United States Patent Application Publication US 2005/0228172 A9 - sequence listing, part 80

SEQ ID NO: 356579 - DNA, 595 bp, Homo sapiens
acccaatggctgtagggcatgagcaccattggaatggatgcccccgctatgccagggttaaccttttagttgctagatcatggggaggtctggggagaaggaaagagatggttggggtggggagtagagcattgtgttgttaggggagtggctgttttccagctaatatggaagtattgctatgttttatacaagtgtgtgccagttgaatatcagctctgaatataagagcacctaccacatgtgggtgtcctgcatattaagtgatataacatataaggcctgtatattgtcaagttctaactgattactaacatgatcacaaggacttaaaacaggaagttttacattagtcatgctgttacacactttgtactcttgtttatttcttaaattcagtgttcataaaccatcagcaaatacacagtgagtctattacaaatggggaactgtccwggccaggggttgacctctctgttgagggtgggttgtcttggaacccttctttccattctctttcctattgccctggctgatgtggggaatgaggttgacattcccatggtgaacttgtattccatttggtgagatattt

SEQ ID NO: 356580 - DNA, 558 bp, Homo sapiens
tcctcctttttttctttttcttttctttttttctctttctttctttctttcttttcttttctttctttcttctctttcttcctttctttctytctctctctctctctttctttctttcttgctttttctttcttctttctttcttttttctttttttttgagactaggtctttctctgtcacccaggctggagtgcagtagtgtgatcatggctccctgcagccacgacatgctgggcttaagggctcctctcacctcagcctctcaagtagctgggactacaggcatgtactgctatgccaggctataaaaaaattttttttgtagagacagggtctccctatgttgcccaggctggttttgaattcctgggctcaagtgatcctcctgcctcagcctcccaaagtgctgggattctcttttgtttttctacacaggttgagtatcccttatctgaaaacccaaaatctgaaaggcttcaatgagcatgtcagcactcaaaaagttttggattttagagcatttcagatttcagatctttggactggggatgctcaa

SEQ ID NO: 356581 - DNA, 558 bp, Homo sapiens
tcctcctttttttctttttcttttctttttttctctttctttctttctttcttttcttttctttctttcttctctttcttcctttctttctctctctctctctctctttctttctttcttgctttttctttcttctttctttcttttttctttttttttgagactaggtctttctctgtcacccaggctggagtgcagtagtgtgatcatggctccctgcagccaygacatgctgggcttaagggctcctctcacctcagcctctcaagtagctgggactacaggcatgtactgctatgccaggctataaaaaaattttttttgtagagacagggtctccctatgttgcccaggctggttttgaattcctgggctcaagtgatcctcctgcctcagcctcccaaagtgctgggattctcttttgtttttctacacaggttgagtatcccttatctgaaaacccaaaatctgaaaggcttcaatgagcatgtcagcactcaaaaagttttggattttagagcatttcagatttcagatctttggactggggatgctcaa

SEQ ID NO: 356582 - DNA, 629 bp, Homo sapiens
tggactgtttccttttatgttcttttaaattttctgagctgtaaaaaataaagtggcaaaagtctcatttttattttgatgtcttatgaggtccccaagtcaccataaggaatgtgaatggcataatggggtgaaactcttgcaattctaaaatgattactcatctttatattattttgcttctyaattgcatgtgtggatattttatgtgattctaatgtttgtgaatctgcaaagagaattataaagaaaactattagtttgaacttgtaaacatcatagtattatctggcatgaattgcagcttcagagcacagttaaaggtcctggacatggataatcctataaaatctaaatgaagtaagatgttagcaatgattcatttttatacaactttcaaaaagagcagaatgctgaagtatcagctggcttatttaaacctgtaccaccttctgcatgtagaatgatgaagaaaagtagcccaaactgagtaacgagcacaattcacaattcttgaacatagccctgcttttgaaagcatgttttggctcatcctgctttttcattgtgcattttgatatttcccttttgaagaaaaaaagttgtttttctaacagcttattttacat

SEQ ID NO: 356583 - DNA, 629 bp, Homo sapiens
tggactgtttccttttatgttcttttaaattttctgagctgtaaaaaataaagtggcaaaagtctcatttttattttgatgtcttatgaggtccccaagtcaccataaggaatgtgaatggcataatggggtgaaactcttgcaattctaaaatgattactcatctttatattattttgcttcttaattgcatgtgtggrtattttatgtgattctaatgtttgtgaatctgcaaagagaattataaagaaaactattagtttgaacttgtaaacatcatagtattatctggcatgaattgcagcttcagagcacagttaaaggtcctggacatggataatcctataaaatctaaatgaagtaagatgttagcaatgattcatttttatacaactttcaaaaagagcagaatgctgaagtatcagctggcttatttaaacctgtaccaccttctgcatgtagaatgatgaagaaaagtagcccaaactgagtaacgagcacaattcacaattcttgaacatagccctgcttttgaaagcatgttttggctcatcctgctttttcattgtgcattttgatatttcccttttgaagaaaaaaagttgtttttctaacagcttattttacat

SEQ ID NO: 356584 - DNA, 508 bp, Homo sapiens
cccgccaggaatttccttgtgggcaaaatatgagaaaggtatacagctacctatgtaggaaygaaatgggaaggaggtttgcaggacccagtgcccatcttcactgtttcctttggcttactgagtttgaggtcctgagattttaattttattttcctttcacacctcaaccacttatcatttctttctttctttctttcttttttttttttttttttttttttttgagatggagtcttgctgtgtcacccaggctggaatgcagtggtgcaatcttggctcacagcaacctccacctcctgggttcaagcgattctcctgcctcagcctcccaagcagctgggattacagatgcatgccaccatgcctggctaatttttgtatttttattggagatgaggtttcatcatgttggccaagctggtctcagactggctggtcttgaattcctgacctcatgatccaccttccttggcctcccaaagtgctgggattgtaggcatgagcc

SEQ ID NO: 356585 - DNA, 508 bp, Homo sapiens
cccgccaggaatttccttgtgggcaaaatatgagaaaggtatacagctacctatgtaggaatgaaatgggaaggaggtttgcaggacccagtgcccatcttcactgtttcctttggcttactgagtttgaggtcctgagattttaattttattttcctttcacacctcaaccacttatcatttctttctttctttctttcttttttttttttttttttttttttttgagatggagtcttgctgtgtcacccaggctggartgcagtggtgcaatcttggctcacagcaacctccacctcctgggttcaagcgattctcctgcctcagcctcccaagcagctgggattacagatgcatgccaccatgcctggctaatttttgtatttttattggagatgaggtttcatcatgttggccaagctggtctcagactggctggtcttgaattcctgacctcatgatccaccttccttggcctcccaaagtgctgggattgtaggcatgagcc

SEQ ID NO: 356586 - DNA, 501 bp, Homo sapiens
aattttttattttttgtatttttttcaacatgttgcccaraatggtctcaaactcctgacctcaagggatccacccaccttggcctcccaagtgctgggattacaggtgaaagccaccatgtctggcttctgtttgtgtttctgtggcttctatacacagcatgtgactgaggttagactctgtcagctcagcttgcatccaaaaaggaagcagccaagcgtgctctgaaagaggaaggaattttaaaaaatgccctagtgataactttcccaatttcatagaccaactgcaacacactcatgacttttctcaccctgaggtggcttccaaaggaattcataggaattcccatgatttatgaagggaccagttgttttctggcaacctggattaatgtgcttctaagacataggatcttccctttggtttctaataaatttattaactagattatgagttacttaatggtgaagcctttcttcgacgcagtaggtactcag

SEQ ID NO: 356587 - DNA, 501 bp, Homo sapiens
aattttttattttttgtatttttttcaacatgttgcccaaaatggtctcaaactcctgacctcaagkgatccacccaccttggcctcccaagtgctgggattacaggtgaaagccaccatgtctggcttctgtttgtgtttctgtggcttctatacacagcatgtgactgaggttagactctgtcagctcagcttgcatccaaaaaggaagcagccaagcgtgctctgaaagaggaaggaattttaaaaaatgccctagtgataactttcccaatttcatagaccaactgcaacacactcatgacttttctcaccctgaggtggcttccaaaggaattcataggaattcccatgatttatgaagggaccagttgttttctggcaacctggattaatgtgcttctaagacataggatcttccctttggtttctaataaatttattaactagattatgagttacttaatggtgaagcctttcttcgacgcagtaggtactcag

SEQ ID NO: 356588 - DNA, 419 bp, Homo sapiens
aatgcattgttcctgctaacagttgaaaacagtggctagcaaaatagagacacagcattgcaaaatgttggagctgcagtgtaccttagaaattagctcatacaggccaggtgcggtggctcacacctrtaatcccagaactttgggaggccgaggtagatggatcacgaggtcagttcaagaccagcctggccaatggggaaacctcatctctactaaaaatagaaaaattagctggggatggtggtgcttgcctgtaatcccagctacttgggaggctgaggctggagaattgcttgaacccgggatgcggaggttgcagtgagccaagatcgtgccactggactccagcctgggtgacacagtgaggctctgtctcaaaaaaaaaaaaaaaaaaaaaaaaaaaatctgtagaaaga

SEQ ID NO: 356589 - DNA, 543 bp, Homo sapiens
ttagatttagcctttatcaccctaatattataaatgtaatttcctacatttctcacattattttttcatgtttacctctaatacatctgagatgtgtgcataarcagataggcatgcaaagaaaagtgaggtaaggctttgttatttcaatgagccacaagtggccccgtatagtggacctgccgtgtgtttttcccttcttcgcagtaggctggaatccattagtccagaagcccaccagtgccaagctcaaatttttaacacattcaattgttttaaacataaccccattaagcacatttttagccatttagagctgcttgttttgcatatcacacgaaactgcaccaaacatctgttagacatggataagataaactccagggctatgagagatcccaagccactatgacccttcagaattctctgacccagagcgtccccaccttcatgtatttagttaagccccctctctggtcctggaagggtcttctccaggcgtcccctttccttcctttctgttttggacagtgattcctgcag

SEQ ID NO: 356590 - DNA, 523 bp, Homo sapiens
tagggacattggttaaataatggttaatgtcaaatgacaacattttgacccgtaacttgcttttatttggaaaagtcggtgagtggagggttgaaagttgttgccaggctctgagtatcagttcataggtaggtaaaggcatttccatgtggaatgagctgtggtacggtggtctgggctccrctttcacttctgtcacatcttctctaagccccagtttcatctgtaagatgataattagcatcaatctggatacaactcagtgtacctttgggagtaaagtgcaactctaatgtgtaaacacttagaaaatggtaaagctgatttacataaaagtagagatatatatattctcctgtgtgtcttttaacagtattttagaaagaatatattggcctgttaaactcctaataaaaatatgttaggagagagtatgaacaaaaactgtaaagaatataaggtaggcaacatagaacaaagcattgattataattatttttattttaattaattaatttatttt

SEQ ID NO: 356591 - DNA, 523 bp, Homo sapiens
tagggacattggttaaataatggttaatgtcaaatgacaacattttgacccgtaacttgcttttatttggaaaagtcggtgagtggagggttgaaagttgttgccaggctctgagtatcagttcataggtaggtaaaggcatttccatgtggaatgagctgtggtacggtggtctgggctccgctttcacttctgtcacatcttctctaagccccagtttcatctgtaagatgataattagcatcaatctggatacaactcagtgtacctttgggagtaaagtgcaactctaatgtgtaaacacttagaaaatggtaaagctgatttacataaaagtagagawatatatattctcctgtgtgtcttttaacagtattttagaaagaatatattggcctgttaaactcctaataaaaatatgttaggagagagtatgaacaaaaactgtaaagaatataaggtaggcaacatagaacaaagcattgattataattatttttattttaattaattaatttatttt

SEQ ID NO: 356592 - DNA, 588 bp, Homo sapiens
atcataacctgaggcatatttggagttcaatgaattgatckttttttgtttcactgtgattatagtaaagtcagcataaaaacattgcttttttcatctgcagactctggattaataggaccatagagcagcaaattgctaggtgcactgtggcagtttcaataataataataacagaaaagttagagtaattgacacaattctcagtggccttcatttttttcgtcttgcctgctcttaagtagaaattcagctaaatatattccactgatagagttcatgaaagaaaataaaggtgatatttttaccctaggattctgccatttgtctgaaagctttagaatcattctacacagatgccaattttccatcaagttctgttactccacagccctgttaaaaattctcagccctgttaagaattcagctctgttaagttgcctgggccgggagtggtggctcacgcctgtaatgtcagcactttgggaggctgaggcgggtgaatcatctgaggtcaggagtttgaggacagcctggccaacatggtggaacctgatccctactaaaaatacaaaaattagccaggca

SEQ ID NO: 356593 - DNA, 588 bp, Homo sapiens
atcataacctgaggcatatttggagttcaatgaattgatcgttttttgtttcactgtgattatagtaaagtcagcataaaaacattgcttttttcatctgcagactctggattaataggaccatagagcagcaaattgctaggtgcactgtggcagtttcaataataataataacagaaaagttagagtaattgacacaattctcagtggccttcatttttttcrtcttgcctgctcttaagtagaaattcagctaaatatattccactgatagagttcatgaaagaaaataaaggtgatatttttaccctaggattctgccatttgtctgaaagctttagaatcattctacacagatgccaattttccatcaagttctgttactccacagccctgttaaaaattctcagccctgttaagaattcagctctgttaagttgcctgggccgggagtggtggctcacgcctgtaatgtcagcactttgggaggctgaggcgggtgaatcatctgaggtcaggagtttgaggacagcctggccaacatggtggaacctgatccctactaaaaatacaaaaattagccaggca

SEQ ID NO: 356594 - DNA, 588 bp, Homo sapiens
atcataacctgaggcatatttggagttcaatgaattgatcgttttttgtttcactgtgattatagtaaagtcagcataaaaacattgcttttttcatctgcagactctggattaataggaccatagagcagcaaattgctaggtgcactgtggcagtttcaataataataataacagaaaagttagagtaattgacacaattctcagtggccttcatttttttcgtcttgcctgctcttaagtagaaattcagctaaatatattccactgatakagttcatgaaagaaaataaaggtgatatttttaccctaggattctgccatttgtctgaaagctttagaatcattctacacagatgccaattttccatcaagttctgttactccacagccctgttaaaaattctcagccctgttaagaattcagctctgttaagttgcctgggccgggagtggtggctcacgcctgtaatgtcagcactttgggaggctgaggcgggtgaatcatctgaggtcaggagtttgaggacagcctggccaacatggtggaacctgatccctactaaaaatacaaaaattagccaggca

SEQ ID NO: 356595 - DNA, 588 bp, Homo sapiens
atcataacctgaggcatatttggagttcaatgaattgatcgttttttgtttcactgtgattatagtaaagtcagcataaaaacattgcttttttcatctgcagactctggattaataggaccatagagcagcaaattgctaggtgcactgtggcagtttcaataataataataacagaaaagttagagtaattgacacaattctcagtggccttcatttttttcgtcttgcctgctcttaagtagaaattcagctaaatatattccactgatagagttcatgaaagaaaataaaggtgatatttttaccctaggattctgccatttgtctgaaagctttagaatcattctacacagaygccaattttccatcaagttctgttactccacagccctgttaaaaattctcagccctgttaagaattcagctctgttaagttgcctgggccgggagtggtggctcacgcctgtaatgtcagcactttgggaggctgaggcgggtgaatcatctgaggtcaggagtttgaggacagcctggccaacatggtggaacctgatccctactaaaaatacaaaaattagccaggca

SEQ ID NO: 356596 - DNA, 568 bp, Homo sapiens
acttatgtattccaggagattcctcttttgcttctgcatttgaagtcagttctcttaagaaatatgcttgtgtgcaagcttatatttataaatttgaggaacttacaatgaaatgtgtttaattctcatttcattcattttcctttcgttcctgtcttccaaccattttcctttgaatgcttaaatgatggttaactatgaagaagaccaaaatagacaaagtaattgccacttgttcctttgttctcagtggcttgctgtgctataagtgtatttaatctggaccaatctggggaggtaaaacctaatttaatagctatcaatcacaggcagcaggcctgcataaggagaaaataaaaaggtggttctattactcagtcttctcttaggraaaacaaagtgaaacactagacatgccacatctttacaagatgcctcctaatccctctaccaagttacacataatttgaaactctttgtgtattccattttcacttatgtgccactacccttatattaaaaagtatgtgactgacaggttagctaaaatatttataggaattaaata

SEQ ID NO: 356597 - DNA, 591 bp, Homo sapiens
aattttttgaggaactgtcagatatttttccaaagtaaatgcatcattttacattcctgccaacagtgcatgaaggttctaatttctccatatacttgccaacatttgttattatcattgttttttattatagccatcctagtgtgtgtgaagtggtatgtcaatgtggtttttattttcattttcttgacagcagatcatgttgagcatcttttcatgtgcttattggcatttttatatcttccttggataaacctctaytgaaatcctttgcccttttcaaattgggttgatataaaatactattaagtaatttctatacttagtcagtacttaaagagtacctactatgttccaaatactttataattataatcactaacatgtaaaaagtaatccttcaaaatagtattgtaatttccatttagtttatgttgggacactcaagatcagcataaaaaggaaaaacttactaagctaacagaggcagatacaggattaggactaatgttcagctaacatggaaacccaaaaagctcagtaattttttgatgctaggtggccacctgagcacactgaagtaaatgaact

SEQ ID NO: 356598 - DNA, 591 bp, Homo sapiens
aattttttgaggaactgtcagatatttttccaaagtaaatgcatcattttacattcctgccaacagtgcatgaaggttctaatttctccatatacttgccaacatttgttattatcattgttttttattatagccatcctagtgtgtgtgaagtggtatgtcaatgtggtttttattttcattttcttgacagcagatcatgttgagcatcttttcatgtgcttattggcatttttatatcttccttggataaacctctattgaaatcctttgcccttttcaaattgggttgatataaaatactattaagtaatttctatacttagtcartacttaaagagtacctactatgttccaaatactttataattataatcactaacatgtaaaaagtaatccttcaaaatagtattgtaatttccatttagtttatgttgggacactcaagatcagcataaaaaggaaaaacttactaagctaacagaggcagatacaggattaggactaatgttcagctaacatggaaacccaaaaagctcagtaattttttgatgctaggtggccacctgagcacactgaagtaaatgaact

SEQ ID NO: 356599 - DNA, 455 bp, Homo sapiens
atttctatacttagtcagtacttaaagagtacctactatgttccaaatactttataattataatcactaacatgtaaaaagtaatccttcaaaatagtattgtaatttccatttagtttatgttgggacactcaagatcagcataaaaaggaaaaacttactaagctaacagagkcagatacaggattaggactaatgttcagctaacatggaaacccaaaaagctcagtaattttttgatgctaggtggccacctgagcacactgaagtaaatgaactcatcctctcttctgataccttctgtgatcctccaaattttatcaggaacgtgccctaaatgcacatctttgatgctcccctaacgtggagaataaaattcacactcctcagcatgccactgagacctacccatacttgatatgctccaccatcccagcctcacttgacgccattcc

SEQ ID NO: 356600 - DNA, 461 bp, Homo sapiens
ataatagtggacatagtccggtccctgacactaggaagctgaaagtctagccagagtctgtttccactgctatcctgtaaactgtctgagcccagggatagtatcaytaacttttatcacctcaccagcaagcacattccctggtaaaatctagattacaaaaaaggtatttctgatattttactgagactaccaacactcatacatcttgcaggagatagactcttctgctaatgacaataaatggaagggaactctggcaataaactgctgagaactgcacagcagcacttcccagctatctgccatatgagaattagaacaaaacaatgcaacccaaatgggaaggtggaagtgcacaatgaatacacaaagctataaactaagtgataatttttgtcttgattgtgtgagctaactattaagaagattataattaagagttcatttcttatagtacc

SEQ ID NO: 356601 - DNA, 461 bp, Homo sapiens
ataatagtggacatagtccggtccctgacactaggaagctgaaagtctagccagagtctgtttccactgctatcctgtaaactgtctgagcccagggatagtatcattaacttttatcacctcaccagcaagcacattccctggtaaaatctagattacaaaaaaggtatttctgatattttactgagactaccaacactcatacatcttgcaggagatagactcttctgctaatgacaataaatggaagggaactctggcaataaactgctgagaactgcacagcagcacttcccagctatctgccatatgagawttagaacaaaacaatgcaacccaaatgggaaggtggaagtgcacaatgaatacacaaagctataaactaagtgataatttttgtcttgattgtgtgagctaactattaagaagattataattaagagttcatttcttatagtacc

SEQ ID NO: 356602 - DNA, 603 bp, Homo sapiens
tgctttggcattcttttattacatttccatttattgaacattgactgggctcacaaagcactgggctcacaagcactgggctcacaaagactaagccacaatccttatatttaataattaaataacatttaattatttgataatctttatattgaatatagaaaacttaacacgtgtggggacccactcagaaccccagagttggtatgaagattatttgatgctgaagaaatttgaaattcgacaaatgcasaaagaaatcttcttaaaacttctctcatctgagcagaagcagaaatttgtgagaaataaggcttccataaatccctttagggcaggtctactcccagaagagaaaccaagggtaaactaccacagattccctcttgggagagtttctaggccaagaaagagtggaaaaggccactcctacctccatacacaaacattattatcatacatcttttaatcttctgtctgttttcctaaaaatctatttgtctttcctaaataaaccatctgttcttcctatagaagccttttctcccccacccctttcctttagtaacttaggtatataggcctctaaccttagtcacctag

SEQ ID NO: 356603 - DNA, 576 bp, Homo sapiens
tgattaaaattcataaaaatgacatgttattctaagatgactgggtacagaaaatctcgtcagctcttacttaagcaattttccaaaaactggaaggaaacacagtcacacacaccgtggggtcacttcctgcagagatgacttggggacatagctgaatgaggctgaaaagtcagacctcacaagttcattataggtttagctgaggctggggcctgtcggactcttttttgtttgtttgttttttggtcaaggttaagtctgggtaagtctattcaggtatgttttcccagaatttaagctaaaatgatgaaaactgcctttgaacttgaaggttttgcggtaagtgcacaaattaaaagacatytgaaggtaggaagaggagacgttgcctttcttcttaatttgaatgttcagaaaaaccagtaattagattcattacgttaaaattgaacttaattcctttaatctgaaaatttcaaagggctttcaaaagctcacaaattgctgttaatcccaatggcacaaagatgacctatgtcattttaatggtatggtatggttgaaataaaaaca

SEQ ID NO: 356604 - DNA, 570 bp, Homo sapiens
ataaacaatttttgaatgaacactgaatcacctcatattttctaactgggycacatagtttgatttatttttgtcactttccttactgcttcctgtgtctttaatacacctcaatatctatctacttaaaaatgggtggtaatcttttaaaatgtagcttagaggcagtcttcttagtttttccacattaaaaataacttgggttggccgggtgcagtggctcaagcctgtaatcccagcacttcgggaggccgaggtgggaggatcacgaggtcaggaggtcgagaccatcctggctaacacggtgaaaccccgtctctaataaaaatacaaaaaattagccaggcatggtggcaggtgcctgtagtcccagctactcgggaggctgaggcaggagaatggtgtgaacccgggaggcagagacagagcttgcagtgagcagagatggtgccactgaactccagcctgggtgactgagcaagactccgtctaaaaaaaaaaaaaaaaaaaaaattatttgggttaaggtctcggcccttccctttcttaaatgcatgactccaaacaaca

SEQ ID NO: 356605 - DNA, 570 bp, Homo sapiens
ataaacaatttttgaatgaacactgaatcacctcatattttctaactgggccacatagtttgatttatttttgtcactttccttactgcttcctgtgtctttaatacacctcaatatctatctacttaaaaatgggtggtaatcttttaaaatgtagcttagaggcagtcttcttagtttttccacattaaraataacttgggttggccgggtgcagtggctcaagcctgtaatcccagcacttcgggaggccgaggtgggaggatcacgaggtcaggaggtcgagaccatcctggctaacacggtgaaaccccgtctctaataaaaatacaaaaaattagccaggcatggtggcaggtgcctgtagtcccagctactcgggaggctgaggcaggagaatggtgtgaacccgggaggcagagacagagcttgcagtgagcagagatggtgccactgaactccagcctgggtgactgagcaagactccgtctaaaaaaaaaaaaaaaaaaaaaattatttgggttaaggtctcggcccttccctttcttaaatgcatgactccaaacaaca

SEQ ID NO: 356606 - DNA, 557 bp, Homo sapiens
actaacaaaacaaaatcttggcaaaacagccaataatgcataaccaataatgatatgtgggctgagtgccatggctcatgcctgtaatcccagcactttgggatgccagggcaggaggatcacttgaggccaggagttcgagagcagcctgggcaaaaaagagaggccctatgtctccaaaaaataaaataaaataaaaaattaagcatggtgatacatgtctgtagtcctagctactggggaggctgaggtgagtggatcacttgagtcccggagttcaagactgtagtaagctattatcatgccactgcactccaacttgggcagcagagtgagactctgtctcaaaamaaaaaagtatatgtatatctgctcaaggaaattcttgaggaatgagttagtaaaatgacttgtatcaatagatattctttatttactgatatttacaattcagtcctttttgttaatatggccaactccatggatttccactataaaacaaaccttctctcagatactcacgtttaacatcacaattagttggatacagtagagaa

SEQ ID NO: 356607 - DNA, 557 bp, Homo sapiens
actaacaaaacaaaatcttggcaaaacagccaataatgcataaccaataatgatatgtgggctgagtgccatggctcatgcctgtaatcccagcactttgggatgccagggcaggaggatcacttgaggccaggagttcgagagcagcctgggcaaaaaagagaggccctatgtctccaaaaaataaaataaaataaaaaattaagcatggtgatacatgtctgtagtcctagctactggggaggctgaggtgagtggatcacttgagtcccggagttcaagactgtagtaagctattatcatgccactgcactccaacttgggcagcagagtgagactctgtctcaaaacaaaaaagtatatgtatatctgctcaaggaaattcttgaggaatgagttagtaaaatgacttgtatcaatagatattctttatttactgatatttacaattcagtcctttttgttaayatggccaactccatggatttccactataaaacaaaccttctctcagatactcacgtttaacatcacaattagttggatacagtagagaa

SEQ ID NO: 356608 - DNA, 557 bp, Homo sapiens
actaacaaaacaaaatcttggcaaaacagccaataatgcataaccaataatgatatgtgggctgagtgccatggctcatgcctgtaatcccagcactttgggatgccagggcaggaggatcacttgaggccaggagttcgagagcagcctgggcaaaaaagagaggccctatgtctccaaaaaataaaataaaataaaaaattaagcatggtgatacatgtctgtagtcctagctactggggaggctgaggtgagtggatcacttgagtcccggagttcaagactgtagtaagctattatcatgccactgcactccaacttgggcagcagagtgagactctgtctcaaaacaaaaaagtatatgtatatctgctcaaggaaattcttgaggaatgagttagtaaaatgacttgtatcaatagatattctttatttactgatatttacaattcagtcctttttgttaatatggccaactccatggatttccactataaaacaaaccttctctcagatactcacgtttaamatcacaattagttggatacagtagagaa

SEQ ID NO: 356609 - DNA, 461 bp, Homo sapiens
tataatacatcctattttttwaaaaaaacaaaagacttccatgggtcccctcatccctgtgtagactgagatgtcctatgttctttataattaagttcttttgctctggcatcccttcttaggcattcctgagcccacaagcccattccagtgagactgtggtctacaccactctattgtcatgatcaccaaagacttttactagcacttatcttattgaactgatcagcagcatttgggagttggtaactgtttcttccttgaaatgtcttcttcccctggatacagtaagatactcttgacaaagctttctgtctccagggtgtttcttctcagtctccattatttattaagtataagcttaaataactttacatcctggaaggccccaagggctgtccttaaatctctgttattgtccatatccacacccattgaaattatattggctatatttgaaa

SEQ ID NO: 356610 - DNA, 461 bp, Homo sapiens
tataatacatcctattttttaaaaaaaacaaaagacttccatgggtcccctcatccctgtgtagactgagatgtcctatgttctttataattaagttcttttgctctggcatcccttcttaggcattcctgagcccacaagcccattccagtgagactgtggtctacaccactctattgtcatgatcaccaaagacttttactagcacttatcttattgaactgatcagcagcatttgggakttggtaactgtttcttccttgaaatgtcttcttcccctggatacagtaagatactcttgacaaagctttctgtctccagggtgtttcttctcagtctccattatttattaagtataagcttaaataactttacatcctggaaggccccaagggctgtccttaaatctctgttattgtccatatccacacccattgaaattatattggctatatttgaaa

SEQ ID NO: 356611 - DNA, 601 bp, Homo sapiens
aactgctctttcaacgttgctactttattgtttttagttagctgtcatttagataaccacaagaggaatgaaaagaatccaaatccttggatgaacaacggtacaaaacatatttagtccactctgttgggtctatggatctgtacgacctgaaggtaggagaaggatttaggagagcttggtttactaataagcctaaaatagcacctcctacacaagaaaacaggttaaaattatgatcaaacactagtcaggtttcctttcayaaaataggtgtaggtcctttcaacaaaagagctttgtaaattacagcagatgacaaagaccttgagaaaagtgaaggtattagccttgtgttgtcactctttctaacgtgaggctgtcagaccttctaaaaaaccagaaaaatgttaactgtaagatggtccctgaccctttggagacaatgcggtttccctgatgtaaccttacaaatgaaccatttgggtaatttgcatgagctgatattgtttctaagtggtatttatgctttcaaaaatgacagtaacatgatgtctttagtaacatttcccaaggagtgaacatgttcagttcagcagag

SEQ ID NO: 356612 - DNA, 548 bp, Homo sapiens
attcatattggttcaccttctgagccaggaatttaatagtgtgcgttgtttttcttttcagaaatggaaaagtttttaaggtataattttaattcttgttccctttaacaagttaattttgatgacatatcatttgtttgttgtctcaccaagtttcatgaagagagactgaagacattctcagaatagtaaccaagtgtattttaggagaccttggtaaagaagttaatactgcaattaagcacacctgaaatctggtgtaaamtataattaaacgttgcttagaaacttttcttattgaaccaaatgaaaatatgcctcttgtttaaaatgtcaaactgatcattgttccttatttttttcttggttatagaatgacatttccatgaacactcatttctggtttagctatacacaataaacacaatagctattaccaattatttagtccctactgagcagttcatcaaggatttgtgaaggcaatggcatcaattgatattccttcctttccttctcctgcctgctctgtttaaagataacatgtt

SEQ ID NO: 356613 - DNA, 514 bp, Homo sapiens
ggtatgggagcccacagtcctaaccattgtactatatactcttcatctttggattcttattttcagctaggcccagaaccctttgtagagccttagagtcttgtgtggagcattctctgttaacatttatcccacctcctgctggtggttctgtcttgactcctacttaaatcacccagcatttgctctcatagtctggtaaatagagtttggccatgaacaccctttaaccagaacaatattggtcacctctctcactccaattttaagcaacacwttcatctaaatctatgcctccaaaactctgaatgccattaccctttgggctagatgtgcctttgtggcagtactatcctctacccagttgcttctagtactgtctgtcaaccctgaaagtctgtattgacaaagccccaggaaaccctgttccataaagtgtagaagataaataaatggagatcaataagggaggcaatctgcagaaaagagacaaagcgcccctcttaatgacacg

SEQ ID NO: 356614 - DNA, 564 bp, Homo sapiens
atccaaacaagacaggataattcagagtggtagcctggaagtggtgagaagtagttggattttgaatatattttgaaggtagagctaacagtattcaaaatwgtgaaagattcatacaaggagatactattcagcaggttaaagcaattaactaggttaatatgaaataacagaaatctcaaaattaatgtagaacaccaaaaataagatgtaacataataatacactagagtagaatttatgtaaattaagaaaaaaatctcacagtatgatatattgctcatgcatagataatatgtgtctatttcaaaaatggattgtaaggataatgcataatgaattaacgattgtttttaacctgttggacagaataggaagaaggagggacttggtctgaagaagaaaagaatatatgatttcaaccctgtgtttttttaatttgaaagattgttaataaatatgtagatagctacgtagtatgtataaaggtgtcttgctctatttcctttctatattttaatttaaacaaaaatagaaaagtatatagagatttataaaagacta

SEQ ID NO: 356615 - DNA, 564 bp, Homo sapiens
atccaaacaagacaggataattcagagtggtagcctggaagtggtgagaagtagttggattttgaatatattttgaaggtagagctaacagtattcaaaatagtgaaagattcatacaaggagatactattcagcaggttaaagcaattaactaggttaatatgaaataacagaaatctcaaaattaatgtagaacaccaaaaataagatgtaacataataatacactagagtagaatttatgtaaattaagaaaaaaatctcacagtatgatatattgctcatgcatagataatatgtgtctatttcaaaaatggattgtaaggataatgcataatgaattaacgattgtttttaacstgttggacagaataggaagaaggagggacttggtctgaagaagaaaagaatatatgatttcaaccctgtgtttttttaatttgaaagattgttaataaatatgtagatagctacgtagtatgtataaaggtgtcttgctctatttcctttctatattttaatttaaacaaaaatagaaaagtatatagagatttataaaagacta

SEQ ID NO: 356616 - DNA, 594 bp, Homo sapiens
gataggaaatcacctgccgacttttggaatgatccttggatttcagcttctagaatttagagccaacttataagccttctttacttcatcccaccctctaaaaatagagagcagatttccatcactgacactatgagataatattgtgcagcaaaaaagaagaaaatgaatctattggcgcatttttattaaaggaatttattatggctttaggtaccaatacatattgaaaaaagtatattaaaagatagtgctaacattttgttaaagaggcagtgaaatatatgaaagcttgaaatctcaagattttcaaaagcaaatataagctgaaagagctcaatgtgagtattccactaggtttaatctaaacgaattgcctgataacttgatgattgactgagagactggcttctaaatcagcaggctattaagtgtaacctagatagcaatgcgggagcaaatttaaagtgtgggaaatacctggagtgaagtgaatgaacaagttagtctaaccaggatattgatgaaaytggtttagtgcaaatggcatcctaaatagcaagtacccgccaccaccaccactacgcacaaata

SEQ ID NO: 356617 - DNA, 432 bp, Homo sapiens
cgccaccaccaccactacgcacaaataccaatcttccagtgaaacaccacctgatcaacctcgagtgctgctgacaaattcagcaaccaaagcgaatgtcaggaatatgagctactagagttgagaagtttggtttacagaaatcaactcatttctctatctcactctggttaggaccagaggaactataatatgttgtaaggggaatgaaaaagtactgtgcttttctcactttctgaatcttcattttcatggggctttatcacttcctattatgtgtgcataatattctcacacattgcctgacaagcttggaygcaaacaaccagcaatgaggcagaatgatgtaccaatattaagcctaatgtggtgcctataccatttgagttttgagttatttctcccacagcagatcccctatacaaaaagaat

SEQ ID NO: 356618 - DNA, 594 bp, Homo sapiens
ttatattatccctagcagggttaccatggaagctctagctcttcatagcactttgcttctcctgtccgagtagtatgctctacatatctttaattagaatggatgcaatttatttagtaatggaaagcttacttaagcgagttctgtgaaggtgtcagacagaattcaaccagccctgcatattcagagaagacaaatgtaaaaatgcaaatgatttttctaatttaattccttactgaaaataaagaaaaaaggaaaaaaaatgccttcctatctggaaataagcttcgtttgatcgtaaagaaattatgtttgatattccatctttactcagacacaaaacaagcagtagttcttaaaataacctcttctgctatggatataataatctgtcatatgcatttattaactgattctctrgcactgctgtggcatttaacattgcttatcatggttttgtattgggtgcaatccgcaagtctaaacaggaccaattactgagtcccctgtgtgcctggtcttgggatatgaagacccgttattctcaagtcatgaacaaatgagttgtggagaccagcaaaaaggcaaacgtaa

SEQ ID NO: 356619 - DNA, 516 bp, Homo sapiens
tcactggggccagaccctgtgcaaagtttacctactctgagcctcagggtcctctccatgaagatggtgacaaccacccccacatggggaagcaaaacaagactcaatgtataataaaggtgctggcacccacagactgttcaccagcctttactactttacacggtaagtgctggttaagtatttgctgaactgacaaatagtaatataaccaagaaacaattgctgcccaatcccatgaacactcagttaaaagtttggagccaagatacttcaactgcttaaaaactacacaacttcaaaaccagctcattaaaaaagaaagcaggagtgggaggaaaccctcagtcctcggcctgaacgcttggtggctgtcgcttcaaggcatgctgcatgagaygcataagcaaacgaatttcagatcatcagaaagatcttcctcattttcttctggccctgacccaccttccgactttctccttgacactaacttccttgtcaaagcctcgcgtccat

SEQ ID NO: 356620 - DNA, 595 bp, Homo sapiens
tgtagttctgtaatcccagaatctttttggtttgtttttgttttgagatggagtctsactctgtagcccaggctggaatgcagtggagcaatctccactcactgcaacctccgcctccccggtcctggttcaagcaattctcctacctcagactccagagtagctgggattacaggcacgcatcaccatgcccagctaatttttgtattttggtagagaccaggtttcaccatgttggccaggctggtcttgaactcctgacctcaagatctgcctgcctcaggctcccaaagtgctgtgattataggcgtgagccaccatgcccagccctagaatcacttaatagcgccttcatttctctctctgatctgtttgagccattagtgtacctaggggaaagacatagcacattcagggatttacattgaaaattctggttctttatacttgtgctttagggtttgtgcacagaattagaatgaccttctttatcttttacaaagtctctcaaaaaaggaatacatgattgggagtgggataattgcatttgtcacttaaattaaaattctgtttttatgtctgctgatgaacatac

SEQ ID NO: 356621 - DNA, 595 bp, Homo sapiens
tgtagttctgtaatcccagaatctttttggtttgtttttgttttgagatggagtctgactctgtagcccaggctggaatgcagtggagcaatctccactcactgcaacctccgcctmcccggtcctggttcaagcaattctcctacctcagactccagagtagctgggattacaggcacgcatcaccatgcccagctaatttttgtattttggtagagaccaggtttcaccatgttggccaggctggtcttgaactcctgacctcaagatctgcctgcctcaggctcccaaagtgctgtgattataggcgtgagccaccatgcccagccctagaatcacttaatagcgccttcatttctctctctgatctgtttgagccattagtgtacctaggggaaagacatagcacattcagggatttacattgaaaattctggttctttatacttgtgctttagggtttgtgcacagaattagaatgaccttctttatcttttacaaagtctctcaaaaaaggaatacatgattgggagtgggataattgcatttgtcacttaaattaaaattctgtttttatgtctgctgatgaacatac

SEQ ID NO: 356622 - DNA, 639 bp, Homo sapiens
taaagtgtccaatcttatgagtcataggtattgctgagggagaagaagagtaaaaaggttggactatctatttgagggaatgattgaggaaaactaccttagtcttgctaaagatttaaatatccagatacaagaagctcagagaactccagraagatacattgcaagatggatttcaccaagacatatagttactaggcaatctaaagtcaacatgaaggaaaaaaaatactaaaagcagcaagagtaaagtgtttaatcacctctaaaggacatctcatcagatgaagtggatttctcaattgatacctcagaatacagagatcatcaaagactactagaacagctgcatactcacaaacttaaaaacctagagaaaatggatacattcctggaaacatacaaccctataaaccagaagagactgtggccctatgttcagtcttaaagggaaaaaaactatcagacatgcattttgtatactgctaaacaaggcttaatacatgaaggagaaatagtctttttcagccaaacaaatgctaaggaaattcatcactattagactggtcctacaagaaatcctcaaaggagttcaaacatggagataaaagggtgatgcttgccatcagaaaaacacac

SEQ ID NO: 356623 - DNA, 617 bp, Homo sapiens
tgtaggcatctactcattttcagtctgagacttttatttgaataaggatcttgcttttttaagcattagatgcacatagaatatgaatgggaatgggaccatggcagaattcaagccataatgccttatagcctggtttcagataccttagatataagattatttcctcaaatttaaggtgtgctgatttatcaagcacatttatgacatttttataatcacatctataagttttaaataacctttcatgttttaaaggacaaggacaattatatatctccaacttgtctttaattttagttgaaaacagaaccttattaaaattggagcrttatacatgtaaaaccactacagagtgtccttttactcagcacagaatacatcttagatgaagttcacaataaaatattcttacatgaacttttgtcttgttttgaatcataagtgtagaaataaagtcctgaatattttctcatgaaacagataattttaaaataacaataacaaatcaaagtcaaaaaattttctgaatttaaaaatacaaagcatcagtgctttttttttttttttaacagatgtgatactccctgatgaagttttctagggagaaagaaaat

SEQ ID NO: 356624 - DNA, 579 bp, Homo sapiens
aggcattaaaaccagcattgatatcaatgagataaagattgtctcttctgattatttctgaatttagcagaaaatatcacatccaggagaggttgatcatttataaagatcctgaagagacagctttatcatgaatagtctsgataagtataatattaattcattctaattctcagcaaatgtgtttccttgttagaggcaaaataactagacagtgacttttaaaagttctgtggctgttggcagcagtacatcaaagtttcaactcattttgaaattgtggcactaggatattttattaagggcaaagaatgagataatgtattcaaatagtaattgaacatgttgcttcttagcatctgttcacatgatgaaggagttagtgttatcataactcaattatactgtgctgtccctatggtcaacataaataatgttcatcttccatctcatatatgtcttatcaaaataattgttacagtcgcttctgtgtcctggatgtctatgcactgtttctctatgtgaggagtgagaagattctaaaagagtctatcaagatagtgaggtatatactaatat

SEQ ID NO: 356625 - DNA, 555 bp, Homo sapiens
cattcttctaatagttgttttgatgtgtggctttatgaatttgatctttggatgcaaactgtgctacactccattgccttkgagaatttggctctcttgttgcatagttgtcttctgttttaccttagagcatttcagtttcttttgcagggcgtgggtcctgaaatgcctcagcctttccatgctttgagataacttgccagagaaatgaactcattgcttactcaggaaattactgcagtggcactaactggcattagtaattaaggggttgcctttgtggtttgcaagtttttggtgcaagaacatttgcatagttggtgctacattctgacaaatatacacaatattcagaaattccactgggatcattcactgcttccagaacattaattcctctgttgttgtttcactattgtcttaattctggcctttaacattccttgcttgtgcaggatcctaattcgttgctgaacataaagtttccataatcccccaacttccttcctccagcttcctcgtcctttaacatcaccaggatcctcacaatcaaat

SEQ ID NO: 356626 - DNA, 555 bp, Homo sapiens
cattcttctaatagttgttttgatgtgtggctttatgaatttgatctttggatgcaaactgtgctacactccattgcctttgagaatttggctctcttgttgcatagttgtcttctgttttaccttagagcatttcagtttcttttgcagggygtgggtcctgaaatgcctcagcctttccatgctttgagataacttgccagagaaatgaactcattgcttactcaggaaattactgcagtggcactaactggcattagtaattaaggggttgcctttgtggtttgcaagtttttggtgcaagaacatttgcatagttggtgctacattctgacaaatatacacaatattcagaaattccactgggatcattcactgcttccagaacattaattcctctgttgttgtttcactattgtcttaattctggcctttaacattccttgcttgtgcaggatcctaattcgttgctgaacataaagtttccataatcccccaacttccttcctccagcttcctcgtcctttaacatcaccaggatcctcacaatcaaat

SEQ ID NO: 356627 - DNA, 557 bp, Homo sapiens
ttcctctgttgttgtttcactattgtcttaattctggcctttaacattmcttgcttgtgcaggatcctaattcgttgctgaacataaagtttccataatcccccaacttccttcctccagcttcctcgtcctttaacatcaccaggatcctcacaatcaaatcattttcacactggtgctaaagctatctttctgaagtagattaatcatgcttccacaaacactcttatctctttaactaagacactttatgaagtatactccacctaccttttgtgcctcatatgctacagctcgtatatattctatagctgagaatgttaaggatatttcttagactcacattcacacactattttatttcacacacacattgctacatgtctttttctgttatggaattgatagtagcaggaggcagccaaatgcctaggcagatagggacaggtacctagtgaaaccccatctccaagctgaaggcaccttaaagcctgaaagccaagttacgagttaaatccttggaccagattgagaacttgtcctctgggttcggtgca

SEQ ID NO: 356628 - DNA, 557 bp, Homo sapiens
ttcctctgttgttgtttcactattgtcttaattctggcctttaacattccttgcttgtgcaggatcctaattcgttgctgaacataaagtttccataatcccccaacttccttcctccagcttcctcgtcctttaacatmaccaggatcctcacaatcaaatcattttcacactggtgctaaagctatctttctgaagtagattaatcatgcttccacaaacactcttatctctttaactaagacactttatgaagtatactccacctaccttttgtgcctcatatgctacagctcgtatatattctatagctgagaatgttaaggatatttcttagactcacattcacacactattttatttcacacacacattgctacatgtctttttctgttatggaattgatagtagcaggaggcagccaaatgcctaggcagatagggacaggtacctagtgaaaccccatctccaagctgaaggcaccttaaagcctgaaagccaagttacgagttaaatccttggaccagattgagaacttgtcctctgggttcggtgca

SEQ ID NO: 356629 - DNA, 603 bp, Homo sapiens
ttatctttccataaatttcctgtggagttgtagaactgaaattcattcactttgtttccttatgctccacttacaacatttttgtttaatgcctgacttggttagtgttgactcaatacctatgatacaattttttgcattttaaatatgagccctaagcaactaggaggagctgcagctccatggtaaattgtaatctgtattgggagttcaatattaagaaacagtttagaaaaatatgtgacatatagaatttaaggtgcaggcttaattttacctacttctcaagtcttaccaattatatattttattcataacagaaattctgtcattattcttgatgattaacatcttgtaattaaaaacattttgctmtacttttgagatctgcccttatttctgctgcattgatccaaagcaatcatactgaattaatttttgcttgagcagttcactataaatacaatgaaaatcgatcacttcattttgaaaagctagattggatacataaatttcattagtcattagataattatcaattccacatataatttttatagatcctaccagttacataataattttattaaaaatttactataa

SEQ ID NO: 356630 - DNA, 547 bp, Homo sapiens
aaaactcaccttaagtgagattttaatgatgtttggcaccaaatatcatcagtgtttgcactatctrttactctctatcagtaaaactaacatacagggcattaatgctaatagtgttggttttacaattaacagtgaactacacgaagataaatttgtcaggagcgcagaatttacataaggtctggaacaacttttcctggtctgggccagcaaagtgacagaaaaacaaaagagattgatctggtatgccattattttcttttttctgctaaaccaaatttccaataaggttactgctgataatactggttgatatggtttgtctgtgagtccccacccgaatctcatcttgaattgtactcccataattccgtgttgtgggaggtaccagtagagtggggcactgctgaaaagatacccaaaattgtggaagcgactttggaactgactttcaggcagaggttggaacaatttggagagctcaggagaagacagaaaaatgtgggaaagtttggaatcttctagagacttgttgaatggcttt

SEQ ID NO: 356631 - DNA, 646 bp, Homo sapiens
cagataaatgattgctaatcattcgccaacacatcactgtcaaacaccttttacaaaagaacaagattaacttctcatacccaattatcctaattccacagtcctttattaaaaccatggaaatcaagcaagtgatggaaatgtcaataagcccaatttcttcataaattccaggattagatggctttgtctactagaaaacctgctgaaaactcaccttaagtgagattttaatgatgtttggcaccaaatatcatcagtgtttgcactatctattactctctatcagtaaaactaacatacagggcattartgctaatagtgttggttttacaattaacagtgaactacacgaagataaatttgtcaggagcgcagaatttacataaggtctggaacaacttttcctggtctgggccagcaaagtgacagaaaaacaaaagagattgatctggtatgccattattttcttttttctgctaaaccaaatttccaataaggttactgctgataatactggttgatatggtttgtctgtgagtccccacccgaatctcatcttgaattgtactcccataattccgtgttgtgggaggtaccagtagagtggggcactgctgaaaagatacccaaaattgtggaagcg

SEQ ID NO: 356632 - DNA, 513 bp, Homo sapiens
tgacatgattctttttgattaaatttagagaacacaaaatagaactcagaacaataagttcaattttcttctttaaatatcaaataataattttattatgattttacataaacatactatggattaacccttaacccatgaacaaatctcataatttgacttgaaaagcactaccttctatcctagaatatgagttttctttggtaagtaaactatctaaggactgtgttgatttggcaccagctctgacttctcatagtgtagcgtggagtcccagtagaaactgcacctcccaaggcattaccattgacagatcttcaggggcttttaaacacattgaatcagcaatgataattttggagatagatgactcctatttaaatacagtttgaataactttatagcagtaatgaatgcctatgcttatccctgggaaatatgccaggaaaagaagcaggcatcttcagcctgaattcyactggcttcatgctgtaaaaaaaaaaaaaatcagcc

SEQ ID NO: 356633 - DNA, 464 bp, Homo sapiens
gcttacattgtaatgagaacaatgtgttaccacatactactcctctaggacgaattttcatatgtggcatctagctccttcatacaatctgacttcttatcttgaattttaatggactatacaatttacagccaatatttttgttattgccttcattgcttcaagaacacctagaagtgattatggtaaataatattctgactttcctaacaggggtatacttagcagcaaagttattatttaaaacaatttggtagcctattgaatataaataattaaaatatttaaaatatgagcaaatgtatagatgtacaaaagaatataaagagagaaaaaatatttatataaagaaggtgtaatgtcatctaactggatatagaaaaatgctsaagaaatgaactccatcaaatgttatttttaagcttaggatagtgatttggaagaaatgccctatgcagtgtttg

SEQ ID NO: 356634 - DNA, 626 bp, Homo sapiens
ttaagaggttacccaagaaggtaaagcaaaagggacatccttcggatgggcagatcttcagtcccatgatgtggtcataatctttgggtggaaatagcctaagagaagaatatgcatggagttataggtagtggcaaatgacatggctggactggaaggcaaaatataagactatctgggtcagggaaatatgagaaagaagcatrtattggactgataggagtgggcatgaagtgtgaagttctctgcaatgcatgttaatgcagaagaggcattcaatagccataaagaaataactcagccagttaacatctgtccttctctggcatcagccaccacaatggtggtacaacaggcatgaatagagtagctagagtggcaaatatggaggcctgtgcatggacccaatgtatgggctcctctgtcccaagaattagttaggtactgcttccctcagatatccaatcttccaggaacagagaccatagccactacacacttaatggtcagcctttcttgcttctcctgccaatagatgtttggccagaataactactcaagggcttatgtagtgttgatccatcaatatgagagctctcataatatctcactggaccaaggaagcc

SEQ ID NO: 356635 - DNA, 587 bp, Homo sapiens
taggtagaatttattttttccttgagagagaacttagagaaaatggagcagaatggcctcaacttttacaaaaaattgtaaatggstaacagaaatacttagaaatagtcataaacaacttacaacagattgtctacacaaaccccaaaattttttataaggagattgatttaacttattctgatttctatgctcttatagcaatattttcagtggaaaaaatcacatcaaaacacttgcaaactaaaagttgtgcctattgcatatgccagatatctagtttttctctccaaacacaaattgctaaggaatacttcaaagcttcaaacaaaacttaaaaaaaaaataaaaacatgctagaaatatttttttctatagataacttacatggataataaaaggaatgtttcttagaagtaaaggttacaaagtgcttattcgctttagtcctcaacaaagcttttctgaattatattatttattgaaaatagaatttctccatatggccagcagtaaatctatttttttgtttgtttctacttgtttttttttttcccttaaaatatctgcaatatgggcagaagatt

SEQ ID NO: 356636 - DNA, 648 bp, Homo sapiens
acttacatggataataaaaggaatgtttcttagaagtaaaggttacaaagtgcttattcgctttagtcctcaacaaagcttttctgaattatattatttattgaaaatagaatttctccatatggccagcagtaaatctatttttttgtttgtttctacttgtttttttttttcccttaaaatatctgcaatatgggcagaagattcgtgattgggtaagcaccacaatataatattgttactaggatttgtcatctaagggtttcgtttgttttattgttttaaacgtaattgaaggtatcatattttgtggtatttaaaaaatacttcttcatttctttaaaaaataaattaatatagcttgctcccaccgccatgggactgstcatctacagttcagaaaatttagcctatgaggaggatatgagtgagactaagtcaggagccacagagaagcaagaaggccacagtgattgttgccataagcgtgctggctaccatctttctggctttgtttgcagtcttggtggtggtttgagtgcagcgctactgctggccaggagacctgctgcagcgctatgattctaagcccattatgagtctcttgggtgccatggagacccaatctgagctctctgagttagaact

SEQ ID NO: 356637 - DNA, 529 bp, Homo sapiens
gatgagacagcagaagactctaagactgccaacaaaaatctgcatttaaaataaaataccaagagtcctacttaaatcatgagttcattgctacaggcgattcactttctccaagyccactttgtataatatgtggcaaccagctatccaacaaaggcatgaaaccttcaaaactgcttccccagttggagaccaagcaacctgcattaaaatacaagcctttggagtttttcaaaagaaaaaaaaatatcaacgtaaagaacagaagcaattactgaagactaccacttcatcaaatgtgtctgcactgagcgcatcattcttagttgctaactgcattgctaaagccaagaagctcttcactattggtgaagagttgatcctgcctgttgctaaggacatttgtcatgaacttctcagagaggctgcagttcaaaaggtggcaacgtcttcctctttcagctagaaccataagtagacaaattggtgaaatggcagaggatattaaggcacaattgttagagaggat

SEQ ID NO: 356638 - DNA, 506 bp, Homo sapiens
agttacctctccctagaaatacaccccccaccagatttttgattggtttgattttttgctaatgagttctaagagtttcttatatttttttattattaacaccttagcctaatgtgtgtaacaactattaacataaaataagagtttaaaaacattatttcctattcacttattttcctaataatagtattgtttatatttcccctgcccctacaaaatggatgaaggaaccctaatagggttattctaggaccctaacatttatgtaaattacattttagaatttctgagaatttgaaggaatgtcggtattgttttaaggtccttacagaattttgtggtaaatagaaattttttaatattattcaggaaagcaatcaaggtttttattctaggtgcttctgttgtatagaaaagtaatggttctgaatggaattacctagcaaagaacaataggtacaactgggatatasagaaaataaatttgaatactttagtacacatgc

SEQ ID NO: 356639 - DNA, 619 bp, Homo sapiens
ttatcccatgttggcaaatataggtcatctagcacaagtgcctttgtttgctatctatcttgtcatttcaacatatctaggtgatcacagcttccttatgtctttagaacttatctgtaacattactcttttcttcctcctgtctcagagtaagtttgtttcctctctttcactttgtgcagagtgtcattcacaactcagctgagccaaagctttgtttgaaatcagttaataagtccctcccttgcattttagggctcttgcttcattgatatttctcttctaattgtaaatatatttagatcatttattcctttaaagaaaaaaagaaacaaaaatttaacaaggcttccattttctaataccccttcaagcttcactcttagtttttccttcctttcaccaataacattcctaagatttttctatatttgkcattttccttttatattttctcactggatgctttacttttcaaaatcttctgttattaatgtctttacatgcataacaaaactaaactttcacctgtacaactattttaccagttaaaccaatagtttcacaattaagtaacttttaaaattatttcttctccttgtgtattgatgaaatgctt

SEQ ID NO: 356640 - DNA, 585 bp, Homo sapiens
atgttgccttttccaaaaccacctatggcccactcttcccccaatcctgtgcccataaaaaccccaggctccatcagcagagagcagagaagagaagcaactggatatccaagagaagcagcttgacttcaaagagacaacttgacaacgtggcttcagagaggagtctggccaaggactgctgaactccaggggaggattgccctcccactccatctgctttccagctcccctccccacagagagccattttcatcagcaataaaatcctccacattcaccaccctccaattcgttagtaagacctgatttttcctggacactgaacaagagctcaggagccatgggtgcagacagtgaagactgtcacactgactctttgcccttgctggtggagagcaaccaccacacgtgaaaaggcagggggcccactgagctgtttaagacttaagctgtccacagatggcaaaactaaaagaacactgtaacatggctggtcgcggtggctcacacctataatctcagcactctgggaggycaaggtgggcagatcacgaggtcaggagatagagaccatcctggata

SEQ ID NO: 356641 - DNA, 605 bp, Homo sapiens
tcacttgggtcacaggattccagctatcccagatgaattaatttattttttgcctttcattgcaggattattttattattattatggattagggaatatgtgttcaagtttgttacgtggatatattgcataatggtgaggtttggcttctaatgcatccatcgcccaataatgaacattgtacccaacagataattgttcaaccctcaaccccstccttccctctccccttctggagtccccagtgtctgttatttccccatctttaagtccatgtgtgcccattggttagctcccacttataagtgagaacgtgtagtatttgattttctgtttctgagttatttcgtttagattaatggctccatccataattctttcttcagtagtaataatcctgatgtttaaaaatcccatctaccattttcttttcttcaaccattatatttttcatatgtcaaaaatccacatttaaataaaatcttatttcagcctcttattactagtgtcttcctttacatacataaggctaaatgacatggttatttttaatcctttgatttaaaatctgcttcatttacatatgtcatttttcctttatattg

SEQ ID NO: 356642 - DNA, 277 bp, Homo sapiens
tgccagtatttggtgttgtcagtgttttgtgttttacccattctaataggtgatgtagtgatgttttaatttgcaattctctgatgacaaatagcgtggatagctacatatgcttatttgccatcygtacatcttatttggtgaagcatctattgggatcttttgcacataatgtaattttgttgttgttgatgggttttaagaaatcgtgtggatagctacatatgcttatttgccatctgtatatcttatttggtgaaacatttattaggatctt

SEQ ID NO: 356643 - DNA, 277 bp, Homo sapiens
tgccagtatttggtgttgtcagtgttttgtgttttacccattctaataggtgatgtagtgatgttttaatttgcaattctctgatgacaaatagcgtggatagctacatatgcttatttgccatctgtacatcttatttggtgaagcatctattgggatcttttgcacataatgtaattttgttgttgttgwtgggttttaagaaatcgtgtggatagctacatatgcttatttgccatctgtatatcttatttggtgaaacatttattaggatctt

SEQ ID NO: 356644 - DNA, 610 bp, Homo sapiens
tcatcctgtgaaacttcataagccagggaaataggaaaagcatatctggccagaaaaacaggtttgctcgatctcctcaagcaatgaatttttaaaagatttgcttaaaacaaccgagtatgtcaattggcaatatcagtccacatatgagctttcaaatgctctctttctaagcccaggcagctgagtgatttgtrtgatatttgatttttagtttttcagcagcccgttttgatttagtgctttctgcatttttatagacatcagcaatcctgtagcaggtcctgtttggctgatacattttacaagttgataatagtaaagggtgtgtagagatagaacctgatatagatgtgttcttttgaagcatcatcattactgagagataagtctacatagaaacaaaacacaaaacagctagcagctatattttaaatttttgattcaaccaaaaaattagatatattgtactaccttgatgtttatccccttttctacatatttgtgatgttttgaatattgaataggaattcatgaagatatttccaaataaaaacaaaaatgatattggaaatttttataatagattgtaaatatttgtctttcaaaa

SEQ ID NO: 356645 - DNA, 482 bp, Homo sapiens
ttattgaggtaaaagcatgtcaaaaattaactatatgaacagcctttatgggaggcaaacaagaagttacctaatggctggatgtggccttgcaaggatgagcagaagtctatttggtttagaggagttactcaaggtggcaatgcagaccacacttgttttgtttgtctgtttgttgactcatattttactgatttttagaaataatttgatttggaatgtctttaaacagtygtaaggttttcagcagttaccccctcctgctgttttatcccaggagagtttcacttgtttacattatctgtcacggacatctctaggcattcgagtttgcactccctatttacaggctatttacttatctgataggcactagaaatacctttccctagtgacaaaaacgagtctgtaagataaacatgaaatagttgcaaatacaaatattttatagcactctaatttagtgccagaagaaagaatta

SEQ ID NO: 356646 - DNA, 588 bp, Homo sapiens
catttatgcaataatcatcatctccagttcaagtgggaaraaagttatggaaggaaggagactaaggatttcctccacttggactggagacaatgagttcaactcaccaggagttattaatgcaatgttttttaagctaatgatgcaaaaaaaaaaaaaaaaaaaaccagaaacaaagaaacaggcagaatgaatcttcaaaccaggtctgtaggcctaggaacatagtcaattttagaattaatatgcacagaactacatggataacatggcatccgtcgcatgtgcttgctttctttttatctttatttagattaatctaatcacatttcaagaattaaaagcttaaagtaacttaaaacatatgggaaggactctgtagatccataaatagcttatttttaaacatattttttgatatctcctaagcttcttatatctgtatggatgaaaattattcaccaagccattaattatgttttaacatctttatgaaaaagaagataaggacccttgaaaatcttgagggagatatgagtatgtaattttagaatatgtaaaattaatagtgtaattgatgaattaaag

SEQ ID NO: 356647 - DNA, 447 bp, Homo sapiens
aaatctaatgttacatgcgtactttttaatcattgccctttattagactgaaatagtttatttttatttgtaatttgctaatagttatttaaatcatgaatggatgataaaattttcaaatgattttttaaatttattgaggtratgatatatttatattttcctcttttaatattatatatgcatgacttttactttttattatttttattatttattattattataccttaagttctagagtacatgtgcacaacatgcaggtttgctacatatgtatacatgtgccatgttggtgtgctgcacccattaatgcatcatttacattaggtatatctcctaatgctatccctccccgctccccccaccccaggacaggccccagtgtgtgatgttccccatcctttgtccaagtgttctcattattcaattcccgcctatgagtgt

SEQ ID NO: 356648 - DNA, 447 bp, Homo sapiens
aaatctaatgttacatgcgtactttttaatcattgccctttattagactgaaatagtttatttttatttgtaatttgctaatagttatttaaatcatgaatggatgataaaattttcaaatgattttttaaatttattgaggtaatgatatatttatattttcytcttttaatattatatatgcatgacttttactttttattatttttattatttattattattataccttaagttctagagtacatgtgcacaacatgcaggtttgctacatatgtatacatgtgccatgttggtgtgctgcacccattaatgcatcatttacattaggtatatctcctaatgctatccctccccgctccccccaccccaggacaggccccagtgtgtgatgttccccatcctttgtccaagtgttctcattattcaattcccgcctatgagtgt

SEQ ID NO: 356649 - DNA, 512 bp, Homo sapiens
agcatctcatgaacacatataagtaacttaaaaattgatcaaattcccaggtctaagagacttgcaacattgacaactctatttcttctttcaatgcaatggaagtacagcatgcatatgaaaggcatctaraaagctaaatttcagagtgctaccacccagatacataaccttgaataagttgcttatctcctcagggccaatgttttctcattggatgctggtaatcattaaataacatttaaatggagaaggaagaattgtaaaagtagggaaaataatcaatataatattttaaagtgctgtattaagataaaacatatttattcagcaattatttcatttggactagtgagtgtgaaaatgttcttattcatctgctttgataaatagtctgatggtgtctaaggattcattttctttgtagtttcatgcagttgaaatgagtttgctagtcacctcttgaaacctatgaagttttaaaatcagtcattcagaatatgaagattcag

SEQ ID NO: 356650 - DNA, 495 bp, Homo sapiens
atgttaggccccaaaacaagccctaataaatttaaaatgattgaaaatatacaaatatgttctctgacagcaattgaatgactttagaaattaatagtacaaaaaattttgagaattcacagatatgtggaaattaatcaacacactcctaaataaccaataggtaaaagaagaaaccccaaggaaaatyagaaaataatttgagatgaatacaaattaatatacaatatgacaaaagttatgtgatgcagtttaaacaatgcttagagagaaatttgtagctgtaaatgtctatgttcaaaaagaagaaaaatttcaagtcaatatactaacattccactttaatagactggaaaaaaaacagtgaactatacttagtgcaagtaaaagaaaagaaagagtagagattggagtggaaattaattaaacataaattagaaaaataataaaaaacaacaaactgaaagttgtttctttgaaaagagcaacaaaatt

SEQ ID NO: 356651 - DNA, 495 bp, Homo sapiens
atgttaggccccaaaacaagccctaataaatttaaaatgattgaaaatatacaaatatgttctctgacagcaattgaatgactttagaaattaatagtacaaaaaattttgagaattcacagatatgtggaaattaatcaacacactcctaaataaccaataggtaaaagaagaaaccccaaggaaaatcagaaaataatttgagatgaatacaaattaatatacaatatgacaaaagttatgtgatgcagtttaaacaatgcttagagagaaatttgtagctgtaaatgtctatgttcaaaaagaagaaaaatttcaagtcaatatactaacattccactttaatagactggaaaaaaaacagtraactatacttagtgcaagtaaaagaaaagaaagagtagagattggagtggaaattaattaaacataaattagaaaaataataaaaaacaacaaactgaaagttgtttctttgaaaagagcaacaaaatt

SEQ ID NO: 356652 - DNA, 583 bp, Homo sapiens
ttgtagcagtagatgtcctttactctgtgaacccccttatcgctggcacccasagcagtcaccccatcctctctgaaggcttcatgccatgcatcaggcagtcctccagatgtggccacatctatgtcctcccttctgatttatgttctgtctttctcataatcagtgtggtgccattgtactctcctcagtcagccttaagccataccaacaataatataaacacttcttatatgaataggataattcttctttttcaacccacagagcctttgcctattttccccactggtaggttgtgtgaagaggggaagcttgcaaccaacatttagagagatcacattctggggatgttgtgattactacctaaagagttctaaaggagacatgcccttgcattgatcctatcaaattctgaacagtgaatgtaacatgagcaggaaacaaattactcttcacactttcctgaacaccctagctaaaacttgtatgtgtagttgtcatcaataaagcacagtagcaatgtctgagactgttgctggaagccagtattcaccggcagcactgtgaggggatgagacta

SEQ ID NO: 356653 - DNA, 583 bp, Homo sapiens
ttgtagcagtagatgtcctttactctgtgaacccccttatcgctggcacccagagcagtcaccccatcctctctgaaggcttcatgccatgcatcaggcagtcctccagatgtggccacatctatgtcctcccttctgatttatgttctgtctttctcataatcagtgtggtgccattgtactctcctcagtcagccttaagccataccaacaataatataaacacttcttatatgaataggataattcttctttttcaacccacagagcctttgcctattttccccactggtaggttgtgtgaagaggggaagcttgcaaccaacatttagagagatcacattctggggatgttgtgattactacctaaagagttctaaaggagacatgcccttgcattgatcctatcaaattctgaacagtgaatgtaacatgagcaggaaacaaattactcttcacactttccygaacaccctagctaaaacttgtatgtgtagttgtcatcaataaagcacagtagcaatgtctgagactgttgctggaagccagtattcaccggcagcactgtgaggggatgagacta

SEQ ID NO: 356654 - DNA, 648 bp, Homo sapiens
ataaatattctattttctgaaactcacatttttctctcatttacgtgaaggtttttttctgggagaaagctgctattaaaatgtcttttaaaaatagcatgccactagcactttgctgaatggctgcttcacagcatgataatattcactatgaattttgcaatgtgttttaactaatgctcgcaggtacctaaaccttgatatccacattagtagcatttatttttctgtataaggaaagtaagggatgctttggtgtcatgacatacagatttattctggatttttttcagatttggccagtatgtctttgctcaagcatccaaacatctgacctcagtgacagtgttcaagcagttggaatctgagcaaactgccatccatyttatctgatttctcaaacaagtccacctcttgcccaaggagcatcaccagtagaagctgaagagggatttgtgctgtgtgctgtgaagtgtcatctgaggtcaatgtgttgtcattgatggcttgtgcaggaatgtcaagattcagcatgtgacttgagccctgcagcctacacgctctataaggctcgtggctcaagagatgattcctcagagggctgataatgaaaaaagcaaacctccatttgcgtaaaaaaacacataa

SEQ ID NO: 356655 - DNA, 615 bp, Homo sapiens
ctccactgtgtgacaattacttcatcattcttggtttgcrtgtccttccatttttgaggagtattttgtagaatgtccttaaatatggatgtgtctaatattttttcacggtttgactgggatgtggggcttttgtgagaaagatcacagaggcaaattcacatcacatcatatcaaggctacgggctattcctgtgatgtagatatgaagatgttaatcttaatcacctgaacagggttctccattgtaaagtcacctgccctccctgctctccctactctatacattggaaacaagtcattacatgtatcccacattcaaaagtggttggcagtttaagctccactgcctggagatgggggaagccacataaactatttgaaattttcgtctccacctttgcttatgtattcattcaatcatttatttatgtcagcatggacttggacttgggatatttcttttatgctttgccttatcacccaatactatccttgtttattttgttctcattgctccagctttggccattagaaggtctttcaagttgcctctgacatgcctccatccttctattctctgagtacttccttaaatcctggcactgtaagatg

SEQ ID NO: 356656 - DNA, 548 bp, Homo sapiens
tgagcatattttatgcttctaaaaaaaatcatgacttattctaatctgaattttgtaaattttcagtgtgttttcctactgagagtgtttactttgaagaaagttaaattttcctatttttagagttcttaaaaatctttctgaaaaaaaggaggttccactacaaatggctcaatatttatggtggagaaaacataaatctaatttatcatccttagaagttacccctgattcttttatattgatttcaagattttatgaatacaacttattttgcttgactatctcttttgttatcataaacagaatgttcttttacctggggtcagaaataagaaagcactctattygaggggaaagggtcctagattaaaacacacagcacatgacacatgccaatccctttttgttccttttaatttcaatattattctcttattcccagaggagtccttggaaaagcggggcatatgagtagcttgtggaggagctaaatagcagagaacagcttttagcttctgaagaatcaggtcttacagatgtgcctt

SEQ ID NO: 356657 - DNA, 548 bp, Homo sapiens
tgagcatattttatgcttctaaaaaaaatcatgacttattctaatctgaattttgtaaattttcagtgtgttttcctactgagagtgtttactttgaagaaagttaaattttcctatttttagagttcttaaaaatctttctgaaaaaaaggaggttccactacaaatggctcaatatttatggtggagaaaacataaatctaatttatcatccttagaagttacccctgattcttttatattgatttcaagattttatgaatacaacttattttgcttgactatctcttttgttatcataaacagaatgttcttttacctggggtcagaaataagaaagcactctattcgaggggaaagggtcctagattaaaacacacagcacatgacamatgccaatccctttttgttccttttaatttcaatattattctcttattcccagaggagtccttggaaaagcggggcatatgagtagcttgtggaggagctaaatagcagagaacagcttttagcttctgaagaatcaggtcttacagatgtgcctt

SEQ ID NO: 356658 - DNA, 536 bp, Homo sapiens
cctcatatggtttggctgtgtcccacccaaatctcatcttgaattgtagttcccataatccccacatcatgggagagacccggtgggaagtaattgaatcatgagggcaattaccccactatgctgttcttgtgatagtgagtgagttctcatgagatttgatggttttaaaagggcttttccccctttgctyagcagtgctctctcctgccaccttgtgaagaaggatgtatttgcttccttttccaccatgattgtaagtttcctgagctctttccagttctgtggaactgtgagtcaattaaacttctttcctttataattatccagtctcaggtatttcttcatagcagcatgagaaggaactaatacaaccccccatctaccagtttctgtgggaggatatgagattatgttccatgggtgccttgatccaagttacaaatctacctcctgtcaaaaagatataagaaatttgcttttcctctggataaagccaatcagtttacacagatggtcaccccaattactagatg

SEQ ID NO: 356659 - DNA, 562 bp, Homo sapiens
atcctaaaattgataggtaaaatttaagtagaaataagattttgcatagtcactgtgtgtccatttggactgcattaacaaatgatcatagactgtgtggcttataaacaacagaaatgtatttttcaacagttctgaaggccagtaagtctaaaataaacacactggcaggttcagtgtctggtgaggacccacttcctcataaaaagctrtcttctcattgtaacctcgcatggctgaaggtgcaagcaatctctctgaagtctcttttacaacagcactaatcccattcttgagggctccacccgaatgacctcatcacctcccaaaggccccactcccaaataccatgaccttgggtgttagaatttcaggacataaatttggaaggaacataaacattcaatccactgcaatcacaaagtatctctctcaaaatatttagtaatcacaaagagaaaaacagcaactttacaatggaaaaacatggcagacgccaagtgatcaagattaatataatcagtaataagacatatcaatgtcatttactttggatatgatg

SEQ ID NO: 356660 - DNA, 510 bp, Homo sapiens
ggaggttcatagggagtgctcatatrcaatacttgtgagggatggggaaagcaggattaggcacagagaaaagttaaactgtgatgcagttgcaaaagcagcctcagctgatcctaaggggatccagaagctgagatgactatttagaataccagttgagtcaaggggccaaggcctttgcaccccgacttcaagcagttattggatgtaatctgctcacaagggggagaatgtaatcttgggcaaggcaggttcttcagtgagggcaacttacagaaaaagactcagcaatgagcctcagcactcatcattcctggctgcaggaagaatgagtgtctcaataatgtaccgcagtgtcacagcaacttattgatatttttaatgtgttaaaataactaggtagaaaggttacctacatgatcatgtatccattgatcacacatgagttcatagatgccagaactgaacatgtagcatttaactattcatctaaagctgaaaggtaacacc

SEQ ID NO: 356661 - DNA, 510 bp, Homo sapiens
ggaggttcatagggagtgctcatatgcaatacttgtgagggatggggaaagcaggattaggcacagagaaaagttaaactgtkatgcagttgcaaaagcagcctcagctgatcctaaggggatccagaagctgagatgactatttagaataccagttgagtcaaggggccaaggcctttgcaccccgacttcaagcagttattggatgtaatctgctcacaagggggagaatgtaatcttgggcaaggcaggttcttcagtgagggcaacttacagaaaaagactcagcaatgagcctcagcactcatcattcctggctgcaggaagaatgagtgtctcaataatgtaccgcagtgtcacagcaacttattgatatttttaatgtgttaaaataactaggtagaaaggttacctacatgatcatgtatccattgatcacacatgagttcatagatgccagaactgaacatgtagcatttaactattcatctaaagctgaaaggtaacacc

SEQ ID NO: 356662 - DNA, 565 bp, Homo sapiens
ttcttgtttgcggttaataactacctttccagtatttcaagattcctgactcttaagtcaactgaatagaagtcaaacttagagtttctctaagcaatgtcttattttcttccctcatgtttttagatgctagtataaactctgttttctctctctcaagcaggaatttattgaatataaattcaataaagtcaacacactctaacattctattttttttctcctaagtcctttaaatgctaacatttcaatgtacatgatctagttctcaagggtagaaaaaacaaaaattattatttttgctaccatgtaacaataactacaatcttccaaccactgaagagaatggtttcactggcctccaccaatctttttagctcagccaagacctcattttagagtttcagaatgttagactcattctgggtcccaatttctgtttcaaaaatattamttccaaacaatagaaaccaaatgtggttatcttatagggaaaaaggaagtgtggaaaagaaggaaagttatttcctttgagtttattggaactaaatggggccctatatac

SEQ ID NO: 356663 - DNA, 587 bp, Homo sapiens
tttgtttttgtttcaattgtttctgkgactgagtcataaattccacctctttccacctctgcaagctaataattttaaaaacttattattcttatttttttttgtagagacagtgttttactatgtttcccaggctggtcccaaactcttaggttcaagagatcctcctgcctcagcctcccaaagtgctggaattacagatgtgagccaccatgcctggcctggatcttgcttctttatccaacttgcaactctatgtcttttaattagggtgtttagcccatttacattcaaggttaatattgacatgcgaggatttgatcctatcattgtgttgttagcttgattagactttattgtgtagtttctttatagtgtcagtgggctgtgtacttaggggaatgttaaacatggaagcaaaagaaacatgccaccacaaaaacacacttaagaacctcttatacagcaggtctagcactagtaaattcccttagagtttggttgtctgaaatggattttatttctccttttcttaagaagcttagtttagcagaatattaagattcttggttggtcttacttctcct

SEQ ID NO: 356664 - DNA, 587 bp, Homo sapiens
tttgtttttgtttcaattgtttctgggactgagtcataaattccacctctttccrcctctgcaagctaataattttaaaaacttattattcttatttttttttgtagagacagtgttttactatgtttcccaggctggtcccaaactcttaggttcaagagatcctcctgcctcagcctcccaaagtgctggaattacagatgtgagccaccatgcctggcctggatcttgcttctttatccaacttgcaactctatgtcttttaattagggtgtttagcccatttacattcaaggttaatattgacatgcgaggatttgatcctatcattgtgttgttagcttgattagactttattgtgtagtttctttatagtgtcagtgggctgtgtacttaggggaatgttaaacatggaagcaaaagaaacatgccaccacaaaaacacacttaagaacctcttatacagcaggtctagcactagtaaattcccttagagtttggttgtctgaaatggattttatttctccttttcttaagaagcttagtttagcagaatattaagattcttggttggtcttacttctcct

SEQ ID NO: 356665 - DNA, 575 bp, Homo sapiens
gggtttactgagtttgttgaatttgcctgttaacctctctagtgaaattggggaaattttcatggactgtatcctcaaatacgttttccaagtttcttactctctctcctgtttccttcccttycaggaacgtcaatgagtcataggtttggtctctttacataatcttgtatttctcagaggttttgttagttttttaaagttcttttttctttatttttgtctgcctgcattgatttgaggagttgtcttcaaactctgagattctttcctcagcttggtcaattccattgttagtgcttccatctgtgttatgaaattcttgtcgtgaatttttcagttccacaagttcagttttgttctttctaaaaatggctatgttgtctttcaattctgggatcattttactctttttcatgggttgggtttcaacttcctcctgtatctcattgagcttccttgccatcctgattctgaattctatgtttgtcatttcagccatttctatcttgtttggaaccattgctggagagttagtgtgatcatttgagggtaaggtgacactctggatttta

SEQ ID NO: 356666 - DNA, 575 bp, Homo sapiens
gggtttactgagtttgttgaatttgcctgttaacctctctagtgaaattggggaaattttcatggactgtatcctcaaatacgttttccaagtttcttactctctctcctgtttccttccctttcaggaaygtcaatgagtcataggtttggtctctttacataatcttgtatttctcagaggttttgttagttttttaaagttcttttttctttatttttgtctgcctgcattgatttgaggagttgtcttcaaactctgagattctttcctcagcttggtcaattccattgttagtgcttccatctgtgttatgaaattcttgtcgtgaatttttcagttccacaagttcagttttgttctttctaaaaatggctatgttgtctttcaattctgggatcattttactctttttcatgggttgggtttcaacttcctcctgtatctcattgagcttccttgccatcctgattctgaattctatgtttgtcatttcagccatttctatcttgtttggaaccattgctggagagttagtgtgatcatttgagggtaaggtgacactctggatttta

SEQ ID NO: 356667 - DNA, 598 bp, Homo sapiens
ctagtataatcagagcttgcattaaaaccaaggtttgtctgactctaaattctattctgggaagcattaggtaaaacattacaggaaaaacttttctctttgaaccctcaggaaaacacaaagatatgtgtgtgcacacaggaaagactatatgaggacacagagagaaggtgcccatctgcaagccaaggagagaggccccagaggaaaccaagcctgttaataccttgatccttgccttctagcctccagtactaagaaaaaataagtgtctatgtacttaagtctgtggtattttgctatgacagacctaagagaagaaaatactcataaagtgactttttgtgtcctcctaatatcactgtgatatcagacacttacacaattctatcctctgtcctggaaaagggaaatcatcatctccctcgtattgacatatattcatgtaaaagactatgagttattttgaaataagattagataccagttggcaattaagctagatttttttgtgtgcttgtgtgtgtatgtaaagaaaaagycagtattgagccaaaggactttcttcaggtatggtatgttcctgaataaataggca

SEQ ID NO: 356668 - DNA, 574 bp, Homo sapiens
agctgccatcttgcaatcatgaggagaaatttgcatataaagaagtctaaagcagaaagttagaaggagcttcagtttttgtttcttttaacacctgcaccaactcttggcttacctctagctgtcttgttatgtataaaattaattccctgattaattcactgtaatagattattctcccacatttgccaaacatatttctagtcaatatgtggactatttccccctttgtttttgaaagaacatcctgttgaaacacttcmatattagagtgctggagcgacatggagatacactgttttggattctcagatgtactgttgtttcaaataaaagtcaatttttttttttgtagatttcttactggaggacaaataatggtctaaaagatatgaatactttagcacactttattgtgaaaattcatgtatattccaatgattgaaaacattaaaaaataaccactggttttattatattggtttgacttgcaaatacacattgcttctttttaaatttcaacatgccacaccctcttcctccaggtttcctctattgctcatgtcctcatgtt

SEQ ID NO: 356669 - DNA, 576 bp, Homo sapiens
ttattttcttatgagaaccttgaatatgctacatttttgtaatgaagtcagaactgaaatatatcaggtatcttttagaggttaaaaaactaggaaataaaatttggacaccaattcacatgcttttgcatataagacactatcagttatattacttcttaccaaatcataataccagaaaaccacagaaacccaaatttgaataatcttagatttcctttctcttatcctttttgcaattactgtccttattcttggttaatgttctaaaggctgtgataataccctttataattttatgcttatgaaaatcttagaaacagttacatgtatttatgaataatataccttattttttcacttttcttgtcaatattttcttttctcaaaaagacttttatgttagcttattagacaccaagttcgtatagcgtttcaaaaatgccatatgtcatgacattttataaatggcacatttactcctgtacctgtgtttagcaaaatacctcttagtacagttcatgattctcatcagyacagactgggaaagagatgctgtcaccaaaaggtattcat

SEQ ID NO: 356670 - DNA, 548 bp, Homo sapiens
tgggttttaatcagcctgatttttagcacctacagtaatcctgacatgctcaataaatgtgtataaatgaatcacgaagtcaatattttaggtcctgttaatttactctctgtttgactttgtgttgttaaacctgtctagtcctcagttttctcattgctgaaagagagcattrgagcaatctagataatctctagggacctttctagctgtaaaattccataattaggtccatctgtattgtacctttttaagtttttctccttactggaatgcttcttactgctttcatcatatacctcttttttattatcttctcaagttcattccatccatgaggccctctcaaatgattaaatattgtgatttttatagttgttatagccagtgtgactcaatttgttatactgtcttaaattctgttctgttattttatatgtcattttgtatgttgtttcctcaactagcttgtgaattcttagaaggtaaagatcatattttatatttctgtcctatctgtaatcctttgctcataaagtatattagtt

SEQ ID NO: 356671 - DNA, 554 bp, Homo sapiens
tatttgtacaatgacctatttaagtacttgtatttttttaaactaataatgtatatatttataatgaatttatcacagtaaaatactatataaatggtaacatattagtctgaaacctgtctatagaagttgaatactttggaatggcacaataaatatgagcagcaaaaaactgtcaaactaattaatcaattataaaagattcaaaatgtattaaaaatgtacaattctgcacttacattacttcacaattgtttttaagcactggtwccttaaatcattcaaaatgaaatgacaggtgacacattatgagtatggtttatatgaaaacacagggaattccagttggtgcacccacccatacttaaaactttatgaagctgggcgcagtggctcacatctgtaatcccagcactttgggaggctgagacaggagggacgcttgaacccaggagttcaagactagcctgggctacagagcaagaacctgtctcaattaaaaaaaaaaaaacaaaaactttatgattctttgctttgacttgactagtcaacca

SEQ ID NO: 356672 - DNA, 554 bp, Homo sapiens
tatttgtacaatgacctatttaagtacttgtatttttttaaactaataatgtatatatttataatgaatttatcacagtaaaatactatataaatggtaacatattagtctgaaacctgtctatagaagttgaatactttggaatggcacaataaatatgagcagcaaaaaactgtcaaactaattaatcaattataaaagattcaaaatgtattaaaaatgtacaattctgcacttacattacttcacaattgtttttaagcactggttccttaaatcattcaaaatgaaatgacaggtgacacattatgagtatggtttatatgaaaacacagggaattccagttggtgcacccacccatacttaaaactttatgaagctgggygcagtggctcacatctgtaatcccagcactttgggaggctgagacaggagggacgcttgaacccaggagttcaagactagcctgggctacagagcaagaacctgtctcaattaaaaaaaaaaaaacaaaaactttatgattctttgctttgacttgactagtcaacca

SEQ ID NO: 356673 - DNA, 554 bp, Homo sapiens
tatttgtacaatgacctatttaagtacttgtatttttttaaactaataatgtatatatttataatgaatttatcacagtaaaatactatataaatggtaacatattagtctgaaacctgtctatagaagttgaatactttggaatggcacaataaatatgagcagcaaaaaactgtcaaactaattaatcaattataaaagattcaaaatgtattaaaaatgtacaattctgcacttacattacttcacaattgtttttaagcactggttccttaaatcattcaaaatgaaatgacaggtgacacattatgagtatggtttatatgaaaacacagggaattccagttggtgcacccacccatacttaaaactttatgaagctgggcgcagtggctcacatctgtaatcccagcactttgggaggctgagacaggagggacgcttgaacccaggagttcaagactagcctgggctacagagcaagaacctgtctcaattaaaaaaaaaaaaamaaaaactttatgattctttgctttgacttgactagtcaacca

SEQ ID NO: 356674 - DNA, 547 bp, Homo sapiens
attcatgtttcccagaatcagcttgtccttttaaaggctgatctctaacttgagactggctttgctttgactgtgagatacttctaagatcaggtctccattctgatcccactcacyggctgctctgtttccaaagtacttctgccttccctaggggggtctcctcctgtacaggcactgaaagactgatcaaatctgcatgtgtcaatcattgcctacttcccagctggtgatagaggtagattcctaccaaatttactcggaggacttgactttctcaggacctcttcctgttgtgcattgtcatgatcttgcagctaaactaatagatgtgaaagtgaattgaaatgtaaaacatgctgggcaagtctaaaatgctttgaatgataggaggtaattaaatgaatgactttcaaacctcacttgatgcctgctgagatatcctatatctactgattcaagggccaaatctctaatttcccaataccacccatcacttggaagtttctcttcaatacattgatcttctcatggttgcctgatgctt

SEQ ID NO: 356675 - DNA, 547 bp, Homo sapiens
attcatgtttcccagaatcagcttgtccttttaaaggctgatctctaacttgagactggctttgctttgactgtgagatacttctaagatcaggtctccattctgatcccactcactggctgctctgtttccaaagtacttctgccttccctaggggggtctcctcctgtacaggcactgaaagactgatcaaatctgcatgtgtcaatcattgcctacttcccagctggtgatagaggtagattcctaccaaatttactcggaggacttgactttctcaggacctcttcctgttgtgcattgtcatgatcttgcrgctaaactaatagatgtgaaagtgaattgaaatgtaaaacatgctgggcaagtctaaaatgctttgaatgataggaggtaattaaatgaatgactttcaaacctcacttgatgcctgctgagatatcctatatctactgattcaagggccaaatctctaatttcccaataccacccatcacttggaagtttctcttcaatacattgatcttctcatggttgcctgatgctt

SEQ ID NO: 356676 - DNA, 548 bp, Homo sapiens
tttagacatctcttcttcaccaacataagcatttaaagctatatatttctgaataggcattgctttggatgcatcatacaaattttgatatgttgtatttttattcattcagtgtgaaatactatctaacttcctatgtgatttcttctttgaccaatggattattttaaatatcttgtttatttayacatatttgaagtttccctagatcttagttttattgatctctaatgtagttccattgtgatcagagaacatactctgtatgattgcaatttttaaaaatttattaagacattttaagatccactatatggtctatcttgctgaacataccacatgcacttgaaaacaaaatgtattctggagttgttggatgtggtgctttataaacatcaatgaggttgtatcagtcagagatcaccagagaaacagaaccagtaggatgtgtagatgagagagagggagggagagagagagagagaaagagagagcgagaggtttattataaataattggcacatgtaattgtggaggctgataagtct

SEQ ID NO: 356677 - DNA, 571 bp, Homo sapiens
  misc_feature (1)...(571): n = A,T,C or G
aaataaactatttttctttctaaattgcccagcctcagatatttctttatagcacacaaaacagactaagacaaaggatacaaaattttagttagacaggagaaatcggttctggtggtctagtgattatggttaataatatattgtatatttcaaaatagttaaaataatggattttaaatgttctcactacaaataaatgataattacttgatagatatggtagtctgatttgatcatttcacaatgtgtacatgttatggaaaaatcacattgtatcccataaacatatacaattattacttgtcaatttaaatatacatattaaatatataataatatatatttatatgtctaatgacatatagtgtttatatatatgtgggtgtgtatatatatatatgtstaacgagttccttggtgatccttatttnttctaaagtttgaaaacaactgaaaaaccaagaaaggaaaaccttataagataagaggggacagtaatagagcaacagtgataattgctacctagtttgggatgaggaagaaataggtggagaggaaagaggtggag

SEQ ID NO: 356678 - DNA, 609 bp, Homo sapiens
atgcagaaatcacctgccttctgcattgatctcactgggagctgcagaacggagctattcctattcagccatcttgccagcaaaatcctcttcttttcctttttttcgagatagggtctccctctgtcacccagactggagtgcagtggtgcgatcactgctcactgcagcctcaacctctccagctcaagtgatcctcccacctcagcttcctgaatagctggaccccaggcatgcaccgccaaacctggctaatgtatttttatattttgtagagacagtctccttgcattgcccaggctggtctcgagctcctgggctcacgtgatcctcccgcttcagcttcccaaagtgctggaattacctggtcaacaattttctaattgttaaaaataatattagttaaaaataaaagttgataactttatagcaacttgaaataaaatctatgagataatgtgaaagtaaaatgccaagatacaaagatgtagatttttctaccagtaaaacaaagattcactaggaaaaggaggagcagakggaagcaatcagaggacaatgtggcaaagcccaaaatctatcacttcagtgaagcttgaaatatagaca

SEQ ID NO: 356679 - DNA, 627 bp, Homo sapiens
aatctttttgtgttgagccaagatttcttaggacaacacaacccccaacccccaccaacccataaaagaaaaaattataaatggacttcataaaaattataaaattcccgttctttgaaagatattattaaataaatgaaaagataaaaaaacttggaaaaaatacttgcaaaatgcctatgtgataaagctttgtatccaaaatatataaagagcatttgcaactcagtaaaaagaaaacaatccaacagaaaatgatcaaaagatctgaagaggcacttcagcttttattaatgatgactgaaattaaagatgaactattttttttctgrgcatttatttagtaaatactggtgattgaagttccatccagatgtggttatttttgctataataaatgtccttttatggttattctctggaatgtgtaataaaaagtgatttgcttgagaatggctcatttttcactacaagtaaataattaacaaaatttatagattttgttaaatacttatactttaaagtataactaattggaaacaccctatacagagcgtggactagctttgttattccttccttgacaaggaattttagcaaacattctatggaaaggataattagcaa

SEQ ID NO: 356680 - DNA, 535 bp, Homo sapiens
atgatcaagtgaggagtaatcactagccctgctcctcaaagtacagagagcacgttaacaattactcattataaagtcatactttatcatctagcatttatttaaaccagacttagtgacattatacatataaaatatgaggacttttgaaatatggtagggatagattgtgactgcagtgcagccatcagcaagcgtcactaattttaaagaccctcttggtgccacctgtctctaaatctgcacactctggccacaagtcccctctgtactgtgaaaggaatgttttatgccttgccaaacgttcctaggaagactgttaayagtaagcaacaaaaacccgttctctagaatacctctaggctgtctctcttagaagagctccgcagaagtaaaagcttgcctgcattagaatcccagagctgagcagcaggctgtcctttaactctttactactcactctgtgtaagatttaggaaaggcatgcaaggtaacgtgccttcaaatatttgatcaccacaaaggtgcacccatg

SEQ ID NO: 356681 - DNA, 606 bp, Homo sapiens
caggtggtatatatagcaaagctctttcaaaatggccacagaaaagagcaagagagaatagaagaagacggagagggaatcttattcctttaaaaatgtcttaaagactttctaaggagactcttggtcaccctgaggatggttggcattacctctccttagagaggtgagtgtccctgatgttccgaggctaccagtccaactgaggacaggcttacaggacagcacaacaatccttaaaaagaagwtggaggaggagaaggagaaagagatttcggagggaaaaggaattttaattccaaaaatataccttatttcctcctgaatagagctgtaaatttgtaaaagtaatacaaacatcttctgatttccactcggacaatctcccaggcacagtcactgtatttcttttctttcaggaaattgtctatcctgtggaaatatctcctcagttccaggctgctcagctgggggaccctggcttctgagggtttcatctcattctctttcatttctttcatgtcttcattttcattcttgtcttcctccaagcattggttcaggtactctgcttgctgatcaagtcctatttggatttgtttgagg

SEQ ID NO: 356682 - DNA, 606 bp, Homo sapiens
caggtggtatatatagcaaagctctttcaaaatggccacagaaaagagcaagagagaatagaagaagacggagagggaatcttattcctttaaaaatgtcttaaagactttctaaggagactcttggtcaccctgaggatggttggcattacctctccttagagaggtgagtgtccctgatgttccgaggctaccagtccaactgaggacaggcttacaggacagcacaacaatccttaaaaagaagttggaggaggagaaggagaaagagatttcggagggaaaaggaattttaattccaaaaatataccttatttcctcctgaatagagctgtaaatttgtaaaagtaatacaaacatcttctgatttccactcggacaatctcccaggcacagtcactgtatttcttttctttcaggaaattgtctatcctgtggaaatatctcctcagttccaggctgctcagctgggggaccctggcttctgagggtttcatctcattctctttcatttctttcatgtcttcattttcattctygtcttcctccaagcattggttcaggtactctgcttgctgatcaagtcctatttggatttgtttgagg

SEQ ID NO: 356683 - DNA, 412 bp, Homo sapiens
atttaataagagaaggctgtttttaaaagaagatacattaaaaaaggaaaaattattatacatctgaaatgggatcaatactaytttatttgtttaaacatttctactctagagtattttgaaagaaaatgtggattctccctaaggctcagttccaatcagttgatatgaataacacacagtatgtgggaatatactattcttgcagccatgtttatacatgtatatatacttataattacacacacacacacacacacattctataaagtgcaaagcctctctgagggccatggctttttacatacctcatataacttctctacctaaaacttcttgaactgttccaattagaactgcttgttccccattttgcttttacgatgccttggcctccttaaccatgggtttt

SEQ ID NO: 356684 - DNA, 597 bp, Homo sapiens
aattccattaagcttcagtgggagcaaaagtgtaatcacttaagtaacagcagttacttaaactgaaaatgagatcagtcaaaattacttttgaagagagcaaaaatattgtcaggtttcttgctgtggttctggatgttcagtagcaggctcatttgaaggcagaatcagccctgcagggaactcacttctaccttcagaatgtggggtttatggggaaaaatccaggttttgggggaaggtaaggaggaaacgcctcgctggatagacatttctcattgcaaatggagcatgtggtggatctgggaaatcccttsgtggaaaataatcttgagaagctccaaacatggttcctggaggaggtggggggaaaggaggtctcttctcatgaacaggccccttgtatcccccggaaacaatggacctctgattggagcaagaggtggaggagaaaagtaagggccagttgcttcattttcagcagggagagatgaatcaggcacatttaaattaccaaggtcatctttggtatcatttctgctggattccatttctgaaagcattgacccatccactttatccaaagaagtcatatta

SEQ ID NO: 356685 - DNA, 424 bp, Homo sapiens
cccactttccctcaaatgtttattgtctaccattcctttctactatcttaaaaatcccatcaaaacaaaacaaataaaagataactatgtgagatgatgaatatgttaatttgcttcactacagttaccttttcactatctatatccatcttataacatcacgttgtataccttaaaaatacgcagtaaaatttattttttaaaaaagaatcccatcttttttttttttttttttttttttttttggatggggtctcactttgtcacccaggctggagtgcagtggagcgatctcccgctcactgcaaactccacctcctgggttcaagcgaaraatcccatcttttgaattagtcctttgaacactatttgtacaagatgtctggaaaaggcaactggctcctgaatttctcctctagctttc

SEQ ID NO: 356686 - DNA, 615 bp, Homo sapiens
caagcacatcatcatttcaaagcactttcaagaaaaagcatcctctttcctagacaactaaagagggctgttaattcagatggaatcatctgaaagctttttcttatcacyaacttacttattttcttttaatcccctccccaatataaatcatagcacctctgggtgatagtatttgaaaatgacaaaaagaacccagatgttgactaaaggccaaggttaattggatatgtgtgagactgtgctgtaacttcttattgaattgggtggctgagctgtatagttcttgtggcattatttcaggatctgaatttagtgattacataagaaacttctaatgcgctaaagagtttaataacccatgtctaaacttcccttccataacttcagttttcgtccagaatctccgttactcagatcttttcaacggcttcttttctggctgctgaggaacccagaaacttctgactggctttgaagggttacttcccttgcattttttctctcctttcttatccttctttctcaggctgctcgctgtaatatccctcaaactggatcttctcctccctctgttccttctcccctcaccttcattttatcaaccaattccct

SEQ ID NO: 356687 - DNA, 615 bp, Homo sapiens
caagcacatcatcatttcaaagcactttcaagaaaaagcatcctctttcctagacaactaaagagggctgttaattcagatggaatcatctgaaagctttttcttatcactaacttacttattttcttttaatcccctccccaatataaatcatagcacctctgggtgatagtatttgaaaatgacaaaaagaacccagatgttgactaaaggccaaggttaattggatatgtgtgagactgtgctgtaacttcttattgaattgggtggctgagctgtatagttcttgtggcattatttcaggatctgaatttagtgattacataagaaacttctaatgcgctaaagmgtttaataacccatgtctaaacttcccttccataacttcagttttcgtccagaatctccgttactcagatcttttcaacggcttcttttctggctgctgaggaacccagaaacttctgactggctttgaagggttacttcccttgcattttttctctcctttcttatccttctttctcaggctgctcgctgtaatatccctcaaactggatcttctcctccctctgttccttctcccctcaccttcattttatcaaccaattccct

SEQ ID NO: 356688 - DNA, 571 bp, Homo sapiens
cttggttcttcagccataaaatggggataaaattgtccatcctgcagcattccgtcagtgataaagtgaaataatgtattcaccggtaacactgtgctcaatgcatgcttcatgcccagttcagcatcagctgcggatgttggctcctgtgagaaagaagctccatgggctctgctttttaaagaaagcaaatgacggtaccatcctaccaaatagatttcttccaaggaaagtatgttttttttwaaaaaaatagcaaattaatcatttagcttcttatttatgtagccttgaaaagaatttaaatccttcatttcaacagtacttctactctttcagaaaagaaatcactagaaagctgcctatggctgacaactccaatcctctccagaaggattttttttcttttaatctctattgggcatctataatgtgccccattatgccagcccaaccccctgatctaacttataccagtctcaatgcattttgattgctagattgtttttctaaatagatcagagatgggctaactgttcaccaaactattccctctccttcctgggcacct

SEQ ID NO: 356689 - DNA, 522 bp, Homo sapiens
aagcactgggattacaggtgtgagcccccatgcccagccctatgtttatcactttttgttgcatttgttcacacaatcattyttcccctctagacttaacctagttgagattaaagttgtatcttatctagcaagtcgtaatgtgtttggctttttttttttttttttttttttttttttgaggcagagtctcactctgttgccaggccagagtgcagtgatgcgatctcggctcactgcagcctccatctcccaagttcaagtgattcccctgcttcagcctccctagtagctgggactacaagcacacgccaccatgcccagttaatttttttttgtatttttagtagaggcagggttttaccatgttggccaggctagtcttgatctcctgtgcttcatacatatttgtagaaagaaggagggaatggaaagacttgggacagagatgtaacttgccagatgtaagaactctgagaaatctgagaaatcatataacatctctgattttaaatttattca

SEQ ID NO: 356690 - DNA, 590 bp, Homo sapiens
tctacatcaaaatcaaaatagtattatataagagtgatmtgtttaaactgtagcattatagaaatatactatagaaggaactattttatatttactttatagtattatatgaagttttggtttcttctttgagaatcatagtaatgtgatcagttagtcttcttttaaagaaacctctcatcccaactattctattttcaaaaaaaaactttttcttggagtgaaaatgtcaaacctattcctagctttgcagatgaaagtgttcagattccttggatttttactttggatacatgtattagatacctgggatgaataacttcagtttaggttatattaatattataataataagaatgtttaaaaacaatttatctaaatagtattttacatttgaaatattaatatataatttgaaaaatcaaaatgaaatccagagagttaagcagaaagtttttttaacataagattatattataaagcttctttaaatattttttctttgaaaagacaaaattaattttaaaaaaagtttagatccagcatgactgtcagctgaacagaagctgatcagtcttcaaatatcatag

SEQ ID NO: 356691 - DNA, 571 bp, Homo sapiens
cccttgtcctggccccgtggcctacagggtttgccctgctatgcatcctccaatgctgggcttcggattggccacagcttgcggatcctgccgtgccagcttgtacctccactctctcaatcagattctgaaagttaaaaagcacagtgtctatttgacaaatttgaggaaatcgggaactttgggtgacctaggctctctaaatgagatgacctatcaaataccagcagaggaaatgctggactcctaagcagaatttttttggaagaccttgcagatgaggcttaccaatttgagcactatgatgtctcctttgggaatggtgtcttaacaattaaacwgagtgaagatctaggaacctatatgacaaacagcagaccccaaataagcaaatctggttatcttccccatatagcatctgaataagttgcactttgtcttcaaatcaagttaaagtttgacctctagtttgttttgagcatctcagctaacgaagaacacatgattgtgtcggaggcacaatgcagcctgtgcagcatgaaaacctgaggccatgcaaggaaagatgtcc

SEQ ID NO: 356692 - DNA, 623 bp, Homo sapiens
gaaagaaccacagccctaagtgtgagtttatgagactgggctatctgccatttccaaatctcatcrgagcccaaggaggggtagagagaagtacatgttatggggagagaagttgggtatccctccctctgccaggccaacctgcacttttaactcgaccccactgtcacttggtagttaaatgaatgcatactctgggtgatgtttgtagggaaaagaaagagagatcagactgttactgtgtctatgtagaaagggaagacataagaaattccattttgacctgtaccctgaacaattgctgtgtcctgagatgctgttaatctgtaactttgccgcaacctctttgccctaacctctttgccccaaccttgagctcacaaaaacatgtgttgtatggaatcaaggtttaagggatctaggcctgtgcaggatatgccttgttaacaaaatgtttacaagcactatgcttggtaaaagtcatcgccattctctagtctcgataaaccagaggcacaatgcactgcggaaagccgcagggaactctgccctggaaagccgggtattgtccaaggtttctccccatgtgatagtctgaaatatggcctcatgggatgagaaag

SEQ ID NO: 356693 - DNA, 623 bp, Homo sapiens
gaaagaaccacagccctaagtgtgagtttatgagactgggctatctgccatttccaaatctcatcagagcccaaggaggggtagagagaagtacatgttatggggagagaagttgggtatccctccctctgccaggccaacctgcacttttaactcgaccccactgtcacttggtagttaratgaatgcatactctgggtgatgtttgtagggaaaagaaagagagatcagactgttactgtgtctatgtagaaagggaagacataagaaattccattttgacctgtaccctgaacaattgctgtgtcctgagatgctgttaatctgtaactttgccgcaacctctttgccctaacctctttgccccaaccttgagctcacaaaaacatgtgttgtatggaatcaaggtttaagggatctaggcctgtgcaggatatgccttgttaacaaaatgtttacaagcactatgcttggtaaaagtcatcgccattctctagtctcgataaaccagaggcacaatgcactgcggaaagccgcagggaactctgccctggaaagccgggtattgtccaaggtttctccccatgtgatagtctgaaatatggcctcatgggatgagaaag

SEQ ID NO: 356694 - DNA, 414 bp, Homo sapiens
tctgccaggccaacctgcacttttaactcgaccccactgtcacttggtagttaaatgaatgcatactctgggtgatgtttgtagggaaaagaaagagagatcagactgttactgtgtctatgtagaaagggaagacataagaaattccattttgacctgtaccctgaacaattgctgtgtcctgagatgctgttaatctgtaactttgccgcaacctctttgccctaacctctttgccccaaccttgagctcacaaaaacatgtgttgtatggaatcaaggtttaagggatctaggcctgtgcaggatrtgccttgttaacaaaatgtttacaagcactatgcttggtaaaagtcatcgccattctctagtctcgataaaccagaggcacaatgcactgcggaaagccgcaggg

SEQ ID NO: 356695 - DNA, 443 bp, Homo sapiens
cttggatcatcatctagcagaagtgatgtctgtctggcctcaagacatgcarggctcatgtgacacgttccacttggactcacaagctccctctcttatgatagaaggtgaggtcatagacaccaggagggtttagagaggtgtggagaacttttgatgggcctgtatatcttccttggagctagagcagtggcagagtacatctacatctactcacgaagttgttttgagaaacaaatgagctctgagatatatgctattgaccacagtctctggaacatcataaatactcaataaacagcaatgtattattaataaataataacaataatataagaataaacagaatgcaagcattggtactttattagtaacatactgccaacactcctcacaaacaattatgacaaagaccatttcaccattctgttcaagaacccatg

SEQ ID NO: 356696 - DNA, 443 bp, Homo sapiens
cttggatcatcatctagcagaagtgatgtctgtctggcctcaagacatgcagggctcatgtgacacgttccacttggactcacaagctccctctcttatgatagaaggtgaggtcatagacaccaggagggtttagagaggtgtggagaacttttgatgggcctgtatatcttccttggagctagagcagtggcagagtacatctacatctactcaygaagttgttttgagaaacaaatgagctctgagatatatgctattgaccacagtctctggaacatcataaatactcaataaacagcaatgtattattaataaataataacaataatataagaataaacagaatgcaagcattggtactttattagtaacatactgccaacactcctcacaaacaattatgacaaagaccatttcaccattctgttcaagaacccatg

SEQ ID NO: 356697 - DNA, 470 bp, Homo sapiens
ggagatacacacacacacatgcgtgcacacacacacacwcaattaatcatgatataatgttataagtgcagaaatagacatacataaaaaatattacagacttgaaaaaccaagtgcaattaattcttagagttgagtgtaaggagctgataagagaaaactgcatagaaaggttaatacttgagtagggtcttgaaggagtttgttaaatggaaaaaaaaattgtccagacagggcacaacacaaacacttgtggtatgttccacatgggatgtatcaaacaaccaccaataataacagcacttgcagagtgctcagctactgttctgtgtgctttatatgtattatctcagctaaccctcacagtgactctgtagaggaggtattgctgtgccattttacagaggcacagataagtaaaataacttgcctaaagttacactggtatttgatattgggtgggagaacca

SEQ ID NO: 356698 - DNA, 515 bp, Homo sapiens
ctgcaacctccatctcctgggttcaagcaattctcctgcctcagcctcccaagtagctggaattacaggcacccaccaccatgcccgaataatttttaaaaatatttytagtagagacagggtttcatcatgttggccagactggtctcgaactcctgacctcaggtgatccacccacctcagtctcccaaagtgcctggattacaggcatgagccgccgtgcccggcccttttcttaagtgattattctatttttggtgttttgcgtattggaaggcagtactgcataatggttaaaggtacattctctaaagccacactgtctatgttagaattgcaactgtttaatctcaaagttttgatgctttggtttcctcatctgtaaaataaagatgatcaatctgcctcatagggttgctgtgagaaataaagtaagatacatatctgcacttagaaaactgtctgactcatattaagtgctatgtaatgttactgctactatttttgtattcata

SEQ ID NO: 356699 - DNA, 601 bp, Homo sapiens
gttcttggcaaaattgagttctgtgtgttgataagaaatctacttcaacttcaatggcaagctgtggctgctccctgaatagttctttttttttgaatcctaaatggtgcccactattctcaccaacattaaataggtctgtgtcaaaaaaaaaattacattcttttttttattccaagaaaatgtttatcagatatagtgctaaaattcagcctccgcagaagcagaaaccaggctgttcagtgagagatatattgagcatgtcttctggatggaatagtaagtagttaggaagaaagcactaggacttatatcactcatcgtctggtgaattaattaacctgaggcttgactaatgggaagctattttgccattaagggtgattaattaacaaattcttctacttagaaattagtgcttatatatgcacatatgcatatatatatataaatatakcaatgtgtgtgtataaattgtactattaagcataattatttaaaatattattttcagactattttaaaatagtttaaatgatttaaattaaaagcaaagaaattccctcttcctggaagtttcagaggctaatgaatcgtcccc

SEQ ID NO: 356700 - DNA, 616 bp, Homo sapiens
acatatgcatatatatatataaatatagcaatgtgtgtgtataaattgtactattaagcataattatttaaaatattattttcagactattttaaaatagtttaaatgatttaaattaaaagcaaagaaattccctcttcctggaagtttcagaggctaatgaatcgtccccatggtcatgtgaaattgacattcagcagaaaaggaaatgaagccaggtgagtcttttcttgtccaaatcattaggtttaatgctacaggacacaggacaaatgaactatagaagtaattgtgagtcatggttttgtcacatgacatactctytatctaagcaatgggaaggagatgggtggcgataagagggagagggtactgtgaacagctgccagatgatttctgttatgtttagttcagcttgaattaggaagaaagaagaaaggaagaaagtcttgtgtttaatgatgaataaatattgttgtatcagatgttaagattgaccttaacaaaagcaagagcatccagaaatctaaaggaaggacattactcaggtgataatgaacctaaaacttgtgttcaagaaattcagattatttagcctgaaggtgattttagggat

SEQ ID NO: 356701 - DNA, 616 bp, Homo sapiens
acatatgcatatatatatataaatatagcaatgtgtgtgtataaattgtactattaagcataattatttaaaatattattttcagactattttaaaatagtttaaatgatttaaattaaaagcaaagaaattccctcttcctggaagtttcagaggctaatgaatcgtccccatggtcatgtgaaattgacattcagcagaaaaggaaatgaagccaggtgagtcttttcttgtccaaatcattaggtttaatgctacaggacacaggacaaatgaactatagaagtaattgtgagtcatggttttgtcacatgacatactctttatctaagcaatgggaaggagatgggtggcgataagagggagagggtactgtgaacagctgccagatgatttctgttatgtttagttcagcttgaattaggaagaaagaagaaaggaagaaagtcttgtgtttaaygatgaataaatattgttgtatcagatgttaagattgaccttaacaaaagcaagagcatccagaaatctaaaggaaggacattactcaggtgataatgaacctaaaacttgtgttcaagaaattcagattatttagcctgaaggtgattttagggat

SEQ ID NO: 356702 - DNA, 584 bp, Homo sapiens
gtgtgtgtgtgtatatatataaaaataatgaactaggtgctatatagcaaacccagaacgcataaacttttccttccaaaatagttaacactggagtagcagtgcagtgcatttcagaggtacacagaacagattcttttttcaaaatgcacgcacccaggtcctacacacaacttgttgaatcaaaaccacagagtggtgtactaacaaatttgcccagattattccaatgaaaccaccaatattttgaactactcttcaaaaaaaaagagggagcaaaatattaaactgcctgtctcagttaaatgtttaaaagcatattatgargtaaaacacaatcaactaggaccctccaataagatatataagcctctgcttaattttttaatggaaaggaaacattagcaaaatgcagtgtaatattaggagctcatttgaaggttcaactaatgcagcttgccctgatctctttgcagattcagccttacctttttgtctcctataactgcaagctaattggatgagaactgatgtgcaacccggtgatactcaggtgctgcagggtcttaaattatcagaggaat

SEQ ID NO: 356703 - DNA, 598 bp, Homo sapiens
ttatgtgttagagagaaaggagctggtcttgcgtatttatcacagcatcccccacctccagaaatgcttgggatgtagaagttggtgaatgtatatttgttgaacaaattaatgaatatgagtgtacttagagaaatctgcttggattttacaggggaggaagcatttaaactgagcacccagtgagagaaagacatctcaagttgaagaaaacactaaatgttagggcattgagaggacagtagaatgccatttttctagtgatctacaagcagcttggcttttctttttttaagagattgaaagggaagcgggagcaagagtcacataggcataacaggaagaatgtatcaatccgtgcccaatggagatcaacacaagaattttacccagtaaaggagaactatcagtggacatctaagtgtcggtgtttctcctaactataggatcattgaactaaacagaatgtgttaagtatagcatttagacagctcactgattctcaagrtagagaagcagacctggtaatcctttgggactattagaaaaattaatgatttagtaaagaaaggagttacctgaggaagaggcacactat

SEQ ID NO: 356704 - DNA, 614 bp, Homo sapiens
tatatatttaagtgttgcaaattcaaaatagytttataaatatgatgtaataattcagaggagatgaattatttgcttgaaatttgcctgttctggtcaaagctgctgctctaatctgaggcactaagtgtgattttgttctgtttaacttatttataatcttatactttttagagttgtgcttttgaaacaaagatgattcagcaacccagaaagacaaaaggggtggtcatatttcactctcccctgattctgtgtaattacaaccaagcacaaaaaggcaacagagaaatgggtctttgattgtgagaaatacctggaaaataacattagtaaattactttgcagtgtctgttgtgaatttgtatttttccacaagtggccccaaacatcatactatatattaagcaatctaatgtttaaaatagtatttattatattgttaatgtgatacaattgaatgaggatgttggattggactttcaactattcaagaatgacggatgaagtctaaagctaaaaatccgtcagttacccatatgctgaaaactgctacctttgaggcttcaaacacttgcatcgtctgcccaagcactatccgccatcattccaca

SEQ ID NO: 356705 - DNA, 566 bp, Homo sapiens
acaattgatcagcattaacatgaaaacagagatcttaagactgacaaaatagactctgcagcaataagatgccaaattccaacctgactttcatatagcatcacatggcagactgcatgtgatgaaaagaaattactgcatgaaagaaattactttaccccaaaatgtatttctttgacatattttgaaatggctctgcaaaggggtctcttgtaggggaagtatacattatatagcgaatcctcttcccttaccaggtctttttctgatcctgaataaattagctgacactctagcaccttttaaaggtctgaataagaaatatttgccatctattgcctctgaaggtggccatctatgagacttcmtctacatagtaagtaccttggtctccacaatgccttatcttaatccagacactcctttctattgattctaggtctttagataggtctctttcaaccaattgccaattagaaattcttttagttcacctatgacatgtaagccccactcccactttgaggtgtcccacatttccaaaccaaaccaatgtacaccttgca

SEQ ID NO: 356706 - DNA, 613 bp, Homo sapiens
ttcaagctgttgaattgttggtaacttygtgagaggatgaatgtacaaatggataatggccagaccataaataaaaatagaaacctgacccacaaactctgcaacagccagtccaggaagccaaaccacaagctattcagcagttggcccaaaatgatcaacactctgtcaataactgtcaacttctctagttttgttcccacttccaatttaggaccaaccagagaaagccaaatatgcgtctcaactcgaacagataaaatgccccacttcgactttgactgcctacagcttctctatgccaataatctccagttaaaccttccattttttctactataaagtttctttactcactggcccacctttgagccttagccaaattcaagtaatagtggctgactgtctctgtatagcaaactctaaatacttagcctttgtgtattctcatgtggatggtcttcctttatttccactataggagagggataaaaaaacaacttttttctctatttatctgaagttctctagcaagggccctgtaaactagactagcaaaagacagattaacaacagaaaaacatatggaagtttattaatgtgtgcatcacac

SEQ ID NO: 356707 - DNA, 455 bp, Homo sapiens
ccgcagtactgaaccaggcattgcaktttcctcacacaacagcttgcacttttgtaaataatgcctttaataaattctcctcagattacctgatttgagtatatatcatctgtttcctgcctggaccctgattgatacagtctctaagtggtaactaaaacattttaaagtatttgaagttttaaactgcacccatttgttactttaaatttcctaagtgatagtagtttgggaggaactgaataagaaattcttatctatttttttcaacaaagaaattcctgtttacttgcaactattttaaagttaagtaactacttagaattgaggagaaaataataaagcttttcttttgagaaatggaagctgtcaagactttattaccgcgaggaagcactgaaagtaatcaaggctcttctgcaaaatgtgatgtgtacctttctgtcaaataccat

SEQ ID NO: 356708 - DNA, 455 bp, Homo sapiens
ccgcagtactgaaccaggcattgcattttcctcacacaacagcttgcacttttgtaaataatgcctttaataaattctcctcagattacctgatttgagtatatatcatctgtttcctgcctggaccctgattgatacagtctctaagtggtaactaaaacattttaaagtatttgaagttttaaactgcacccatttgttactttaaatttcctaagygatagtagtttgggaggaactgaataagaaattcttatctatttttttcaacaaagaaattcctgtttacttgcaactattttaaagttaagtaactacttagaattgaggagaaaataataaagcttttcttttgagaaatggaagctgtcaagactttattaccgcgaggaagcactgaaagtaatcaaggctcttctgcaaaatgtgatgtgtacctttctgtcaaataccat

SEQ ID NO: 356709 - DNA, 580 bp, Homo sapiens
aattacaaattaatatttcccaaaaatagctttgcagtatactctagagggaaaaaaaggagaggcgataagaagacttgaagcttaaattggtgtagaaaaacaatgttaagcaggagtttatactacaggattttgtgaagcttattatacattattgttcatcttaaatctctataaagggaacacagaaaattatttttctcacaatactactagttttaccaggaatcgtggtccatgaatcactcattagaataattatcataggcaataatgtggcacagccttctaagtagtttgagtcataaaatactaacacataaaaaagaaccttggcyggatgcagtggctcacgcctgtaatcccagcactttggaaggccgaggtggggggattacaaggtcaggagtttgagaccagcctgaccaacatggaaaaccctgtctctactaaaagtacaaaattagctgggcatggtggtgcatgcctgtaatcccagctactccggaggctgaagcaggagaatcgcttgaacctgagaggcggaggttgcaatgagctgaggtcgtgccattgt

SEQ ID NO: 356710 - DNA, 600 bp, Homo sapiens
ttttaaaaatgagattaagaatgataaataggttagaggataaatgaagattaaataatgttaaacrtcaacaaagttcttagctcaatgccttacacatcaaaaaaataaaataaaaaggtatttttattatttagattagaccttagctgctaccatgttatttataaaagtggggagataataatattttcatgttacagtaaaggaaacctctatgtaaagtgtgatttctctaaatctgagaacattttcaaaggatgtattcagtattcagaatccctgccaaaagtttactcttttgactcctacacatgtctctttcttaattttgaggctgttttattaagaaattattatttgaataagtacatgaaattcttaatattaccaggacaaataacagacatttttatataggaacaaacttctgaatttgaaagtcttttatgggtccagtctccaggagaggagaccaccgtattgctaaaccttagagtgtaatttaaaaagtcagtgataaagacagtggtgacaacatccaataccaagagcatgatgcatgctgtaccctttactctcttgaaatgccttaattaa

SEQ ID NO: 356711 - DNA, 601 bp, Homo sapiens
attattatttgaataagtacatgaaattcttaatattaccaggacaaataacagacatttttatataggaacaaacttctgaatttgaaagtcttttatgggtccagtctccaggagaggagaccaccgtattgctaaaccttagagtgtaatttaaaaagtcagtgataaagacagtggtgacaacatccaataccaagagcatgatgcatgctgtaccctttactctcttgaaatgccttaattaaaaagagggttcattcatgcattcattattactcattagaatcaagtttgtcttttagtaaaccatgtggtacattattttctacaactcataaaaaacaccttattctcacttttttgacataaatcaatgcgtgatgtgagaaagtgaagatttcaataatatttctactcttattaaattttgtattaaatagactgtttttagagcagttttaggttcgcagtgaaaatgtgcagacagtagagagttcccataaaccagctgcttctccyaccacacacaacctccataactatcaacatttcactccccagtagtacactggttacaactgacaaacctgtgttgaca

SEQ ID NO: 356712 - DNA, 533 bp, Homo sapiens
agttcccataaaccagctgcttctcccaccacacacaacctccataactatcaacatttcactccccagtagtacactggttacaactgacaaacctgtgttgacacatcattatcacctgaagttcatagtttattttaggattcacccttggcactgtacattctttgggttttgagaaatgtaaaatgacatgcattcactattgtagtatcacacagcacaattccactaccctaaaaatcctttgtactctgcctattcaccccttcctcctctaaccttagcaaccactgaaatgtttattgtctccatagttctgcgtttyccaggatgtcatatcattggaatcacatagtacgtagccctttcagattgacttctttcactcagtagtatgggtttaaggttcctccatgtctttttgatagcttgatggctcatttccttttatcactgtatagtactccattgtctgaatgtgccaccatatttttatccatttacttattgaagggcatcttgggtgctcc

SEQ ID NO: 356713 - DNA, 610 bp, Homo sapiens
ctgtaatatctattttttctcttgaattggattactatataagtcctttccctcttgcatgttaaatggctatctttagctttttctctttgtcaacagtctgtcatccatgcttacttactggtgtttgtttaaaaataattaaaaaatttatctgtagttgtattgttattggcctccgtttattttcttatcaagaaaatctttatttttatctcattttgctcgctgttttgcttggtatttctttatcttatctttaaacatttatttcttaaattcctgacattatttagttcatctatagcttaaagcacctctaggaaacgtccctcttttctgaaagcttatcttttcttcaagaatagattcttcatgtatttttggtatagtatagttgttttcccattattttactgcatatgctaggagagatgtattagacctttccctctctttgtctcactcctttatgctggatactcttaactgggcagtggtgtcaggtctaaaacmgagtgggtggatcctcaatgagtctctttccaatccagttgtaaactgtttgtcttctaatttaaaacttgaagatagtgtagagtgggaagca

SEQ ID NO: 356714 - DNA, 522 bp, Homo sapiens
tggtattctggtcctgtgaaaagatacttttcggacacaaataatgttttcaatttaacttgaggcattatagcttttcattcagttcctgagtcagccagattgttcttttatcctattttaacccattgtttccagtaactatgaccactttctccttttgccctgctcttgctctctttatgatttgggaagaattttatgagtgtcccttcccccactacctrctacctctgagaatcttagcttattttcattcattttcaccttttctttggctaaatctctagtttggggattttacatcccaaattttgggttttacatcactacttattgccagagacaattagattgggaaattaacatccttttgtttttttctctttattttccttcttttctttttttttttaacttttatttttaggtttgggggtacatgtgaaggcctgttacataggtaaacacatgtcacaagggttggttgtacatattacttcatcacccaggtattaagtc

SEQ ID NO: 356715 - DNA, 522 bp, Homo sapiens
tggtattctggtcctgtgaaaagatacttttcggacacaaataatgttttcaatttaacttgaggcattatagcttttcattcagttcctgagtcagccagattgttcttttatcctattttaacccattgtttccagtaactatgaccactttctccttttgccctgctcttgctctctttatgatttgggaagaattttatgagtgtcccttcccccactacctgctacctctgagaatcttagcttattttcattcattttcaccttttctttggctaaatctctagtttggggattttacatcccaaattttgggtwttacatcactacttattgccagagacaattagattgggaaattaacatccttttgtttttttctctttattttccttcttttctttttttttttaacttttatttttaggtttgggggtacatgtgaaggcctgttacataggtaaacacatgtcacaagggttggttgtacatattacttcatcacccaggtattaagtc

SEQ ID NO: 356716 - DNA, 583 bp, Homo sapiens
taacctacctgccttcttgaaatactcttttccctctgattccaggatactatgcttttcctcatagttctctggcagcaagtacggaatatttttttcttgaccttagagctagattcattttctacatttctccaagttgatcatcttctaggaggctaatctatctgtatggacagcatcaatgggcttccttgtcacctgacttcccattgatttggccactgtaaggcaattgctccgccttccagagggaagcctgggaggggttgagytcctttaccaaggccacggctcctatccagcagtcctctcctgaagctacagtcacagcctcagctctatctacattttggtattctaaattttggtattctctcccttcccttgcccctttcaaagctagggggcatatttccacccctttgctatcacactatccatttttggtttccctaaactctctttcattaatctccctaattaccccatttgcctgtgccatttttttttctcctagaactgagattatctattccctctagattcctgaacacttttttatgaagtgtcacataaatgt

SEQ ID NO: 356717 - DNA, 583 bp, Homo sapiens
taacctacctgccttcttgaaatactcttttccctctgattccaggatactatgcttttcctcatagttctctggcagcaagtacggaatatttttttcttgaccttagagctagattcattttctacatttctccaagttgatcatcttctaggaggctaatctatctgtatggacagcatcaatgggcttccttgtcacctgacttcccattgatttggccactgtaaggcaattgctccgccttccagagggaagcctgggaggggttgagctcctttaccaaggccacggctcctatccagcagtcctctcctgaagctacagtcacagcctcagctctatctacattttggtattctaaattttggtattmtctcccttcccttgcccctttcaaagctagggggcatatttccacccctttgctatcacactatccatttttggtttccctaaactctctttcattaatctccctaattaccccatttgcctgtgccatttttttttctcctagaactgagattatctattccctctagattcctgaacacttttttatgaagtgtcacataaatgt

SEQ ID NO: 356718 - DNA, 583 bp, Homo sapiens
taacctacctgccttcttgaaatactcttttccctctgattccaggatactatgcttttcctcatagttctctggcagcaagtacggaatatttttttcttgaccttagagctagattcattttctacatttctccaagttgatcatcttctaggaggctaatctatctgtatggacagcatcaatgggcttccttgtcacctgacttcccattgatttggccactgtaaggcaattgctccgccttccagagggaagcctgggaggggttgagctcctttaccaaggccacggctcctatccagcagtcctctcctgaagctacagtcacagcctcagctctatctacattttggtattctaaattttggtattctctcccttcccttgcccctttcaaagctagggggcatatttccaccccyttgctatcacactatccatttttggtttccctaaactctctttcattaatctccctaattaccccatttgcctgtgccatttttttttctcctagaactgagattatctattccctctagattcctgaacacttttttatgaagtgtcacataaatgt

SEQ ID NO: 356719 - DNA, 583 bp, Homo sapiens
taacctacctgccttcttgaaatactcttttccctctgattccaggatactatgcttttcctcatagttctctggcagcaagtacggaatatttttttcttgaccttagagctagattcattttctacatttctccaagttgatcatcttctaggaggctaatctatctgtatggacagcatcaatgggcttccttgtcacctgacttcccattgatttggccactgtaaggcaattgctccgccttccagagggaagcctgggaggggttgagctcctttaccaaggccacggctcctatccagcagtcctctcctgaagctacagtcacagcctcagctctatctacattttggtattctaaattttggtattctctcccttcccttgcccctttcaaagctagggggcatatttccacccctttgctatcacactatccatttttggtttccctaaactctctttcattaatctccctaattaccccatttgcctgtgccatttttttttctcctagaactgrgattatctattccctctagattcctgaacacttttttatgaagtgtcacataaatgt

SEQ ID NO: 356720 - DNA, 590 bp, Homo sapiens
ctttcccgaggccttcctgaaggtgatgctgatccatcctcctcttagctctttgtgaattaaattcccaaaagacagaataggattggaagagcttggcacaagtgccctctccctagaccactcattgcttcctgggctgtattttgattggccatttcttaccatagcatatggcaaagagaaaattgcatgtctccataacttgcacatgaaagagaagccattacagggatgcagattactttatgttcaaccttgaattaataacaacaacggctgtagagagtttttgaaaagtacgtctcaaggtgggatacctgaggagatacagaatgacatcaaggctccyggaaacatcagcaaacatcagcaataatgtggaacctgaagtccaacgaaagtgaacatttccctgagtcatacctgtcagggatttcccaagctacattctgcattcggtgtagtctgatgtttgtggtcatgcttatgttatatactgagcaaaccatggggactagagccaaagcccttcttacagactgttgccataagaaatcagatttctttctagatgggcttcctactag

SEQ ID NO: 356721 - DNA, 568 bp, Homo sapiens
taatgcaatcatcatttgctaatacagcaaatgtagatttttttwtaaaaaagtagaataaatcaaagaatttcaggagcaggtctaatgaggaacagaggtagggaaaaataaactgaatttctgtttctttgcatttggcttcagagacatcttatttcaaagtacaaccgtgagcatatttgtggtatgcaaatatatatactcagctcaggaaagtgagaggcagtaggaggtaggcaattaaagaggcagaatataaatttgacaagtgtaggtgaaatcaatagtgatatagaaaactaaatagagttttgattaatgtaattattttttgaaatccacttacaaaataactgcctgtgaagctagagctgaaatataaagtactagccccacactacctcctctgtattttgtgtgctctgatagtttcacataagctgtgtgtgtgtgtgtgtgtgtgtgtgtgtgtgtgcctatgaaataaacttcttctttgtgtggaaaaattaggatgtcataaaacgtattttcaaataagagcagttgtaatatttgctgaagt

SEQ ID NO: 356722 - DNA, 568 bp, Homo sapiens
taatgcaatcatcatttgctaatacagcaaatgtagattttttttwaaaaaagtagaataaatcaaagaatttcaggagcaggtctaatgaggaacagaggtagggaaaaataaactgaatttctgtttctttgcatttggcttcagagacatcttatttcaaagtacaaccgtgagcatatttgtggtatgcaaatatatatactcagctcaggaaagtgagaggcagtaggaggtaggcaattaaagaggcagaatataaatttgacaagtgtaggtgaaatcaatagtgatatagaaaactaaatagagttttgattaatgtaattattttttgaaatccacttacaaaataactgcctgtgaagctagagctgaaatataaagtactagccccacactacctcctctgtattttgtgtgctctgatagtttcacataagctgtgtgtgtgtgtgtgtgtgtgtgtgtgtgtgtgcctatgaaataaacttcttctttgtgtggaaaaattaggatgtcataaaacgtattttcaaataagagcagttgtaatatttgctgaagt

SEQ ID NO: 356723 - DNA, 568 bp, Homo sapiens
taatgcaatcatcatttgctaatacagcaaatgtagatttttttttaaaaaagtagaataaatcaaagaatttcaggagcaggtctaatgaggaacagaggtagggaaaaataaactkaatttctgtttctttgcatttggcttcagagacatcttatttcaaagtacaaccgtgagcatatttgtggtatgcaaatatatatactcagctcaggaaagtgagaggcagtaggaggtaggcaattaaagaggcagaatataaatttgacaagtgtaggtgaaatcaatagtgatatagaaaactaaatagagttttgattaatgtaattattttttgaaatccacttacaaaataactgcctgtgaagctagagctgaaatataaagtactagccccacactacctcctctgtattttgtgtgctctgatagtttcacataagctgtgtgtgtgtgtgtgtgtgtgtgtgtgtgtgtgcctatgaaataaacttcttctttgtgtggaaaaattaggatgtcataaaacgtattttcaaataagagcagttgtaatatttgctgaagt

SEQ ID NO: 356724 - DNA, 556 bp, Homo sapiens
cttattttttgtagaacaaaatataacatttaattagaatttcaaaatcagagtctatttagagaaagctcttcaatggttattccaaatccaatttgtaaaacataaattgtcatctagatttaagtgcttttccatcaaaatatataatgaacttggctgaggttatttcaggacatcagcatgaatataattaatatgtggaaatgtattaaaatgaccatgagaagagtaamgttaaataatgaaaactcataacacaaggtgggttgtcagggcttagcttaacattcataatattcctcaattttagggcaacaatgttattgaacatgaaaactatttcacatgactctgcaagtttaggttaaagaaattgataaaaatcacccatttgctcattttctgtaaaagtgaatattaacactctgaatacctattctcagacatccttatgtgcccaggacatagaacaccagcagaagcaatgctaaatttgggtatgtactcccaatgtgactagtctgtaaatcttttcaacgatgcaacttagcaa

SEQ ID NO: 356725 - DNA, 605 bp, Homo sapiens
ccatggtaagcacctcaccatgaaatcaacatttcccagacttttctcagccttttttgcctgcttatattctaggcatagaatcaactttgcttctgaggacaactgtatcttactttagccttcaaaataytcccacaattgaaggggagggctccttgcagcaacaaggctagcaactggggtgtgaaaactgctattctccttctgaatgggtcagctgggaaatcaagggaaatgaatcattgaaaacagctgtgtgggttgaccatggcttggcagttggccattgtttgccagtaaaagtagcagcagaaatcaacctgtactgaatgctacccgtacatttggctcaaccaatttcttagaagctgatttaaagattcttcccaaatttactattaacaaaaaagcctgtaccacagaaagaaatatttggattgcctgtcagtttgcagtatttatgtcaactcctgtatgttccactttggcagctttggcaagtaaaaactaaacaaaataaaaatgatgccatgaagtaaaacacacattctcttttgccagatttttagtatgttcctaatttctaaaccaaaaatttggtc

SEQ ID NO: 356726 - DNA, 501 bp, Homo sapiens
atggcaaaaaaaaaaaccctcaaataacctgattaaataatggacaaagggcttaaatagatgtgtctcccaagaagacacaaaaatcttgacttttaatgttggcatcaaattagaattctwtaaaacattgcagtctaaacaaaagacagctgcaaacttgatttaatcattttgttaactctaatctatagtgtcagcatgcaaattagaattgtagagttggaaaccaaatattaccatccccaatattaagctatatcagataactgctgatgctcatctttgatatgattcattattcttagaaagtttcatgcatttttcttctctgactacatcatcaaaggtcacatgtgtacttataaagaatgtgtattttgcaaatgttaagtattaggttctacatatagaaattcagccaactttgtgtttcaatcttttgtacccttattgatcttttatttacttgttttatcaaactctgagagtaacgtatga

SEQ ID NO: 356727 - DNA, 626 bp, Homo sapiens
atttcttcttggtttggatccattgcaggtgagttagtgtggtcttcagggtgttaaagaaactttctttgtcatattaccagaattgtttttctggttccttctcatttgggtagactgtgtcagaggaaagatctggggctcaagagccactgttcagattcttttgtcccatgagggaatcctttgatgtggtgctctccccctttctctagggatagtgcttctcgagagctgggctgcagtgattgttatttctcttctgggtttagtcacacagcacagctactgggctctgggctgatgctggggaatgtctgcagagtcctgtgatgtgatccatcttcaggtctctccacygtggataccaacacctgctccagtagaggcagcaggggagtaaagcagactctgagggtccttggttgtagttttctttagtgtgctggttttctcaaatgctggttgtgctggcagcgaagttgtcacatggacagactcaggaccgctggttagccacgaagttacaggcagtggaattagcagttgttttctcttttcttggagtggggttgttcacttatgagttgctgtaatggcttgagttggttggcctccagccagca

SEQ ID NO: 356728 - DNA, 626 bp, Homo sapiens
atttcttcttggtttggatccattgcaggtgagttagtgtggtcttcagggtgttaaagaaactttctttgtcatattaccagaattgtttttctggttccttctcatttgggtagactgtgtcagaggaaagatctggggctcaagagccactgttcagattcttttgtcccatgagggaatcctttgatgtggtgctctccccctttctctagggatagtgcttctcgagagctgggctgcagtgattgttatttctcttctgggtttagtcacacagcacagctactgggctctgggctgatgctggggaatgtctgcagagtcctgtgatgtgatccatcttcaggtctctccactgtggataccaacacctgctccagtagaggcagcaggggagtaaagcagactctgagggtccttggttgtagttttctttagtgtgctggttttctcaaatgctggttgtgctggcagcgaagttktcacatggacagactcaggaccgctggttagccacgaagttacaggcagtggaattagcagttgttttctcttttcttggagtggggttgttcacttatgagttgctgtaatggcttgagttggttggcctccagccagca

SEQ ID NO: 356729 - DNA, 623 bp, Homo sapiens
atgcttatttaggtagatattaatggcttctcaaagaatctatgccaaatctagagaataagaaagggtagtagtatattcttttctttstatatcagaaaaacactttaatattttcatcctccactccagaacattggctttctttcctccagatatgaaaattcaagcatgaaattgttattaaagacctcattattcctcttcaaatagcacacaagacctgaaatatagtttaattatttaaatgggtcacgttgtaagtaatgattgactagtacattgcttacttagaaaaggaaatcatattggtacatttaattctgttgagtagtgagcagtgacctctttttgattaatggtttcaccctaagcacttttcattttgatctctaattaggtataattagaacaatccaaacttttcaacttagataactctcttggcttgcttatgtcttcattattttgtctggaaaactacatgaaacaaaggcataacattaaaaaaagacattgcaagttttccagaaatttctagataaaaacagaaataatgtattttccttttgctactatgcaaagattgatcattcaacagatgttccaggcattgcctgaaa

SEQ ID NO: 356730 - DNA, 623 bp, Homo sapiens
atgcttatttaggtagatattaatggcttctcaaagaatctatgccaaatctagagaataagaaagggtagtagtatattcttttctttctatatcagaaaaacactttaatattttcatcctccactccagaacattggctttctttcctccagatatgaaaattcaagcatgaaattgttattaaagacctcattattcctcttcaaatagcacacaagacctgaaatatagtttaattatttaaatgggtcacgttgtaagtaatgattgactagtacattgcttacttagaaaaggaaatcatattggtacatttaattctgttgagtagtgagcagtgacctctttttgattaatggtttcaccctaagcacttttcattttgatctctaattaggtataattagaacaatccaaacttttcaacttagataactctcttggcttgcttatgtcttcattattttgtctggaaaactacatgaaacaaaggcataacattaaaaaaagacattgcaagttttccagaaatttctagataaaaacagaaataatgyattttccttttgctactatgcaaagattgatcattcaacagatgttccaggcattgcctgaaa

SEQ ID NO: 356731 - DNA, 605 bp, Homo sapiens
catttaacttgtatattaaagacagcatatgggacaattgttttggtgtcaatgtctctctccctgtttccgacaataacccgacccttaacaatcctttgccccacccaacccaacatgacataaattccttttagtagcttctcctttaagttattaattttaaaagttattatgatcatatttcaaacattttcaaaattagaaagtataatacaatgagctttttttacccatcacctcacttcaatagttgctgagattttgccatatttcttctctcttcctacttactgagtttacattgctgaagtattttaatgccaattctagacctcctgtcacttccttactacataatttagtatgtattattttaaagtatggacattttcttaaatgaaaaaaacaaaatcttggtggaaagagctagaaaaaattccttgtttcctgatgaaaatctgccttctgtctttayagagttcttgagtcagaaaaattaaactgagctggataatatacaccgcattgtcctccaggaaagtgttttaccaaatagcaattcccctcactttatctttggctcaagtttttctaaaagagaa

SEQ ID NO: 356732 - DNA, 609 bp, Homo sapiens
ttttttctcttgacaatctagaattttaaaagaaaaaagtaatttgtactttgtttattctgtttcagcatttccaacccttccttggagcaataactctagagctctctaaacatctgcctgaaggggagaagggccatgggtaacaggaaatacattagttggaaagcactttggttggtttttccaacataatattttaccayattccaacataaagtaattaaccagcaatttctagaatgaaacagtgcttgaaattaaagagaacaacaggcattataatagagataaaataaaataaaattttagagaatgaccaacaccataatgtaagcctagagacatcagggggaaggggaggggaataagtccaaaatgtcaatgaagcccaagaagctgttaattttctatcaattaagcatcttctttgggtcatgttcagtgctatgtcctttttaaaaattaacttttaagctctccaaaaatctacaagataggtttcattatctccatttttgcataagggtaaaatgtaagcccagatgaaagtgacttgttcaaacttcccccactccccataatatgcttcagacctggaaagattta

SEQ ID NO: 356733 - DNA, 478 bp, Homo sapiens
atttggaacttgagttttggcaagccttgccatgatgggctaaagtgctctggggttctaaattaatctgaaaggctgtctaggccacaaggactgcaattcctaggcaagtactagtgctgtgctaggctcagagccagtggacatgggggaaacacaacctaktgacacaccagctgcgatggctaaggaattgtttgcatcacccctcccccaaacctgggcagtgcagctcacagcaacaaaagtgactccttccttctgcttgagatgaggagggaggagggagtaaagaggactttgtcttgcacctcggataccagctcagccacagtaggataaggcactgggcaatcataaagcccttgttccaggccagagctactggatggcatatgtagacacaccctgggccagaagggaaccttctgccttgaagggaagaacccagtcctggcaggatttatcatttgctgac

SEQ ID NO: 356734 - DNA, 581 bp, Homo sapiens
cctggccaaaggggactcacccatcgtagcatttggaacttgagttttggcaagccttgccatgatgggctaaagtgctctggggttctaaattaatctgaaaggctgtctaggccacaaggactgcaattcctaggcaagtactagtgctgtgctaggctcagagccagtggacatgggggaaacacaacctagtgacacaccagctgcgatggctaaggaattgtttgcatcacccctcccccaaacctgggcagtgcagctcacagcaacaaaagtgactccttccttctgcttgagatgaggagggaggagggagtaaagaggactttgtcttgcacctcggataccagctcagccacagtaggataaggcactgggcaatcataaagcccttgttccaggccagagctactggatggcatatgtagacacaccctgggccagaagggaaccttctgccttgaagggaagaacccagtcstggcaggatttatcatttgctgactaaatagcccttgggccctgaataaccagtagcaatacccaggtagtgtgccttaggctttgggcatactgag

SEQ ID NO: 356735 - DNA, 486 bp, Homo sapiens
acgttgtatttgagaacagtaggagactgttagaaaaaataaaggaatggaaatacagatttttagaaaagaataaatgagaacaactaaaaagaaagcagttagtgttattagctactttaacattcagttttccattaagtaaaaccagtcaccttgctcggggacattctgcttcctccagttgctgccactccacacagttcttctggttctgaggaacaatccagagagaggctctaatcttgctgagccagccactcctttctctctcatgacagagataacacacttcccacagctccacggtgtgctgaatcctggagagagacctcctccaggcacagggcatccttcctgtcatcccagggatgctattttctgttcctagagctctgaygcttaaaaatgtgctttggatctcaagcaagtcagtttgaaaattaggtttaaatgtaaccacactaacttctaaaaatagaattc

SEQ ID NO: 356736 - DNA, 536 bp, Homo sapiens
caccttggtgcaaaatatgaatctgacgtaaagactttgaggtttttatgtaaccattctycctggaagtgcccttgaagtccttgttcctacctctcctaggcacattgctgctaggagagagacactacttcaaatctcctctcaggatcatccttgctgccagcactttgtgcaacaaaagctctgctcagcagggtgtggaatgtgtacaggttctttataaaacatcagggaatgttttccttaaaacactttctttgggcttaagattgtagccttgtctgaagttctgcatctggtatgggtcagaagcctagtgagctggaactacagtagaccacaaaggataaggaagtcagagaagcagaaaagaagagttgagtaatgccagccatgcaccatgatcaatgaaaggaacaatctagcttcacctcagttattccggacacaaataaatgtccacttataaacctttagagctggattaagttcaggtccaagtaatacattaaatttaataggtgagtgcttgc

SEQ ID NO: 356737 - DNA, 582 bp, Homo sapiens
tatgaatattatatttggcttacatttactttttcccctattttcagctgtttgaatttatatttatccctaggtaatatatttcagtttttccctatactacttagaagtcctttagtattgaaaacagttatcctatctcacaatatctttcttcttttaggctaaacattctcaattccttcagccattctccccaagacatgatttcaagtcttttcactgttttcttaaacttgactgaacatgctgctgattatctaaatctgtttggtcctaraatcataaactgaaaaaatattataggtaagacctgattagtgcagagtaaaattgaattatcaatttttgttttcaagatattcaatcttgattaatttaatctaatactgcattaccttttccggtcacaacctcacactactgatgcccattatatttggctgcataggaattagtataatagattcttttgaatttctacatttttctgaattcctttcacacctactctgtttcatatttctaaccatatttttcccttgctccacttttaccatctagttattttgttgtagtgta

SEQ ID NO: 356738 - DNA, 604 bp, Homo sapiens
caggacatcgagaaggaaagacagacatgaaatgttggagagaaaygataaattggaattcagggggacaggctggaaatcacagaggcaaactgtttttcagcctctgtcttgaagcctccaaattcaatgatgccagtgacctgcaagagaaactgctttgcttcatcatgttgctaaacatgtaactgacccaggagctggagaaactgaaggaagcaaatctggtgagagctgatgaagctgcatgcccggcttctgctcaatgtcaataatgtgagccagagagcagaaatcacttggtgagctgcagtggtgcctgtgctctgcacttttgcctgcaccgatcttcagtgctttaaaggaatgtgattgacgcttaacttcagccttccaaatcccatcatgtgtgtttctggtggcccacgctaacctgaaattatgcagagacagggatcctgggaaacatagctcctgcttagctaaatttgcacagtgcaaatctaccatacaaactcattttttttaccctagagtcagtctgaattcatagttctatagtttttttctctcattctaaatctttaccaggttcctgaggtcc

SEQ ID NO: 356739 - DNA, 604 bp, Homo sapiens
caggacatcgagaaggaaagacagacatgaaatgttggagagaaatgataaattggaattcagggggacaggctggaaatcacagaggcaaactgtttttcagcctctgtcttgaagcctccaaattcaatgatgccagtgacctgcaagagaaactgctttgcttcatcatgttgctaaacatgtaactgacccaggagctggagaaactgaaggaagcaaatctggtgagagctgatgaagctgcatgcccggcttctgctcaatgtcaataatgtgagccagagagcagaaatcacttggtgagctgcagtggtgcctgtgctctgcacttttgcctgcaccgatcttcagtgctttaaaggaatgtgattgaygcttaacttcagccttccaaatcccatcatgtgtgtttctggtggcccacgctaacctgaaattatgcagagacagggatcctgggaaacatagctcctgcttagctaaatttgcacagtgcaaatctaccatacaaactcattttttttaccctagagtcagtctgaattcatagttctatagtttttttctctcattctaaatctttaccaggttcctgaggtcc

SEQ ID NO: 356740 - DNA, 592 bp, Homo sapiens
ctcaatgtcaataatgtgagccagagagcagaaatcacttggtgagctgcagtggtgcctgtgctctgcacttttgcctgcaccgatcttcagtgctttaaaggaatgtgattgacrcttaacttcagccttccaaatcccatcatgtgtgtttctggtggcccacgctaacctgaaattatgcagagacagggatcctgggaaacatagctcctgcttagctaaatttgcacagtgcaaatctaccatacaaactcattttttttaccctagagtcagtctgaattcatagttctatagtttttttctctcattctaaatctttaccaggttcctgaggtccactcttcagctctgttttggggagcacaggcctgatggctcttccctggcattgcagacacagattcagaaagacatgctgtggaggatggaaggaaaatgccatgttggaatcacagccttccccggattaggttgcttctccccttccccacttggggctgcagcatggttctcattgtagtttccaagtaaaccgcccttacttcctggcttcctctaatcagggtggcagggggatgtgtccacc

SEQ ID NO: 356741 - DNA, 604 bp, Homo sapiens
caggacatcgagaaggaaagacagacatgaaatgttggagagaaatgataaattggaattcagggggacaggctggaaatcacagaggcaaactgtttttcagcctctgtcttgaagcctccaaattcaatgatgccagtgacctgcaagagaaactgctttgcttcatcatgttgctaaacatgtaactgacccaggagctggagaaactgaaggaagcaaatctggtgagagctgatgaagctgcatgcccggcttctgctcaatgtcaataatgtgagccagagagcagaaatcacttggtgagctgcagtggtgcctgtgctctgcacttttgcctgcaccgatcttcagtgctttaaaggaatgtgattgacgcttaacttcagccttccaaatcccatcatgtrtgtttctggtggcccacgctaacctgaaattatgcagagacagggatcctgggaaacatagctcctgcttagctaaatttgcacagtgcaaatctaccatacaaactcattttttttaccctagagtcagtctgaattcatagttctatagtttttttctctcattctaaatctttaccaggttcctgaggtcc

SEQ ID NO: 356742 - DNA, 671 bp, Homo sapiens
tgaaaaagaaattaaggatataattccatttatgacagcttcaaaagctataaatacttagaaatgaaattaacaaaagaagtgcaaaacttgtactctgaaaactgcaaaacattgatgaaagaaatttgagaagacttaaatattacaacctatgttcatgggttggaagatttattattttaaggtgttaatactccacaaatttatctacacaattaatgcaatacttatcaaaattacagatagctgacttttttttcagaaattgataagttgattctaaaattcatatagagtgcaagagaaccaggatagccaaaacaagctttataaaaaaagaacaaaattggaggatttacagttcccgattgtagaacctacttcaaagctacaaaaaccaagacaatgtggtattagcatttggatagacatatagatcaatgtaaaagaatggaaagtacaaaagtaaatcctgacatttgctgtcaactaattttttgacaaagtttcaayataatttaattgcaagaaaaagttttttcaataagtactgggataactggatacccatatgtaaagaatgaaattggatgccttccttatactgtacacaaaaattaacttcaaataaattatagacctaaatgtaagagctaaactaaaattat

SEQ ID NO: 356743 - DNA, 603 bp, Homo sapiens
attattccatatataaacatgtacaacacatgcaaacatacatacatatggcggtaatgactattctaaatgtggccagtgagttacagtttaacaaaatgctttcacaaacgwgatcacatttttttttttcttttttcgtgtgtgtgtttgagaaccatttctgtacagtattttatttcagctcccagtcattgtggtaaaacaatcacaagacaaaatatataagaattacaaagaatagttatcattttttaagaattgccatataattatattgttacaaattcaatataataaaagttttcctatatcttatctctaacagtaaacattgattttactcaccataaatgattttctttcaagctttaatatgcttgctagaatcatatatgacaataattgttatacatttttataacttcaacttttattttagattcagggggtgcatatgcaggtttgtcacatgggtatattgtgcagtgctgaggtttggggtatgaattaatgatcccaccacccaggtaccaagcatagtacccaataggtagtttttcagcccttgcccacctcgcactctaaatcttctagtggtct

SEQ ID NO: 356744 - DNA, 603 bp, Homo sapiens
attattccatatataaacatgtacaacacatgcaaacatacatacatatggcggtaatgactattctaaatgtggccagtgagttacagtttaacaaaatgctttcacaaacgagatcacatttttttttttcttttttcgtgtgtgtgtttgagaaccatttctgtacagtattttatttcagctcccagtcattgtggtaaaacaatcacaagacaaaatatataagaattacaaagaatagttatcattttttaagaattgccatataattrtattgttacaaattcaatataataaaagttttcctatatcttatctctaacagtaaacattgattttactcaccataaatgattttctttcaagctttaatatgcttgctagaatcatatatgacaataattgttatacatttttataacttcaacttttattttagattcagggggtgcatatgcaggtttgtcacatgggtatattgtgcagtgctgaggtttggggtatgaattaatgatcccaccacccaggtaccaagcatagtacccaataggtagtttttcagcccttgcccacctcgcactctaaatcttctagtggtct

SEQ ID NO: 356745 - DNA, 472 bp, Homo sapiens
gcatgtgctttgaaatcatacaataaatttattaaatgctaaggactttatattcactgtttaattttatcatcttaataaccttcattattacctccattaaaccctatttgttggctacttacattattctgattttgcaaatctaaatttgagaggctttcccaatgtcacataagttaataagtggcatagctggggtttgaattaaagtctaccggattccaagatctacttaccattgttctacaatatatactttttaggtacctgagaatgctaacaacctttcttttgaaatctgccttctttctggatagcagctttattaatatatgattagggcaccatatttcaggcaacaaattctttgaaatctttcatttycatagtgagataaggatcagttatgtggcattgtcagccagaaaacatcacttaaagactatcttgtacaataagtacaaaacat

SEQ ID NO: 356746 - DNA, 196 bp, Homo sapiens
gccacagctaatggtgaaatcttcctaactctaggtgaagattaatgggcaagttggagagttaaggtagcttgtggctgctccttttagaaggaagtctgatcattgctctcttatttgtggaacccytctgttcccccaaatgcttggtaagacatgcttgaagaccaatcctgtgtcagtagacttcatatct

SEQ ID NO: 356747 - DNA, 196 bp, Homo sapiens
gccacagctaatggtgaaatcttcctaactctaggtgaagattaatgggcaagttggagagttaaggtagcttgtggctgctccttttagaaggaagtctgatcattgctctcttatttgtggaacccctctgttcccccaaatgcttgrtaagacatgcttgaagaccaatcctgtgtcagtagacttcatatct

SEQ ID NO: 356748 - DNA, 302 bp, Homo sapiens
tgcattcaggggcaatttggctagctttcttcatccacrccagaaaactcgcttttgaattggtttggaaagctccaaaaaggacgtgcttcatgctgttggtattgctgtcaaaaagaaaagattctgcttttcatcagctgttgatttttgctctctgtatttctctagcatgtgttgctggtggccctggttatgctaagaagtagatagtgtagctgcagcagcagaacagaaaagactctcctggattctcagttccaggctggcctgggaacaggcttagggatgtttcaatgctt

SEQ ID NO: 356749 - DNA, 302 bp, Homo sapiens
tgcattcaggggcaatttggctagctttcttcatccacgccagaaaactcgcttttgaattggtttggaaagctccaaaarggacgtgcttcatgctgttggtattgctgtcaaaaagaaaagattctgcttttcatcagctgttgatttttgctctctgtatttctctagcatgtgttgctggtggccctggttatgctaagaagtagatagtgtagctgcagcagcagaacagaaaagactctcctggattctcagttccaggctggcctgggaacaggcttagggatgtttcaatgctt

SEQ ID NO: 356750 - DNA, 302 bp, Homo sapiens
tgcattcaggggcaatttggctagctttcttcatccacgccagaaaactcgcttttgaattggtttggaaagctccaaaaaggacgtgcttcatgctrttggtattgctgtcaaaaagaaaagattctgcttttcatcagctgttgatttttgctctctgtatttctctagcatgtgttgctggtggccctggttatgctaagaagtagatagtgtagctgcagcagcagaacagaaaagactctcctggattctcagttccaggctggcctgggaacaggcttagggatgtttcaatgctt

SEQ ID NO: 356751 - DNA, 302 bp, Homo sapiens
tgcattcaggggcaatttggctagctttcttcatccacgccagaaaactcgcttttgaattggtttggaaagctccaaaaaggacgtgcttcatgctgttggtattgctgtcaaaaagaaaagattctgcttttcatcagctgttgatttttgctctctgtatttctctagcatgtgttgctggtggccctggttatgctaasaagtagatagtgtagctgcagcagcagaacagaaaagactctcctggattctcagttccaggctggcctgggaacaggcttagggatgtttcaatgctt

SEQ ID NO: 356752 - DNA, 385 bp, Homo sapiens
tgtatctatgaagtaactaacttaattttgactttacaggctcataggcagaagggccttgccttgtctaagataagactttggacttggatatttgggttaatgctggaatgagctgaggctttgggggactgttaraaaggcatgatcatgttttaaaatgtaaggacatgaaatttggaaggggctgagggcagaatgatatggtttggctgtgtccccacccaaatctcaccttgaaatgtagtttccataatccctacatattatgggaggaacccagttggaggtaattgaatcatgggggtggttacccccgtgctgttctcatgacagtgagtgatacctgaaggttttataaggggcttttccccttttgctcagc

SEQ ID NO: 356753 - DNA, 597 bp, Homo sapiens
cgcagctctcttcaaactatgatcctattctcccactgcctcctgagttcagcctcttcgacttggctaagtctgcctttcctttcctatctgtttgctttcttccctctgattaatccatagtaaaatttgactttttttttccattccaacaactccatcttctatcacatatctcctttcatgaagttggcccatgataatgtttctgttgacaagagtataatatagacaagattgtatatagttaaagtacatattttatttatttggtggcagcattctgataagaaattaaaactatttcttttaaaatcataatttaatcaccaggcagagcaagtaaagagaaataagttccagaatctcacatctgtcaaaagtaaatgctgatttttattgaggacttccttatttctgccaccagttgactctcatacagcttgttcacaataraatctaatgtggaattggcaaatatggtgtcatacatacagcgctctactggagctgataattaagtacccagaaattttatgaagtgtttgtcaaaccatcagtagaaatatttacacaatggaaatcagcaaatgctac

SEQ ID NO: 356754 - DNA, 597 bp, Homo sapiens
cgcagctctcttcaaactatgatcctattctcccactgcctcctgagttcagcctcttcgacttggctaagtctgcctttcctttcctatctgtttgctttcttccctctgattaatccatagtaaaatttgactttttttttccattccaacaactccatcttctatcacatatctcctttcatgaagttggcccatgataatgtttctgttgacaagagtataatatagacaagattgtatatagttaaagtacatattttatttatttggtggcagcattctgataagaaattaaaactatttcttttaaaatcataatttaatcaccaggcagagcaagtaaagagaaataagttccagaatctcacatctgtcaaaagtaaatgctgatttttattgaggacttccttatttctgccaccagttgactctcatacagcttgttcacaatagaatctaatgtggaattggcaaatatggtgtcatacatrcagcgctctactggagctgataattaagtacccagaaattttatgaagtgtttgtcaaaccatcagtagaaatatttacacaatggaaatcagcaaatgctac

SEQ ID NO: 356755 - DNA, 584 bp, Homo sapiens
aatagcattaaatctgtcaattgctttgtgaagtatagccattttagtcatattggatmttcctatccatgagcatggggtggttttccatttgtttgtgtcttctctgatttctttgagcagtgttttgtaattctcattgtagagctctttcacctccctggtgagctgcatttccaggtattttattatttctgtggcaattgtgaatgggatggcctttctgattttgctgtcagtgtggttatcattggtgtagagaaatgttagtgatctttgcacattgatttagtatcttgaaaattcgctgaagttgtttgttaactaaagaagctttgtagctgaaactacagggttttctagatatagaattatgttatctgcaaacagaaatagtttggctttctctcttcctatttggatgctttttgtatttctttctctagcctgattgccctggtcaggactttcaatactatgttgaatagaaatggtgagagagggcattcttgccttgtgctggttttcaaaaaaaaaacgctcccaacttttgcccattcaacagattgttggctgtgggtttg

SEQ ID NO: 356756 - DNA, 584 bp, Homo sapiens
aatagcattaaatctgtcaattgctttgtgaagtatagccattttagtcatattggatattcctatccatgagcatggggtggttttccatttgtttgtgtcttctctgatttctttgagcagtgttttgtaattctcattgtagagctctttcacctccctggtgagctgcatttccaggtattttattatttctgtggcaattgtgaatgggatggcctttctgattttgctgtcagtgtggttatcattggtgtagagaaatgttagtgatctttgcacattgatttagtatcttgaaaattcgctgaagttgtttgttaactaaagaagctttgtagctgaaactacagggttttctagatatagaattatgttatctgcaaacagaaatagtttggctttctctcttcctatttggatgctttttgtatttctttctctagcctgattgccctggtcaggactttcaatactatgttgaatagaaatggtgagagagggcattcttgccttgtgctggttttcaaaaaaaaaacgctccsaacttttgcccattcaacagattgttggctgtgggtttg

SEQ ID NO: 356757 - DNA, 408 bp, Homo sapiens
tcctcaatttttggggatagtttctgtaggaattgtacaagctcttctttgtacattttgtagaatttggctgyaaatccataaagtccagggctttcatttttttgattggcaagctacttattacctatataatatcagagctttttattggtccattcaggaaataattgtcttcctggcttaatcttgggagagtgtgtatatctagtaatgtatctatttctttaaagttttctagtttgtgtgtataaaggtgttcatgttaatactgaccccacataaataaaaacaaccattagaaaccattaaagttgaacacttatgtctttaatctatttttatttaatttttgtacttggaatgtgataaagattcaactttactggtttaaatgtgaacttgttt

SEQ ID NO: 356758 - DNA, 570 bp, Homo sapiens
catatacaggccactcatttggcagaaacaatactcttggttgaacagcaacaccgttgcctaaatgacttcttatcccaccttgcacatcattattttcaaaccagtatgtaatatttctgtcttcttcaggcaattgtggttttaatttatcaaaagctcctggaattttatcaggtggaaggaatgccaatacagacaaatgacacatttttaaactaaaattttcatcattgccagatggcctggtcaatccactcacctgaattttctggcaaatgagctgggctgaatggaagatataaastttactggtaacaacttgcatttcacttttagaagccttgatcacacctaattaaaaacttgtcattataatttggtgatccaattgaaatctattttcttctgcaaagccctccaaatcttcaaataagcttttaaaaagtacttcactttttccagttattaaaccataaacatgcagattaaattacagaattttgtaatccaattggggcataaactgtataaagttgatttaaaaaacccactggggacagttttgaa

SEQ ID NO: 356759 - DNA, 570 bp, Homo sapiens
catatacaggccactcatttggcagaaacaatactcttggttgaacagcaacaccgttgcctaaatgacttcttatcccaccttgcacatcattattttcaaaccagtatgtaatatttctgtcttcttcaggcaattgtggttttaatttatcaaaagctcctggaattttatcaggtggaaggaatgccaatacagacaaatgacacatttttaaactaaaattttcatcattgccagatggcctggtcaatccactcacctgaattttctggcaaatgagctgggctgaatggaagatataaagtttactggtaacaacttgcatttcacttttagaagccttgatcacacctaattaaaaacttgtcattataatttggkgatccaattgaaatctattttcttctgcaaagccctccaaatcttcaaataagcttttaaaaagtacttcactttttccagttattaaaccataaacatgcagattaaattacagaattttgtaatccaattggggcataaactgtataaagttgatttaaaaaacccactggggacagttttgaa

SEQ ID NO: 356760 - DNA, 627 bp, Homo sapiens
ctgtttacagcatggtttactaagtatttgaagcactctgttgagacctactgctcagagaaaaggataccttcataatattactactcattggcaatgtacctgggcaccaaagagctctaatggaaatacacaaagagattaatgtgattttcatgactgttaacacaacatccattctgtagcccagggtacaagtaatatttttgactttcaaatattactatttaagaaatacattctgtaatgctatatctgctatagtgatgtttctgatgtatatgggtaaattagaaacctctggcttaaaggagtcaaggcgggacgcggcaagatggctgactagaaacagcagcaatcgaggctcccrtcggaaagaaccatcataagcatgtgaatacttcaccagcaaccaaggtatctaggttctctcatcagaaccgactaggaggctggtgtgatccacagagaaggaggaagagcagagtggtgtactgctcacctgagagccacacagggtaggggagccccacccctcagcctagggaggcagtgagtgagcatgctacccagctggggaagccatgcattttccacggaactgggcaatcctctgatcaatccact

SEQ ID NO: 356761 - DNA, 557 bp, Homo sapiens
gctctatgagcatgtctccttcacgagacattgacgtttgagaaaagctgagtgtactaggctgttcttgaattgttataaagaattacctgagacyaagtaatttattaagaaaagaagtttaattgggttatggttctgcaggaggtactggaagcataacactggcatttgcctctggggaggcctctggaggcttacatttgtggtggaaggcacaggagcaggcatctcacatgttgagagcagcagcaaggaagagagagagaggtgccacacacttttaaacaatcagatctagcaagaactcagtattatgagaacaacaccaagaggatggtgcaaaaccattcatgagaaacccactccgatgatccaattacctcccaccaggtcccacctccaacactggggaatttttttttttttttcattagaaagctattgaagaaaaaatgaggaagtaaaagatattatctgacctgtgttttaggagaagttacccaggaatcaatgtgaagggcagattaaaagagatccggtttggaggcaaggag

SEQ ID NO: 356762 - DNA, 528 bp, Homo sapiens
actctcagaagagtctatttattgtgcatgtaggaatattagactgttatttaaagaaaaataaaatatcttctgtcatgtaaaacatttcagctctatgccaaggttttacatcccttctaaaattgacaaaaagccaacagtacatcatgtttaactttggataacaaatatgattacttcattgctaacaagactaataagtaaaatctacttatgtaaataatgtgccagagatcaagttagaaagcaattatgacctaatgagggtgtggttttgttttctgtcccaaaatcattccaaatttaaagtccygtgtgagaccaaaagcaagactcaacaaataattaataaaagcattattcattgatttatgacaacaaatataatttgctcatgcaattctactatagccttaagtctaacagcataatgcaatgatacctacttgagttataatgtaagtccttacaagtttccatcagctctttgcccctgtcagaagtttcaacacataatacctaaca

SEQ ID NO: 356763 - DNA, 626 bp, Homo sapiens
gttagggaggaatatttctcctttcttgtgaaagaagtacatatgacactgcraaatcatatttgagccataaattcacccttccttgtcatcttttataaacattaaataattgttttgggttagcacatttaataattcatgcagccaaaacctaagtatgtccttcaaaagacaagttcaaatttgctcaatttctatctgcatagatttttgtctctgtatcctgtaacaaccaacttatgtaattgatgaaatttctagattgtctctggataataacacagctacacagcccatgattttagttcttatctagtcatgatttggttatttgagtaaatcaaagcaaaattacacttactgtctgagaagcagtggatatcgtggaaaatattcagactttgaaataagttagaaatagattttcaaatctttgctcaatgattacttgatgacagctttctttacataaaccttaatttttacattcataaatttgggattattttggcagagatatgtgaaaaatgaaatagtaaattttaggttcctagcacatagcagatgcataatatacactacacagtatctttattattttgtagttgtgttatggcggtaaa

SEQ ID NO: 356764 - DNA, 605 bp, Homo sapiens
aatgctcagacactgaagaacatctcctagcactaacaccatccaggaaaacatgacctcacctcaccaattgaactaaataaggcatcaaggaccaattctggaaaaacagagatatgtgaactttcagacagagaattcaaattagtggttttgaaaaaactcagagaaattcaagacaatgcagagaaggaatttagaattttgtcagataaatttaaaaaagattacaataataaaaaagaatcaggtagaaattctggagctaaaaaatgcaattggcatactgaagaatgcattagagtcttttaatagcagaattgatcaagcagratgaattagtgagcttgaagacaggctatttgaaagtacacagtcagaggagacaaaagaaaaaacaataaaaagcaataaagtacacctacaggagctggaaaatagcctcaaaagggcaaatctaacaattactggcctcaaagaggaggtaaagaaagagataggagtagatagtttattccaaggaataataacacagaacttcccaagagaaagatgccaatatccaggtacaagaaggttataaaacaccaagcagattaacccaa

SEQ ID NO: 356765 - DNA, 624 bp, Homo sapiens
aatctgtacaggtgtaagttatacttctgaggtatgtcacatatgttagagtgccttcagatgtagtagaatatgtataatcactataatacagagctttgattcttttcacaaaccaagccctttttctagtattacaattttatcttgtactttcatccgttagagtaccagcatattcacttcattacattagcgtcatatgtttatgtataatcattataaatgtggccgggcactgcagcctgggtgaaagagtgaggctctgtctcaaaaaaaatcattataaatgcttatttttaagaccatatatatcaaaaagaaataaaaagctgagtgctgtggctcatggctgtaatcccagtgctttgggagggtgaggcaagaggatcacatgagtccaggagtttgagaccagccttggcaacatagcaacaccccatctctacaaaaataaagaaattagatgtggtggcctgcatctgtagtccagctacttgggagactgagaccagtagataacttgagcccaggagttcaaggctatgattgtgycactgcactccagcctgggccacagaggaagactcagactcaaaagaagaagaagaacacagaagaaaa

SEQ ID NO: 356766 - DNA, 543 bp, Homo sapiens
gcggctccttgagggctggcgccctttgcaggtgtctgccgggcccctgtgcrttgctggtgggacccgggctgggagctggtctcaggacgtctccaacccaggggtctagtcttcttcccataacgatgaagccacggcaggctgtctactcagcttgcacgttgggtaaaacctcacactcccacggtccttgactgaagctatctgaagttccaagctgggtcaaggagcaggattatccccactgctggctctgcaggcgatgccctcgccgggtgtgcgtgttcacggtgagcatgtcctgactctgctggggtcaccgatggctctgtgggtgatgccctcgctgggtgtgtgtgctcattgtgagcatgtcctgactctgccggggtcaccgatggctctgtgagtgatgccctcgctgggtgtgcaccctcacggtgagcatgtcctgactctgccggggtcaccggtggctctgtgagtgatgtcctcgccgggtgtgtgtgctcatggggagcatgtcctgactttgctggg

SEQ ID NO: 356767 - DNA, 551 bp, Homo sapiens
agtgatcagggtagagtgaagtgcatttggaggatgaagttcaccatggacttgagcagtagcttagaggaggaggtagagccaaagctggatagggatttgatgtgtagataaaggagagagggctttttttttttttttttttttttgatggagtctcactctgtcacccaggctggagtacagtggcacaatctcggctcactgcaacctccatctcctggattcaagtgattctcctgcctcagcctcccaagtagctgggattacacgcatgtgccaccatgcccaactaatttttgtatttttaatagagacagagtttcaccatgttggccagstggtctcgaactcctgacctcaggtgatccacccgcctcagcctctcaaagtgttgggattacaggcatgagccaccgtgcccagcaggagagagggctcctttctaggatatgaacagtagagagtgttgtaaataagaagtatttgaattttcctattgaaactttgataaagcagtgattgtcaaataaatttttaaaagttcagtt

SEQ ID NO: 356768 - DNA, 521 bp, Homo sapiens
atggaggaatcaacattattatttatttttactaccccacatcctatttctgactttagtatcattcattacctttttgagtttgtgtgtatgtgtatgtgtgtgtgtgtgtgtgtgtgtgtgtgtgtgtgtttaagcaagttttttgaacatggcttctctgatgtctttactttttaaatcacctagacttstgtaaagagcggtctcattgctacacagtacaactttgaaatattttgacaggaatttttactacaatacaaagagaacaatagaaaaatacaaaaatatatagaaacagctctatttctggagttaagattttacagctaaaatggcagtccaatactgatctgtcaggcatagagtttagtgggaaagtattactcctctcttctcaatctgatgtagtctgagctcaggggaaagtcaattgactgttcactcaaaatgcccagaattgctgtaatgggaactggatgacccacagattaagaaagagactcaagagaaacatt

SEQ ID NO: 356769 - DNA, 495 bp, Homo sapiens
gactctcaacatcaagaacagtgggaactgggtttcaaaatggcctggtaattcaaagctgtagagttgaatcaggtttttttgattttaaaatgaacttattgagatttcataattgaaagcacattcagaaggcagccctgtgaatggaaggtaactggtaacagcaaatgttctgctcaaaatcctcattcacatggcagcattytgaagaaaatggaatttgtaactgcagattttctgaaatacaatcacatccaaacagcaggatttctaaacagaaggtgccttataactatgttctaaaattaaacctcatttaaactacattcattctaaatggaaaatgtactgtagttgttttcaacattaaagtcaaattcaaatcattgttatcctaagagctaagtagcttaaataacttctgccgtgtaatgaagattagcgtgtatttcatattaggtttgcagagtaatttgggggaaaatgttttct

SEQ ID NO: 356770 - DNA, 550 bp, Homo sapiens
ttttatcttcttattctcacttacagaaatgagaatgttaaaattctccaaccaaggctacagacttaccttttatttccatttctgccaatttttatttttgcatatttaagctctgtcacttatcacataattggaattgttgagtcttcctgatgaattaaccattatcattataaaaaagacacaccttcttctgacaaaactttttgtcttgaattctattttgtaaaatgttcacagtgctaccccataattgttatgcttaatgcttcttttatccatcgtctcactttcaatctatttgagatatatttaatagatatttcttataaacaccacgtagttaagtcttgctttatatatagtctgccaatttttattttccattttaacttgagcatttttcctgttcacacttaatgtaattattaatatagtttactctyatttgttttatatatcagaatacaattatatttagatccattttacatttttgtgctataattgtcatatatttcacttcaaatcgaacaaatacccaaca

SEQ ID NO: 356771 - DNA, 573 bp, Homo sapiens
actccaatgtaaatgcaacaaaatataaattagtgtgaattacggttttttacagagcataaaatttagactgtaatgtctgatgtcacttacctggtgtattaattttagaagagagtcactaatgacttgagattccagaatgcattcaccactgcaccagagcaaagagaagtacaactaacatcagcagaagtgtcagggatattaatgtggctttytaaaacctctatagttgctgacctagttttaattgatggtctatgatgttaagaagacaggatttgtggcctagatagtagaaaatattctctacaaaactgtgaagacagaatcacttacatccaatgtttcatttttgacttgctatgtaagataataaaaaatatgagtaaagtgtaatgaaaagcaattttgtattgaccttgtatagtgttcagcacagcaatgtgtagtaggtaatacatattcttttggatgactgcttttgtatggaaatgcttttccacatctttgtatatgcctaagatcttctcagctttagaaattagcctaaacattacttaagaaagg

SEQ ID NO: 356772 - DNA, 563 bp, Homo sapiens
ggcactgttggaaaatacccaattttcatcttctgatatcttacaacacaataggcattaaaaaaatccaaaatgcggccttaaaaaatacattagctttgattgtctagattgctaataaatatgaatctggagaacacatttgtgattactttttatctgattagacaattttgaggaaataaactgaaagrctccaaggagggaagtgataataaatatcttgaagtagatttatgtagaatggtagtctgcagacaattttaaatcattggtaattcttgtgccttcattttctttgcttgtaaatacagtctaatacatctccttgaatgccagtgtggctatagggaagactgacagagaggctttaatgtttctttaaagcaagtatagcatttgttcataagcctgttcctggaaacttaaaatgtacatcagtggttatcaacttgaattcagagcatttatgaacattatgatctcatttgccaaatagtacgataagagtaagaaatttttctggggaaagaatggatattgttacgagatccaaaaatggc

SEQ ID NO: 356773 - DNA, 576 bp, Homo sapiens
cagttttctctaaactgcttaaataatgacagttttgcaaagttctgaatagtttttcaactctcttgaattttaatttgacgcattttccttcatggcagtattatgtgtggattgtaacaataaattgaaaaacatgcaacttggttggtatcaataatgtgtaaaaatggtttaatatagttaatatcacttttcatttatgtgacactcccatgtagtttcaaaatattktatggttattttgtaattattattttttggaaaaggaaattagagagatgcgtgaaatagacaattcaattttatacaagtgaataaattcctaatattaaacaaatgtctctctgagatttctaaaggttttattgattgaaaaaggtagaaatcatttgtccactgttgaatattagaactttcatatattgtgctaaaaatgtcccaatctctagggatccatactttatattttacaagatataagagatggtcctttcatccattgcacaagttaaacccactcaccactattctctgtgcattcagtacccggtaatatatgcttgccagtagaat

SEQ ID NO: 356774 - DNA, 586 bp, Homo sapiens
tacttcaagtttccaagtataacttttctaattagaaattctggaagttcagagtcagtgtctgctaggtcctgaaaagtcaacttatttccttttccccaatgtacaattacccttataaaagacaataagtctctttggggaattctaggagacagattaacagtatggatttctggcaatgttctatggtccttccacaaggggacctggcctcccttttattcaaggagttctcagtctgtaaactggctcacgtttttatttgagggcctcaaacaagtctttgattcaaaggtgtcttagtccattctgtacttctataacagaattccactgggtaatgtacaatkaacagaaatttactggctcacacttctggaggctggttaagtttaatatcaaggtgttagcatctggcaagggctttctttcgttgctgtaacgtggcagcagtcatcaaatggtgaaagggcaaagagtgatagagacagtgcaggagggaacaaactgaattctgcaataagccactcccataataatggcacttgtccattcatgaaagtggaatcctcatgacctaacc

SEQ ID NO: 356775 - DNA, 644 bp, Homo sapiens
aagcttagtatccaatagttccttttttttttttttttgctcctctccctcctcccactctccaacctcaagtaggtcccagtgtctgctgctcctctttgtgtcaatgtgttttcatcctttagttccaacttataagtgagaacatgcagtatttggttttctgttcctgctaaggataatggccgcctgatacatccacattgctgcaaatgacgtgctctcattattttttatggcggcacggtgttccatgttatatatgtaacacattttgtttatccactttaccattgatgggcatttaagttgatttcatgtctttgctattctgaataatgctacagtgaacatatacatggatgtgtctttatgacagaatgatttatattcctttggktatatatccaataatgggattgctgaatagaatgtcatttctgtttttagctctttgaggaatcctcacactgctttttacaatggcttaactaatttacactcctatcaacagtgtataagtgttcccttttctccacaatcttaccagcatctgttgttttttgagtttttaaataagtgccattctatttggtgtgggatggtttctcattgtggtttcgatttgcatttctctaaagatt

SEQ ID NO: 356776 - DNA, 611 bp, Homo sapiens
tgcatagttccataaactgaatacacgaacctttatttagaagggatattaaatatcccttctaaataaagggatatgtaaatgaatgacttaataaatataaataaatgactgagacttggatcattggtttgttctatactttctgctatctcttaggcaattcccatgagattccattatcaaagtgttgcactcacgtagtctttttcaacacaagcgggattttaggaggattaaatttggtgaaatttaaatttatacacttctaraagttaaatatgcactcatgtatacacacatatataaatatagatatatgtgaatatacacctatatttatataggtgtatatacatacctatatatattcctctctctatatatgggtatatattcatatattcatattatatatgaattcagatatattcatatattcatatatctctctaaataaatatatgtgtgtatatacatgtatataataggttagcaaacattatcttgtgatgtttcagccattagaaaaaaatgaaataaattatgtcagagtacttacaggaaaaatcagttacatattttaataaaactgtcttcttaagccagtt

SEQ ID NO: 356777 - DNA, 611 bp, Homo sapiens
tgcatagttccataaactgaatacacgaacctttatttagaagggatattaaatatcccttctaaataaagggatatgtaaatgaatgacttaataaatataaataaatgactgagacttggatcattggtttgttctatactttctgctatctcttaggcaattcccatgagattccattatcaaagtgttgcactcacgtagtctttttcaacacaagcgggattttaggaggattaaatttggtgaaatttaaatttatacacttctaaaagttaaatatgcactcatgtatacacacatatataaatatagatatatgtgaatatacacctatatttatataggtgtatatacatacctatatatattcctctctmtatatatgggtatatattcatatattcatattatatatgaattcagatatattcatatattcatatatctctctaaataaatatatgtgtgtatatacatgtatataataggttagcaaacattatcttgtgatgtttcagccattagaaaaaaatgaaataaattatgtcagagtacttacaggaaaaatcagttacatattttaataaaactgtcttcttaagccagtt

SEQ ID NO: 356778 - DNA, 611 bp, Homo sapiens
tgcatagttccataaactgaatacacgaacctttatttagaagggatattaaatatcccttctaaataaagggatatgtaaatgaatgacttaataaatataaataaatgactgagacttggatcattggtttgttctatactttctgctatctcttaggcaattcccatgagattccattatcaaagtgttgcactcacgtagtctttttcaacacaagcgggattttaggaggattaaatttggtgaaatttaaatttatacacttctaaaagttaaatatgcactcatgtatacacacatatataaatatagatatatgtgaatatacacctatatttatataggtgtatatacatacctatatatattcctctctctatatatgggtatatattcatatattcatattatatatgaattcagatatattcatatattcatatatctctctamataaatatatgtgtgtatatacatgtatataataggttagcaaacattatcttgtgatgtttcagccattagaaaaaaatgaaataaattatgtcagagtacttacaggaaaaatcagttacatattttaataaaactgtcttcttaagccagtt

SEQ ID NO: 356779 - DNA, 577 bp, Homo sapiens
aatttatttaaatgtgtagagcatctttagatttttattcaaactaaaaaatttaacaattggacatacttgatataaatgagtgatattatggaataattgctcctttttaaggtaaagtgaaattctcatggttatatttttaaataactgctcccttttaaagatatgtttctacatatttatagataaaattataaccctgctaaggatggaggtgttaaagagatgagaattataaagaaacaaatttggacataagttgatagttgtagataatcttcaattatttctacctcctcagtctttgtctgagwtgatttgttgctgtgatccacagtttcttgcatatttacaggtttgcaccggaagtgcatgtctttcttcttctcagcctgagggctttcttccccagtggtaggggcttccttggcccttttatggataacccagaattgtgtggaattaattctttcaagaacaaccctcagaggtggcagtaggtaaatcgatgccacaaattcccaaaacacatttctcagaacatcccagttgggtagccaggatcccagaagag

SEQ ID NO: 356780 - DNA, 576 bp, Homo sapiens
aagtaaaaggatgaaaaataacaaccacaataaagatgaaatgactaagctaaaattagaaatataaaagagagcagacatggatttaaaaaataatatgcactctatggtgtctacaggagacacattttagattcaaatatacaatttgaaagtaaaaggatgaaaaaataacaaccacaataaagatgaaatgactaagctaaaatcagaaatagactttaaaaccaaaaagagagagggagatatgmgactagaaagaggaacattttataatgataaaagggtcaatttattaggaagatacaatagtgatgaacatatatatgcacataataatagaacaccaaaatatgtgaagaaaaagatatggaaggagacatacacaactcaacaataacaactggaggcttaaaaccccactctcaataacagataaaacaattaagcagatgaacaagaaaatatatgacacaaacaatactataaaagtactagacctaacagatactcaaatatctacagaatacccacctaacaacaacaggatacacacttttttaatgtgcacatgta

SEQ ID NO: 356781 - DNA, 583 bp, Homo sapiens
cgggggaaaaaaaattaaatctaaagcaagcagaaggaaggaagtgttaaagattagagtggaacttactgaacttgacggtataaatacaatagtgaaaaacaattgagaaaacatcaacaacatttataaacatttagctagattaacaaataaaaaacaagtgaatagtccaattactagaatcagaaatgaaattatactgaccttatgaaagtgaaaaggattacttaggagtattacaaacaatggtataccaatacatttgctaacttaggtaaaatggacaatttcttagaagaaaatataagctactgaaacttactcaaaaagaaatagacaatctgaataaamctgtaacagtaaaaaattaattatttttaaaaaatgcccacagggaaaatcttaggtccaggtggcttcactggagaattctaacaacacttaaaaattaacacaaatatttcataaacttttccaaaatatagaagagaagcaggacatcctagctcattatatgagccattattaccataataccaaaaccaaataaagtatcacaaggaaagaaaattactgacca

SEQ ID NO: 356782 - DNA, 589 bp, Homo sapiens
actaacaaacagaaaggaatagcatcaagatcaaaaaaaggacgtccgcacaaaaaccccatctaaaggtgaccaacatcaaagaccaaaggtagataaatccacgaagataaggaaaaaccagcacaaaaggctgaaaattccaaacaccagaacacctcttctcctccaaaggatcacaactacttgccagcaagggaacaaaactggacggagaacaagtttgatgaattgacaggaatagtcttcagaaggtgggtagtaacaaactcttctgagctaaaggagcatgttctaacccaaagcaaggaagccaagaaacttgaaaaaaggttagaggaattgctaactagaataaccagtttagagaagaagataaatgacctgatggacctgaaaaacacagcgtgagaacttcatgaagcatacacaagtatcactcgcygaatcaatcaagcagaagaaagattttcagagattgaagatcaacttaatgaaataaagtgtgaagacaagattagagaaaaaagaatgaaaaggaatgaataaagcctcaaagaaatatgggactgtgtgaaaagaccaaact

SEQ ID NO: 356783 - DNA, 531 bp, Homo sapiens
aagaactcaacttattcatggcctggtttgtgaggaaattatttatttgcatagggcctggaaacagactaaaaaactctccagggcaaatggcaatatcacatatcaaattcctgggcatgcaaagcagagggagtagtaaacacggatggccaaggctaggtctgcacatataatttgaaccaaagattgacccacctagattactaaaatagacttcttttgctacaactatcagggccgggggtaggagtaaaatgtcacctgaattataaaaacacatgcttaatatctcacctgtacatacagcatcagtgatccctcaaaaactttgccaggctttcaaaatactgtttttctatccttaaaaaatatttttatctgaaataatttatttccttttctggtgtgcatatttcycaataatcatgacgatgagttacataaataggggtaaatagttgttaatgtataagacatttaaggccactttgctgcttttaggcagcatgtcctttgacagaaaagttt

SEQ ID NO: 356784 - DNA, 535 bp, Homo sapiens
ctgtttgatcctttcttttacctgtgctaacaaaagggaatgagagaatacataacctcagacgtacaacttgcatgcatagaataatttgaactacagaataatctggatttgctttgacaatagacaaatttgcttggtggaaacaagagtttgaaatttgcagtgtttactcatgttactttactttcagagtcaactcaagcaacaatgtatccaatttctttttctattgggaaaaaataatagtccatctcctacaatcaaggatctcctttaaagaggctacatccacacagggccacagtggctgcactacagagcatgagtgtatgcagcctcactgagracaatacagaaaagaaccagccctagtgacacagccattggaaaatatggggaggtggtaaaataggaatttttagcaactggtctaggcatttatttaaaatgatctggaactttggtcctctggaaagtcctcagaggctgaactgggtggtccatttacctagatacatgcaaattttcttaa

SEQ ID NO: 356785 - DNA, 535 bp, Homo sapiens
ctgtttgatcctttcttttacctgtgctaacaaaagggaatgagagaatacataacctcagacgtacaacttgcatgcatagaataatttgaactacagaataatctggatttgctttgacaatagacaaatttgcttggtggaaacaagagtttgaaatttgcagtgtttactcatgttactttactttcagagtcaactcaagcaacaatgtatccaatttctttttctattgggaaaaaataatagtccatctcctacaatcaaggatctcctttaaagaggctacatccacacagggccacagtggctgcactacagagcatgagtgtatgcagcctcactgagaacaatacagaaaagaaccagccctagtgacacagccattggaaaatatggggaggtggtaaaatagraatttttagcaactggtctaggcatttatttaaaatgatctggaactttggtcctctggaaagtcctcagaggctgaactgggtggtccatttacctagatacatgcaaattttcttaa

SEQ ID NO: 356786 - DNA, 623 bp, Homo sapiens
tattgcaaaccaattcatgaggattcctagatggtaatcaggtaaaggcctgtggtataatgctaacaaacaatgcatttatttataattgatatttgctttggtgcttctctccattccataattcattgaaaatctgaaagttgcaaccgatacagatttctgagagtaaaaatattcatgacaagttaaaaggtgtaaattaaaatagatagctgtacaaatttaattagtcctcaatggaaacttaaataaattcctttgtagactataagtaagcaaaatgttattttaayacatgtatttaaagaagttttattaaaatatgaataacataaatatctatggtaatttttctgatgtcttttaaaacacattataactgtttattgtattttaaaagcttctaatatatctagatacaatatagtattaagacaatctctgtagcagaattccagctatggctgtgtgacccttagccagttacttaatctccctgtgaccccagttacctcacctgaaaaatgaagtctagtgatggcagctacctgctagaattggtggaagaatgacataaatgaatacaattaaaatcttaggataatgattggtacgttgta

SEQ ID NO: 356787 - DNA, 623 bp, Homo sapiens
tattgcaaaccaattcatgaggattcctagatggtaatcaggtaaaggcctgtggtataatgctaacaaacaatgcatttatttataattgatatttgctttggtgcttctctccattccataattcattgaaaatctgaaagttgcaaccgatacagatttctgagagtaaaaatattcatgacaagttaaaaggtgtaaattaaaatagatagctgtacaaatttaattagtcctcaatggaaacttaaataaattcctttgtagactataagtaagcaaaatgttattttaatacatgyatttaaagaagttttattaaaatatgaataacataaatatctatggtaatttttctgatgtcttttaaaacacattataactgtttattgtattttaaaagcttctaatatatctagatacaatatagtattaagacaatctctgtagcagaattccagctatggctgtgtgacccttagccagttacttaatctccctgtgaccccagttacctcacctgaaaaatgaagtctagtgatggcagctacctgctagaattggtggaagaatgacataaatgaatacaattaaaatcttaggataatgattggtacgttgta

SEQ ID NO: 356788 - DNA, 600 bp, Homo sapiens
agaatttagtgagtgatatgtatggaacagttgtaccaggccctctcagaaagaggctgattgcagcttatgttccctcactaaagccaagactatttttaaactgtgaaagcccataactattctaatgwagtggaacatctgtaatggttgtggttcgccaagcaagtgtttgagaggcaatgcctggaaagtgcccagatatcttccggttgatacaaagaacaaaggaactcaaatagccaaaatgcaagctgctcacattcacagcttctcaggccaaaaatctggatatccgatttgatcatgttttttacccccctactcaatttatctgaaagttttgttagctccgaatgcaaactttacatcacatttatatacttctttcaaattccacagctaccattccattctttaccagcatcatcttcacttgccttactgcagtaccttcctagctggcctcgccattttcactcttctttcatcccaatctaatctccacacagctcctataatgacattttcaaaacataaatcaggtcatactcttcattagcttaaagccctgccatagttcctgaatcttaaaataaa

SEQ ID NO: 356789 - DNA, 600 bp, Homo sapiens
agaatttagtgagtgatatgtatggaacagttgtaccaggccctctcagaaagaggctgattgcagcttatgttccctcactaaagccaagactatttttaaactgtgaaagcccataactattctaatgtagtggaacatctgtaatggttgtggttcgccamgcaagtgtttgagaggcaatgcctggaaagtgcccagatatcttccggttgatacaaagaacaaaggaactcaaatagccaaaatgcaagctgctcacattcacagcttctcaggccaaaaatctggatatccgatttgatcatgttttttacccccctactcaatttatctgaaagttttgttagctccgaatgcaaactttacatcacatttatatacttctttcaaattccacagctaccattccattctttaccagcatcatcttcacttgccttactgcagtaccttcctagctggcctcgccattttcactcttctttcatcccaatctaatctccacacagctcctataatgacattttcaaaacataaatcaggtcatactcttcattagcttaaagccctgccatagttcctgaatcttaaaataaa

SEQ ID NO: 356790 - DNA, 600 bp, Homo sapiens
agaatttagtgagtgatatgtatggaacagttgtaccaggccctctcagaaagaggctgattgcagcttatgttccctcactaaagccaagactatttttaaactgtgaaagcccataactattctaatgtagtggaacatctgtaatggttgtggttcgccaagcaagtgtttgagaggcaatgcctggaaagtgcccagatatcttccggttgatacaaagaacaaaggarctcaaatagccaaaatgcaagctgctcacattcacagcttctcaggccaaaaatctggatatccgatttgatcatgttttttacccccctactcaatttatctgaaagttttgttagctccgaatgcaaactttacatcacatttatatacttctttcaaattccacagctaccattccattctttaccagcatcatcttcacttgccttactgcagtaccttcctagctggcctcgccattttcactcttctttcatcccaatctaatctccacacagctcctataatgacattttcaaaacataaatcaggtcatactcttcattagcttaaagccctgccatagttcctgaatcttaaaataaa

SEQ ID NO: 356791 - DNA, 584 bp, Homo sapiens
catttggggaggggcagctgcagtcrcaggttctgtggacttaatctttcctgcctgccagctgtgaagagagcagctgatcctggcaagggggattctctcagcacagcacagcagctctgctaaaggacagactgcctccccctcaagtgggtgtccctgaccctgtgcctccttactgggtgagacctcccaactggggtcaacagatacctcatacaggagagctccggctggcatcaggcaggtacccccctgggatgaagcttccagaggaaggagcaggcagcaatttttgcttttctgcagcctgcactggtgatattcaggcaaacagggttgagaatagacctccagcaaattgcagagacttgcagaagagaggcctgacaacaagaagaacaaacagaaagcaacaaaaacaacaacaacatcaacgaaaagatgccccccaaaaaaccctatccaaaggtcgtcagcctaaaagatcaaaggtagataaatccattaagatgacaaaaaaaccagcacaaaaaccctaaaaattccaaaagccagaatgcctcttctcttccaaatgattg

SEQ ID NO: 356792 - DNA, 606 bp, Homo sapiens
agctataatatataaaacacatgtgttgtgaagttagaaggggagctttgtgttcaagaatgatggatgaatctaaaattctttcctgagccttgattatttaggtttttgatgcttctgcactgtcagctaagaagaaaattctgttttttrcaaacagttctctaatgataacaaatggtcaaattcagcttggcaaaatccccttttttagagtattctttctggagatggatgacttttaatagtctccatatgcacaccctgcctacataagatataacaacacttaaggtaagttaaaatggacaagaatgccatatcttaagtatttttttcattaggttatccttttttcaaaggccatgacattttacctgacgttttagcagattggactgccctgcttaagagactatcagaaagaatattaggaaagagacttcagaagccaaatagcttgaccttaaagggtgctgatgacctctgaaccagcttgaatcccttttgtcctctaatgttgcatgaataataaataaaacaatatcaccagaggtctacacaggtgctgtgtaagccaaagaatgtaacagcacagcagagctt

SEQ ID NO: 356793 - DNA, 554 bp, Homo sapiens
  misc_feature (1)...(554): n = A,T,C or G
nnnnnnnnnnnnnnnnnnnnnnnnnnnnaatattgtcacagcattagagactatcttctgaagtagacataattttatctagggccttgacttatgagaattgctgtagaaatactgtgctgatctgtaataatttctactattttgtcaattctaaaacttagagagtggcttcagtgctgaaaagaatggtctataatcatagttttgtgacaataacagtaataaaaaagataagtatgtgtattagtccattctcacactgctaataaagacatacccaagactgggtaatttataaaggaaagaggtttaattgactcacagttcagtatggctagggaggcctctggaaacttataatcatggtgcaagggtaagcaaacgtgtccttcttcacatggcggcaggaagaagaatragtgcccagtgaagaggggagtcccttataataccatcagatcttgtgagaactaactcactctgatgagaacaggatgggggaaaccacgcctaatgattcaatgatttccacctggtccctcatacagcac

SEQ ID NO: 356794 - DNA, 554 bp, Homo sapiens
  misc_feature (1)...(554): n = A,T,C or G
nnnnnnnnnnnnnnnnnnnnnnnnnnnnaatattgtcacagcattagagactatcttctgaagtagacataattttatctagggccttgacttatgagaattgctgtagaaatactgtgctgatctgtaataatttctactattttgtcaattctaaaacttagagagtggcttcagtgctgaaaagaatggtctataatcatagttttgtgacaataacagtaataaaaaagataagtatgtgtattagtccattctcacactgctaataaagacatacccaagactgggtaatttataaaggaaagaggtttaattgactcacagttcagtatggctagggaggcctctggaaacttataatcatggtgcaagggtaagcaaacgtgtccttcttcacatggcggcaggaagaagaataagtgcccagtgaagaggggagtcccttataawaccatcagatcttgtgagaactaactcactctgatgagaacaggatgggggaaaccacgcctaatgattcaatgatttccacctggtccctcatacagcac

SEQ ID NO: 356795 - DNA, 455 bp, Homo sapiens
ttatgatatttgcatgtggaagcatccttaattaattaatgaagccatttggattccacaggactgtcagttttctctctcttattccttttacyattcttattcttattattggctcatattgaaatgttatgtattcaaaacaaaaaatacagtttaagtattgagcctgattttttaaaaataataacgaatatttttcagatacagacatttttataagatttgtacataagcaatttcaaattcattgtgaaatatgcaataagatcattcaaacttattttcagaaatcatattgtggtgtgggtcacaatatgtaaattgtattgtgcccagttataactaaatcctcatcttatttcatcttataaaatatttagtatgtctaagtcatagtaacagaaaactaaatatacttcaacttatgttaaaaatttcaaatgtcagctcaa

SEQ ID NO: 356796 - DNA, 483 bp, Homo sapiens
agagcacacattgataacctaatgtcatacctcaaggaactggagaaacaagaactaaaactaaagctagaaraagaaattaaataacaaagataagagcagaactaaatgaaattcaaacaaaagaaaacacaaaatctcaatgaaataaaaagctggttctctgagaaaaataaaattgatacaccattagctagataaattaagaaaagaagagagaagtaccaaacaaactcaattagaaatgaaactggagacattaaaactgacaccacagaaatacacaagatcgttagagactcctacgaatatctttatgtactcagactagaaaacctaaaggaaatggacaaattactggaaacatacagccctcctaaattaaatcagaaagaaatagaaaccttgaacagaccaaaaacaagcagtgagattgaatcagcaatttaaaaattgccaccaataagaagcccaggactagat

SEQ ID NO: 356797 - DNA, 556 bp, Homo sapiens
aaacattagctaaccaaatccaacagcacttcaaaaagataatatatgatcaagtgggtttcataccaaggatgcacggatggttaaacatatgcaagtcaataaatatgatacatcacataaatagaatgacaaacaaaactatgtgatcatctcaatagatgcagaaaaagcatttgacaaaatccagcacctttttatgataaaatctctcaacaaacgaggcacagaagggacctaccacaaaataagaaaagtcacataagacaaactgacacccaacaccataattataggggaaaagttgaaggcattgcctctgagaacaggaacaaacaatgatgtccactatcaactcctattcaayaaagttctggaagtcttagccatagcaattaggcaatagaaaaaaataaagggcatccaagttggaaaagagaaattcaaacaattgctctttgcaaatgatatgattgtatgcctagaaaatcctaaagactcctccaaaaaatgtagattttataaacaaattcaggttacaaaatcaatgtataca

SEQ ID NO: 356798 - DNA, 556 bp, Homo sapiens
aaacattagctaaccaaatccaacagcacttcaaaaagataatatatgatcaagtgggtttcataccaaggatgcacggatggttaaacatatgcaagtcaataaatatgatacatcacataaatagaatgacaaacaaaactatgtgatcatctcaatagatgcagaaaaagcatttgacaaaatccagcacctttttatgataaaatctctcaacaaacgaggcacagaagggacctaccacaaaataagaaaagtcacataagacaaactgacacccaacaccataattataggggaaaagttgaaggcattgcctctgagaacaggaacaaacaatgatgtccactatcaactcctattcaacaaagttctggaagtcttagccayagcaattaggcaatagaaaaaaataaagggcatccaagttggaaaagagaaattcaaacaattgctctttgcaaatgatatgattgtatgcctagaaaatcctaaagactcctccaaaaaatgtagattttataaacaaattcaggttacaaaatcaatgtataca

SEQ ID NO: 356799 - DNA, 567 bp, Homo sapiens
ggtgggtttgcattctgagtctctgcatgcaggacaagcagcagcctctgtgttggaggacaggagtgggtctcaggccactggcatgatgttccagagtgragcattgctgcctgtgcttcacagaagagtttgtgcagggagtggggtatagcaggcagtggtgagacccacagttcccacgcacctggcaaggcagatccactcccacagtgttccactggcagcagcaagctgagttccagtcagcctgtaatcagaacttgccactgcctggagtcgtaagcttttcccttggagatttcagctgtggcttccagggcatgctattccctgtgcactgcagagctggcgcctggctcctgcacccactggcttctgcactggcacgtcctgcactcatgactcctgcacttgcactctccctcgccccggccctgaccaagggggttcatccctacccaagtttatatcatgaaaccctgttgggaacttctttcaacctatgaccaccacctgaaatttttggctgtcctctgcagcatcccctgtgaggaactgtaagga

SEQ ID NO: 356800 - DNA, 540 bp, Homo sapiens
gttaaatacgatgtctaagttgcttgcttgtcatttgttgagtaaataaacataatggcagccttgtaacataaactagattgtctacaagcccaccggaagtataggcagtggctaatatattctgtttctaacccagcattatacctagtgtggaaggagaaaattattttctaacattctccaatgttcactggttagcatgagggaaatactaagtcaggaggtaaactaagttaagaaaatataaagtgtcttaaacagcaaaaaggagacgaggagcatatttgctggaattattacagagagaatttagatgtatgatgtagtctcaatagaggctggttagtgaaagaaactcctacttagcctcttcatattaggccccaaattcacctgttagtatcatgattaacaggtaacattkgtgtttcttaggtgagtaaatcttaggatattctcttagataaacatatattcttaattatttttatatgtttaaaatagtgtcaaaaatatgataaaaatatttgggttgaa

SEQ ID NO: 356801 - DNA, 563 bp, Homo sapiens
tgatattgatggaagattgaaaaaatttctgaggaggataaaatataaaagcctctcattaaattctcccacatttattttcagtatttgcttatatcatatgcacattgactctacagatactgttctataacagcacctaaaacaacaagggtcttagagatgaccagactgagctacataaacattgatctatatatatggtagctagaatcagaacaaagatttttctgagtttcagacaggactatcatgcaaatgtggcttcattaccaggaaaatattatgaattataatactccctaccattgaacctcttgccttctctttagcttttctattctgtcagtggctcaagtaaaaaacaaaacatgtctcttttmaatttccctttcagtcaattctgtgaaactgagaagagaggcgaaaaaagcaacaacaacaaaaaaaatgtagcatgttttgataggcctccttagaatgaacatggcacctgtctaattataagatactgaaaaataagaatctttaaacagacatctgccccatctgcccttgtcaac

SEQ ID NO: 356802 - DNA, 627 bp, Homo sapiens
cccactggtacatatgtttgagatcctgggaatgcaagaagttatatctatgttacttttttcatgatttctttattaaacatttatcaagtgactagtatgtgacraagatatctgaattggaagtgggccctaatactaaggagctattgacaaagaggaaatctaaaacgaataatagaataaaagcaatgcaaagtagaacttaaaaaaatgtatagagaagcatccaaagaaggtagaatgcaatttcataggaaggtgaaattatttacacctgggggttaaaatattttaaattatttaaattttatttgaacatgttaatatttctcaattatttaaaacccaactaaagtgagacctatataattctttcaattagcactctataaatgtttattgatatatctcaattggcatgttaaattttagattgtgttccaattttagtttaggagggaggtcctgtgagaggactgaatatctttcaatttgggttaaagcaattatgaaagattccattccatctttctttacatggagttttattcctttaatgctgataactcaaaatttaaacaataaagtacaggatttgctccacattgggtcatcttatgacaa

SEQ ID NO: 356803 - DNA, 627 bp, Homo sapiens
cccactggtacatatgtttgagatcctgggaatgcaagaagttatatctatgttacttttttcatgatttctttattaaacatttatcaagtgactagtatgtgacgaagatatctgaattggaagtgggccctaatactaaggagctattgacaaagaggaaatctaaaacgaataatagaataaaagcaatgcaaagtagaacttaaaaaaatgtatagagaagcatccaaagaaggtagaatgcaatttcataggaaggtgaaattatttacayctgggggttaaaatattttaaattatttaaattttatttgaacatgttaatatttctcaattatttaaaacccaactaaagtgagacctatataattctttcaattagcactctataaatgtttattgatatatctcaattggcatgttaaattttagattgtgttccaattttagtttaggagggaggtcctgtgagaggactgaatatctttcaatttgggttaaagcaattatgaaagattccattccatctttctttacatggagttttattcctttaatgctgataactcaaaatttaaacaataaagtacaggatttgctccacattgggtcatcttatgacaa

SEQ ID NO: 356804 - DNA, 627 bp, Homo sapiens
cccactggtacatatgtttgagatcctgggaatgcaagaagttatatctatgttacttttttcatgatttctttattaaacatttatcaagtgactagtatgtgacgaagatatctgaattggaagtgggccctaatactaaggagctattgacaaagaggaaatctaaaacgaataatagaataaaagcaatgcaaagtagaacttaaaaaaatgtatagagaagcatccaaagaaggtagaatgcaatttcataggaaggtgaaattatttacacctgggggttaaaatattttaaattatttaaattttatttgaacatgttartatttctcaattatttaaaacccaactaaagtgagacctatataattctttcaattagcactctataaatgtttattgatatatctcaattggcatgttaaattttagattgtgttccaattttagtttaggagggaggtcctgtgagaggactgaatatctttcaatttgggttaaagcaattatgaaagattccattccatctttctttacatggagttttattcctttaatgctgataactcaaaatttaaacaataaagtacaggatttgctccacattgggtcatcttatgacaa

SEQ ID NO: 356805 - DNA, 627 bp, Homo sapiens
cccactggtacatatgtttgagatcctgggaatgcaagaagttatatctatgttacttttttcatgatttctttattaaacatttatcaagtgactagtatgtgacgaagatatctgaattggaagtgggccctaatactaaggagctattgacaaagaggaaatctaaaacgaataatagaataaaagcaatgcaaagtagaacttaaaaaaatgtatagagaagcatccaaagaaggtagaatgcaatttcataggaaggtgaaattatttacacctgggggttaaaatattttaaattatttaaattttatttgaacatgttaatatttctcaattatttaaaacccaactaaagtgagacctatataattctttcaattagcactctataaatgtttattgatatatctcaattggcatgttaaattttagattgtgttccaattttagtttaggagggaggycctgtgagaggactgaatatctttcaatttgggttaaagcaattatgaaagattccattccatctttctttacatggagttttattcctttaatgctgataactcaaaatttaaacaataaagtacaggatttgctccacattgggtcatcttatgacaa

SEQ ID NO: 356806 - DNA, 286 bp, Homo sapiens
gctagtaaacatgcccagtaccaagcaytaaatcagtcaggttttggtaaagaatgtagaaaccaccttaaataccttttttaagcgtaattgccgctaacctacccagccaattaaaaggcttaattttctggctacttttacatgtcttcttcctgatacttccatgttgtaagttgccccactactaattatagccactattcttcatgttgtggaccactgaatgggacaacaccccttcttccattgagccctgaaggaaattggatgaagcagaaccaaa

SEQ ID NO: 356807 - DNA, 577 bp, Homo sapiens
gagggttagaggacagaatgttaagtgatgggtaggaagtaaatgccagctatgactcaagtaaatgatacataaactgtgacaaaggatctgtgccaacaggtcagatatatttagtatgcagtgtctgtggtccctgcaaattgagtctataggaaaggataacacactaaattatttgatgtcaatattgttggattggggatttgcattaaaacatatttgtaaagtatattaaaccaaccaaccaaaccaaaattytgaactaactaatctttttcaggaaatttagtttgaggatggagtaagatgggaattaatgctaattttatcaccaagtaaaagaactgcccagccactaggtttatcattctactaaaaccagatgcataatgcatcagagtcagagttgtccctatagcaaagggaccatgatacttaattctacctcgcaagagctgagggtatacatcctgccttgactcaggaaaaaaaaaaaaaagtgaatgagagtctgcctctaggaaggctgtacctttgatataatgagtgataaaaaagagatgagccagaggga

SEQ ID NO: 356808 - DNA, 602 bp, Homo sapiens
cttggctaactatgggaagagaaactcactaatttgtgaggaagcctgttaaataattacagctttgtagttactcaatctcttctttatagatgacaattctacttcagtataactttyattcagttttcacatacacagatgtgaacaaactcacttacacaaacacacacttttgccttttgtctacagaacttcaaatatctatagttctatgttctcattctattttaaccaggcgaacactctctcagaattagtgaaattactgccttttgtttccaagcaatggcaacataaaatatgcccagcaatcagtgctgtgttgggtttgctacatataattcctacaacttgattttaccaaataatgaaactgaagcacagagaggtcagcaacccacccaagatcacacaactgaatattggtggcaggatttaattccagacttctgtctacaaggccagtgctcttaactgctttatttgggtgataaaataaggaaaaaaaaaaattttcatcagtttaacactttgcactttccaagaaacaaactcaaaatttaaaaaaagaaagaaaatgtgagtgacaagtaagagtc

SEQ ID NO: 356809 - DNA, 419 bp, Homo sapiens
ttttaattaaaatagaatagtaaaaatatgcagatacaactaaaaataaactaatgaaaatttcaaaaaatataccatgcatatcagaaaatgaactgaaaactttttcaatcttttgattaaaagatgtgttgaaagaaaacttcgaggagcttcagatttgtcttcaacttttaacatatttatattacaagagaaaatggccacgccaatgccaaaaaagaagataggctcaattaaaaataaatgaattcatagattgaaggttctggcaatgaaraaagccttgatttgggggaagtggcatcaccaatcagaattttaaccttggcattttagctcttctcagtccagtctttaagtgcttctagagtgcttcattatccaaatcatggtcatgcctgatgcagagagcaatt

SEQ ID NO: 356810 - DNA, 600 bp, Homo sapiens
gtctcatggtttagtgctatgcttgccatagtgagtgagttctcaggagatttggttgtttaaaagtgtgtggcaccacacctgccacaggctccccctgtgccttccrtgatgactgtaagctctctgaggccttacccagaagctaagcagatgcctggtaacaggtttcctgaacagcctgcaaagtgtgagccaactaaacctcttttttcaggaattaaaaaaaaacaagaagacagaacagtgatctggaattggcaaacaggggtaggcccattggtcttctcttttggaaatttccagctactggagaaggtgaaccctccctgaggtcaggctctgggaaaagtgtaatttgtggaaagattacagatttcggacagggatatgtgacagactagctgatacgaagagtatttttggaaaagaaatgttttcctagggcagaaggcgaggtatagagaattcagtcatttattataagaaactccctcctttgcagcagagaaaaatggtagacagacccatcatgaaagacatgagagttcagagaaaatgacaagaagttgggagttggctgatggataaaagaaaact

SEQ ID NO: 356811 - DNA, 491 bp, Homo sapiens
ttttgtagagatggggtttcaccatgttggccaggctggtctcaaactcctgatctcagatgatctgcccaccttggcctcccaaagtgctgggattacaggcatgagccatggcgcccagcaacttaggccgttttttaccattcactcttctgcaggtgaggacacagcaagaaggctcccatcagacactgattgctggtcccttgaccttggtcttagcctctggaactatgagaaaataaatttctgttattyataaattatccagtctgatatttttgttttatttatagtagcacaaatgggctaaaacaacctatcaacagcatttggcagagcataacacgttctctcatttgaaatatattttacttgcacatatgatatcatattctcatgattttattcctgccttactgagcattacttctcagaatcctttgctatgttttgctcatattcccagactctgattattggtaccacaa

SEQ ID NO: 356812 - DNA, 588 bp, Homo sapiens
ttaattccctgtatggagtttttttaaaaaaacatttaagctttttatttgctgtgaaaagcctgtataaagttatgttagtatatcttcctaattttattatcattcaaagaaagcatgagagttatgataaatcatatagtgactttgtctaaatgaactctatagtaaactgcgtgctatagctctgaaaaaccaaggtaatatagtaataaaaattggcatttgatatttttgtgacatttcatactatttttttttttttttttttgagacagagtctcgctctgttgcccaggctggagtgcagtggcacaatctcgtctcactgcaacctctgcctcccagtttcaggtgactctcccaagtaggtrggattacaggtgcatgccatcatgcttggctaatttttgtatttttagtagagatggggtttcaccatgttggtcaggctggtctctaactcctgatctccaagtgatccacccgcctcggcctcccaaagtgctgagattacgggcaggcatgaggcaccacaccagaccacatttcttactattaactagataaatctaaaaaagtgtacag

SEQ ID NO: 356813 - DNA, 588 bp, Homo sapiens
ttaattccctgtatggagtttttttaaaaaaacatttaagctttttatttgctgtgaaaagcctgtataaagttatgttagtatatcttcctaattttattatcattcaaagaaagcatgagagttatgataaatcatatagtgactttgtctaaatgaactctatagtaaactgcgtgctatagctctgaaaaaccaaggtaatatagtaataaaaattggcatttgatatttttgtgacatttcatactatttttttttttttttttttgagacagagtctcgctctgttgcccaggctggagtgcagtggcacaatctcgtctcactgcaacctctgcctcccagtttcaggtgactctcccaagtaggtgggattacaggtgcatgccatcatgcttggctaatttttgtatttttagtagagatggggtttcaccatgttggtcaggctggtctctaactcctgatctccaagtgatccacccgcctcggccwcccaaagtgctgagattacgggcaggcatgaggcaccacaccagaccacatttcttactattaactagataaatctaaaaaagtgtacag

SEQ ID NO: 356814 - DNA, 656 bp, Homo sapiens
tataaccaattggctggttgactagttgtgattggctgaggatctctctctccccttaaatcagttacaagaaatgcctacaaattaaatttcaggttccttaagtataagctttggttacagagacaacctttggctaatggccttcttatttgctttgatagagtaaagcatatgttagtaatgatgttttccacctaaaatattcatatgctgatatatatttattttgtaaaaactcataattcaaattcataaaaataaaaaagaaataaaattcattatcaagatttctattataattatggacatacagaagaatttcaataattccaattaaagtatattttatcactgcaattgttttcatattgaaacagacagtaaaaacatcaaagtaatagctacaataaaaattattaattatttacctctgagaaaatggtggggaatatgtttcaaactgaaagctatagaaacatggaaaatkttatattttaacttcagacaaaaagcaacacagtttcagtgcaataaggcaacagagaatcaagtaatgaaaataagtcattgctagggaacttgaaccatgactaaaacataatcaaaaatgtgtcactgctgaaatataaaatatctttgtcagacatcaaaaa

SEQ ID NO: 356815 - DNA, 506 bp, Homo sapiens
acactttctgtaatacttaaatattagttttatatgaaaaatataaaatagattatcatttatattttatgtagtcttttataaaagccctttaatttttattaaatataaataaataccagtaatacaacaaatatttatttttgcttctaatacatcttgcccaactatcattaaatgggcaktcaaattatatattaaaaagtaaatatatataccatatcatgagagttttatataattcgagatggaacatagtatggaaagtaagaaagacaatagttattgagacattagagaagtagttaatttgggcatcaggataagtaaaagaccaactagtggtctccaaactccagagcagttgaagcctctcttgaggatgtcaaagaaaaaatatacatgtgctttttttcaggtctcagaaattataacatgtttggacaatggtcttcgaatgaatgcattcaaaagtttaaagccagaatctctatctccttcactaa

SEQ ID NO: 356816 - DNA, 506 bp, Homo sapiens
acactttctgtaatacttaaatattagttttatatgaaaaatataaaatagattatcatttatattttatgtagtcttttataaaagccctttaatttttattaaatataaataaataccagtaatacaacaaatatttatttttgcttctaatacatcttgcccaactatcattaaatgggcagtcaaattatatattaaaaagtaaatayatataccatatcatgagagttttatataattcgagatggaacatagtatggaaagtaagaaagacaatagttattgagacattagagaagtagttaatttgggcatcaggataagtaaaagaccaactagtggtctccaaactccagagcagttgaagcctctcttgaggatgtcaaagaaaaaatatacatgtgctttttttcaggtctcagaaattataacatgtttggacaatggtcttcgaatgaatgcattcaaaagtttaaagccagaatctctatctccttcactaa

SEQ ID NO: 356817 - DNA, 501 bp, Homo sapiens
tatttttctatgaatccctatgtaaatgagggaaataataaaagtctcttgagagactatgtgttacattactgcatatgttacagctaatcaatattaattaatgtgttccattgaatagactgagagctagctacctctcagatatatctttgaaggactttcttatagcagttgaaagaataattcaagttttgaaaaaaatattatcatctatgtatttatctatatctgtatttgtccttatattgatatgaattttcatattgccartatatatctccctaaataaaggaatactagtaggacaaaaatccaaataataatagtaatatcttagggtggtaaagttatgggtgactttaatgtttttatagtttttttccctttctggattgtcttcaatagaggttgtctttataattagaacaaaataatattatagcaaaaataatattaaaatttttttcagatttcaattttcttttatgtaactgagaa

SEQ ID NO: 356818 - DNA, 441 bp, Homo sapiens
agaacacaaacatgcagggaggacaggaagaagggagtaggaacaagaaaaaaaaaaaaaggaccagaaagaagtagaaaaggccaccatggacatcccgggagagctgattaaaaagtcacagctgagccaagcctttgtcacaaaccaagaaagaattctcaggatttaatgggtagagtggtcaactagtgagaattgaaaggctcttctcaactgaagtaaaaatggtaaaaattgatctacgcctccttaacaattggcagcataatggtaaatggcagcaaacggtaataattgatmtatgcttccttaagttttctcaagagaagcaaaaatagtaaaaattggtttatgctgctttagcaatataaaataacactgcacctgatgagataagaaccagatattccctctccttgtagtgaaaagttgggttag

SEQ ID NO: 356819 - DNA, 581 bp, Homo sapiens
tttaaagttatttttatgactcaataatctaaatagcttgtcataaagcgaaaacttttaaacyagattttccaaaattattctgttattttaatgtttaatgactcctataatatttgaattttatacaaagtggatcaacttaattagatgagaccttgggtgctaaattctcctgtgcattgctgttcctgagcacctagtataatctaggcatggaacaaatgcttgttaaatggatgaaatacttaaaagaaacaacataccctccatttttatccatttctgtggaaatagttcctatcaacacaaatacaagtttctgtgcaaatgacctggtgtagatatggataatattcatgggtgtttcctaggaaaattcctgtccttttttttacagcttcaagtaacaaatgatagattcagaaactatgagtatatgagtagtctctagtgggctcactggaatttggacagaagcccctgattctgcattggtgtatcttatcaggaacctctcagattactaggaagtttcccctgcttttttttttctcactatgaaatcctctgatcaacct

SEQ ID NO: 356820 - DNA, 492 bp, Homo sapiens
tatttatttttgcaaaggggaaataattctctttttaaattatgaatgtgatcttgcctttgcttaccaaaaataaatcttggctcttttctggaatcatccacctgccgacaggattacttccagtaggattgtgctgagaaagtcctaggaaatatttagcttttaaaattcaaaggacaagctttggccctcagaaaggattatctaaattcctgtatctcctccttcagcttatataggatcaggctttgtggaaragacaagagttttatgtatgtaagggaagtccagacataacagaaagaggagaaagcctgcatttttctgcccttgggaaactatggaaagagaaagggaaaaaaatcccccctttcctgtgtttgtggctcctcacagtcttccctggggtggactgtagcatagtaatattgagggtgcagcataactgggcagcaagaggccctgagctataattatcatgaatccttt

SEQ ID NO: 356821 - DNA, 597 bp, Homo sapiens
ccctatttattaattaatgtgttcaaaacatatctagtgagcacatattatgtaacaggctcaaaggtatgaaaagataacacaacctccatgaggcttactaaataacagggaaaatgactaaatagtaattaaaacatgatgagtgtagtaattggagagatacaatattctctggaaacacagggcagaaacaataaatgtattatgtgatctatggatgtgaaagagggcgaggtggataccagagtagtgatctgaaaatccgtatgtgrctttttcttctcccgacatccttccattttttcttctatttttcctgtttcatatcttattccaaatatctatcttttttttttcttgtcccaacctgcctagtatctgttgttatttttttggtttgtttgtttgttttttttcttatcatctgtagttagattcagcatacgacttcagcaacagttctctttatagccaaaactcatttaattcatatccctattcagtttcctagacccacacagatcttgtggtgttagtactaaacttgtcatcagcagactcagatcaaaatcctgatattgctgagtaataata

SEQ ID NO: 356822 - DNA, 149 bp, Homo sapiens
atttctttataaaagtaaacaraagaagcatatcacagaatctcttaatgctataagtactaaatgctatgaaaaataaaggattaagagctcacaacacatcagactaattaggcatcacatcatgagaaaggtagcattttcagatg

SEQ ID NO: 356823 - DNA, 542 bp, Homo sapiens
cacacagggataaacctctagttattatgtctaaccatcaaccctgaccattgctgatttatccaagacggaaaactggatactagtgtgaccaatcaggtttcctctcctggaaattcaaaatgtgggatttacatacacagactggggagtagttggagctgagctttctaactggcagtgcttgacagagaggcttcctcarttcctctgtattctttctttctcaagtctcagttttcaattctggattcctgtaccttatctctgtttcaatgtgtgagatttttgtgtgtgtgtgtggcttgcaagcaaacaaacaaaatctcaaataatgcaaagctgagtcgaatgttccttctatgggattctggacttgggaaaaagtggttggggtggggggaaggagagaagagggagggataggggcagggagatagggagagggagagggaaagagtatgagactctagaattgttcagaacatattttccatgacaacagaaggttgagagaaacacgaggctgttttccagaaaga

SEQ ID NO: 356824 - DNA, 542 bp, Homo sapiens
cacacagggataaacctctagttattatgtctaaccatcaaccctgaccattgctgatttatccaagacggaaaactggatactagtgtgaccaatcaggtttcctctcctggaaattcaaaatgtgggatttacatacacagactggggagtagttggagctgagctttctaactggcagtgcttgacagagaggcttcctcaattcctctgtattctttctttctcaagtctcagttttcaattctggattcctgtaccttatctctgtttcaatgtgtgagatttttktgtgtgtgtgtggcttgcaagcaaacaaacaaaatctcaaataatgcaaagctgagtcgaatgttccttctatgggattctggacttgggaaaaagtggttggggtggggggaaggagagaagagggagggataggggcagggagatagggagagggagagggaaagagtatgagactctagaattgttcagaacatattttccatgacaacagaaggttgagagaaacacgaggctgttttccagaaaga

SEQ ID NO: 356825 - DNA, 503 bp, Homo sapiens
agtcactttaacacacactggcttaatataaaatgtattgctacgatatcttatattcattttcttaccaagtcttcaaaattcagtatgtattttatacttacagcacatctcaatttgaaygtaagtggctacatactatcatactggaaaccacagttctagttagctaacatttattgaatactttctgtgtgctttatgtgccttctctcaattaatcctcgcaacaactctatagttgctactactagacccactttatagataagcacaccaaaacttaaagagcttaggttatttgtctgagggctgctattggttgtagtgaaattgcaactggaccaacaggctttgacttcataagaaagcactggtttaaaatgagagccattggaagaggcagtaagacagattctgagacttttacaaaacgatgttgtagattagacacagaggtagaggctaattaacagcaggtcacaaggtgactagaaggaaac

SEQ ID NO: 356826 - DNA, 503 bp, Homo sapiens
agtcactttaacacacactggcttaatataaaatgtattgctacgatatcttatattcattttcttaccaagtcttcaaaattcagtatgtattttatacttacagcacatctcaatttgaatgtaagtggctacatactatcatactggaaaccacagttctagttagctaacatttattgaatactttctgtgtgytttatgtgccttctctcaattaatcctcgcaacaactctatagttgctactactagacccactttatagataagcacaccaaaacttaaagagcttaggttatttgtctgagggctgctattggttgtagtgaaattgcaactggaccaacaggctttgacttcataagaaagcactggtttaaaatgagagccattggaagaggcagtaagacagattctgagacttttacaaaacgatgttgtagattagacacagaggtagaggctaattaacagcaggtcacaaggtgactagaaggaaac

SEQ ID NO: 356827 - DNA, 544 bp, Homo sapiens
agataagacggaactaaaatgaggattaaccacagattaacaccaacaatgatctacggcctgaaagcatttccatcacacaaataaatatagtgagaagaaggatattgaaataattttgaagactaaagttataagaggacacatatatgtatgtgacacatagaaatggaaagcaaagacaaacaagtgtctatatttgattcccatacctgacgaataatgttttgtaagctttgctaacttgtagatttcgtgactgagccaaaagccctgatctatgtgaaaaagtgcctgacttagatgtgactgaagaatgatattcaatatttggttatggttaaattggtcatttaagaagatcttcaatattctaycagtttttgggcctcaacatctaccaataacttcataggaagtaaaggcatatcaggagaattaaagagttaatggctttaggaaggatttttaaattcaatttagaataaataaaagcatttgtgaaaaagaagtacaaaagaggaattacacttgtgttttcaaa

SEQ ID NO: 356828 - DNA, 544 bp, Homo sapiens
agataagacggaactaaaatgaggattaaccacagattaacaccaacaatgatctacggcctgaaagcatttccatcacacaaataaatatagtgagaagaaggatattgaaataattttgaagactaaagttataagaggacacatatatgtatgtgacacatagaaatggaaagcaaagacaaacaagtgtctatatttgattcccatacctgacgaataatgttttgtaagctttgctaacttgtagatttcgtgactgagccaaaagccctgatctatgtgaaaaagtgcctgacttagatgtgactgaagaatgatattcaatatttggttatggttaaattggtcatttaagaagatcttcaatattctaccagtttytgggcctcaacatctaccaataacttcataggaagtaaaggcatatcaggagaattaaagagttaatggctttaggaaggatttttaaattcaatttagaataaataaaagcatttgtgaaaaagaagtacaaaagaggaattacacttgtgttttcaaa

SEQ ID NO: 356829 - DNA, 583 bp, Homo sapiens
cagcatgactaggacaatacatcatgtaccacacatcatgggattcatctttggggtgcaaggatrgcatgacatgtgaatcaattaatgtgaaacattacattaacagaatgaagaataaaaatcacatgatcattttaatgatgcagaaaaagcgtttgacaaaacgtaatagtctttcagtataaaaactcaaaaaactagaggtaaaaggaatttacctctacataataaaggtcacatatgataaactcacagctcacattatagcagatgattaaaaaactgaaagttttcctctaagattaggaaaaagatgaagagtctcaccttcaccacttctattcaatatagtattggaagtactagccagatcatttaggcaagaaaaataaatgaaaggcacctaaattgaaatggaataagtaaaattgtctctgtacatgacttgatctcatatagaaaagcttaaagactctacaaaacaaacaaaacaaaacaaaaaaccaaaaaacctgttagaagtaatttaaaaagtaagtataattgtaatatacaaaatcaagatataaaaatcagttgt

SEQ ID NO: 356830 - DNA, 583 bp, Homo sapiens
cagcatgactaggacaatacatcatgtaccacacatcatgggattcatctttggggtgcaaggatggcatgacatgtgaatcaattaatgtgaaacattacattaacagaatgaagaataaaaatcacatgatcattttaatgatgcagaaaaagcgtttgacaaaacgtaatagtctttcagtataaaaactcaaaaaactagaggtaaaaggaatttacctctacataataaaggtcacatatgataaactcacagctcacattatagcagatgattaaaaaactgaaagttttcctctaagattaggaaaaagatgaagagtctcaccytcaccacttctattcaatatagtattggaagtactagccagatcatttaggcaagaaaaataaatgaaaggcacctaaattgaaatggaataagtaaaattgtctctgtacatgacttgatctcatatagaaaagcttaaagactctacaaaacaaacaaaacaaaacaaaaaaccaaaaaacctgttagaagtaatttaaaaagtaagtataattgtaatatacaaaatcaagatataaaaatcagttgt

SEQ ID NO: 356831 - DNA, 547 bp, Homo sapiens
actattcacaatagcaaagacatggaatcaaccttaattccccttcaaccatagataagataaagaaaatgtggtacatatacaccatggaatactatgcagccattaaaaaaatgagatcatgtcccttgcaggaacatggatggaactggaggccattactctgagcaaattaatgcaggaacagaaaaccaaatactttatgttctcacttataagtaggagctaaacattgagtacacatggacgcatgtgtacttgaggatagaaggtagaaagagggagggaataaaaaaactacttattgagtactctgcttataacctaagtgacaaaataatctgtacgccaaacccctgtgacacgcaatttacctatataamaaacctgcacatataccctgaacctaaaataaaatcttaataaataaataaaataaaatttgtattgtatcctttgttataatttgtttatataagatttgattttaaagaacttaccactttattttaattgattctgattctgtttatctagtcttttcatt

SEQ ID NO: 356832 - DNA, 523 bp, Homo sapiens
acttcaaaattccactgaagagcctcactaatggataattagttcacagtaaagagaaagacaaaactctatggtcttcaaccttctctggaatcactggaagagagggctgcctaaaaactatttctgcacagtagcaaggtcacattctggttaacctgggaggggtcactggctccacgcagtagytaggatgcaataagcaagcagtcttgtctcttcaggctaatagctgcgctccctctagtggtcacagtagtgaactgaaatctagcggcttgaagactttaaaccaaagtaaatagactgacactgttctctacatgtggctgctgcttcaggcaaagcatctgggagtggctaaacacagagcctctgagcctctctatatcagatgctttgatacacctcccgttttgccaagcaggagtctgttgtggctgaggcctttgtaggcaaggagtgctttggctcattttaagccagcctcacactgatgtctgctgtatggtgcattttatta

SEQ ID NO: 356833 - DNA, 523 bp, Homo sapiens
acttcaaaattccactgaagagcctcactaatggataattagttcacagtaaagagaaagacaaaactctatggtcttcaaccttctctggaatcactggaagagagggctgcctaaaaactatttctgcacagtagcaaggtcacattctggttaacctgggaggggtcactggctccacgcagtagctaggatgcaataagcaagcagtcttgtctcttcaggctaatagctgcgctccctctagtggtcacagtagtgaactgaaatctagcggcttgaagactttaaaccaaagtaaatagactgacrctgttctctacatgtggctgctgcttcaggcaaagcatctgggagtggctaaacacagagcctctgagcctctctatatcagatgctttgatacacctcccgttttgccaagcaggagtctgttgtggctgaggcctttgtaggcaaggagtgctttggctcattttaagccagcctcacactgatgtctgctgtatggtgcattttatta

SEQ ID NO: 356834 - DNA, 608 bp, Homo sapiens
attttctgaaattgtacaacgtttacagcagttggtgctttattatcagcactgagtctacgtgacttctctaggggacataggttgtgagaatgtgagaattccctgagcacgtatccacagtgtacttygttgctttactgttctttgcaagcacagcagtgttttcttggtatgttatttgactttatgtctcaggtgcctagcatactgtacacactaaataaatgtttagtgaattcatgaccagatgccatggaaatattaggctcagatgccaggaaatggccccagcactttccaggtggttcgtagcagtgagcccaactttctggcggctggatgattgtactcttatgatcagcctaaggcagcaacaaccatcgctgctgtctcttgcgtgaagaatagtggttgctgattgctgcccttcataagatgttctggggatttctgaaggggctgggacaccacctggcttccttgacatcctgtggtatcactctacgttgcttgttgaatcacgttgtgtgtactgggctgtcagttctttgagagcaagaaccaaaattgttttgtttatgcttgtgttcacagcccagagagca

SEQ ID NO: 356835 - DNA, 608 bp, Homo sapiens
attttctgaaattgtacaacgtttacagcagttggtgctttattatcagcactgagtctacgtgacttctctaggggacataggttgtgagaatgtgagaattccctgagcacgtatccacagtgtactttgttgctttactgttctttgcaagcacagcagtgttttcttggtatgttatttgactttatgtctcwggtgcctagcatactgtacacactaaataaatgtttagtgaattcatgaccagatgccatggaaatattaggctcagatgccaggaaatggccccagcactttccaggtggttcgtagcagtgagcccaactttctggcggctggatgattgtactcttatgatcagcctaaggcagcaacaaccatcgctgctgtctcttgcgtgaagaatagtggttgctgattgctgcccttcataagatgttctggggatttctgaaggggctgggacaccacctggcttccttgacatcctgtggtatcactctacgttgcttgttgaatcacgttgtgtgtactgggctgtcagttctttgagagcaagaaccaaaattgttttgtttatgcttgtgttcacagcccagagagca

SEQ ID NO: 356836 - DNA, 619 bp, Homo sapiens
tgctttattatcagcactgagtctacgtgacttctctaggggacataggttgtgagaatgtgagaattccctgagcacgtatccacagtgtactttgttgctttactgttctttgcaagcacagcagtgttttcttggtatgttatttgactttatgtctcaggtgcctagcatactgtacacactaaataaatgtttagtgaattcatgaccagatgccatggaaatattaggctcagatgccaggaaatggccccagcactttccaggtggttcgtagcagtgagcccaactttctggcggctggatgattgtactcttatgatcagcctaaggcagcaacaaccatcgctgctgtctcttgcgtgaagaatagtggttgctgattgctgcccttcataagatgttctggggatttctgaaggggctgggacaccacctggcttccttgacatcctgtggtatcactctacgttgcttgttgaatcacgttgtgtgtactgggctgtcagttctttgagagcaagmaccaaaattgttttgtttatgcttgtgttcacagcccagagagcataccgaacacagcgcttaataaatgtttgtggaaaaaaataaataa

SEQ ID NO: 356837 - DNA, 619 bp, Homo sapiens
tgctttattatcagcactgagtctacgtgacttctctaggggacataggttgtgagaatgtgagaattccctgagcacgtatccacagtgtactttgttgctttactgttctttgcaagcacagcagtgttttcttggtatgttatttgactttatgtctcaggtgcctagcatactgtacacactaaataaatgtttagtgaattcatgaccagatgccatggaaatattaggctcagatgccaggaaatggccccagcactttccaggtggttcgtagcagtgagcccaactttctggcggctggatgattgtactcttatgatcagcctaaggcagcaacaaccatcgctgctgtctcttgcgtgaagaatagtggttgctgattgctgcccttcataagatgttctggggatttctgaaggggctgggacaccacctggcttccttgacatcctgtggtatcactctacgttgcttgttgaatcacgttgtgtgtactgggctgtcagttctttgagagcaagaaccaaaattgttttgtttatgcttgtgttcacagcccagakagcataccgaacacagcgcttaataaatgtttgtggaaaaaaataaataa

SEQ ID NO: 356838 - DNA, 569 bp, Homo sapiens
gtgtaactcatttacctggctgacgtaagaggaatttgatagcttccaaaagtttccactctcttccctagccrggaaatcagaatgcaggtgcatcagagagactgaagaaagtttaatgtagatttgtcaggtgtaggggggaatatttgaagagaaaattcctgtaaccatgtgtgtgtgtgcatgcatacacacaggcatgtctgtctacacaacacacatgaggaagaggtaatagaaagagaaatgctctttctgcattcaatggagagagagagagagtggagaaaaaaaattgtaatgactcattctgagccatggaagaatttcaaagcaagtgctagaactctttactctcccgtctttagaagtctctcatttacttatttactggtttctcaaatagaatttctgaacacttgtcaactctaacactttgtgtatcatcttcttgattacttattgctcacagtttccatttcaaacatcttatttcagttattaagtttctacttaaaactaggttggaagcaagaatgaataattcagtactcattttctttatc

SEQ ID NO: 356839 - DNA, 583 bp, Homo sapiens
agtaattgtgatgtttctctatgacattgtacatggctgtaaatgattttgatttgtgaagtgatttgcctgtataggagaattattaaactgagttattgtcaaacagaaattgmaatagttgatgaaaaggttaaaatagtttaatactgtttgaccttatctatctatctatccttccatctatcatctgtctatctgtctatctatctatccatctatctatctatctatcatctacctacctgcatatctacctagattctaaatgttcagaaagagcgaaagatcagtttcttgcaaaagtggacctgaatgactgaattagaaataactgtgggcagatttaatgtcatcaaaatacgttgtttagaatgaaaggaaagatgtgttaggaaagctttcttcatagtgtaatgctggcataagtagcacagctgtgtttgaatggtaattaatatctgtaatgtaaatctcagttgagtaaatactggactgaataccagaagaaatgacctgagggaacttatatgtcagggagtgattagtatatactctcaaagaaatatgagttataaatttg

SEQ ID NO: 356840 - DNA, 567 bp, Homo sapiens
gcctgttattcctgcagaccctcaactcctgatgtcatgaatcttaagggagtattttaaaaacaaattataaagtataaattagcttakcatcatgttgtacaccataaatatataaagtttttatttgtcaatttcaaaatgaataaagacagtgaaacaatacaaaatgtataacatagtttaacttacttggaagttatcttcagcaacagcaggaatacagtaagagtagtattgtaaaataggaagtctcaaataatttatgttgtggtgagtctgaaataatttaggagtaaaaatatccttacaaacattaggatgggtgaggtaacccagaggtgaggagtgatatatgtatatcccactgttttacccagttgattcaatattcccagtgacatttatgtttagaatttgcattatgtaattttataacaagttctgaatgaaggtgagtactaggattatggagacatgacaagcaggtattgtaaagacaatttactttttttcaggtcactctcctatgtgtgtgacggatgtaatgctgagtcagttgtatat

SEQ ID NO: 356841 - DNA, 567 bp, Homo sapiens
gcctgttattcctgcagaccctcaactcctgatgtcatgaatcttaagggagtattttaaaaacaaattataaagtataaattagcttagcatcatgttgtacaccataaatatataaagtttttatttgtcaatttcaaaatgaataaagacagtgaaacaatacaaaatgtataacatagtttaacttacttggaagttatcttcagcaacagcaggaatacagtaagagtagtattgtaaaataggaagtctcaaataatttatgttgtggtgagtctgaaataatttaggagtaaaaatatccttacaaacattaggatgggtgaggtaacccagaggtgaggagtgatatatgtatatcccactgttttacccagttgattcaatattcccagtgacatttatgtttagaatttgcattatgtaattttataacaagttctgaatgaaggtgagtactaggattatggagacatgacaagcagktattgtaaagacaatttactttttttcaggtcactctcctatgtgtgtgacggatgtaatgctgagtcagttgtatat

SEQ ID NO: 356842 - DNA, 605 bp, Homo sapiens
ttttaatccatctttgtaacactgtgtatgtttgcattttggaactacaaggaaattttaaagatcatcttgaacaagttccttaacttctcagtgcctcatttatctyacttataaaatgggacaataaactttctgcttcttagggttgttacaaggtttaatgagataatacatgtgaatgacttagccaagtgtctaaaacagaataaagacttagtaaatatcaattgttattatttttactattatctaatgtagtcttcccattttccagtgaggaaatgtagacatgctatactgtaagtttggatgtctacccatcatgcctccctttggaactggcccccaccaacaggaatggttccttgacacatgacaaaattggaccaatgctggtaaagctgagaggttatttagcagcatggctggcaatggaggcttccagtgatttttagcaggcatgtggaaacgttgtaaaagctagttgtgaagagagaagaataaattggccagggatagagcattgggccttgcatagtaaaaagagtggctgctctgtttctgatgatattttagttcctgtatctttttctcataaatcg

SEQ ID NO: 356843 - DNA, 607 bp, Homo sapiens
tattgacttttaaaaaagaaattaggaaattgtttatctccttaacataagatttttagtgtgatagctaaacgcaaataattggctccttgggttggaaccagaaaatttcccaacttcattcccttatcattctgccactagtaagtaaattttgagcagtggaaagacttccaaagtgggctaatatcagtgaggtaggacatgcggtgaaggttactggggggtaatagtggccgaggggagtggtgaagtggcatcttacccggaggaggaaaagtattttgttctaaagtttggaagaggcaggaaagggtaggaaatgttttttctgacgggcttgtgccacaaagtttgagaaccaggtcagtagaacctgcagctcctgctagtgcttcagttgaatagttacagatagatacctcttgactctgaaaacatctgtcccatgccacactgctgacatctttcctaacaccccactttacctggcctcctcagtggtaacttactkagtccttgaatccttgcttcccattttaatagcaaggtaactgctgaccctttcttgaactgtggctttttcctgttttctgggcattgaata

SEQ ID NO: 356844 - DNA, 560 bp, Homo sapiens
gtcttctaacaacatcaacagctctagtttcttaatctccagaggactgcractccagctcacagtctcacttagtcctagagtgcctgatttctcctacctggacatctccagatccttgactcatcaatcctatctaggatggctgatataaccccttttcatatttccttgtctcaattccaaatcatagatttggaagcattatattgggagattcgttatattgggagaatatcttgtgggtatagcaagagaaccccattagaaggcaacattaactactacttatggcagagagtggcaatgccaatcctatattcttatttcttcttcctcactaatcaaatccgatcttctttagtttgacaatatgctctctaaagattacattgatcagactccctacaaaaaaggtgaccaatgagaagtatgcagtggtcaagtgggtagcttttcctgaaagctccttaaagggagctgactcatctgtgctcttcttgccctttaccctttcttcccccttcacgtctttagctgaggtataatggctggagctt

SEQ ID NO: 356845 - DNA, 626 bp, Homo sapiens
aggctgagtttctggtctcacaccaacatcttgtcccaccacaagaaagcttctcactaaaaggccaggcttctcccaacctgaaacttctggttcctgtagacagactaaggctaatagctgacacgaactgaggcctactctatctcaaatacagttaatccttcaaccatattttttggaaaatactcattatcatcattcccttttacacatgcagatattggggcccaaatagattaaataaaccaccacatgtcagcaccagcatcaccackatagacagatgctgatgccacacagctcacaacttgcctggagccatctctggtcctctgttctcctgcccttgagggtagagttagcgtagccaggatgaaaagggatttaaaaagtaacaaacagcatcttctaatgtcctatttttcattcccaaatattctgtcttttagagaattgtcttgttcaggctcaggtctccgaagagagctctgaaaagtggattaatttgcttttcatttatctaacaaagactcactcaagcacctctcatgcacagtgagtactgaactgactatgaaagagaaaataacacccagatgttgtccataccctagaaggattat

SEQ ID NO: 356846 - DNA, 598 bp, Homo sapiens
ccaaaaaaaaaaaaaagtggggtcgtacaggaagaaagagagtttaaaagcacatgaacattttgagaaaaaatatcagggagctcgtgggcttccctgctgcccacacagggactataggttaagaaatcttgaggaggcaggtgagcgagcagagacgggaggtgagtgggggtcggggaaataaaggtctaaagcagcatttctcatccaggatgccactggcacatttcraggaacaagtcttcaccagataggatgctgagtacccctggcccagcccctggccactaaataccagaaatacccatctctccagtctgcaacaaccaaaacatgcacccacatattccggaatggcaccaccccactggagaacccctgttcaagagggagcagacaaggcagcaaagaaaacttggaaagttccaggatggaaagaaaagcagatccaatcctccagccaccccgccaaaatatacccaggatgtgacccttctcctcacttccccacctccaccatcagcacctcatctaagccatcccttgcacggattgttgcaattatctcctaactggtctttctacttctagcctt

SEQ ID NO: 356847 - DNA, 598 bp, Homo sapiens
ccaaaaaaaaaaaaaagtggggtcgtacaggaagaaagagagtttaaaagcacatgaacattttgagaaaaaatatcagggagctcgtgggcttccctgctgcccacacagggactataggttaagaaatcttgaggaggcaggtgagcgagcagagacgggaggtgagtgggggtcggggaaataaaggtctaaagcagcatttctcatccaggatgccactggcacatttcaaggaacaagtcttcaccagataggatgctgagtacccctggcccagcccctggccactaaataccagaaatacccatctctccagtctgcaacaaccaaaacatgcacccacatattccggaatggcaccaccccactggagaacccctgttcaagagggagcagacaaggcagcaaagaaaacttggaaagttccaggatggaaagaaaagcagatccaatcctccagccaccccgccaaaatatacccaggatgtgamccttctcctcacttccccacctccaccatcagcacctcatctaagccatcccttgcacggattgttgcaattatctcctaactggtctttctacttctagcctt

SEQ ID NO: 356848 - DNA, 609 bp, Homo sapiens
aattgactgctgtgtggcagtccatctagagtcttgtgctgaaaagtccagaaaattgagttacaatgctggcttcagtacgacttaactccttgacaaatcccaggctgaatctcaacatccttatatgaaaatgggaatgctgtattcacacttgttttccccaagtccactttagacaaatctgtacctgtaggaaataacacaaaacacaactctgttttaaaataaaaagaggctgggtgtgatggctcatgcctgtaattccagcactttgggaagtcaaggtgggaagattgcttgaagataggagttcaagaccagcctggacaacatagtgagaacctgcctctaaataactagatagatagatagatagatagatagatagatagatagatagatagtcctaaagaaaaagcaaaatcccagcagggagggggagtaaatggctgaagagcatgagtgctgtgggaatctatagaacaggggtctgcaaaccacctgagggccaaatccagcctgccatatgtttgcaagagctaagaatgatttttacatttgtaaagattttttttwaaaaaaattcagataagactattttgtggt

SEQ ID NO: 356849 - DNA, 580 bp, Homo sapiens
tagccacatttcgagtgttcaacagccacatgtggccaagggctaccatattggacagcatagttctgtctttttccttctcatatttgttactctattctccaacaggaagaaatctggagtacaggaatacgtaggagatagcttcataaatggctaacttatgcctctgaaagaaagcaaacttacaaaagtttaatgcttcaattttttagatcaaamacatatagtgaaagccacaaatctggagcatacatctcagtgcattttaaccaatgcacacacctgcataacccacatgtctatcattttcatcacaaacaaaatgattgttttcatcacagaaatttctcctgtgctccttcctagtcagttccctgcccaaatcagaggcaataatttatctgacctttttcatcatggagtagattttcctcttctagaattatacattttcataaatgtggtcacagtattctttttgggtgtaaatctggctttttcctctcagtataatatcttgaaattcatccatatttttacatgtattaaagtttattcctttaagtcactaatgagt

SEQ ID NO: 356850 - DNA, 580 bp, Homo sapiens
tagccacatttcgagtgttcaacagccacatgtggccaagggctaccatattggacagcatagttctgtctttttccttctcatatttgttactctattctccaacaggaagaaatctggagtacaggaatacgtaggagatagcttcataaatggctaacttatgcctctgaaagaaagcaaacttacaaaagtttaatgcttcaattttttagatcaaaaacatatagtgaaagccacaaatctggagcatacatctcagtgcattttaaccaatgcayacacctgcataacccacatgtctatcattttcatcacaaacaaaatgattgttttcatcacagaaatttctcctgtgctccttcctagtcagttccctgcccaaatcagaggcaataatttatctgacctttttcatcatggagtagattttcctcttctagaattatacattttcataaatgtggtcacagtattctttttgggtgtaaatctggctttttcctctcagtataatatcttgaaattcatccatatttttacatgtattaaagtttattcctttaagtcactaatgagt

SEQ ID NO: 356851 - DNA, 541 bp, Homo sapiens
caaagggcaagaaggtggggaatgaagctggagggcatatttcagggatcaaatactaataaggacccatcatttcagctagagagcaatatcaaagacacaacttcaaactcagtrccaggtgaagaattaagtaaatcaataacaaaattatctggaaaatcctcagatatttggaaataaaacaacacattctaaataatctatgggtcaaagaagaaatcacaagaaaaattagaaaatattttgaactaactatactgtagggctacagcaaccaaaacagaatggtactggtacaaaaacagacacttagaccaatggaacagaatagagagcccaaaaataaggtcgcacccctacaaccatctgaactttgacaaagctgacaaaaacaagcaatgaggaaaggactccctattcaataagtggtgctgggataactggctagccatatgcaggagattgaaactggaccccttgcttacaccatatacaaaaatcaactcaagatgaattaaagacttaaatgtaaaacccc

SEQ ID NO: 356852 - DNA, 462 bp, Homo sapiens
ttatagatgggtatggaaactgggcattacgcatgctaatgaaatctatctagctcttttcacttttaatagatttggaggtttcatgggttaaaactcccttaagctataaattgcaggtaaatataataaaaaaactgccaggaaacatttccctcagaattttttgytgcatgctaatgtagcaatttcaaaaaaatttgtcattgttctccttcctaaaaattcacatgtcacaagggaacctttgactcagccatgaaacagtcccaagagtcctagaacttgactttgggaaatacttctccatacaaacagtgctagaagtttgttttctatcaacattccaaagtttgttacctagatgatttggaacaacctgctatgagtacgaaaaacatacacagaattttaatgtatattaatgactcaaatttctcccacttcctttcggggaaaatg

SEQ ID NO: 356853 - DNA, 584 bp, Homo sapiens
tgcttgagcccatctctaccaaaaattaaaaaataaaaacaaaacaaaacagctgggcgttgtggtgcatacctgtagttccagctactggggaggctgaggtgggagaattgcttgagcctgggagatcgaggctgcagtgagctgtgattgtgtgatgcactctagcctgaacaataaaatgagaccctgtcacacacacacataaaaagtactttaaaattttttctagttaacagtttttccgttttgagtgctatrgtatagtattgtcttccactacttttcattgccgatgtaacgcataaaataaataagcccttttgaaataattttggaacctggccatttttagaacattgtttcaaagagaaaatgaatttccagcttttagaacatgatttattttaagttggctatttcctctgtgtgtttggtaacaaaaatatgtttgatgtggtgacataaaatcagagaggcctgccttgatttttaccttgttaaatatgttcataatagaaaaaaattaaccttttatttcttatatttatttgtgtttgtatagcattcttagagactgtatt

SEQ ID NO: 356854 - DNA, 579 bp, Homo sapiens
aattgttatcttcttcatccataaaataaggttgtcactagagccagagatttaaaggccaaaaagattatggtgcttattctcccatatgtaattcaaactgacactaacatatatgcagagattaaaatctctctttcttaaacttttataattgcaaaattcactatgagatgagatgagcggtgcagggagcgggggcagttctgtgggtaccctgggaatgtaatgtgctcaggrtgtctctgggaaatgccaagcttgacaaaagtcagggcttgggctcttgtgaacctgccccccaccctcagctccccattgattcctacaacctcctaactactcaatccattgttcactcttcaccaggtcactttacaaaaactaacaaaccaaaagatccaatcctattatcctactgcttttgaaagtctccacaaaaaagttcaaccttcttttgtcaggtaactgcagtgacaaaatgttcctaaccataaatacaaacatgagctctggcaggtgtgcgagtacctaggaaggcaatgagaaacaagaggcttaagtgaaaacggtctcagg

SEQ ID NO: 356855 - DNA, 579 bp, Homo sapiens
aattgttatcttcttcatccataaaataaggttgtcactagagccagagatttaaaggccaaaaagattatggtgcttattctcccatatgtaattcaaactgacactaacatatatgcagagattaaaatctctctttcttaaacttttataattgcaaaattcactatgagatgagatgagcggtgcagggagcgggggcagttctgtgggtaccctgggaatgtaatgtgctcagggtgtctctgggaaatgccaagcttgacaaaagtcagggcttgggctcttgtgaacctgccccccaccctcagctccccatygattcctacaacctcctaactactcaatccattgttcactcttcaccaggtcactttacaaaaactaacaaaccaaaagatccaatcctattatcctactgcttttgaaagtctccacaaaaaagttcaaccttcttttgtcaggtaactgcagtgacaaaatgttcctaaccataaatacaaacatgagctctggcaggtgtgcgagtacctaggaaggcaatgagaaacaagaggcttaagtgaaaacggtctcagg

SEQ ID NO: 356856 - DNA, 509 bp, Homo sapiens
tattgacttccacctggcttggttcagccatagtggtgaagtggtgtggtatgctgtcttttaatcaaacagacatttagaggaggtcttttgggtcataggtggcatggggatggattgcacaaaggtgactgagtagttagttggctcaggttattatggagtgatcgtarctgtcccttggagagtgtttctattatgagcagtacagagtatactctattgcgctatattctttcaaaataatcttagtaatagcaaaagcatgtcacatgaggtaagttttgctcatgagtgagtttaggaatgctgtttttaaagaccatatgactataaaaaataatatagaagcaatttctaaaagaggagttcaaatatattttgagaaggagcaaaaaataaataagtatatatttcccaaatcgcctgccttaataggtacagcacccatctgcacgcatgaaattatatattaaataaaaatgtagtctcattacattacagccatt

SEQ ID NO: 356857 - DNA, 509 bp, Homo sapiens
tattgacttccacctggcttggttcagccatagtggtgaagtggtgtggtatgctgtcttttaatcaaacagacatttagaggaggtcttttgggtcataggtggcatggggatggattgcacaaaggtgactgagtagttagttggctcaggttattatggagtgatcgtagctgtcccttggagagtgtytctattatgagcagtacagagtatactctattgcgctatattctttcaaaataatcttagtaatagcaaaagcatgtcacatgaggtaagttttgctcatgagtgagtttaggaatgctgtttttaaagaccatatgactataaaaaataatatagaagcaatttctaaaagaggagttcaaatatattttgagaaggagcaaaaaataaataagtatatatttcccaaatcgcctgccttaataggtacagcacccatctgcacgcatgaaattatatattaaataaaaatgtagtctcattacattacagccatt

SEQ ID NO: 356858 - DNA, 551 bp, Homo sapiens
acttgaccctctgatgctaatcgaaaatacacaatcatcaaatggcattcttactccattttttaactattacatatcccattttgacaagttattcttaccttttttacataggtcgaactggaaggtacacccttatagagaaatggagagatactgaaagacacttagcacctcatgaaaatcctatcatatccttaaacaaatgggggcagtatgctagtgatgtgcagctcattctacgacgaacygggccgtctctcagtgagcgacccacttcagacagtgtggctcgaattcctgaaagaactttatacaggcagagtctgccccccttagctaaactgaggcctcagattgacaaatcaatcaaaaggagggaaccgaaaaggaaatcactgacatttacaggaggtgccaaaggattaatggacatttttggaaaaggtaaagaaactgagtttaagcaaaaggtgctgaataactgcaaaacaacagcagatgagttgaagaagctaatccgtctgcagacagagaagcttcaatccatt

SEQ ID NO: 356859 - DNA, 622 bp, Homo sapiens
attaattcaaagaatctatgaaaaacacatgccagcaaaatgagcatctgatgctcaggttcctttttcagcatcaatgaattattccttcagttttggaaaatcacatccagctttatttctacagaatcctaaataaaatatgtctgaacatacacattaattttaactcctgtcttaaatacaaagcaaaatttcttggagattttctgcattttctttaaattcacactattaaaatatactttctggaataagycattttgtttgagacaatgttgattagtggaaacaagatgcaccaaggttcaaatcccgagtctactacctcttgtgtgatttgagtcaagacgcatatttttccaagcagcatttgtaagaaatggcatgaaataatgtcttttcaaattgtaccttatctagtacagggctcggcacacagtttgaattcaagagttaggtctgggacagaagtgaaagttctaacttaaaaagtataaacttcttttttatggaaggacaaatcaatagcaatgcaaattttcagaaacatttatactaataagagcatctgaaaataaagacattttaggttactaatccacatacctagagcagcagc

SEQ ID NO: 356860 - DNA, 331 bp, Homo sapiens
ctccaaaatgtcccttcacagaatctacaaaaagagagtttccaactcgctgaatcaaaaagaaaggtttaactctcaattaaatccacatgttacaaagcaggttcacagataagttccttctagtttttaytgcaggatattccattttttaatataagcctcagtgagctcaaaaatcctgctgcacagattacaaaaaaagagtatttacatcctgctgaatctaaagtaatgtctaaacctgggaactgaatgcacacagcacaaaacttttccacagatagcttctttccagtttttattgcaggttttgggtttctcactacag

SEQ ID NO: 356861 - DNA, 537 bp, Homo sapiens
ctgattctacaaaaagagtgtttctaaccagctgaatcaaaagagaggtgtagctctgtgtcctgaatccatacatcacaaaagagtttcatacatatcttatttttagtttttattgtaggatactcagtttttcactatagcaatcagtgggctccaaaatgtcccatcacagattgcacaaaaagagtgtttttatcttctgaatcaatagaaatatttaaygctttgagctgaatgctgacatcacaaagcagtttcacagacagctctttactcctttttatctcagtgtgttttgttttttaatctcggccacattgggctctgaaatgtaccttcacatattctgtaaaaagagtgtttccaacctactgaatcaaaggaaaggtttaaatctttgagctgaattcactgatcacaaagcagtttcacagatagcttctttctaattttttattacaagatattcaatttttcagtgcaggcctcaatgggctctgaaatgtccattcagagattctacagaaagggtgt

SEQ ID NO: 356862 - DNA, 425 bp, Homo sapiens
ggccactgaagcctaaagtttgaaactgaatatcccaccataaaaactagaaaaaatctctctgagaaactgctttgtgatatgtgcattcagctcacaggrttaaacctttcttttgattcagctggttggaaaaactctttttgtagaatctgtgagggaacattttggagcccactgaggcttacagtgaaaaattgaatgttctgtgactaaaactaaaaagaagctatcagtcagactgcttttgttgtgtggattcagatcacagagtaaagcctgtcttttgattcagcaggttggaaacactgtatttgtagcatctgagatgggacattttgtacctaactgaggcccttagtgaaaaacagaatatcccacaataaaaactagaaagaagctatctgtgaaacttctttgtgatg

SEQ ID NO: 356863 - DNA, 627 bp, Homo sapiens
tgaaaacactttttttgttgaatctgcgaaaagacatttcatagccgactgaagctgatagtgaaaaacagcatatcccaagattaaaagtcaaaataagctctctgtgaaactactttgtgatggatggattaagctcacagggttaaacctttgttttgattctgctgtttaaaaacactctttttgtagaatatgtgaagagacattttgaagccgattgaggactgtagtgaaaaactgaatatcccaaaataaaaattagaaagaagctacatgtaatactactttgtaacgtgtggattcatctcacaaagttaaacctttcttttgattcagcagtttggaaacactcgttttgtagaatctgcgaagggacttttggagcccattgaggcctatagtgaaaaaattaatagmcctagttaaaaaactagaaagatgctatctctgaaaccacttagtgatgtgtggatttatctcacagatttaaacctttcttttgattcagtaggttggaaacactctttttgttcaatctgcaatggcacatttcagtgcccaatgttgcctatagtgataaaaaggcactctttttgtagaaactgtgaaggaacatttgggacc

SEQ ID NO: 356864 - DNA, 638 bp, Homo sapiens
agtgataaaaaggcactctttttgtagaaactgtgaaggaacatttgggacctcactgagttcttacaggaaaagcagagtattcctcaatgaaaactggaaagaatctatctgtgaaactgctttgtgatgtgtggtttcagctcacagaattaaaactttttttttattattcagctagttgaagcaatcattttgtagatttatttcagagcccacttacacctatagtgaaaaactgaatatattggagaaaactaaarcaagctattgtgaaatttgtttgtgatgtgtggattcagttcactgtgttaaaactttcttttgactcaggatgttggcagcactctttttatataatctccaaaaggatatttcagagctcattgaggttatagtgaaaaaacgaatatcttataataaaaactagaaagaaactatctgttaaactgctttgtgatgtgaggattcagctcacagagttaaatgtttccttcgaagaagtaggttggaaacctttttttgcagaaaatgtgaagggacatttccgagtcctttgaagcctatactgaataaccaaatatcccatgataaaaactagacagaatttatttgtgaaaccgttttgtgatgtgtgc

SEQ ID NO: 356865 - DNA, 564 bp, Homo sapiens
ttgggattaaaaactagaaagaatctatctgtgaagctgctttgtgatgtgtggattcagctcgcaaagttaaacctgtcttttgattcagctggttggaaacactctttttgtataatctgcaaagggacatttcagagtccactgagacttacagkgaaaaacaaaatatcctatgataaaaactacacagaagatatctgtgaaactgatttttgatgcgtagattcagcttatagagataattttttttgattcagcaggttagaaacactcttttcgtaagatctgcaaagagacatttcagagcacacagacctacagtaaaaaaatatatatataaaaactagaaacaagctatctgtgaaagtgctatgtgatgtgccatttcagctcacagagttaaattgttcttttgattcagtgggatggaaacactcattttgtacaatctgtgaagggatatttcaatgcaacctgaggcttgtaatgaaaaacccaatatccagctataaaactacaaagaagctctctgtgaaactgctttgtgatatatgcattcat

SEQ ID NO: 356866 - DNA, 599 bp, Homo sapiens
tttggatccaaatgagacatacagtgaaaaaccaaatgtcccttgatatatactagaaaaaatctatttgtgaaagtgctttttgaagtgtgcattwggttcacagagttacatctttcttttgattcagcagattgtaagcagtctttttgtaaaatctgtgagggtacatttcagagcacactgaggccaatagtaaaaatatgaatatcccacaataaaaactagaattaagctatctatgaaactgctttcagcacaaatgttaaactattcttttgatttcacagagtggaaatattatttttttacaatctgtgaagggacattttagactgcgctaaggccaaaagtgaaaaactgaatatcacaagataaaaactagaaagaagctatctgtgaaactgcttggtgatgtttggattcatctcacagagataaacttttcttttgattcagcagattgaaaacactcttttgtaaactctgcaaagggacgcttcagagcccgttgaagcctacagtaaacaatggaatttcccataataaaaaacaattaagaatctatctgtgaaactgctttgtgaggcatggattca

SEQ ID NO: 356867 - DNA, 409 bp, Homo sapiens
tgaaaacactcttttgtaaactctgcaaagggacgcttcagagcccgttgaagcctacagtaaacaatggaatttcccataataaaaaacaattaagaatctatctgtgaaactgctttgtgaggcatggattcagctmacagtgttaaaccttccatttcattcagcagtttcaaaacactctttttgtagaatatgcagagagaaatttcataacccattaaggcctacagtgaaaaacaaaataccccacaataaaaactacaaagaaactctctgtgaaattggtttgtggtatgaacattcagctcatggagtcaaacctgtcctttgattcagcaggttggaaacactttttatggagaatctgcaatgggacatttcaaaacctacagaggtgtatggtgaa

SEQ ID NO: 356868 - DNA, 581 bp, Homo sapiens
aaatttcataacccattaaggcctacagtgaaaaacaaaataccccacaataaaaactacaaagaaactctctgtgaaattggtttgtggtatgaacattcagctcatggagtcaaacctgtcctttgattcagcaggttggaaacactttttatggagaatctgcaatgggacatttcaraacctacagaggtgtatggtgaaaaacagaatatgctgtaaaacaaaaaacaagaaagaagctatctgtgaaactgctttcagatgtgtagattcagcttacagaattaaatctttcctttgattcagcacattggaaacactgtattagtagtatctgcaaacaacagttcaaagcaaactgaggcctatactgaaaaaaacaaaaattccttgataaaacctaaaaagaagctctctgtgaaactgctttttggtgttttcattcagtttacagagttaaaccactctttttgaagaatctgtgataggacatttcagagcccaccgaggcctatacagaaaacctgaatatcccccaataaaaacagaaagacgttatctgtaaaactgcttttgat

SEQ ID NO: 356869 - DNA, 581 bp, Homo sapiens
aaatttcataacccattaaggcctacagtgaaaaacaaaataccccacaataaaaactacaaagaaactctctgtgaaattggtttgtggtatgaacattcagctcatggagtcaaacctgtcctttgattcagcaggttggaaacactttttatggagaatctgcaatgggacatttcaaaacctacagaggtgtatggtgaaaaacagaatatgctgtaaaacaaaaaacaagaaagaagctatctgtgaaactgctttcagatgtgtagattcagctyacagaattaaatctttcctttgattcagcacattggaaacactgtattagtagtatctgcaaacaacagttcaaagcaaactgaggcctatactgaaaaaaacaaaaattccttgataaaacctaaaaagaagctctctgtgaaactgctttttggtgttttcattcagtttacagagttaaaccactctttttgaagaatctgtgataggacatttcagagcccaccgaggcctatacagaaaacctgaatatcccccaataaaaacagaaagacgttatctgtaaaactgcttttgat

SEQ ID NO: 356870 - DNA, 595 bp, Homo sapiens
tatgaacattcagctcatggagtcaaacctgtcctttgattcagcaggttggaaacactttttatggagaatctgcaatgggacatttcaaaacctacagaggtgtatggtgaaaaacagaatatgctgtaaaacaaaaaacaagaaagaagctatctgtgaaactgctttcagatgtgtagattcagcttacagaattaaatctttcctttgattcagcacattggaaacactgtattagtagtatctgcaaacaacagttcaaagcaaactgaggcctatactgaaaaaaacaaaaattccttgataaaacctaaaaagaagctctctgtgaaactgctttttggtgttttcattcagtttacagagttaaaccactctttttgaagaatctgtgataggacatttcagagcccaccgaggcctatacagaaaacctgaatatcccmcaataaaaacagaaagacgttatctgtaaaactgcttttgatatgtgaattcacctcacagagttaaaccttgttttttattcagcaggttggaaacactatttttttaagaatctgcaaaaagaaatttcagagtccactgagac

SEQ ID NO: 356871 - DNA, 458 bp, Homo sapiens
ttaaattcggtagtttggaaagactttttttttttgtagaatatgagaagggacatttcaaagcccattttggcctgcagtgaaaaaaaaaatatccttagataaaactacaaaaatgctaactgtgaaactgctttgtgatgtggcgactcagctcacaaagttaaacatttcttttgaatcagcaggttggaaacactctttttgtaggaccttcaatgggacattttggagcccacggaggcctatactaaaaaattgaatattttgcaaagaaagaacaagaaaaatgctatctctgaaattgctttgttttgtgtggattcagctaacaaaattaaacctttctwttgattcagcaggttggtagcactctttttatacaatcactgaagggacatttcagagcccactgaagtctagagtgaaaaaaatatacctgcaataaaaactattaa

SEQ ID NO: 356872 - DNA, 612 bp, Homo sapiens
ggcctacagtgaaaaactaaatatcccgtgataaaaactacaaagaagctatctgcaaaactgatttctgatgtgaacattcagctcacagagataaacctttcatttgattcagcaggtggaaacactttttttgtagactccatgatgggacatttcagaacccacagaggaccatagtgaaaaactgaatattctgccaaacaaaaaactagaaagaagctatctgtgaaattgctttgagatgagttgattcagctcacagattaaacctttcttttaattcagcaagtgtgaaacactctttctgtagaatctgcaaatgacagttttgagtaaactgaggcctatagtgaaaaaccaaaaatcccgagataaaaactagaaagaagctctctgtgaaatggctttgtcatgcttgcattcagtttacagagcttaatcattctttagattcagcaggtggraaacactctttttgtagaatctgtgaagggacattttagagcctactgaggcctatactgaaaacctgaatattcaacaataaaaactagaaagaagccatctttgaaactgctttgtgatgtatggattcacctcacagagttc

SEQ ID NO: 356873 - DNA, 530 bp, Homo sapiens
ataaaaacagaaagaagctctctgttacctctttgtgatgtgtccattcagtttatagttaaacattttttttattcagcaggttggaaataayctttttgtagaaatctgtgaagggacacttcagagcccactaaagcctatactgaaaaaccaaatatgccacgatataaactaaaaagaagctatccatgaaactgctttgtgatatgggcattcagtttacaaacttaaacctttcttttgattcagcaggttggcaacactctttctgtagaatctgtgaagggacatttcagagcttagtgaagcctatagtgaaaaattgaatatcctgtgataaaaactacaaacatgctatctatgaaacggctttgtgatgtgtggattcagttcacagaagtaaacctttctttgattcagcaggttggaaacacactttttgtagaagctgcaaagggacattttggaacccactgagacctacagggaaaaaatgaatatcccaggagaaaaaccagaaagacact

SEQ ID NO: 356874 - DNA, 530 bp, Homo sapiens
ataaaaacagaaagaagctctctgttacctctttgtgatgtgtccattcagtttatagttaaacattttttttattcagcaggttggaaataatctttttgtagaaatctgtgaagggacacttcagagcccactaaagcctatactgaaaaaccaaatatgccacgatataaactaaaaagaagctatccatgaaactgctttgtgatatgggcattcagtttacraacttaaacctttcttttgattcagcaggttggcaacactctttctgtagaatctgtgaagggacatttcagagcttagtgaagcctatagtgaaaaattgaatatcctgtgataaaaactacaaacatgctatctatgaaacggctttgtgatgtgtggattcagttcacagaagtaaacctttctttgattcagcaggttggaaacacactttttgtagaagctgcaaagggacattttggaacccactgagacctacagggaaaaaatgaatatcccaggagaaaaaccagaaagacact

SEQ ID NO: 356875 - DNA, 526 bp, Homo sapiens
tgatgaggcatgagctgatgccgggtcatcctatggatgtcccacccttttcaaaagtcccgatgtacccttcaggtgggggctagggttctgggctctggcacaaggtttctgtgtctctcatggagggccccaacgggtggcagcggggctgcaggctggcctgtgagggtgggcagggccctgggctctggcccagggtgactgtgtttctcccagagggcacccatgggcagcartggggccacatgtgggccagtgcaggtggaaagaaactccaaatgacgttcaggcaggcagagaggagaagtggtgaggcctgagagggtgctgggtcgtctcagggatgtctctcccttcccagaatcccacagggattccccaggtgggggatagaggcctgggctctggatctgggctcctgtgtctctcacagagagcccctatggctggcagtgggctgcaggtgggtctgtgagggcggacagaaactaaggggaactttgacaaagaaagaggggagaag

SEQ ID NO: 356876 - DNA, 563 bp, Homo sapiens
ataggaatgttaaaatatataaggtgaattcacacatcacaatgcagtttcacagagtgcgtctttctagttttttattgtgagataatcagtttatcactaaaggcctcagtgggctccaaaatgtcttttagcagattttacagaaagggtgtttccaacctgctgaatcaaaagttactattaattctgtcacaaagcagcttcacagatggtttccttctagtttttatcatgggatattcggattttcaatgtaggtcacagarggctcagaaatatccctttgcagattctacaaaaagagtgtttgcaacctgctgaatcaaaagaaatgtctagctctgtctggtgaatccatacattacaaagtaggctcatacaaagcttttttttttttttttttttttttttagattttatcgtgggatatttggttcttcagtatagaaatcagttggctccaaaatgtttctaaacagattgtaaaagaaaagtgtttccacgttgctgtatcgagagaaaggtttaagtgcttgagctgaatgcacacatcacaaaat

SEQ ID NO: 356877 - DNA, 603 bp, Homo sapiens
gtctggtgaatccatacattacaaagtaggctcatacaaagcttttttttttttttttttttttttttagattttatcgtgggatatttggttcttcagtatagaaatcagttggctccaaaatgtttctaaacagattgtaaaagaaaagtgtttccacgttgctgtatcgagagaaaggtttaagtgcttgagctgaatgcacacatcacaaaatagcttcacatgtagcttctttttttgttttcattgkgggatacttagtttttcactgcaggccacagtgggctctcaaatgtcccattgcatgttctacaaaaagagtgttgccaacctgctgcatgaaaagaaaagtttaactctgagaactaagctgcatgaaaagaaaagtttaactctgagaactaattccccacatcaaaaagcagtttcatagatatcttatttattgttttcatcacgtgatattttttttttcactataggcctcagttggctcccaattgtctcatcacacattgtacaaaaagagtgttttcaacctgctgcatgaaaaggaagccttacttctgagaaccaaatccacacatcacaaccagtttc

SEQ ID NO: 356878 - DNA, 527 bp, Homo sapiens
attttgttttccctataggcctcattggccaccaaaagtcccttcacagattcgacaaaaagagtgtttccaacctgctgaatcaaaagaaaggtttaattctctaagcttaatccacacaacacaaaacagtttcacagacagcttccttttagtttttattgtggattatttgggttttcactataggcctmagtaagctctgatatgtcccctcacagttcctaaaaaaaaagggtctccaaactgctgaataaaaagaaagttttaactctgtgagctgaatctgcacatcacaaagcagtttcacagacagcttctttctagttttcatcactgtatatttgttttttcactatggttttcagtgggctccgaaatatcctcgggaagattctacaaaaagagtgttccaaacctgctaaatcaaaggaaaggtctaactctgttaactcaatacactcatcacatagcagtttcacagataggttcttgtagtttttaacatgggatattcggttttttac

SEQ ID NO: 356879 - DNA, 527 bp, Homo sapiens
attttgttttccctataggcctcattggccaccaaaagtcccttcacagattcgacaaaaagagtgtttccaacctgctgaatcaaaagaaaggtttaattctctaagcttaatccacacaacacaaaacagtttcacagacagcttccttttagtttttattgtggattatttgggttttcactataggcctcagtaagctctgatatgtcccctcacagttcctaraaaaaaagggtctccaaactgctgaataaaaagaaagttttaactctgtgagctgaatctgcacatcacaaagcagtttcacagacagcttctttctagttttcatcactgtatatttgttttttcactatggttttcagtgggctccgaaatatcctcgggaagattctacaaaaagagtgttccaaacctgctaaatcaaaggaaaggtctaactctgttaactcaatacactcatcacatagcagtttcacagataggttcttgtagtttttaacatgggatattcggttttttac

SEQ ID NO: 356880 - DNA, 615 bp, Homo sapiens
agaaagaagctatttgtgaaagtgctttgagatgtgtggattcagctcacagagttaaacctatcatttgatacaacaggtagggaaccctctttcttttttttgtagaatctggtaaagggcatttcagagcaagctgagtactatagtgaaaaactgaatataccatcataaaactagaaagaaactatctgtgaagctgatttgggatgtgtgtattaagctaacaaagttagaacttctttttgattcagcaagttgaaaacaaagtttttgtagactctgccaatggacatttcagagtaaactgaggcctatagtggaaaacatattatcccactataaaaattataaagaaactttctgtgaaaccgctttgtgatgtgtgctttcaactcagtgagttaaacctttctcctgattaaggagtttggaaacactctctttgtagaatctgcaaaaggacattttgcatctgactgaggcctataaggagaaaccacatatccatttaaaaacaaaaraacagaaagaagctaattttgaaactgttttgggatgtgtacattcacttgacagtgttaaaactttcttttgatgtaccaggttgaaaac

SEQ ID NO: 356881 - DNA, 299 bp, Homo sapiens
tgaattcttttacttaagataatgacctccagtttcatctatgttcctgcaaaagacatgattttattctttttcatggctgactaatattctattatgtatatgtgccacatctgctttatccaagcatccattaatggacacttaggctgattttatatctttgctattgtgaatagtgctgcaataaacatacaagtgyaggcatacttttgatacaagcatttcttttcctttggtagatactaagtagagggattaatgggtcgaatggtagttttattttcagttttttgagg

SEQ ID NO: 356882 - DNA, 384 bp, Homo sapiens
gttgagcagtttttcatatgctttttagccatttgtatgtcttcttttgaaaaatatctattcatatcctttgctcactttttaatgagattgattttgttgttgttgttgagttgtctgaattccttataaattcccagtattagtcccctgctggttacatagtttgcaaatattttttcccattctgcaggttttctgttcactctgttgattttttcatttgctgtgcggaagctttttagkttaatgttggaagctaaccgaaatttttttttaaatattgaaagctaaacacaaatgtcatgaagccatcagtttacaaccagtgcactaaaggcttatcttcaacctaaaaaaatctgtatggaaaaagagaaggtt

SEQ ID NO: 356883 - DNA, 577 bp, Homo sapiens
atgatgatatttaaggtgaagtcagaatgagaagaaaccagctacatatagaagggaggcatttaagacaagggaatagcatgtgcaaagcctgagtcaggactatttcaagaacagaaatgtctactggtaaggtagggcaaagggaagaggaaggagacacagcagtgcaaattcaggtcaagaggtgggcaggaattaggttgcaaagggcctcctagtccatggtgaggcctggcacataatagaccatcctgctgttgcataacctctgagctcgtctyctccactgtttttcaaaccctgctgaaagagacaataagaaactagagaattttcgagaaagaaagtacaagaccacgatcctttatccactctcttgaaattttaaaaactgacaactgaaggttttttcctaagtttggcacaaaatcacttggcagcaaacactgtctgaatgtacaggaggctatttatggtctttatttatccctcttcatgtgaatattcatgtatttcactcttacatgtttgggtgtggggtactgcccatagtacaatgccagacctacataat

SEQ ID NO: 356884 - DNA, 576 bp, Homo sapiens
catgatcagattcatagtctttaggaggaaaactctatttgcagttttaaagataaactggaggaagcagagaaggaagctagttaagaaactaccggaaaaccggtggtgagaaatatggagagttgtaccaagctggagatgctggggatggaggagtttgggagatatgtcccaggaggatcaacataactcagtgcctgattggaggtgggaggtaagagaggaaggaatccaggatgagyctcatgctcctcgcttgtaagagtggacagatggtgagccatcccccacaagagaaagccgaggatgattagaattaagaagaaaaaatgctaaatgccaggttggacatgtgtatgtgaggttcttctgcatcctgtgcttgcagacatgtggtagggaattggaaatgtgggtctggagcccgggagagaagctggtgtcagaggtacagatttaggaggtgtcgtgagttaatagtgttccccaaaatgacatggccaaatcctaaccccagtgtctgtgaatgtgaccttatgtaaaattaaagtctttgcagatgtaattaagtta

SEQ ID NO: 356885 - DNA, 576 bp, Homo sapiens
catgatcagattcatagtctttaggaggaaaactctatttgcagttttaaagataaactggaggaagcagagaaggaagctagttaagaaactaccggaaaaccggtggtgagaaatatggagagttgtaccaagctggagatgctggggatggaggagtttgggagatatgtcccaggaggatcaacataactcagtgcctgattggaggtgggaggtaagagaggaaggaatccaggatgagcctcatgctcctcgcttgtaagagtggacagatggtgagccatcccccacaagagaaagccgaggatgattagaattaagaagaaaaaatgctaaatgccaggttggacatgtgtatgtgaggttcttctgcatcctgtgcttgcagacatgtggtagggaattggaaatgtgggtctggagcccgggagagaagctggtgtcagaggtacagatttaggaggtgtcgygagttaatagtgttccccaaaatgacatggccaaatcctaaccccagtgtctgtgaatgtgaccttatgtaaaattaaagtctttgcagatgtaattaagtta

SEQ ID NO: 356886 - DNA, 500 bp, Homo sapiens
taaggggcatttgcagatggattaggaaagaacatgtcacacccagttaatcaagattagggaataaccagagtttatgtgcaaaagaattttaaatcccatgtaaactggcttcataggcttgctaatggaatttgtgcagtgcctgatactgaggggacagagaagagatggagacatgtcaagttaatcttytcaagagtttttcttttccttctctaactctctgaacacttaattgatttttcaaccagcctaatttgggtaacacaataaatacttatgggagaatgtgtctggggttaaaagcccatatttaggtgtcagatatacacatcacctaaatttaagtaattcatctactttttgatttacatgtaaccttgagcaagttattaaatttccataaaatcccagccctatatagtccttgtgaatggcagtcctggagttgtgcaatgcatggatctcctggctgtatatggctgctggaaacctca

SEQ ID NO: 356887 - DNA, 500 bp, Homo sapiens
taaggggcatttgcagatggattaggaaagaacatgtcacacccagttaatcaagattagggaataaccagagtttatgtgcaaaagaattttaaatcccatgtaaactggcttcataggcttgctaatggaatttgtgcagtgcctgatactgaggggacagagaagagatggagacatgtcaagttaatcttctcaagagtttttcttttccttctctaactctctgaacacttaattgatttttcaaccagcctaatttgggtaacacaataaatacttatgggagaatgtgtctggggttaaaagcccatatttaggtgtcagatatacacatcacytaaatttaagtaattcatctactttttgatttacatgtaaccttgagcaagttattaaatttccataaaatcccagccctatatagtccttgtgaatggcagtcctggagttgtgcaatgcatggatctcctggctgtatatggctgctggaaacctca

SEQ ID NO: 356888 - DNA, 365 bp, Homo sapiens
tgccatgcaaatatgtttgtaaagtatgcagtgatcattatttcaggttatggtaggataaagttccaagstttctggagtccagctgtgggtagagtgaaatactaagggacagtgcctgctaggtttggtgtacctaccaaaccaacctcaggtttccaggtggaatgtaatgctgggaaaatgtaggcattctttttatctaattttagtaatataactgaagacaaagtctttctagctataggagcagaagagcaggttgaagagagagaattgaactgaagcctaacccagtagctttcctgttttataacctttaatagagacacatttctttattcttgcaaatatcttctgaaaaa

SEQ ID NO: 356889 - DNA, 541 bp, Homo sapiens
ctttaatgacaacaattgaagtaatagtaaaagcggctactaatattgggtgcttatgttagaccaggaactatgtagataatctcatttgatattctcaatacccataaagtagtttctactgtttccctgtttttacagatgagagaactgagataaccaggtaactagataactctccagctgggaaatgtgaagctggatttgtgtctcagcctttctgasctcagagccaccagtattcatcatcattatgcttaccactttactacttctatcccttagaatattctttcctcagtgcttgaaatcccaatctccctttttatctgattcaacaaactcttgttttgtcttttattattttatgttatttttaaattttttgtagagacagggtcacccaatgttacccagactggtcttgaaaacctgggctcaagagattttcctgcctcagcttcccaaagttttgggattataggcatgagccacggtgcccagcaatttttttttttttttttttcagatggagtctcac

SEQ ID NO: 356890 - DNA, 432 bp, Homo sapiens
gtctcctacttttacagatgaggagactgaggctcagagcagggaagagaccagcccatgaacaagttccaagtgagacgcaaactcgractaaaatccaggtttcccaaagcccagttgtgttaggccattcttgcattgctataaagaaatacctgagaccagttaattttaaaagaaaagaggtttaattggctcacggttctgtggctgtacaggaagcaaaacacaggcatctccttctgaggactactcaggaagcttccagtcatgatggaaggtgaagggagagcaaacatctcacgtggcaggagcaggagcgagagagagatgtgggaggtgccacacactttaaaatgattagatcttgcaagaactcactcattattttaaggcagtaccagaaggatagtcctaaaccatccatgagaa

SEQ ID NO: 356891 - DNA, 432 bp, Homo sapiens
gtctcctacttttacagatgaggagactgaggctcagagcagggaagagaccagcccatgaacaagttccaagtgagacgcaaactcggactaaaatccaggtttcccaaagcccagttgtgttaggccattcttgcattgctataaagaaatacctgagaccagttaattttaaaagaaaagaggtttaattggctcacggttctgtggctgtacaggaagcaaaacacaggcatctccttctgaggactactcaggaagcttccagtcatgatggaaggtgaagggagagcaaacatctcacgtggcaggagcaggagcgagasagagatgtgggaggtgccacacactttaaaatgattagatcttgcaagaactcactcattattttaaggcagtaccagaaggatagtcctaaaccatccatgagaa

SEQ ID NO: 356892 - DNA, 481 bp, Homo sapiens
ttaaataagaaaatttgtaaaagtaattaacagagtgtgtgacatccagtaggttctcaacccttgctggtttctttcctttcttgaatgagtgctgacctggaaaaattaatcccaagaacagcagtttctggattctctagcattgctagcctgattcccaagccttttcatctccttgggggtctttttttcttctcccagtctcagcaacatgcacccatacrctcatacacaggcacctacacacaattttattttcttcccgttgccaacaatgtcaagttttcactttattacagcctcacctgttcaggctccctctcacacccatgaattcctacatggcagtcctgctggaccaatgtctccccagggcccagtgagcttcctggtgctccacgcagctacctggtcctgtctgggaacctgctgcagggaggaaactgcccaatggccctgctcctcttaggggctgggc

SEQ ID NO: 356893 - DNA, 638 bp, Homo sapiens
agtgctgggatttgtttcacatgaaagtgtagattttaaaagttactcatggcatggcatggataagagaggatattttatagactggagaccagcctaatgttcagaaactgacgacagttacccttctctagagggagacacaaagcccaggattttcgagagatcttgaacttttaagtacttttgtcattgccctccacagcgctctaaggatacaaatgaccccaagcttttccagttaataatgtggcaagacaaagtgttctcacagggaggcagtgagggtcctggtgagagggcctgagtgtgacattcacatgtcaccatgcctcatgtgagctgagaagccaggagggagccagcctgcagggcacgcccgaggaagggttcttccctttcatttgtgacccaaaagctctgaatcccctgagagctattgcatggaggcatcagctccaagtgccgctggaggcaaggaagccagtacaatgtctgccctcattcaggctggtgttggaagcaagacaggaaacaccactctgctcttgagtaaacacccttcttctgctgggracgagtttcaggctctgcctgcatggccacaagcctggaaaaacggtatgaagttactactc

SEQ ID NO: 356894 - DNA, 521 bp, Homo sapiens
acacacacatattgacacagatagagaaagaggcacaggaggagtaggatgaggtctgagcaggcaagggttaaaaacagccatccaaggagaaatcaagcactacttcttccatcgcccttggagactaggagaacagtaaagaccctaggaagttggagcgtagcgatcagggtatgtggcttacaatgtagaatgggagaaacagaaacagatgggcagctccaaatgaaggaggtgagcactcaccaggtgtctagactcacatactaaccacacttagtgaaagtgccatccacaaagaaaattgcttccaggcttaaaaaccatggttcagtaacctgcctgaaccaccatcctatatttgrtctaggctaatggggattcctagacaaaccttaatattcttgaggaagggagaaacacaaaattttgccaaagaaagaagtgtaaggagaaaatgtttagtcactcaaccactcaacaaatatttcctgagcagctactatatgccagaataa

SEQ ID NO: 356895 - DNA, 579 bp, Homo sapiens
aattgaacacattggctgaaaattcgaggtcccactgaacagatgtcggagctattttccttcccctaccctagttaggaggttggttaactaggaagcccaaatgaaagctgctttcatggtatctggaatataaattgacattcatgatctgttctgctaacggcattaactttataatagctctgaagtgattctaacgtataagtaggattgagaaccactgctatatagcccatggagaacttacagaaacacacacacatacttacacatacacatattgacacagatggaacaagaggcacagggtgagttggataaggtctgaccaggaaagggttagaaacagccatccaaggaggaatcaagcatcactaattctatctccctaggaaactaggaaaacagtaaaagccctacaaagagtgtagtgattggggatgttaccaagagtggacaataagttcatccattatgcatttcttctaaaagtaattgctcctactttcattaaatcrttatttgaacacttcctacctcctacatacactgcatactcaaaaaacgaaggacaag

SEQ ID NO: 356896 - DNA, 604 bp, Homo sapiens
tcaatgactctatctctaccaagaagaggatgaaaggaattcaatataaayataatcaataataaacataataataaagtaaattatatagactgtcagaagataataaatgccatgctgtccaaaatgaaagaaataacaaagaaaaggaagagtgtagggcaggataaaggaatagtgtgtttgaggaaggagctaaagttgtgagtttaaataggatgatgagaactggcttatgacaatatgagatcatgagatttgaataaagtcttagacagggagaggaagtgagccgtgtggatctttgacggcatgatgttcaggctgaggaaaggaaggagcctggaggttgactgaggagcagaagggaattgctgtgctggagctgggatggtaggagctgagactagagaggtcacagaagcctgaatcacatggaatagatgataaggggcaaggtataggagcaggggggcctttcaggaggccagagcagtcctccagatggtattgggatcagaacaagagcagtaaaggcagcctccaggaggctagagcagtcctccagatggtattgggatcagaataagagcagcaaaggcag

SEQ ID NO: 356897 - DNA, 604 bp, Homo sapiens
tcaatgactctatctctaccaagaagaggatgaaaggaattcaatataaacataatcaataataaacataataataaagtaaattatatagactgtcagaagataataaatgccatgctgtccaaaatgaaagaaataacaaagaaaaggaagagtgtagggcaggataaaggaatagtgtgtttgaggaaggagctaaagttgtgagtttaaataggatgatgagaactggcttatgacaatatgagatcatgagatttgaataaagtcttagacagggagaggaagtgagccgtgtggatctttgacggcatgatgttcaggctgaggaaaggaaggagcctggaggttgactgaggagcagaagggaattgctgtgctggagctgggatggtaggagctgagactagrgaggtcacagaagcctgaatcacatggaatagatgataaggggcaaggtataggagcaggggggcctttcaggaggccagagcagtcctccagatggtattgggatcagaacaagagcagtaaaggcagcctccaggaggctagagcagtcctccagatggtattgggatcagaataagagcagcaaaggcag

SEQ ID NO: 356898 - DNA, 590 bp, Homo sapiens
cttgagagacagggatgaagagcatgaatgcgaatgtacagcactgagctcgcgtctgccacatggtaagctcttagaagacctcagcttcttattcattttgtcacaaatcgattaattactgagctgaaggacatattagaaaacggtcaatagcaatacttctaacttccaatctgtacttacgcttggcattcaatcgatgttatcaaaacctgtgccagctccaaggaagagagaacactgttttctgatttagttgcttcctgaaaggagcygagagctgtaaaacacaggcaagattggacttttcaataatgcttatatattgacttgcagaaacaatattagaacttttttaaaatgcacacattatctccttagggtaagggaaaaggttttacctttttatttttgcatctcccctttgagtgaacatcattcttttttctttaactcacaactttacaaggtatttggagaaatataagggagagatagtttctgtttctcacctctttaagcaatgtcctcttgtataccaaataatatcttcctgtggttaatgatatgagaaacagaatgcctct

SEQ ID NO: 356899 - DNA, 541 bp, Homo sapiens
ggatattcattaaaaccatgggtgacagtgcagatccggggtggtaagaaggacagatgaagctgggagagttgattatccctatgggcaaagagaaaattggaccccaacttcacaccatgaaaaaaaaagaatcacctcctggtggctaaatggggaagacaaaacttcaaaattatttagaagaaattaaggagaaagatctttatggcttcaacatggtgaatttcttaaaacacaaaagttttccaactttaaagacaaatactgataagcttcactacattaacattaagaacttctttttatcaaaaaggccccataaagagagtgaaaaaataagccacacactggaagataaatttgcaattttggaactgacaaagaatttytccaaaaagttgaaaaaaaaaaaaaaagacaaacaagtcaacaagcaaataggtaaaagatataaacatacattttaagaagaaaaaacaaattagtagtaaccagggaaatgcaaattacgccatacagatgtaccactttacacaca

SEQ ID NO: 356900 - DNA, 594 bp, Homo sapiens
ccagcagtccaagccagcatccaaactatttattccctctctcccacccccaccgtttcaagtgccagtcataattkttatttgatataatggctcctcaacctacagctctcacccaacccaaaaagagtttggtggcttaaggtttcgaccaaagctccatttcatcctgtataaaagtgacttggaaatcctttttatcctcgatttctgacaagaaaatccagctaacaaggtcatctgagatgccaccaaaacaatatgcaaggctgggtatggtggctgatgcctgtaattccagcatttgggaaagctgaggtaggaggattggttgagctcagttcaagactagcctgagcaacatagcaagactccatctctacaaaaagtagaaaaattagctgaacgtgctggcagctggtttttagcatttacaggcccagctactcaggaggctgaggcaggaggatcacctgagcccaggaagtcagggctgcagtgagctataattgcaccactgcactccagcgtgggtgacagacaaagaccttatctcttatagtaaaattaaaatatatatatatacactatgta

SEQ ID NO: 356901 - DNA, 594 bp, Homo sapiens
ccagcagtccaagccagcatccaaactatttattccctctctcccacccccaccgtttcaagtgccagtcataattgttatttgatataatggctcmtcaacctacagctctcacccaacccaaaaagagtttggtggcttaaggtttcgaccaaagctccatttcatcctgtataaaagtgacttggaaatcctttttatcctcgatttctgacaagaaaatccagctaacaaggtcatctgagatgccaccaaaacaatatgcaaggctgggtatggtggctgatgcctgtaattccagcatttgggaaagctgaggtaggaggattggttgagctcagttcaagactagcctgagcaacatagcaagactccatctctacaaaaagtagaaaaattagctgaacgtgctggcagctggtttttagcatttacaggcccagctactcaggaggctgaggcaggaggatcacctgagcccaggaagtcagggctgcagtgagctataattgcaccactgcactccagcgtgggtgacagacaaagaccttatctcttatagtaaaattaaaatatatatatatacactatgta

SEQ ID NO: 356902 - DNA, 635 bp, Homo sapiens
gcccagcagtccaagccagcatccaaactatttattccctctctcccacccccaccgtttcaagtgccagtcataattgttatttgatataatggctcctcaacctacagctctcacccaacccaaaaagagtttggtggcttaaggtttcgaccaaagctccatttcatcctgtataaaagtgayttggaaatcctttttatcctcgatttctgacaagaaaatccagctaacaaggtcatctgagatgccaccaaaacaatatgcaaggctgggtatggtggctgatgcctgtaattccagcatttgggaaagctgaggtaggaggattggttgagctcagttcaagactagcctgagcaacatagcaagactccatctctacaaaaagtagaaaaattagctgaacgtgctggcagctggtttttagcatttacaggcccagctactcaggaggctgaggcaggaggatcacctgagcccaggaagtcagggctgcagtgagctataattgcaccactgcactccagcgtgggtgacagacaaagaccttatctcttatagtaaaattaaaatatatatatatacactatgtatctcttataataaaattcaaaaaatatatatatatttgc

SEQ ID NO: 356903 - DNA, 639 bp, Homo sapiens
tctggggatctttttttctcctaaatgtccttgtttgctattggaatctggattacatttgtctcataaaataggtgaaaaatgttctgtctctttctattctttgagtttgtataagcttgaaactagctgttccttgaatatacagtagaaactacttataaaaacatctgggattggtgtttattttgtgggaagatttttaactaccgactcaaattctttaaaaattatagggcccttcaggtgtttattacttaaatcagttttaaaatttatacgtttctaggaatttttccacttaacctaagtttttaagtatttgacattaagttgatcatagtattcccgtaaaatgtaatctctgctgcattagcagttatgaacttcattcattcagatattgtcatttctctttttattgatcttacaaaaagtttgtcattttaagcagctttggctttgataattttgcgtctttgtttcttattttatttcttattkctatcttattatttctttcttcttatcttcttaagatagatacatagcctttcttttttttccaggtaagcatttaaggttagaaattatactctacaatatgactttagctatgtctgccaagtttcaacatat

SEQ ID NO: 356904 - DNA, 588 bp, Homo sapiens
gtggccatgttcccaggatgaaggacccagcaacaccacaccaagtctatgggtataattccttttgtccttccccaaaagacatttattcaagtgactctactctggggaaaaactcccagatgttttgaagattactggatgccctgcagggatggatggaggtaggcattgaggtgtgcaatgattcagatcttcactggagaaaggacttacctggcagcttcaaggagtgtagscagccgacagcttccagctgcagcacctggaggatctgcttcagcttttcaaccaagaccacactttttctgggcagctcccagccaataccggcaccatggtggtaccaaggccgtgtctgtccaacacaggaatcctctttgctccagagcttcccatcatgttggtcaaatccgtgtctgacccaccaaaatctgaggctctctcttgtctatcttgttttctaccctttttccttttgtaagtgtcaaatctgcatcgtgatctgaaggctttccatgcttgggcaatcttgatatttcctcttacgctttttacaaatattaccccccaccccaaatctcttgc

SEQ ID NO: 356905 - DNA, 588 bp, Homo sapiens
gtggccatgttcccaggatgaaggacccagcaacaccacaccaagtctatgggtataattccttttgtccttccccaaaagacatttattcaagtgactctactctggggaaaaactcccagatgttttgaagattactggatgccctgcagggatggatggaggtaggcattgaggtgtgcaatgattcagatcttcactggagaaaggacttacctggcagcttcaaggagtgtagccagccgacagcttccagctgcagcacctggaggatctgcttcagcttttcaaccaagaccacactttttctgggcagctcccagccaataccggcaccatggyggtaccaaggccgtgtctgtccaacacaggaatcctctttgctccagagcttcccatcatgttggtcaaatccgtgtctgacccaccaaaatctgaggctctctcttgtctatcttgttttctaccctttttccttttgtaagtgtcaaatctgcatcgtgatctgaaggctttccatgcttgggcaatcttgatatttcctcttacgctttttacaaatattaccccccaccccaaatctcttgc

SEQ ID NO: 356906 - DNA, 543 bp, Homo sapiens
ttgttgcatctttatccacaaatctcctccctttaataaccagtcttctcagaacttaaattccatcaaagccaacaccttcaatacacgcggcccatttttcttcttcggatgctgactagaccgttttccagtcattctcattttatcaatatctccttcaatcttgagattccttcttaaccatttccttctaaaggtctattctaactgcctccaaatgatttcttcttcttcgtcattatcttaatgcttccttagccatgagcttgtttgtacaaatgtaaagataaatggtgactggcagaatgcctgtgcttgaaagatacaaacgggcatatttgccaatttcttctctcttatagaactgtggtcaaactactccgccttcattacaatcacaaatgtgtgagamtgaaggagaggccgaacatgcctgtaatcttggcattttgggaggctgaggtgggaggatcccttgagcccaggagtttgagaccagcctgggcaacatggcgaaaccctgtctctacaaaaaatact

SEQ ID NO: 356907 - DNA, 574 bp, Homo sapiens
ttacagatgccatggcaatgtctaccttatatagtctaaaaaggggaggagccctcagttctgggaattgcccacccctttccgggaaaactcattaattatctactccttgtttagcataaaatcaagaaacaaccataaaaatagcygaccagcagcccttggggctgctttgcctatcgggtagccattcttttatttcttcacttctctaataaacttgcttttcaccttactctggatttgccttgaattttttcttgcgagagatccaagaatcccctcttggggtctagttcgggatccctttctagaaacagaattgcaataccacacatggtaagcatttaacaaacgcctgttgagtgaatgggtgaaaaatagtaattcaatgtaccgtcaataaacagttagagaaagtcttgaaaatattttaagtggggtgtggtggttcatgcctgtcatcccagccctttgggagacctgatgtgggaggagcgcttgaggccagtagttccaggctgcagtgagctatgatcacatcactgaactccagagtaagaccctgtcaaca

SEQ ID NO: 356908 - DNA, 374 bp, Homo sapiens
cacgagtgttaccatggcaaatgtgaaagagtctacaatgttacccagcatgctgttggcattgttgtaaacacacaagttaagggcaagattcttgccaagagaattaatgtgtktattgagcacattaagcactctaagagccgagacagtttcttgaaacgcatgaaggaaaatgatcagaaaaagaaagaagccaaagagaaaggtacctgggttcaactaaagcgccagcctgctccacccagaaaaagcacactttgtgagaaccaatgggaaggagcctgagctgctggaacctattccctatgaattcatggcataataggtgttaaaaaaaaataataaaggatctctgggctacaaaaaaaaaa

SEQ ID NO: 356909 - DNA, 367 bp, Homo sapiens
tccccttaaaaaaataacttttttttaaaaaaacaattttctctaatatattttaggatacttttaatttaaaaaacccctgtgtggcattcttttctcatgggctgtaaatgctgagtgtgtttcatgcttgccccctctctgtgctccttgtcttactctggccccttattctagaccctcctccagcttatggccctcctttgcttcttcatctctttttttragacagggtcttgctctatcacctgagctggagtgcagtggtgcaatcatagctcactgcagccttgaactcctaggctcaggtgatcctcccacctcagcctcctgactagctgggaccacagacacgcactaccatgcc

SEQ ID NO: 356910 - DNA, 591 bp, Homo sapiens
cttgaaaattaattctttctgttggacgatagcgaaagggcctaagaagatcctgaataaatgctttctgatgatgtgggtgcaaccagaagccactgcactgatgttttgaggcctttccagtggtagagttcaagagttcttaattaggaacacatgttctgagagtccacacagtcacttcttgtcaccctaaaggaagacattaaagggtatggctctagaatgaagaatggcctggtgcagtggtttatgcctgtaattccagcactttgggaggctgaggcgggaggatcacttgagtccaggaattcgagaccagtctgcgcaacaaaatgagaaaaatgagacccctgtctttacaaaaaataaaacaattagccagataygatggcgcatgcctgtagtcccagctacatgggaggctgaggcaggaggatggtttgagcccaggaggttgaggctgcagtgagcagtgtttgtgccactgcactctaagctgggcagcagagcaagaccttctctcaaaaacataaaaataataaaggaagaaacttgctccttgtgatatatggggcaagatgttttgac

SEQ ID NO: 356911 - DNA, 591 bp, Homo sapiens
cttgaaaattaattctttctgttggacgatagcgaaagggcctaagaagatcctgaataaatgctttctgatgatgtgggtgcaaccagaagccactgcactgatgttttgaggcctttccagtggtagagttcaagagttcttaattaggaacacatgttctgagagtccacacagtcacttcttgtcaccctaaaggaagacattaaagggtatggctctagaatgaagaatggcctggtgcagtggtttatgcctgtaattccagcactttgggaggctgaggcgggaggatcacttgagtccaggaattcgagaccagtctgcgcaacaaaatgagaaaaatgagacccctgtctttacaaaaaataaaacaattagccagatacgatggcgcatgcctgtagtcccagctacatgggaggctgaggcaggaggatggtttgagcccaggaggttgaggctgcagtgagcrgtgtttgtgccactgcactctaagctgggcagcagagcaagaccttctctcaaaaacataaaaataataaaggaagaaacttgctccttgtgatatatggggcaagatgttttgac

SEQ ID NO: 356912 - DNA, 609 bp, Homo sapiens
ttcacacaacctgcctctaccctgaggcccgaggccacagagcaaacctctccccggtaccctccccacagcatcagtcacatgtagccagcaaatacttactgggcccctgatacacacaacacctcaaaagttgatcagactaattttaacaaaaagtcttactgacaaacacactcattataccaaatggcatttagatttactgaaacrtaagtatttattatttaaggatgtattgcaacatattgtgacatcttttcaaggtgtgcatgtacacagctttctgaagagcaatgtttcaggacttatcagtatcagtaggatgttttcaggtgcgagtaacaggaaatcacaactaaaagtggctgtaaagtaaggaaatttgttagctcacatcacaaaaagcctaaagagaaggtttgccttaggcgtgatatgtcaggctccgggtccacttctttgcatttctttctactttgatctccatgtgtattagcctcggtcacagactggagataagatggctgaatcagcaccaggcctcacaattaaaagcatctagagaaagaagaggaggaatcatctcttcttcaatggtttgtaaag

SEQ ID NO: 356913 - DNA, 617 bp, Homo sapiens
tttggaaccatgactccgctgcataaaattacttctcccattctctagatggggaattttgacttgaagtttaagagagaggtcaagtgaagagagttcacaattattgttgatawcagttgggatgtgatcttgtctgttttactgaaattcaacacaagactttctgagccgtttctctgctatgcaccccgccaagtgtgggatttcaaagagtgcccttggaccttcggggagctcagtcttttttttttcctttgaggcagagtcttgctctgttgcccaggctggagtgcagtggtacaatcaaagcccactgcagccttgaactcctgtcctgggctcaactgatcctccttgagtactcagcctcccgagtagctaggactacaggcacacgccaacacactcagctaattttaaaattatttttgtagagatagggtcttgctatattgccaggggcctcaagcgatcctcctgccttggcctccaaagaactgggattataggtgtcagccacccgaccaggagctcagtcttgaggtgagataggcaagacagatacatagatccctagtccagaaacacatttggaaatgtgttcccaccctgcc

SEQ ID NO: 356914 - DNA, 489 bp, Homo sapiens
tgctggccctcgtttagaacaaaactaggcacacaatacacgatatcagtaagaccaactaaataaactccatgtgaaagggctatttttaaaagatgattgtcaaacacacttgcgccatagctttgtatccaaagtaaagacaatgagatctggatacacatacacaggcacacacagaaacatgcacacactcacatatactatgtcacacctcatacacttaaagacacatacacttatacacacacagtttattcatattagggtttaatgggaccatgtaattcatttttcactgactgtcccttgccaaccagaacatgctgtgttgtactctcctgygacctgacacagtgggattggaaaagacagactaattttagtgagaactgagcacatatcgaatcactgtgtaaaaatcatataatattcctaaggcaaatattaatggtatcttgattaagttctgctttggattaattactt

SEQ ID NO: 356915 - DNA, 636 bp, Homo sapiens
ctctttactgtgatgtttggccatggtgtttgtgtgtatgtgtatatagacaatgctaattgctgtgaagtccactaatttcaagcaattctcagcaaatgagtgcattagacatgcattgaccatcacattgggcctgtcatatttattacatcagccactgtttaagagcatctaattccctcaattactatgggctgagaatctccttgtcaggtagtttggaattatggaataaaagcaaaatatcttatggaactgtaatttcagaaacagaggaatgggctagaagctatgagaaaaggaacaactaaaagatactgaccatggaaaggagtggaactctgtttctcccctctttctccttctctatcactgtcaccatgaaagaaaagtgtatatgagctccctttctcaagttttctcccttttctcaagttctcttttttctttttttcctctatatagctccttgctctrgagtccagcagtctggctgcttctttgcagctgtagtttcttcatggctctgcatggtctctgatggtctattcatgggccttgttatgggttgaggtggatacccccagaatttatatgttgtagctctaaccttcagtaactcagaatgtgacc

SEQ ID NO: 356916 - DNA, 531 bp, Homo sapiens
acaggggcactgttgcctggaagacagcatgtgactctgtcgcctgaagacagcagaaggctggggaccaggacatcagagacggggctgagagaccaccagaatggactaagcagcaccaaggccatggcaggacacccaaggaagaaggtgatcacagatgaggtccaccagaaccaaattttgtggcaactgttctcaaaggactataaacccagaaggtctacatagagtttcatgtgaatccccttcacagggcttacacgatcattaggaagcccatatcttggcatgatataacctggaggaatctgcagatgccaygtttctgaatgtcatttgccatgctgccagagaccaaggaagaaatacccagagacacaaactgaaaatcagtaaactgagtggactcagagcccttgcagcctggccttctcatctgttcacacaactccagtctagggcatgtggctctgaagcaggaagtctgggttttattggtgaggagaagagtgaataggctaatcattc

SEQ ID NO: 356917 - DNA, 600 bp, Homo sapiens
ttcctgtactattttctggtttccatattttctatcaagaagtcagctataaatcttggtgctcttatgaaagcaatgtgtttgctacctggcttcttgtaaatttttgctgtcatttttttcccagtaattttactataatgggctcggatgtgcttttctttgtttttatcatgcttagtgttcatcgtgattattgaatatatgatttgaggtcttttgtaagttttggaaaattcttaactcttaacctccaaatattactttattgcattctctcctctctgagattataattacgcatatattagattttccttcartatcccatataggggggtctcttttatctatatgttctctctttttgtctctttgcatgcattaattgggtatttttatatcacagtcctctaatcctttcttcaattgggtctaaactgctatttaagcccataatttcagttattatatttttggttctagaattatcatttgacctattttttagttttatattctatccattttttcttgtcttttgagtctttaatcatactatttgaaagtctatgtttaccatcacattaatctgtatct

SEQ ID NO: 356918 - DNA, 584 bp, Homo sapiens
taaccatgtctttctgctgaaagttaatagaagcttgagctgtgggggcatgagtacaaatgatcaggggaagagggtgacactgttatgaggaagcttcttggacaagagcagaaataatacatacctatatcttggaatcaacaataatactagtctgaaataagtattttctgctattgagcttacargattgctgcattgtggagtacttgggcaggtagtgtagagtgaacagaagcagaagatgccaaaaccaagaagtattttctaagaaggcactaaaactcagctgtggactacagagatcagtgatctgctgagaaataccagctggatcagacaagcaatgatgccttgtaactcaagtagaagaaaagtgagaaggagaaggaacttcacacagagcagccccaacttcattgtgcttgagatgataaggctgaggtaaaccctgattgtcatacattaagactggagtagcactggtcagaatctaagcaaaatgtaactggtatggatggagggcaggacaggaaaaaggttaggacaaagtacgaacttctttacaaggtgtggctcag

SEQ ID NO: 356919 - DNA, 627 bp, Homo sapiens
ggaagcttcttggacaagagcagaaataatacatacctatatcttggaatcaacaataatactagtctgaaataagtattttctgctattgagcttacaagattgctgcattgtggagtacttgggcaggtagtgtagagtgaacagaagcagaagatgccaaaaccaagaagtattttctaagaaggcactaaaactcagctgtggactacagagatcagtgatctgctgagaaataccagctggatcagacaagcaatgatgccttgtaactcaagtagaagaaaagtgagaaggagaaggaacttcacacasagcagccccaacttcattgtgcttgagatgataaggctgaggtaaaccctgattgtcatacattaagactggagtagcactggtcagaatctaagcaaaatgtaactggtatggatggagggcaggacaggaaaaaggttaggacaaagtacgaacttctttacaaggtgtggctcagccttcaaaagttggtctgatacattggggtctatcagagggtagagagtcggaggagggagaggatcaggaaaaatgactaatggatattagccttaatagctgggtgatacaataatctgtacaacaaacccc

SEQ ID NO: 356920 - DNA, 573 bp, Homo sapiens
ggccctgactgattcttacttgacacaagttagagcctcatgaatgagcataaatgaatggttatatgatattaactgttagtttctaacactattctagatcttactagcccgaagagtaattcgaaattttactagtgagcttgttgagattggaaaatatgyacaaaagttacaaatactttcagaagactgagcgtgagggaaactgaaagtctgctcttaacatctgttccagggacaccaaaatgacacatccatccattcattgttcattcaacatacatttttaaaagtcaagtgttgtgttaagttctgaatgtaaataagatgaatcactactactgtggaaggaagatagaaaaattggcagtaaattacaaggtatgtgaatgcagagataaagaaattcactttacttggggaaatcacaaagacacgacttttgaattgagacttaaaggaagcagaacagtgtttgattaagaaatgagtatacagcaatccatatagaggtaccagcttgcattagaaatgttgatgatgtagactgtggtggggtaataatataag

SEQ ID NO: 356921 - DNA, 612 bp, Homo sapiens
cttctactcagtatcttctgtattcatgtctttggaagctccaattagactttagtagactttatcactcagttctttatatatcttcttcatattcttcatcttcttttctctctgttctacattatgaggaatatttttcaatctctcttccagttcaccaattctgtctttaactgtgaaaaatctcagatctagtctatctaataggtttttagtaacagattaatatatttttatttcttgacacttttggtttcctttcaaatttgcttcattgttctatatagtatctgtttattgcccctattttaaaaggaccatttaattaaaaatattaaacacaattattttgtactctatgtctagttatgcccaattaaaaaagttttggtagtttgactgtgctgattattttttctgttgggtatcaaccccgggccttatttccttgtgtgttttgaccatatgatatttatcttcttttggaatttcacctgtggctattttttgaggcctggattagaggttattcctcaggagaaaaattacaactgctttagacatatccctgsactcccttctctcccagggcactttgaattaaatttc

SEQ ID NO: 356922 - DNA, 597 bp, Homo sapiens
attcgctctgttgattgttttctttgctatgcagaagatttttagtttggtgctattccatttgtctattttcgcttttgttgcttgtgcttttgaggtcatatctaagaaaatctttgccaagatcagtgtcaagaaactttttaaaagtagagaaagaaatgcgaattccactccaaagcttcatttgccaagttttcttagaatgacttttaccartttatgaattattgtaaacagaatctataatggaaatactgaaagacttttgcctaaagtggcattattgaatgctgctgtgatgctactgtaatgtaataaattattaaattgttgcaaaaaaaaccaaaaacaaacaaaacatttttttctagttacaactaccttttaaaaaagcagtttcaaggtgtcaggcagtagacatttaacaggttgcaggttgccagagaagtccagaaaacacacacacacacacacacacacacacacgcacacacgcacgcacgcatatatattttgctatagggatgtgattgctattacagaagaaaatacttcatagtgcatctaagtatagttgaaatcttaatgattaaa

SEQ ID NO: 356923 - DNA, 610 bp, Homo sapiens
atctatagggtaattaaatatcttagaactatgctgtgattttatttgctgctgagtggagatgggttctgtggctagtgtactaggataatctttttctaataatctcatttattcttgagaatcatctaaaataaaaaatagcattttgttgcccagcattaactttataattgtttttctgggatgagagagggcttgtgggacatataattcacactttgacaagagaggtgctaggagaatagatgtaggacaatacagtgccagattcaatagaggaaaatggaatttaaagatggaagattcacaaactagaaatccataagtygacattgacttgtgtgggtttcttgccactaataccaagaaaggaaagggatgatcatcagaagccagcatggattcacttatgagcaagtcaaggctgactagtgttatccgttatctatgcacctatacttgagcctgtacatatacctatacctgtatctatacctatggctatgtctatgccacatgtatctccatctaatagtatgtatttgttcacaaatcaccactaaagaacttactcttataaccaaataccacctgctccccaaaaacc

SEQ ID NO: 356924 - DNA, 429 bp, Homo sapiens
ttgggacccattggtaaaagtagcaggaccctcctcagcttggatccctaaacaattaagtggagcagaagttccatacttactaatgcctactaggttcctctacaaataaacaaaagataaactttaactgcatgaagccattaagatatggtgcattttatgttgttgtccttgttgtcaaagtagttatcttatcctgccaagcacattcrcacctcctgcttttgtacctgctagttcttcttctccaggcattcattggctcaatctgtcacttatttatgtctgttttagagaaaaactccatgtttttcctctgctctcgcaccacaacaattaacacagaaaacttccatgaccaaatgtgtgggggttttctcccacacaccaagcagcagacaccagctgagtgtcctctaatttaat

SEQ ID NO: 356925 - DNA, 577 bp, Homo sapiens
aaagagctgaccacaatttctcctatcttttcatttattctagccaattataccctcttgatataaagaaacaagctcaccacaccaggacccccctcagcttccactccagtgacccttggaccaatagcatttttgactaaatgaatatcccttcaagacttaggatacctacactgaatgtttctacctccttctctccacccacaaatgcatctagttctccatggtctcccaaactatctcccagaaacctattaataaataatcttcaaacaagtgggccaaaatcctatccctcccagaattcctaaaagagagacttaaaatttagtctctcttttcytgtccagagagaacagtcaatcaatgacttcatacactgtatcactgagttcctcttgtaactttaatgttttcatttaagtatcagtgccaggcccagatttgggaaaagtcctgaaattgctaagcgttcatttttgtgcccttctttagccctttctgcaccaaagatcagatctgggtgcttgacttccaggacagtactgtatgtactagtctaacatttgccaaa

SEQ ID NO: 356926 - DNA, 551 bp, Homo sapiens
aaaaaaaaaaaaaaaagtgaacatggtcaattttttctttaaattataatttaaaaagtgttaaaaatgtaaagttccaacagctttaagtttgaattatttcaagtttgaattttttaatttcatagcttctttatcagtaaatccaaaatgatacttccacaaatgtacctcaactgtcagaataaaagaaactgtgagaataaatgggaaaggctgctgaaaaatacaaatgacctaaaagagtaaattaattgtcatcattactatttattttttactgtctatctaatcccatggccagaaggtatatttctaactgtcatctgtaatgacaaaaggaaagtgcrcagaagcatgtgcctggatcagcatggcccgacaacctctgcaggatgagttgctgtgtgtgcaggtcctgcagcagatggaacagcaagtgtgcacatctgtattattcaggtgatgtgtggatacagaagaaggagaacggaaatgacttttagaaccagtcttgttttctgcttgtgttattttatacaggactactt

SEQ ID NO: 356927 - DNA, 555 bp, Homo sapiens
  misc_feature (1)...(555): n = A,T,C or G
tacagaacttacttgttgtagcagctattaacatccgaagtaactcagtggcagtgctttgtacactatgaagcaaaggattcttgttatttttataattggtggccctcacaaccgtacactgtagacatccagctctcccatgtcctaaaatccttttgctttttcctgaggaaaaatccaaatatccaaaaattcaccactccagtaactctcttccttcttcaaaaagtcccccattttttattctcccaagggaccaagggaagggggacagaaggtggagctagggatggaatatggacggtaaaagatgtggcatctgtggggttgctgtctctgcccctggcactgtcccccttctcyagggtagagccatcacatgctacaggatgaattccattatcttatagggcaagaagttttaccaaacaattccccagcatgttcccttgaaagccctgtagagtatgaagcctctgttatacccagaaacctgggaataggaggcaaaaaggacagttcaggnnnnnnnnnnnnnnnnnnnnnnnnnnn

SEQ ID NO: 356928 - DNA, 595 bp, Homo sapiens
ctatggttcaatcagctaccaccagcccccacctccaacactggagattataattcaacatgagatttaggcagggatacagatccaaaccatatcattccacccctggttcctcccraatatcttttcttctcacatttcaaaatataatcatgccttcccaacagtaccccaaagtcttaactcatttcagcattaactcaaaagtccaaagtctcatctgagaaaagccattcccttctgcctatgagcctgtaaaataaaaaaacaagttagttacttccatgatacaacaggagtataagcatttggtaaatgttcccattcccaaagggagaaatcagccaaaagaaagtggcttcaggccccatgcaagtccaaaacccagcaggacagtcattaaatcttaaagctccaaaataatcttctttaactccatgtctcacatccaaggcacactggtatgaggggtgatctcccaagaccttgggaagctctgtccttgtggctttgcagcattcagccaccctcccagctgctctcatggactgttgttgagtgcctgcagtttttccaggcacagggtacaatccgt

SEQ ID NO: 356929 - DNA, 534 bp, Homo sapiens
atatttctaaagcttaacttggagttcaaagatgagtttcacagtaatataattttaaccttcatttacattcatttttatatattactaagatgyctagtctatgtcacaatgatgctttccagtgtccacaaattttagtttcaagatgtgcatatgtaattcactaacatatgggacagttcttactattattataccaactatcctaaaaagaaaaataaaaccctactttacatagaactctgaacatggtgtaacttaaaacagattagtaaaacatgatttttaaatattttagccattttctatatatgtgtataaacttacctatttaatatatgagagctacaactttattcactgagaaattatgcattaattttctccaaccatctttcttaccttaactcaaaaatcttatgacttgctgactctgcttccatgaatttcaaactgcatttttttttttttgggagaaggagatggaaggaaggtgataaatacactgtaaacagaaataagcctccctca

SEQ ID NO: 356930 - DNA, 523 bp, Homo sapiens
cctaaactgatggatgtgttttttttattctaagctaaatctgaacttgcaaaattgattccaggcagaaaatctctataaattaaatcaaaaacaaaaatagattatactttggatatatgtgtgtttatgtgtgtgtgtctgtgtgtgtatatgcgtgtgtgtctgtgtgggtgtgcatgtgtgyatactgattggaatcctccagcatttttaaaccaaattagatatgaattttgggattctactactcacagctcaaaatccataatgagattatgccatattgcttgcctgttatcaaaacatctcatgtaccccatgaatatatacacctactatgtacccacaaaaattaaaaaaacatccatagtgatttaagtatgtattttctcctgtttccttcttggctacccatcttcctgccaaaatacttcaatatagccatggctcaagtttaatgagaggagacagaagtttttggatagctttttgtttttttgttctttttactttggtgatc

SEQ ID NO: 356931 - DNA, 523 bp, Homo sapiens
cctaaactgatggatgtgttttttttattctaagctaaatctgaacttgcaaaattgattccaggcagaaaatctctataaattaaatcaaaaacaaaaatagattatactttggatatatgtgtgtttatgtgtgtgtgtctgtgtgtgtatatgcgtgtgtgtctgtgtgggtgtgcatgtgtgtatactgattggaatcctccagcatttttaaaccaaattagatatgaattttgggattctactactcacagctcaaaatccataatgagattatkccatattgcttgcctgttatcaaaacatctcatgtaccccatgaatatatacacctactatgtacccacaaaaattaaaaaaacatccatagtgatttaagtatgtattttctcctgtttccttcttggctacccatcttcctgccaaaatacttcaatatagccatggctcaagtttaatgagaggagacagaagtttttggatagctttttgtttttttgttctttttactttggtgatc

SEQ ID NO: 356932 - DNA, 568 bp, Homo sapiens
tgagttcttatgtctgcctaacaggttcttggttcttacatcacattagtaaggactggctctracccagtggagtataacagaggtctctgatcacatttcctaaagtgtgatctgggtttcgtataaagtgcgctgagagggtgatcttgacctggaattggtagtaccaatatctttttctccgctttataaaataaatccaattaaataagattagtatacaagtaaaacttttcacttgtaagtttcctgccaaagaaacaaagcatctttttctcaaaggctcttgtcctgagatccaagtgcctttgaagtgattggggtcaataagatcacaggcacaggcaactgcaaaccagcgtggggtgtgagaacaaaagacgaaatagagcttggatccttcaatattaaaaccaaaaccaaggcaaaattttcaaaatctatgtgggaacagaatacagagtattccagaaaaaaagtggtgctaacaaagaatataaagtattgccagagtattggtgagtgaaccaagcctgttatgcattcagcttgtcgttatacaagt

SEQ ID NO: 356933 - DNA, 511 bp, Homo sapiens
ggtcaaaagaattaagcaggtaattcacaacagcagaaatacaaatgcccaatgttaatttcaccaaacacataagttcattagtaataagggaaaattaaatgagaaaaaaatgaaatgcaagtttttacttttccaatcttcaaagttggaagctggctgtgggaatatatattggtaaattaaaatattaattggtctgtatcgaaagccttaygattatttatgccttttaatgtcgtcattccacttatagaaatttatgcataggtaataatcagaagtacagaattattttgtataaacagatatactttacagcattatttttagtactgaaaactttgttaatctatatgttgctcaattggaaattaattaaattcaattcttagggtagattcttagggtagatattgtgctactcacaatatcatgtttcctgagcatatttaatcatatgggaaaatatttgtaacataagttaaatattagaatatattgcttaaca

SEQ ID NO: 356934 - DNA, 511 bp, Homo sapiens
ggtcaaaagaattaagcaggtaattcacaacagcagaaatacaaatgcccaatgttaatttcaccaaacacataagttcattagtaataagggaaaattaaatgagaaaaaaatgaaatgcaagtttttacttttccaatcttcaaagttggaagctggctgtgggaatatatattggtaaattaaaatattaattggtctgtatcgaaagccttatgattatttatgccttttaatgtcgtcattccacttatagaaatttatgcataggtaataatcagaagtacagaattattttgtataaacagatatactttacagcattatttttrgtactgaaaactttgttaatctatatgttgctcaattggaaattaattaaattcaattcttagggtagattcttagggtagatattgtgctactcacaatatcatgtttcctgagcatatttaatcatatgggaaaatatttgtaacataagttaaatattagaatatattgcttaaca

SEQ ID NO: 356935 - DNA, 535 bp, Homo sapiens
gaaaagcagagaagttaatgtaatgaaagaaagctattaagatgtaaattgttttctctgtaagtgctttcatagtgtgctgaaacatacattcacttttattcccttatgtctaggctgctgacgctcaggaaataaagatggaaatgtggaatcaagcaggtcatacccgtacaaagacagacagctaacatctggctcactcttttttcccttaactgatagaaccagtgctgcatagtatctctaacgccttctcttttatatccttagttttagagagaaaaaaatctaatgtcgggcagcattattgaagcacattactgccatattcagcaaacrgtaggacatttaaagtgaggacagttattactgggattaaaacagtaataaaactttatagaggcatttaataactcatttacagatcatgaaacaaagctaatagtcaaccttcatgggtgaagtgttctatttgtcttgtggtccattgctttgacttttagtcaaatgtcaagagatgacttagattgca

SEQ ID NO: 356936 - DNA, 613 bp, Homo sapiens
tcatcaccactaggcttgccttacatgattggctaaagagagttaagttaaacaaaaaaccactaataacataaaacacacaaaatcacaaaactcaatggtataagtaatacaaagccatattcaggataccttagaactctaattgcggcatgtaaagtggttttactcctagtgtgagggttccaaggaaaaaactaataataatgactacagctaaaataaactgttaataaatgcatattacaaaatgatgyaaattctgatatcaaaaacataaaatgaagggcaataaaactgtaaagctgtatgcaaagttaagaagttagcagcttgaaacagactgttataagatgttctatgtaagtctcatggtaatcacaaaataaaaatgtatagtagacacacaaaacaaaaacaggaaagattcaaagcatatcactatagaaaaccatcaaactgcaaaggaagacaagagaggaagaaagaagcaaaacaaccagaaaataataaaatgacagaagtccttacctattgataattaccttgaatgtaaacagattaaattctccaacaaaaagacatagagtaattgaatgaattaaacaaacaa

SEQ ID NO: 356937 - DNA, 491 bp, Homo sapiens
ttaccaaagaaatacaaatgatcaatgattctatgaagagtgctcaacttaacaaagacaactacttggaaggggaaggaaacaatgagattggaaaccattataaaagatgaagtagaaatacatgcaaggcatagaattacatctatgacataaaatatggacaaccgagttagagaacaatacatagagaataatgcaagtttagtttctagcatatatattacagatatttgagagtaactttttaatggaatacttcctatttttcaagcatcatgctattttacacacagtatgtttacacatattacctcatcctctacraccactcagttattattcccatccctctgcataggaaaaagtggagacggtccagagagttggaaattaggcatgaacccaggaaagctaactccagacctggattcttcctcattacctagttgtgcttggtaagctctacacacacacataacccagatcat

SEQ ID NO: 356938 - DNA, 567 bp, Homo sapiens
tttgggaatattaaaggtattcattgaatactttttgaatgaatcaatcaacaagtaaattaactgggataagagagactataagataacactactggtgcttaaggacatggactacatcttctaaatcattatacmcagaaacgctctcagtagctgacaccaatcagtgctcaataaatgtctgtgtaaggaaaacagacaaagatggaacagcatttaggtgaaagtcacaaaaatcacagaatttgttgcaaaaagaaaaagagtaataaccataaaagatggaatacaagatcccattaacaatagcaacgaaaagatgagatcactgagaacacatttaacaagaactgtccaaggtctatgtgaataaatacttaaaacactattgagggacacagaggcagacggccttaaacaaataaagagccctaccatatttttgaataggaaagctcaatttctaaaacatgtcaattcttcctaaattaatctattaattcaaagtaattgccataaaataaatagtcaacatgttattcaatctataaaagctattacaaa

SEQ ID NO: 356939 - DNA, 567 bp, Homo sapiens
tttgggaatattaaaggtattcattgaatactttttgaatgaatcaatcaacaagtaaattaactgggataagagagactataagataacactactggtgcttaaggacatggactacatcttctaaatcattatacacagaaacgctctcagtagctgacaccaatcagtgctcaataaatgtcygtgtaaggaaaacagacaaagatggaacagcatttaggtgaaagtcacaaaaatcacagaatttgttgcaaaaagaaaaagagtaataaccataaaagatggaatacaagatcccattaacaatagcaacgaaaagatgagatcactgagaacacatttaacaagaactgtccaaggtctatgtgaataaatacttaaaacactattgagggacacagaggcagacggccttaaacaaataaagagccctaccatatttttgaataggaaagctcaatttctaaaacatgtcaattcttcctaaattaatctattaattcaaagtaattgccataaaataaatagtcaacatgttattcaatctataaaagctattacaaa

SEQ ID NO: 356940 - DNA, 567 bp, Homo sapiens
tttgggaatattaaaggtattcattgaatactttttgaatgaatcaatcaacaagtaaattaactgggataagagagactataagataacactactggtgcttaaggacatggactacatcttctaaatcattatacacagaaacgctctcagtagctgacaccaatcagtgctcaataaatgtctgtgtaaggaaaacagacaaagatggaacagcatttaggtgaaagtcacaaaaatcacagaatttgttgcaaaaagaaaaagagtaataaccataaaagatggaatacaagatcccattaacaatagcaacgaaaagaygagatcactgagaacacatttaacaagaactgtccaaggtctatgtgaataaatacttaaaacactattgagggacacagaggcagacggccttaaacaaataaagagccctaccatatttttgaataggaaagctcaatttctaaaacatgtcaattcttcctaaattaatctattaattcaaagtaattgccataaaataaatagtcaacatgttattcaatctataaaagctattacaaa

SEQ ID NO: 356941 - DNA, 567 bp, Homo sapiens
tttgggaatattaaaggtattcattgaatactttttgaatgaatcaatcaacaagtaaattaactgggataagagagactataagataacactactggtgcttaaggacatggactacatcttctaaatcattatacacagaaacgctctcagtagctgacaccaatcagtgctcaataaatgtctgtgtaaggaaaacagacaaagatggaacagcatttaggtgaaagtcacaaaaatcacagaatttgttgcaaaaagaaaaagagtaataaccataaaagatggaatacaagatcccattaacaatagcaacgaaaagatgagatcactgagaacacatttaacaagaactgtccaaggtctatgtgaataaatacttaaaacactattgagggacacagaggcagacggccttaaacaaataaagagccctaccatatttttgaataggaaagctcaatttctaaaacatgtcaattcttcctaaattaatctattaattcaaagtaattgccataaaatraatagtcaacatgttattcaatctataaaagctattacaaa

SEQ ID NO: 356942 - DNA, 634 bp, Homo sapiens
cacaaaaatcacagaatttgttgcaaaaagaaaaagagtaataaccataaaagatggaatacaagatcccattaacaatagcaacgaaaagatgagatcactgagaacacatttaacaagaactgtccaaggtctatgtgaataaatacttaaaacactattgagggacacagaggcagacggccttaaacaaataaagagccctaccatatttttgaataggaaagctcaatttctaaaacatgtcaattcttcctaaattaatctattaattcaaagtaattgccataaaataaatagtcaacatgttattcaatctataaaagctattacaaagttgttttggaaaaaataaaaaataaaatacaacagtaagaaaactgccaaagaaggtaaagtaactagaagcaamaatgaccacgaccatatatctaaatatgtaacaatactacaaaaattaaaagagtttggcactggaacataagtagaaaaatgaaagggcaaaagaggactaaaatctacacaaaaatatatagaaattaggtacaaaaatatggcatttcagatcagtggagaaaagatgaaatattcagttaacagcatcattactaatgagtagccacaaaataaatcc

SEQ ID NO: 356943 - DNA, 544 bp, Homo sapiens
tattgaacagaaaagtatggattaaatatttgcaaaacctccaaaatacaatataatcccagtatttcctggcaaagtggcagcttctttcctatgtgtagagtgttgagggcagaacaccttgggcaaatttttattgatcggcacaaaatacgtggtgggctcacagcctgggtataacccactgcaaaatgaaaaggatgggagattaaaccttcacttctacataaagattttttttgtccaattttgactttaactggcaaataaattaatgtagtaaaatttgaattaatrtatcaattacgcaaaggcctgccaactttacgttgaacaaaatggaatatcccaggagcaaaaaaataacatgtgtatggcacattggggttaaaaatgaggttgtctatggctagaaacttcctgcattaaagtccttctttaatatgagagttttgattagtgatatttaatagtgtctaggtttgaatgatgaattatattcaccttggttataaaacaattcagactttctactccttcaata

SEQ ID NO: 356944 - DNA, 544 bp, Homo sapiens
tattgaacagaaaagtatggattaaatatttgcaaaacctccaaaatacaatataatcccagtatttcctggcaaagtggcagcttctttcctatgtgtagagtgttgagggcagaacaccttgggcaaatttttattgatcggcacaaaatacgtggtgggctcacagcctgggtataacccactgcaaaatgaaaaggatgggagattaaaccttcacttctacataaagattttttttgtccaattttgactttaactggcaaataaattaatgtagtaaaatttgaattaatatatcaattacrcaaaggcctgccaactttacgttgaacaaaatggaatatcccaggagcaaaaaaataacatgtgtatggcacattggggttaaaaatgaggttgtctatggctagaaacttcctgcattaaagtccttctttaatatgagagttttgattagtgatatttaatagtgtctaggtttgaatgatgaattatattcaccttggttataaaacaattcagactttctactccttcaata

SEQ ID NO: 356945 - DNA, 544 bp, Homo sapiens
tattgaacagaaaagtatggattaaatatttgcaaaacctccaaaatacaatataatcccagtatttcctggcaaagtggcagcttctttcctatgtgtagagtgttgagggcagaacaccttgggcaaatttttattgatcggcacaaaatacgtggtgggctcacagcctgggtataacccactgcaaaatgaaaaggatgggagattaaaccttcacttctacataaagattttttttgtccaattttgactttaactggcaaataaattaatgtagtaaaatttgaattaatatatcaattacgcaaaggcctgccaactttacgttgaacaaaatrgaatatcccaggagcaaaaaaataacatgtgtatggcacattggggttaaaaatgaggttgtctatggctagaaacttcctgcattaaagtccttctttaatatgagagttttgattagtgatatttaatagtgtctaggtttgaatgatgaattatattcaccttggttataaaacaattcagactttctactccttcaata

SEQ ID NO: 356946 - DNA, 582 bp, Homo sapiens
aagaatttctattatcctgaagatttttaacttctgatcctttttctgtctacaatttacaagaaaatcttttacagattgtcatcaaggtatcctgtaaragtaactatcaactacatctcaaagaattacaaaaatctaccactatggaaactgaaataagaaactgtgttctctgaaaagaaacttactagaatggagaggaaaagataggagaaatacataattagcaattatttaagtacgtaacaattatttactgttaatttggaattattataaatgagctaataaaagcagctaggtaattcaaaggccatggctttttaattaatctactggctttacagtttgggtttaatacttagtaactaataatatttgttgaggggatcttggatttattaaatcatattagacaagctaaatacttgaccagcttaactgtggataaaagatatcatttatcataatgatgaataacagaggctatcctggggtctagggagtcattcttggctctgctactgtgactttggcaaggtatcaaaacagtttggtttcaactttagcttctgcgtc

SEQ ID NO: 356947 - DNA, 582 bp, Homo sapiens
aagaatttctattatcctgaagatttttaacttctgatcctttttctgtctacaatttacaagaaaatcttttacagattgtcatcaaggtatcctgtaaaagtaactatcaactacatctcaaagaattacaaaaatctaccactatggaaactgaaataagaaactgtgttctctgaaaagaaacttactagaatggagaggaaaagataggagaaatacataattagcrattatttaagtacgtaacaattatttactgttaatttggaattattataaatgagctaataaaagcagctaggtaattcaaaggccatggctttttaattaatctactggctttacagtttgggtttaatacttagtaactaataatatttgttgaggggatcttggatttattaaatcatattagacaagctaaatacttgaccagcttaactgtggataaaagatatcatttatcataatgatgaataacagaggctatcctggggtctagggagtcattcttggctctgctactgtgactttggcaaggtatcaaaacagtttggtttcaactttagcttctgcgtc

SEQ ID NO: 356948 - DNA, 582 bp, Homo sapiens
aagaatttctattatcctgaagatttttaacttctgatcctttttctgtctacaatttacaagaaaatcttttacagattgtcatcaaggtatcctgtaaaagtaactatcaactacatctcaaagaattacaaaaatctaccactatggaaactgaaataagaaactgtgttctctgaaaagaaacttactagaatggagaggaaaagataggagaaatacataattagcaattatttaagtacgtaacaattatttactgttaatttggaaytattataaatgagctaataaaagcagctaggtaattcaaaggccatggctttttaattaatctactggctttacagtttgggtttaatacttagtaactaataatatttgttgaggggatcttggatttattaaatcatattagacaagctaaatacttgaccagcttaactgtggataaaagatatcatttatcataatgatgaataacagaggctatcctggggtctagggagtcattcttggctctgctactgtgactttggcaaggtatcaaaacagtttggtttcaactttagcttctgcgtc

SEQ ID NO: 356949 - DNA, 597 bp, Homo sapiens
tccaaattttgctagtaatattacttgaaaattcttatctattttgactcatcaactttaagtggtacttctagactccacgctatataagatgaagaaatgaataggcaaaacttgatcagagagtaattctatgaggcatttaccttgttcataaagtagttccatattcgaatctttgcaggcaactagattgctgagtaatgcaatcacactttgcatggtattacccagaatgctctcctgatgttcctgcaatagatcataatttccatcataaccatacagaaatacaattacatcatcgtaaagacaaataagcaaatgatgtscactgcttcattctttgcacaaggttaaatgattacctttttgcactttaatgaagcacatccttctatgttaagacaaatcccatcagtgagttaagtgagctgggagggagggtaaatcacccagacaccagtgctgcagcacagacttccctgcccatgagctgagagataacacatggtcctccatgctttaggtgggtgacaaaggaattcaagtatgtagaactcagaagatcatgcttgaagatgagtttgatatcac

SEQ ID NO: 356950 - DNA, 411 bp, Homo sapiens
aataaaataagatgaagtctgcatgtgtaaataaatgtaatatttaactttaaagcatacagaagatagctttaaaatgtatagtaatgtgttctttggtatcgtttatataacttacattttgatatgtttcatttctctgctcaaatatcgaagcagggtataactktatatcttgacccccataaccacatatttctgtaggacaccacttacgaagaatgcatatgtaaaaagcgatggatgtcatcaaatcacccttacttttttatatttacataaaatgtcatgataatcagggtgtgagttcctctttagacatccttctgagaactattttatgacaacttccccacaactgataggccagcatgagttgtcaagagaatggaaaagctgcccccacatcat

SEQ ID NO: 356951 - DNA, 533 bp, Homo sapiens
taattcaattcctcaaatatcaaacaacaatgcattattaaaaagtccctgtgtaagtaagctatcctaagccctttaattcagcatcttaggctaccttgttgacactgaacattcaaccatcaggtttcctttattcactcaaaatgttattacgtacctactatgtgacaggcactatgccaaatacagaggatacaacaataaaaataatgtatataaaatatttatttttgcaattaaaagcttcttaagtttttactttacattctaaatctcatggctctccttatggactgctatctagaaccctgagaatttcctcttttaaatatattctcttacactacatcgcttctctcctttaacttctccttgttcccacaccctatgtcatggtgaaaatttgctctttgggaaaactatctctcttttcttctgtgtataactctgtttcctagggttytcctatggttagacagctaagttgggagcctgtttcccttattaactagctttaatcctgaacaact

SEQ ID NO: 356952 - DNA, 559 bp, Homo sapiens
gggtatgatgagttgccatgcaaattgaagtatgcataactaaggcaaagaaagaaattaagatatttcaaaaggttgtataataaactctctttacttggctttctttgagaattagaagaaacattataaattcctttgatcatagtgaatataatattaataaatactcccatctttaaagttgagttattattttgagtacttacagtaaagtttctccaatgccagcctaggaacccaaggattaatatgtaagcaatgccgaaatttatgtgacaaataaaaggtgcaaagaagttaatgcatttgaagcaataaattaacatgtagacagatggtataacgctcctgtgaaaataaaattctaaaatttacacttctgtgaaaccaaaatgtgatcatcagagttctttctaacaagtcttattaggatgaattaaactatacyctctgggtttacagataaatactaattaaccttcataaagggatcaaaagaaatggaattgttcactgggcaagtagatacctgctgattttatttaaggtatttggg

SEQ ID NO: 356953 - DNA, 651 bp, Homo sapiens
acccatttaaacttaaatgacacaaacagttttataatggccaagtgtaatgaactacatgatgactattttccacattttacttttttataacaaactatgatactttccaaaagttggacagtcgagatgctggttactggtaaaaccactgagcatctcatccctacaaataccatctcatatgccaactaaacatgcagactaaattttcatgttgcttataacatgacgtttttcccaactcagcaacctataaaatacagaagatcattctaaatccttccttggtcccttaaattcttttaagaacagaagccttggaaacaaaaatattacttttgttattaagtgcaaayggtatggtggatcacctatctttgagagctatgatttccctttggtagactaacccttgatgtaaatcttgtcttggtaattaaaaagcaagcaagaagaaatccagaaactgtaaaaaataaaataaaataagaaaagtaaaagcaagcactggttttatttctaaccacttgcttgactggataagtcagataaccttttttgtcacttactttcttcatccgtaaattgagaacgttagacaaaattttaatgcagctcaaaccttctagaatctgcactgtgattcct

SEQ ID NO: 356954 - DNA, 651 bp, Homo sapiens
acccatttaaacttaaatgacacaaacagttttataatggccaagtgtaatgaactacatgatgactattttccacattttacttttttataacaaactatgatactttccaaaagttggacagtcgagatgctggttactggtaaaaccactgagcatctcatccctacaaataccatctcatatgccaactaaacatgcagactaaattttcatgttgcttataacatgacgtttttcccaactcagcaacctataaaatacagaagatcattctaaatccttccttggtcccttaaattcttttaagaacagaagccttggaaacaaaaatattacttttgttattaagtgcaaacggtatggtggatcacctatctttgagagctatgatttccctttggtagactaacccttgatgtaaatcttgtcttggtaattaaaaagcaagcaagaagaaatccagaaactgtaaaaaataaaataaaataagaaaagtaaaagcaagcactggttttatttctaaccacttgcttgactggataagtcagataaccttttttgtcacttactttcttcayccgtaaattgagaacgttagacaaaattttaatgcagctcaaaccttctagaatctgcactgtgattcct

SEQ ID NO: 356955 - DNA, 612 bp, Homo sapiens
tattttatcctatttttcaagtcagatgttttaccttactttagttttygtctttcatacatttaaaaaatattcatatatatatagtataaaccaggtgctatgccagacatgtaaaaaactgtagggaacaagaccaaaaagaatttacaggtggtaagaaaataaatctttcaaacaaaaatattttgataaaaggtgataaggggtgtgtggaaaacacagtggtaatacagatgaggtaagcagtgattaatcttccagtgagaaaactcaagaaaattattgaacaggaacaaataagaataaggtcttggaaaaactgatagaaattcaccaagcagtcaagatgataaaggcattctaagtagcaggaataattgatgtaaatttttaaaactcatgaaattgaatggcatcatcaaaaatagaaaaaagaattcatttctttagacacactaaagtacaatggagagaagagtagctcacatggctgaaataagagccaaatatttgaccacagagtctgcagtaccctaaggaatttatcttacttcttgatggaagtaagctaatgggaaactactagattgaaacacaggtaattaaccc

SEQ ID NO: 356956 - DNA, 528 bp, Homo sapiens
gcattacttttgttttaaaattcttcaatttgggttaatagaactataaatctttgtaaaactcttctatgactcaaccaacaagcattgacaaagaaygcaagatcgttagattcattgtcttctttttctttcaacattttcacatactagtgatgattcacatcatttacacatatattctgaacagttttagcaactatattcatggttctttcatacaatttcctttaggaaactaagtacaaatagtgtcagactgtttcatacaatagaacaaagaaataaggcaaagaccactcttattttaaaattccaataaatccaacatttgaactcatatttgtaaagcatcatttattgtgaccaaaattataattataattattattgatatggagtctcgctctgttgcccaggttggagtgcattggtgcaatctcagctcactgcaagctccacctcctgggttcaagcaattctcgtgcctcagcctctcgagtagctgggactaccagtgcccaccaa

SEQ ID NO: 356957 - DNA, 528 bp, Homo sapiens
gcattacttttgttttaaaattcttcaatttgggttaatagaactataaatctttgtaaaactcttctatgactcaaccaacaagcattgacaaagaacgcaagatcgttagattcattgtcttctttttctttcaacattttcacatactagtgatgattcacrtcatttacacatatattctgaacagttttagcaactatattcatggttctttcatacaatttcctttaggaaactaagtacaaatagtgtcagactgtttcatacaatagaacaaagaaataaggcaaagaccactcttattttaaaattccaataaatccaacatttgaactcatatttgtaaagcatcatttattgtgaccaaaattataattataattattattgatatggagtctcgctctgttgcccaggttggagtgcattggtgcaatctcagctcactgcaagctccacctcctgggttcaagcaattctcgtgcctcagcctctcgagtagctgggactaccagtgcccaccaa

SEQ ID NO: 356958 - DNA, 510 bp, Homo sapiens
cttcattaaccttaaaaaatacatctagaaaaacaatctgctacttattgttccctatcccttccctactttttctcacttcttggtcattatttgtgctttcttctctctcaaatgtccaataytgtctatccttcaacttgtaattcatgtgtcaactatttcatgaattcgtaagcagccccaactggagtaatggtcactactgtgaaatcctgttgcactctatttttacttcttatacttattgttcattctttcattcctttattcaataaatattttcatccactttgtaagagagagtgaaggactaaattttccactacggctctttcatttgcttgatccctacagctgtctcttcctcccatcccctctggcacatgaccttcacccaattgccccttctcaccctgttgacataatccaaattcctcaaacaatggcagtgaatatacaagaatcatctttgagcaactattcccaaaactaggtgaacttcaacta

SEQ ID NO: 356959 - DNA, 510 bp, Homo sapiens
cttcattaaccttaaaaaatacatctagaaaaacaatctgctacttattgttccctatcccttccctactttttctcacttcttggtcattatttgtgctttcttctctctcaaatgtccaatactgtctatccttcaacttgtaattcatgtgtcaactatttcatgaattcgtaagcagccccawctggagtaatggtcactactgtgaaatcctgttgcactctatttttacttcttatacttattgttcattctttcattcctttattcaataaatattttcatccactttgtaagagagagtgaaggactaaattttccactacggctctttcatttgcttgatccctacagctgtctcttcctcccatcccctctggcacatgaccttcacccaattgccccttctcaccctgttgacataatccaaattcctcaaacaatggcagtgaatatacaagaatcatctttgagcaactattcccaaaactaggtgaacttcaacta

SEQ ID NO: 356960 - DNA, 560 bp, Homo sapiens
taattatacaaatagccatcaaagttatgcttcaaaataaataartaagatcatgtcatttctctctagtaacattgctgatgctgtccatgaacctataggtcacaaggattcgattactcattcttcaacaccatttgttcaacacctaagagtttgccaggtaccgttctcagtactagagtctaaataatgaataaacagacaagtttccatgctcatggaactgactttctatgctgtttcacacctttccttccttacatactgtattgcttcttttgttaagcaaaaccttagtcagttttcagtccatgtttagatgccacatattcttccacacccacagacgaattatttgcttcttcctctcccctctattgcacagaattcatgtttctactaaacaacttaaaactgtattatgtaattttgtatttatttgcttttcctgtagtattctcctagtcccattaaggcagagataaagaacttgcataaagacaatataaaatagttctacaattaaatagtacaaaacaattttttaaatgaaaaaa

SEQ ID NO: 356961 - DNA, 560 bp, Homo sapiens
taattatacaaatagccatcaaagttatgcttcaaaataaataaataagatcatgtcatttctctctagtaacattgctgatgctgtccatgaacctataggtcacaaggattcgattactcattcttcaacaccatttgttcaacacctaagagtttgccaggtaccgttctcagtactagagtctaaataatgaataaacagacaagtttccatgctcatggaactgactttctatgctgtttcacacctttccttccttacatactgtattgcttcttttgttaagcaaaaccttagtcagttttcagtccatgtttagatgccacatattcttccacacccacagaygaattatttgcttcttcctctcccctctattgcacagaattcatgtttctactaaacaacttaaaactgtattatgtaattttgtatttatttgcttttcctgtagtattctcctagtcccattaaggcagagataaagaacttgcataaagacaatataaaatagttctacaattaaatagtacaaaacaattttttaaatgaaaaaa

SEQ ID NO: 356962 - DNA, 558 bp, Homo sapiens
ttgccaggtaccgttctcagtactagagtctaaataatgaataaacagacaagtttccatgctcatggaactgactttctatgctgtttcacacctttccttccttacatactgtattgcttcttttgttaagcaaaaccttagtcagttttcagtccatgtttagatgccacatattcttccacacccacagacgaattatttgcttcttcctctcccctctattgcacagaattcatgtttctactaaacaacttaaaactgtattatgtaattttgtatttatttgcttttcctgtagtattctcctagtcccattaaggcagagataaagaacttgcataaagacaatataaaatagttctacaattaaatagtacaaaacaattttttaaatgaaaaaagcctttgaagaggcacttcacaaagaaagatatataaatagacaataaatacatgataartgctaagcatcattagtaagtagggaaatacaaataaaaccatttaaaaataagacagtggaggaataacattagctaacttcaaattatacta

SEQ ID NO: 356963 - DNA, 582 bp, Homo sapiens
ctacctttctgtttagtgcatcccctgactctcttagccaagggcaaatgtggattaaaggatctaacgtatacaagctacttaattccatcagctttggagctaaatcaaaattatcccatattttagcaaaatgtgaagttttgcttttcagtagtttagaattttggtttttcttttttttctgtacctactgtttcagagggaagttatgagaacttgttaaaaaatgctaactgtagatcatatgaatcagagttcttgagactagtgctaaatttatattttatttccttcattctgtatcacaccatgggcatccctgtgagagaaaataacccaggaggmtggcctgaagagtgtatacattatggggggaaatataataatctgagctaacacacactttctaattatagaatcagatgcaatcaatcagaggtctcacatagtttcaagctttactaacattttcaaggataggagcagtcaagcgtttcaggtaaccaagtctagatcccatgacactccccaagcccctccttccacattaaaaacacagttttcctggccaagaataac

SEQ ID NO: 356964 - DNA, 592 bp, Homo sapiens
ctcatatgtttaatccctctgtttactgctagtaacatatcgtgtttatttcttctggttatgcattggattgaaactgccatgccaataaaaagttaagtcaaatgtgtagaaagtattaagctcacagcatgggttataccatttttattttattctaaagttttacastggatatttggtgtctactcttccaagtacttttaaaagtaaaaaataaaactagaaaataattaaatgaagaaaatagccaaaaagaagaggcaaccctatattttttttactgccctggtaatacatttatttttaatggacttgggaaatgcatgctttcttgtaaagatactctataaaattgagaatggcgttatttttcaaaataacaactaagtttacttagaatacatccactgataattataattgatgaatattagtaaaatttgagatgttaaattccattttgcttaataagtttatattttaaaatacaatgtaaaactctttattttggaatttaacttataattctttgacatctgatcagaaagtttatttgccaatttccaaggaaatattgaaattaaagaca

SEQ ID NO: 356965 - DNA, 530 bp, Homo sapiens
atactcaccgaatcagaaacttgagttggggaaatgaagtgccgtaatcatcaaaaataggtgatgcttgctaaagcaaactaatgttgaagagctactcagaatatggtaccgctatacttgtgtaacttacaaagacaaataaacctcaaatcacaaacataacacattcattgcaaagtaaagttaatagtcactcttctaagttattcatttataacgatctaacccataatcaccccacctttcacaaaggttgctgttacatcatttaataacttttaatgaagctgagttatttaaacttgacgttaagattaccatgtacccagattatcctaaaagcactcaattcacctatttaaggctaagaaaactctgtttatgacacttacaattcagttattcaagacaaataaatatttcctttacataattgcctcatttaaagagcaaaactgaaaagctaggttacrgaatgaggaaaatttgagacacttaacttagatttaacaatgagcaatgtggta

SEQ ID NO: 356966 - DNA, 575 bp, Homo sapiens
atatacagttgattcagcttcgactcaccaggttaaactcagggaaaatttcttagcagtaagcctctttatgtaagactcctaaaaggatctgaagatttgtttyacttagaggtctttcgattgcaaagaatagagattcacccagagtagctgaaagatggggcagcatagttattattaaaatttgccgtgggataaagagatcctcagagcatactgagagtcatcttttccccgttctcaagaaagaaggccaattgaaccaattcatctttttggattcaattcacgacttacaagtcgtagattgctagtgcacttacagattggctgcccttgaaaaagttttcatatctggcaaagaaaagaagccagagttggtggtaaggaacacaaccataaattgcagatcatagctgatgactgcaatggaagcatgtgggggaggcagtccttcgaaggagtgtggctgccaggcaggcagctatggccatctagtgtagagagtggggttgaaagttcagaacctggactcattctgattgcattgagcccagctctactatttacta

SEQ ID NO: 356967 - DNA, 382 bp, Homo sapiens
ttacaggcgtgagccaccaagcccagccaagttgttgttgctaatggtggttttaagattattttttaaaatttggatctcattggaagtaaaaatattttgaacctccagtatcttaaactagttagaaaagaaaatcgtttcacattatagtagatttgctttattaattataaaatatactatataaagcttaataactagcaatgatgtgtccttatggggactgaaatgcctcatctaatactctttccattgtatcgtattgtatttgccccaytctactcttagtcatttatttaaaatatatgggctgtaggcagtggctcatgcctgtaatcaaaacacattttgaggccaggagtttgagaccagcctaggc

SEQ ID NO: 356968 - DNA, 541 bp, Homo sapiens
tgtgtgtgtgtatcgtgaattagggacaagattgagacacaagtctgtgtgactccaaagctatcacactttccattataaaacactgctttttaaatgtaatactattatgtggtcattgcatatttctgagttgttaatatagtagtttcgacattaggttgacttttgattccgttcactaaaggaggtaaatattgctatgcataaaatgaaagatggaacggaaaactggggtggtagaagagggtgctaataatcagccttctctgagtggttcacaaagaagtgaatacagaracatgcaatttgtgcagtgaaatttaaaacaccttttgtaagtcaacaaaaacaagtttctcatggctcagaaaagagagcttcctgagttttttattaataaactcatgttacaaccagcatgcccatgtataccaagtcaggcagcaaaagaaaatggagagatcactagccttttaggaaaaaaaaaagagtcctaatgttgatttatttctttattaacaagtaatctgtcggttta

SEQ ID NO: 356969 - DNA, 642 bp, Homo sapiens
tagttagttctaggacagaaagagtaggtgccatgtggctggtaagggagctcttgactcagtgtaaataccagggatgaaaagaaatacacttaccagtaatcaatctttatgcttctttgttcttctctttctttgggagagatatcagatgcaaaagattaaggaaggctttaataaaattaagaagagatgtatttttgttttctaatagtagtgatggtaataatacttggaagattggttataattatcatttttatgactcaggctctctcagctcttgttagtctaaacttataaacagttgttttttttttaaattcttggtaagggaaaagtgcacaggtgagagaatgctgatagtttaatccgttccatgcaggattagaaatatagtggagacattgtgtacatactcaagcaatgtgagtttacagcacacattcaatacaaaaggagtaaagaagagaaaatcagtctgtgaaggtcagagatgcaaactgtgaataggctagtggactgcatccttgagtcagggtactgaaaattctgcactctttttcactttttaaagattttgtaaccacmcatgcaaacaagcaagccaagaataaaacaaactaaaaaaagcagccgaac

SEQ ID NO: 356970 - DNA, 554 bp, Homo sapiens
cccttttctctctgtatctttcccatccctagttactaggctctgtttatttgaatttcatgaattacttttaaaaccactgtctattctgcctcttcatccctaccatcttaattcagagcattaagaatcttctgcatttattatagccacaaaactgattgatctcttccagtctattttttcacattgccaccattcttagttttaacgtatgtatctgaggatataattgctaatggaagacatcccaaaatatcttcatatggaatgcacgacccttcattatcagactgtatctaacacctcatcttccrtcaggatcttctggaatatcaaaacataacaagctccttaaaatttaccaaataaataggttctacacactactttatatttctatcaacaaacatcacacttacacttgtgggtttgcattgttaatgactaacctagattctagaatcttgcaacccaggatatatgtctcatttatctacttgtcttcactgcttagcatggtaattagcatttagttggcgctattatattcc

SEQ ID NO: 356971 - DNA, 554 bp, Homo sapiens
cccttttctctctgtatctttcccatccctagttactaggctctgtttatttgaatttcatgaattacttttaaaaccactgtctattctgcctcttcatccctaccatcttaattcagagcattaagaatcttctgcatttattatagccacaaaactgattgatctcttccagtctattttttcacattgccaccattcttagttttaacgtatgtatctgaggatataattgctaatggaagacatcccaaaatatcttcatatggaatgcacgacccttcattatcagactgtatctaacacctcatcttccgtcaggatcttctggaatatcaaaacataacaagctccttaaaatttaccaaataaataggttctacacactactttatatttctatcaacaaacatcacactyacacttgtgggtttgcattgttaatgactaacctagattctagaatcttgcaacccaggatatatgtctcatttatctacttgtcttcactgcttagcatggtaattagcatttagttggcgctattatattcc

SEQ ID NO: 356972 - DNA, 532 bp, Homo sapiens
gctgaaaatcattagaatgcatgattgaggttagagtatctacttccaaaatggctcactcacatgactgttgacagaatgtcttagtttcttaccatatgagtctgtccgtaggattccttgggtgtcttcaaaacacccatacaccagaaaaagtcatcctagaacacaagaygggagccacaacatctttgctgacgtatcttctaaactcacacccatcatttctgcaatattctattggttattcaagtcagctcaattcatcatgagcgggacctatgcaagtatgtgaataccaagacgcaaggtccattggtggctctcttagagcttgttgttatatagggtttaaagtgaatagtacaagaaggctgtatggtttgtatcatacagcaatagatatttccacttaaaaatgtctaaatagaaatcataaaccaagtgggatccggcaaagcacagaaacatttgaacaagcaatatcaaatgaacatatctatagtaataggaagcctctatgttttaaata

SEQ ID NO: 356973 - DNA, 559 bp, Homo sapiens
ttcagcattaagtaccgacaaaggaacctgaacactgcattctgaaatgttttcttctctctagaatactgatgatattgtatgaaggtgcagtctagctacctggaagcaaggaaatatttttttaaatggatgtagttgaatatgaaacttaaatcataatgagaaatcttattattcataaaatgggaaagttacaatatttttactttcctggtaaatatattgatgccttggaacagtattgttcaaccttaagtaatagaaaaaattccactcgagtgggcaaaattattttcatgtactcctgattgctgatttatttttagcataatgtcatttaaacatgtaaaataatgaaattaggtatacactcatagctgatgtataataatcaaaaagscaatttagtaaaacaaaacacgaaaatactcaaacaatgctacttaaattaagaacagatgatgtttacaaatggaattgcttataaaataaataatgtatgatatgccatagcaggattttctttaaattcagcacatccctttaactatgtgtc

SEQ ID NO: 356974 - DNA, 533 bp, Homo sapiens
atttttgcaacttttctgtaaactcaaataattccaaaataattatttttaataaaactgtgtatatctgatggtgacaaatgctatggagttagaactagaaagagggtttggtaatgtttgatcactaaagcactcagtgagaaggtgacatgaataaaaagacttwaagaaaagaaagaacagttcattaaggtatctaaatatagatatctgtcatttagacacatggaacagccactgcacaggagaataaagagggtgttcttgtgttttattcattattaactgctcattgctaataacattatgcatttaaagaaagtgatcttttgttcacaccatgctttaagttctgtctctactgaaatagaaaataagtatcaaatcttttatttatttacttagttacatttttatttgagggttgagactgaactagcttcctattaaaaatttttgacacctgaattttaaaataataataaaatcttttgggtcaatctaaaataatctttttaaactgagtctaa

SEQ ID NO: 356975 - DNA, 603 bp, Homo sapiens
aatgagaaattaggcatgtttgctgggggtttcagttatctgtgttgcatcgctggcaagagagaatactttgctcaataccataatcctttaggaggaaagacagtcttatagaacagcaactcacttcaagtcaacgtggggtagagaaaaggctatgccctgcagagagcaaaaatcccatctaagagtgcaagagtgcgaggctgcatactgtttatgcaggctttatcatagtattactctagggtaatttttaatttttgtttttaaaataatgagcagtaaatgccagctctagttagaaataaagcatcgttcgtgatttagcatgtctgtgtaactgattctaaatttcccactctgctgcaacaagcacagcttgaagcagctggacacatcaagagatggccatagttgatattagagaccagtaaatgaaaatagagaattaytgagttgcttgtgtcaagttattagtagactcagcaatattgttattatctcttttctattcagagtgcttaagttgctttagtcattaacatttcatcagattttaagcagctgccaagaactgctcttacaaaatgacaacagata

SEQ ID NO: 356976 - DNA, 577 bp, Homo sapiens
cagattataatagatgacactctattttgttaacctgtgatttcagaaaaaagcataatgctgcaaaaggccagctacttgtttgccttgcagataaacttctaagttatttcacccattatttctcttaataaactatttaatattttgatgctaaagattagtggcaactttcagttcattctttctctgatgaatcagaattatgtataggtttctcctcctgaaaaaattctccctgggactgagacacacagaaaattgtaagaactacctgtgtttctcctttagctaaatactaacaaaaccaaaaagaaaagaaaaacaaaggtcctttgtgtcttatttctagagcctttaaacaagctatgcaattctaaaactgcctcctagattcctaatgaggaattgtgatgatctctaggcacaagcaatttttaaccaggagagctaagtgcatgcctgcacatgtgaccgaaggcactctttatctcacaggtttgtggcrgctctgaagacccttctcactaaacaacaaaataaatctttctagattcttgaatttcattaatttctt

SEQ ID NO: 356977 - DNA, 634 bp, Homo sapiens
atactcttgttttagcaactgtcttaagcgtaaatcagagagagtaatccatgctctctaagtcagtattgaagaatargataaagcattgtgactggtgtaatcacacagtgaagtggctttgttgcgtggggaaatacctgagattcatcatttggcggtgagaaaattaactacatggacacacgcccatggagtgggttaaggagcgaaaagtttaataggtgggaaagaagagaacagctcccccatgcagagggaggagggcttggaatggaatctccactcatggctggaagcagcaggtaatataaagaagcttgaggagaaggtgtttgatttacataaagcccaagggattggtttgactaggtgtgccatttacatagtccatgaagaaactggccatcccaccttaatcttttatttggtaaatggggttgtttacctggctggccccatgacacctgcacaggtggcaaccaagagaagggcgggggagtcaccatattgggtgtacctggcttttagtatagctgctggcattcccctctgcaagcttccagcttgtttatctatacttgcagcttggcttttcaggctgctttctgttagaaaagaagtagtttggggg

SEQ ID NO: 356978 - DNA, 492 bp, Homo sapiens
tttgccattattatttcctgctcattcttgaaaaaaatgaaagtattcttatcagtgaattgaaaaaagcatcatttatcagtggaatagacatggagattataaagcctctctactaagcacagagaataaactcttctccactttccattattacatacataatttatgcttgagggatttttgaatgaacgataaaatttgtaagaaaaatgtctatgacatttgtaataagttgtgcttgcatcaactgcagtgtctgtttcatctcagtgacaagctaagaaatgaaagttttctcatagcatctttaagtatttcattttgaaagagaccaggtgcttctatatttcataagggtggggttgaattgttttttgctacatagtaggaaagactcaacttattgtggtgaaattgataattctgatgacttatatgataactagtcttattgttttctaatamtatatttaaatttgcttctctacc

SEQ ID NO: 356979 - DNA, 587 bp, Homo sapiens
ggccatcccaccttaatcttttatttggtaaatggggttgtttacctggctggccccatgacacctgcacaggtggcaaccaagagaagggcgggggagtcaccatattgggtgtacctggcttttaktatagctgctggcattcccctctgcaagcttccagcttgtttatctatacttgcagcttggcttttcaggctgctttctgttagaaaagaagtagtttgggggatgctttttattaaaagaaaagctttaccgaggactcctgtaccctcactatctgcctaaataagtcctttttaactcctttattaacggggctataaactcagattccctaattgttgggacttgatgctctgtggttgctgttttaaaattcttgattgtatcttcatttctgctttgtaagtaactgcaataagaaaatgaagaatatgcttccactatctctcttcttcttgggatggattctcatctcctggcttcctatatcttgctcgattgcccttttcttgtccccatcatgcaaatcaaacactgccgtattgtgcctgggtagatgactgggtagcacaggcaac

SEQ ID NO: 356980 - DNA, 517 bp, Homo sapiens
gatccgcactagaagatccttctctgcctggtcctgttactcactggacaggcgacctcagggaactcacctaccactaattttcctctgatttgtcattgtaaattattcatagtgagacatgcctttttatatttatacatgtgctttttcaaagactaaaggaaataatgtactttgattagtaaaggaaaacataaaagtaagttattattactattcatagtttattaaattggtaattaattctataactagacttactaaagcatatgacttaagttgggaagtttacacatactttgaattaagattacaatctttattcagctccacttaaagtgaattatttgaaatccckggaacttgtattttattcacagattgaaaacaatggaattcattaacttatcaaatattgtgtgatccttagataacactgaatatgaaaacataaattaatagaatagcttctattttatcaaaacatatacacatatacatatattaacttctt

SEQ ID NO: 356981 - DNA, 575 bp, Homo sapiens
ggaaccactgggtagtttgtggggtggagaagacatttgcaatctgttttttccatagaggttgcagaaatgagcaagttcaatcccttgtaactggaaaaaaggtcttacagaagagattctggaataggtgatgagaaggataatggggtaagcatatattgtttgaaccccacccaagttcgtcatgccccgctaccaacaacaaaatatattactctttgaaaaacacttgtatagtgtattaaaccacacaatgctccaactgctaattaccatgytacttactgtaagatttggtctttttctataggatgaacatagtacttttcataagtaggttcagaatgtaattttaaacatttgattagataacacagcataatgcaggtttaagatttctgtagattataaaaatatatatttagaacatgtgttggtatgtggaggagtatatgtgaactatttacccaggggaattttaatttgcagatttcctgggagtagattaaaccttttaaacattaagtcttttagatattaaacattcttttaaaatttaaacattaaaaaga

SEQ ID NO: 356982 - DNA, 500 bp, Homo sapiens
ttaaacattaagtcttttagatattaaacattcttttaaaatttaaacattaaaaagagggtgaggtggccgggtatgtggctcacacctgtaatatcagcatgtttggaggccgaggggggcggatcacctgagrtcatgagttcgagaccatcctggccaacatggtgaaacctcatctctactagaaataccaaaaattagccaggcgtagtggtgggcacctgtaatcccagttactcaggaggctgagacaggagaatcgcttgaacccaggaggcggaggttgcagtgagctgagactgcaccgttgtactccagcctgggcaacaagagtgaaactccatctcaaaaaaaaaaaaaagaaaaaagaaaaaaaagatggtgatagaacttagtgtgcttagagtcctggtttgctcctgttgttgtagagatgttattagaatcaccttcttttcaccatcaaaagaatttgatttggatgatatgtaatatta

SEQ ID NO: 356983 - DNA, 564 bp, Homo sapiens
ttcgaatagcaacctagttcaattatgcttcaaaatcttaaccaataccagttaaaacaaagatgatccaggttattcagatagtacctaatatattttatgaaaacctattatttaatatacaaaaatgtgaaataatatattttctaaattggtattccaaaactgaaagcagaatcatcaagttaaaagctggacactggtattaagcaacatcatgctaagtaagttcaatttattcttcttaacttttgccscaaatcagatttcttcatatcatattgggccttttggtcctaacatgtgacctcattgtgatagtcattagagctatacaccaacatttctgattcttttctttgtaggcacacgataggatctcttgtagttagaggtggctaatgaaatgtcagattccaggtggagattttaaaaaattggtgatgcacaatgacacagtttgtatctgtgtgtataccagcccacgtcttaaggttaaaggctcaatctctgggtgaggatagtatggatggatgtgggtatgagggaaaaataagcccttgt

SEQ ID NO: 356984 - DNA, 568 bp, Homo sapiens
ctggggattcttctcttcaccatttagacttcgaatgaaatttcagttccatagaacactatttctgacccttctcaacagattaggttaggtatcattatatgaccccatatcaccatgaattttacatttgggcaattttctttctcataatttttaaatcagttattgactatttgttaygtttaagcatgtcttgtctgctgtattgtaaactccaagagggtggggacctgtctgcttgttcatggctacactttaagtatctatccagcgccataggtaaaatattagtctttgtcaattggatgtcagcctatactatttcattaaatctacatccatatctgtctcagcacacacttacactcacacatgcaaagacagctttctaatttattccaagcttcctgtttacatcctgctctttattttactgtctagtcaaggcttctgcaatctccttgatttgccctttaggatgaccatttactgattttgcttccatcttacttttaggctcctgctttagttgggagttgtgttcttctctacaagtcaatattga

SEQ ID NO: 356985 - DNA, 609 bp, Homo sapiens
gctttcactaggattgttttcagcttaagtttctggaattcatatagaatctatttaccaaggacttgaattcagaccagagttaagtggagaccgtaacagcaaaggctagtcagatataggaacagaagtgcttacctactttacctcggtaagaaattagtcacacagtattaataagttaagttaaaaaatcagaaaaaaataaattcagtaactaaaaagtttgaaaattatatcaaatgacaagtttctgcaataattcttttcacccatatctgcctacttcctctgccttcctatttctatctttttatgtgtttcaattgattagattgattttaaattcattttctgaggaaagaaacattgcttarattagagcttcatgactttttcaaaaggatcaccatgcatgaaaatacttaacaaatgtctcaaaattctctgttttaagtaacacagtaggtcgtctctacgcaatggttttactaccttttcaagaagctcagaatataattgagagacatatatagtgcaaactacattataatatgaaataatttttaacatcataatattgaattctaaaataattataggaaacta

SEQ ID NO: 356986 - DNA, 560 bp, Homo sapiens
atatttaccattgaagaaagaacttgaatttcttcttttcttttaggaaaacaaaaactataaagatatgaatgcattttaggaggtataaaaatgggctttactttcaaatatgcaaggcaataataaatataatgtacctacaatatttataatatctcaggtatgtcttattaattaatcttatcagatatccaatgagatgccatttacttagaaagaaacttcatgttaggcaggttaagtgatttatccatacttacatatcttaagtagaagccagattcatgtttttttaaaaaatatatttaccacaataagtcacaatagaattgtaaatgtcatgctgagaaacaaaaatatgtcaatatgctaatgactataatttgamaacagttgtccatatttatctttaatcataatatagtaatgatggggatcgttttaaaaatagagaagggagttgccaattcagcaaaattggtagagtattccatctccaaatagccccctaaaatgatttctcatgatctgctattccattgttagtgtattattct

SEQ ID NO: 356987 - DNA, 475 bp, Homo sapiens
aattcagcttcatgtttgtaaagatctcacagaggagaacaacaacaaaaactaatggaatttttaaaaaaaaattcaatgccttgttctgtgcctgtttctctgacagaatctatgtgagattaccattaaaaaagtagcttcctattggttgaaaaccccaacgtgaaagacgtataacaccaactgtgatcaatgtcattgttgaccaaaatgctgctggatgcctttaaaattactgctcaaattttttttttcttaaggatcacatctgtaaatagtagactacatcaatgtaaaattctcaaataattaaaattttgaatataaaaactttatttgactgtttaagtatagtaatccctactgtgaatactaaagtgtgatattccatgtgtagtatactatgaasatataaaaacacattttaaattttgattaaatagtagtaaaatgtaagtttaattggtgttga

SEQ ID NO: 356988 - DNA, 421 bp, Homo sapiens
tatagtaaaaagttcaattaattaaaaaaaaaacctaaaattagaaaaaaacataaaactaaagtgttttacttttcatgaaaacttatcaaaagtagtttaaaccatccttgcctacttgtcacctaacaatgtggagcactatctttttttacgcactggtgaattgtcatatgctttttaaagtttggatcggcttcctgcattgtgttctttattctttcagtgtcttgaagcaccttcaagggtttttttctaatgtgaaaaktttctgccagcattacttcctctaggacatgttcattctgttcatcacaactacctttctcatttatgctaagttctcttccagtaagtttccgtggcctcatacctagagactcaaatgacagctgtgtcaatatcccatggtcagctgtct

SEQ ID NO: 356989 - DNA, 605 bp, Homo sapiens
taccaggaagttttattgcaattgacagcctcatggaaactgtccaattctcaggagtcatatatttgataatcagtcagctccatgtttactgagaagaggcacaatgcagactctcattttagtatgaatagttagagttacttttgctcttatacggatgccaaatttgagtattaccacaatccccaatatgtgtgttttccaaataattttaattcctttaacggtgtttctgtgttatatggggraaaaaaaaggaagtaagaccatcctgtattaaagatcaatatttggtcttgatatttggtaagattccggaagagagattttccttttaagccatcaaatttaggaagtgatcagaaagaataagatgggccaatcaatgggtcaagagaaaataaagcaatgggaagggaataaaaaagagctctaattattgaaagaaagaaataacattttaatgcaaaatattgaacacatttaggaaaaactgaagaggatgaaatgctgtttttgacaaaagtgaagagcttaaagcatgaactatggaaatttattaatttttttctagcacaacgtaattagcattcaaaaagcgt

SEQ ID NO: 356990 - DNA, 354 bp, Homo sapiens
tggagggagccaaggtggcagggagctggagtttcagtgccgccccaagcatgtgcacacccagccatgtcatgacagcacccgggctcagccactactttgcttcacacaagaacgggtgccggaagcagggagaggtcagacagtgggagcaggcacttataagcctgcggtggcaggggcttactgggcccccaagagctcggggatgyccaggtctggagccatggcttggcagctgcagctgtgcccaagagtacagggctcccaccccgttaactcagtagaaagtggggctcccacttgttcctggcttgcaccagccctgcagagcatgcaatcccagcagtacct

SEQ ID NO: 356991 - DNA, 610 bp, Homo sapiens
aatatatttgctgttttaaatataatttattcaacagtaactttataatttattatttaaccatagctcacaaaattgcatgaagtttgaagaagtggtttttatgagctaatatagttggctcctacccaatactatcaccaatatttcttttacttttatatatttgttaacaacatttgaattccaaatgctcttaaatgttttctaaatgtttatttawattagtattactagaagttttattattatgtgtaatttgtatgttatagttgttttatcattgaatttttggttctgattgattttgttattgtttcattgtgcctgtttcattcttgtctcacattagagatttttgccaagtaattggggattcttgggggtttgttcaggtaaaaagtgcaactttatgagagagactgccatctctgtgtgcatgtactgtatagggattgttgtttgaaaggcaatgaagtagcaagctgcctgttttatataaaacagcctgtttctatataaagatctacaaatgtcagaatctaaagattttttcatctgggcggctcagttaaagtttcaacattatccagtatgctaacacttgtca

SEQ ID NO: 356992 - DNA, 478 bp, Homo sapiens
ctgtcccaccccaagagatcacacatctagaaggatggattggatcttctgtcatggaggataatacaagaagtrtgtttatttaacatttcataattggtctaagggctacaatatcttcatgtcacctcataacctccccatagtgagtctttcacagtgaatgactatttgtttgtaggattagagaacttcaatcttgcaaacatcagcagaatctagttcatgcaattctttggactctggaggccagtaggtgttccaagtttaggtgcaggtgtgatgattccatatggggtagcaaaaaaacaaacaaacaaaatcagagtagaatgtaattatcctaacatcccggtctatgccatatagagaccaagcaattcaaatgtgcagactccttgtggtaacttgtggactcaaatgcattcttaagcttgagagcagaggaaggcaaaaaccagaccgattcacctatcac

SEQ ID NO: 356993 - DNA, 478 bp, Homo sapiens
ctgtcccaccccaagagatcacacatctagaaggatggattggatcttctgtcatggaggataatacaagaagtgtgtttatttaacatttcataattggtstaagggctacaatatcttcatgtcacctcataacctccccatagtgagtctttcacagtgaatgactatttgtttgtaggattagagaacttcaatcttgcaaacatcagcagaatctagttcatgcaattctttggactctggaggccagtaggtgttccaagtttaggtgcaggtgtgatgattccatatggggtagcaaaaaaacaaacaaacaaaatcagagtagaatgtaattatcctaacatcccggtctatgccatatagagaccaagcaattcaaatgtgcagactccttgtggtaacttgtggactcaaatgcattcttaagcttgagagcagaggaaggcaaaaaccagaccgattcacctatcac

SEQ ID NO: 356994 - DNA, 478 bp, Homo sapiens
ctgtcccaccccaagagatcacacatctagaaggatggattggatcttctgtcatggaggataatacaagaagtgtgtttatttaacatttcataattggtctaagggctacaatatcttcatgtcacctcataacctccccatagtgagtctttcacagtgaatgactatttgtttgtaggattagagaacttcaatcttgcaaacatcagcagaatctagttcatgcaattctttggactctggaggccagtaggtgttccaagtttaggtgcaggtgtgatgattccatrtggggtagcaaaaaaacaaacaaacaaaatcagagtagaatgtaattatcctaacatcccggtctatgccatatagagaccaagcaattcaaatgtgcagactccttgtggtaacttgtggactcaaatgcattcttaagcttgagagcagaggaaggcaaaaaccagaccgattcacctatcac

SEQ ID NO: 356995 - DNA, 478 bp, Homo sapiens
ctgtcccaccccaagagatcacacatctagaaggatggattggatcttctgtcatggaggataatacaagaagtgtgtttatttaacatttcataattggtctaagggctacaatatcttcatgtcacctcataacctccccatagtgagtctttcacagtgaatgactatttgtttgtaggattagagaacttcaatcttgcaaacatcagcagaatctagttcatgcaattctttggactctggaggccagtaggtgttccaagtttaggtgcaggtgtgatgattccatatggggtagcaaaaaaacaaacaaacaaaatcagagtagaatgtaattatcctaacatcccggtctatgycatatagagaccaagcaattcaaatgtgcagactccttgtggtaacttgtggactcaaatgcattcttaagcttgagagcagaggaaggcaaaaaccagaccgattcacctatcac

SEQ ID NO: 356996 - DNA, 533 bp, Homo sapiens
tagtcattgaaaatgtattgagtcctaagtgatgtgcctagcactgtgcaatagtttttattgtgtaggctacaagaagaatacaaacttacttataattgcttttacaatgctaccagttggaaattgtactttgtttggttggttgctttatttttctctctttctttctttctctcttttctttctttcttctttctttctttctttctactttattctttttgatttatctcttttaacttataaatgkccatgtatatttataaccctgatttcagccttcatcgagttatcaatccctagtagagaattaaaattaacgataaagaagtactcctatttatttcagggatttttgcatgcatccctgaatatgtttggtgaataaagtggcatgatataccaaatttatttgaggagtcagaaggcttgtgagaaaagaccaagaaaacaaacacatacaaatagataaatgaaaactttcaacctgtttctatcattaaaattcagatatatctcaaaatagagaa

SEQ ID NO: 356997 - DNA, 593 bp, Homo sapiens
aatattgagttcatatttccaaaatatttaatgatcattcaattctttacaacttctcattcaggtaatttattatactataaagtgcatgtataaaaatataaatatattctaaaacacaaagcattcctcagcatatgacatagctatttaataatgggtattcttttctttttacaaagtaatataaagatttggctctctctttagcctaaaagagcaaataaccagatccaatatttgtarccatctggttatacttacatacctgataaggctgtgactacaagagcccatggggaactttttgtccaaacagaccataatgttcagtattctgactcagtgcataggtttggattaataaaatgtcactcctattgaatgatttaaatcccattttaaatgttgttcacaattggtgaatcctgtaagtttcaattttgcttctcaaactgttcattacattttcttctaagattatgttctggacgaattttttacttcttacattcatttctggaaattaatagcatggcccaagcacatttttttccatgtgaaaatatatattctttaagccttatgctatg

SEQ ID NO: 356998 - DNA, 555 bp, Homo sapiens
gatatatactcaagagaaatgaaaacatatgtttacacaatatacacatattctatagcaacacacttgtcccatgttggaaacaacctaaaagaccatcaactaaatagtggataaacaaatgtggttttcaaacattaataaaattaaatattactcattagtgaataatattaaaacttttaatattgctttgaaaacattatgcttaatgagggaaggtagtcacaaaaggcaacatattacataatttaatttatatgaaatgtccagaatgggcaaattcttagaaacagaaagtagattagtgctagccaggaactagaagaaggaagcagtggagattgagagataatgagtacagggcttctttttgtgaacakgaaaacgtcctaaaattaaatagcggtgatggctccaaactatgtaaatatactaaaaaagcaaaagtaaaaaaccctcagtgaattgtatgttttaaaatggtgactttattgctaagtggattttatttaagtaaaactcttattaagaaaaggtgtttcaaatcatgta

SEQ ID NO: 356999 - DNA, 555 bp, Homo sapiens
gatatatactcaagagaaatgaaaacatatgtttacacaatatacacatattctatagcaacacacttgtcccatgttggaaacaacctaaaagaccatcaactaaatagtggataaacaaatgtggttttcaaacattaataaaattaaatattactcattagtgaataatattaaaacttttaatattgctttgaaaacattatgcttaatgagggaaggtagtcacaaaaggcaacatattacataatttaatttatatgaaatgtccagaatgggcaaattcttagaaacagaaagtagattagtgctagccaggaactagaagaaggaagcagtggagattgagagataatgagtacagggcttctttttgtgaacatgaaaacgtcctaaaattaaatagcggtgatggctccaaactatgtaaatatactaaaaaagcaaaagtaaaaaaccctcagtgaattgtatgttttaaaatggtgactttattgmtaagtggattttatttaagtaaaactcttattaagaaaaggtgtttcaaatcatgta

SEQ ID NO: 357000 - DNA, 553 bp, Homo sapiens
gaagggcagcagagtggtcagtgataataatgaattgacattcttaccagatacatttctgattwcaagctaaaaagaataggatctctccagcctgtgtatgtctcctcttccctggaggagaggcaggagtcatattattcattaatctatgtcttagcccaagtttcctacaaaaaaaagaaaggattctgaggcaaagtttacatgctattgttttattgaggacttcaatcctggggcagcaagaataaagtaaatttggccgtggaggaagaagagcaaataccaggtagtgtgctactcagctggttacattcttataggtgacacagctgattgcttggtcacataggacatttctggagtggtcacctgaaatcattgtctaaccctttggattagaggggaggcaggcaaaataatttatctgacaacttcttgtaatctcctgttcctccttagctaatatttttcctccagggccttaaccagaccaaactcctctgagcagctgttgaagtcagattgcatacctcatggggagttgctt

SEQ ID NO: 357001 - DNA, 553 bp, Homo sapiens
gaagggcagcagagtggtcagtgataataatgaattgacattcttaccagatacatttctgatttcaagctaaaaagaataggatctctccagcctgtgtatgtctcctcttccctggaggagaggcaggagtcatattattcattaatctatgtcttagcccaagtttcctacaaaaaaaagaaaggattctgaggcaaagtttacatgctattgttttattgaggacttcaatcctggggcagcaagaataaagtaaatttggccgtggaggaagaagagcaaataccaggtagtgtgctactcagctggttacattcttataggtgacacagctgattgcttggtcacataggacatttctggagtggtcacctgaaatcattgtctaaccctttggattagaggggaggcaggcaaaataatttatctgacaacttcttgtaatctcctgttcctccttrgctaatatttttcctccagggccttaaccagaccaaactcctctgagcagctgttgaagtcagattgcatacctcatggggagttgctt

SEQ ID NO: 357002 - DNA, 559 bp, Homo sapiens
ttcctttttaaattacccagtttcaggtcattctttatagcagcgtgaaaacagactaataaaccctccatctattaaagctcgaaaactgcctctaggtggcaagccaagctgaggtaataataaggttcaatttgtttattatgcctgaaaacattgttttgtccaattttctatttgtttgaggtacacagtaaatgtagtctctgtcatcccattatagccagagcagaaatgatctccagaaatcttttttaaatgtcaaattacttgctggatacctctttttacaaatataggaagatacctctacttccaaatataagacgcatatgaaacttaacatatataaagtttaactctgctctcctctgcatgccctgaatcaagtaaacctgccccttctttcatgttccccrtgtcagtaaatggcaactcaatcattcccattgtttggaccaaaatttcaaaatttctctttcacacttaatagctaaaccatcagcaaattctttcaaatcttgtcctcaaatgtatatacagactctaatccgatcac

SEQ ID NO: 357003 - DNA, 585 bp, Homo sapiens
acattaattttattcttttaaaaaatgtatattaggtaacatgaactgttgtgacatttcttaaatttcattttaatggaatgacctgaataacatagtaatgggtaaaatttcagccacatccttgagtatgtatgcagaatgcccgtgttcctttctgagaatgataggtaggtctgagtgcacctgaaacaaatattttctaaattgtgctgactctctggcaagatctcactgacttcatgtcatggctgttacttacatttgaagtcatgctttcaaaccgtgatgtgtagtaatataatctccctgactaggcctttactgtgacaatrtacatatttaatttagtttactaagaaagacagattgattaagctgattaactccacatatatattaattttattaatgcttatcaacatgacccacaatatgtcttttaaagaaatccctgtatagcagtgtggaagcaagttgtgctactctaaaaggtaatcgatgttgtcttttttatattgctgattacatttatgaaatttaaatatgcaaacaataaaaagtggcactagaaataattgtact

SEQ ID NO: 357004 - DNA, 577 bp, Homo sapiens
ataaagtatttagacagtatgcttcaactttttaatagaaagaatgacaatggttcaagtaatgaaattttattttcaatgtgggttattatagtctagctaagtgtagcagtctaagtgatagatcaagttttcatgacattggttctgcctttacaaagtttgtgatccccagtgggaataggtgaaatcaaaccttaagtataggaaataaaagaaatgcatgacatgatatagaaatctatggcatttcattaactgtatcttcagcatttgggttaaaagttgaaataaagatgatcacgatcataatgatgctgctgtttttataatgggaggaggtaagaggaggataagtatcagttgttctcgaaaggaatgctatttactgaattaaaagtttgattgtgttttgagagttcaatgttgtattcctaggtattttattcttytggtggtaattttgaatggaattacctttctgatttggttctttggtttgactgttgtggatatatagaaatgctagtgatttttctacatggattttatatcctgcaattttgctgaagttgta

SEQ ID NO: 357005 - DNA, 588 bp, Homo sapiens
tatacaccatgaaatactatgcagccataaaaaagaacaagatgtctgtggacggaacatggatggagctgacaaaacaaaaaaacaaaaaaattttagcaaactaacacaggaacagaaaaccaaataccacatgttctcacttataggtgggagctaaaggataagaacttataaacacaaagaaggaaacaacagacactggagtctacttgarggggagggtgggaggagagaggggaacagaaaagctaactatttggtactgggcttaatacctggatgatgaaataataagttcaacaaacccccgtgacacgtgtttacctgtgtaacaaaccatatgtaccccgaaacctaaaataaaagttaaaaaaaagaaagtttaatgtcatcttttgattttagatttttatttctgattatttcaactatctttcttgtgaatttcagtacccctacacataaaatgagatttctatgtattttgttagggagttagttaagtttgtaatgagtcctgagtactgtggactcaaaagacacaatgtaaatgtaaaatattgtttgtatttattattgcttcat

SEQ ID NO: 357006 - DNA, 431 bp, Homo sapiens
cccccagccctttaatattctaagtgtctctgcagaagtcgagcatatgcatttagaattgagattaaattccctgaatgcttttggcattgtgcagctctgtcattctcatcagtattcagcaccaatgtcaatggataaagtagtttaaaaaaragtgaaaatattgcagcaactgaatgatatgtgggatgtgcggctgtaatagtgacagagcttgaagcagtcttactcgatatgacagagcatgtaatgcacctgaaattgggccctgtgtagtgactaagagtttcaattttctgagtcttatagaattctgtattatgtttggcagctctgtttcacaccaatggctggttccataatgctaacaagtacaaagaagagaaaatgtcacttaaaaaaaaggaagaatacaaaagtgtatgaaa

SEQ ID NO: 357007 - DNA, 569 bp, Homo sapiens
ctatgaaattgtctacttatggcccacaaaaatagcaatgtaaccaaaactacatcaatggggctgaccttttataaaggaaagactccttacaaaatggaaaacattcatttgatgaaataggcaaacctaatggaattttgtatttaaatcaaagtcataggactacgaaagtaacattggattaatgaaaactactgtgaccttctctcaaaataagtccacacttcagagaagcaattaaaagagcttacaaaatgtagactacatagccaatgccacagaatgcaagtctgaagaatttacagggtaataataaaaatgtctaagttgctgcacttgaaaaggcaaaaagacaatcaatgggttaatcactagactgcaaagtataaaatatttgctgaaatgaaaactaattgaatccrtaaagctttggtaaaggcaatcctcataggaactaacaaagtacaggacctcatgtagaatctaaattctgtcaggctcacttctcttcctttgtacaggaagctactcaccacaaaggatgccagggtggtaaggagaacaag

SEQ ID NO: 357008 - DNA, 620 bp, Homo sapiens
ggtttttaatctgaaaacatgcaaaaaagagtcttctaaatataatttattatcagaacaactctcatgtaggtgttgaacagcatataaaatttatatttaggccttagattttgtcctccttcaagagacatagtgacatcagtaggtgaactgaaggttgaaatcccaattgctttgaggggacatcaagcyttatgaatttgtattagtactaaaaacagcaggggaatagtataattaacatgtataagattccatttttaaatacaaagcgaaacctagaatgaaccttacaaaggacctttggataaaccctctgttatgtcatagctaacaatgtcaatagccttagctattatagatgaagatctttgtttctgcaagtttgtgggcttttcctgaattcccaacatatactttattatgttagatcttttattctttaactcttgcaattatgtactatttaataccagagttttattttttttcccaaagtactcaattcctaaaattgaataggaacttcacatgcctacacttagtctgaagtgtttatatgctttaattagagtagaaatatttcctagctttcaaagtacttctatgcagaccat

SEQ ID NO: 357009 - DNA, 400 bp, Homo sapiens
gatctgactgaccctgtcccatgggcgggacagttcttttaaaaccatgtcctgcagtcaacaaaggccaaagtcacctagaggagcatggtgaactttaggggatgggcttccttggccacgctccactgcaaccattcccatgccacaccctctgggttcagcacaggctggagtcctgtctctgccacctctccaagtagctctccctgccatttcagatgtccatgggggtcatggggtctcctgcagstaggattccagaggtctggtaagagtgggccactccttgcctatttaactcactccctccccagcagccactggtggcagtggggggtagaaacaagtccggttcttgtcagccccaggcaaaattcccaggttcctcttccttcgc

SEQ ID NO: 357010 - DNA, 604 bp, Homo sapiens
accaggcaagcataacccaaataataaaggcaaaaagcaacacaacaacaacaaaaaaagaaaattaaaagaaaaaaatgccaatatatctgatgaatataaacacaaaatcctcaataaaatactagcaaacaaaatccaacagcacatcaaaaagatagtacaccatgatcaggtggaatttatgccagaaatacaaggatgctttaacatatgcaaaacaataaacatcatatakcacatcaatagaatgaagaataaaaaccatgtaattttctcaatagatgcccaaaaaagcatttgataaaattcagcctcccttcataataagaactctcaacaaattaggtatagaaggaaaaaagtacctcaatataataaaggccatatatgacaaacccacagctaacaccttcctaaacagggaaagactgagagcttttcctctaataactgtaaaaagacaaggatgcctacttttagcgtgtgtattcaacatagtaccggacatactactcagagcaagtagacaaaagaaagaaataaagtgcatccaacgcatccaaattggaaaaaaagaagtcaattttgcttggtttacaga

SEQ ID NO: 357011 - DNA, 610 bp, Homo sapiens
ggaaaaggccagctaagaataaygtaactacattaaataagaaccaaacagaactgctggaattgaaatattcactacaggaatttcaagatacagtcgaaggttttttaagtagactggacaagagggagaaaaacactaaacctatgacttattagcatttctagcagagactaagaaaatgctacctggaaaacatatttgagggtgtaattcaggaaaatttttccaatcttgctagagaggtagacatgcagatacaagaaatttagagaactcctatgagatactatacaagatgaccatccgcaaggcacatagttactagagtatctgatacagtgttggctgtcctctccaaatctcatgttgaaatgtattcccaaatgttggagatgtgaggcttgttgggaggtgaatggatcactggggcagattttttcataatgcttttccaccatccctttggtgctatcctcataacaatgagtgaattcacacaagagctggttttgtaaaagcgtgtggtatcttcccccttactctctcttggcaccactttcactatgtgacatgcatgctaccatttccaacatgagtaaacgcaccc

SEQ ID NO: 357012 - DNA, 610 bp, Homo sapiens
ggaaaaggccagctaagaataacgtaactacattaaataagaaccaaacagaactgctggaattgaaatattcactacaggaatttcaagatacagtcgaaggttttttaagtagactggacaagagggagaaaaacactaaacctatgacttattagcatttctagcagagactaagaaaatgctacctggaaaacatatttgagggtgtaattcaggaaaatttttccaatcttgctagagaggtagacatgcagatacaagaaatttagagaactcctatgagatactatacaagatgaccatccrcaaggcacatagttactagagtatctgatacagtgttggctgtcctctccaaatctcatgttgaaatgtattcccaaatgttggagatgtgaggcttgttgggaggtgaatggatcactggggcagattttttcataatgcttttccaccatccctttggtgctatcctcataacaatgagtgaattcacacaagagctggttttgtaaaagcgtgtggtatcttcccccttactctctcttggcaccactttcactatgtgacatgcatgctaccatttccaacatgagtaaacgcaccc

SEQ ID NO: 357013 - DNA, 610 bp, Homo sapiens
ggaaaaggccagctaagaataacgtaactacattaaataagaaccaaacagaactgctggaattgaaatattcactacaggaatttcaagatacagtcgaaggttttttaagtagactggacaagagggagaaaaacactaaacctatgacttattagcatttctagcagagactaagaaaatgctacctggaaaacatatttgagggtgtaattcaggaaaatttttccaatcttgctagagaggtagacatgcagatacaagaaatttagagaactcctatgagatactatacaagatgaccatccgcaaggcacatagttaytagagtatctgatacagtgttggctgtcctctccaaatctcatgttgaaatgtattcccaaatgttggagatgtgaggcttgttgggaggtgaatggatcactggggcagattttttcataatgcttttccaccatccctttggtgctatcctcataacaatgagtgaattcacacaagagctggttttgtaaaagcgtgtggtatcttcccccttactctctcttggcaccactttcactatgtgacatgcatgctaccatttccaacatgagtaaacgcaccc

SEQ ID NO: 357014 - DNA, 610 bp, Homo sapiens
ggaaaaggccagctaagaataacgtaactacattaaataagaaccaaacagaactgctggaattgaaatattcactacaggaatttcaagatacagtcgaaggttttttaagtagactggacaagagggagaaaaacactaaacctatgacttattagcatttctagcagagactaagaaaatgctacctggaaaacatatttgagggtgtaattcaggaaaatttttccaatcttgctagagaggtagacatgcagatacaagaaatttagagaactcctatgagatactatacaagatgaccatccgcaaggcacatagttactagagtatctgatacagtgttggctgtyctctccaaatctcatgttgaaatgtattcccaaatgttggagatgtgaggcttgttgggaggtgaatggatcactggggcagattttttcataatgcttttccaccatccctttggtgctatcctcataacaatgagtgaattcacacaagagctggttttgtaaaagcgtgtggtatcttcccccttactctctcttggcaccactttcactatgtgacatgcatgctaccatttccaacatgagtaaacgcaccc

SEQ ID NO: 357015 - DNA, 518 bp, Homo sapiens
gattctatacctagaaaacactaaagattcctcgaaaagactcagacctgctaaatgttgcccagaaagtttcaggatacaaaatgaatacacaaaaatcagtagcatttcaatataccaataatgttcaagctggaaaccaattcaagactgcaatctcatttacaatagccacacaaaaataaaatacctaggaatacatctaaccaaggaagtaaatgatctttacaagcactaaaaaaccctgctgaaagtaatcatagatgacacaaacaaatggcaaaatattccatgttcatggattggaagaatcagtatcattaaaatggccrcactgcctaaagcaatcctcagattcagtgcaactcctattaaattgccaacatcattttttcaaagaataaaaataaagtattctaaaatttatgtggaaccaaaagagaacccaaatagccaaagcaatcataagcaaagagaacaaatctagaggcatagcattacctgacttcaaactatag

SEQ ID NO: 357016 - DNA, 518 bp, Homo sapiens
gattctatacctagaaaacactaaagattcctcgaaaagactcagacctgctaaatgttgcccagaaagtttcaggatacaaaatgaatacacaaaaatcagtagcatttcaatataccaataatgttcaagctggaaaccaattcaagactgcaatctcatttacaatagccacacaaaaataaaatacctaggaatacatctaaccaaggaagtaaatgatctttacaagcactaaaaaaccctgctgaaagtaatcatagatgacacaaacaaatggcaaaatattccatgttcatggattggaagaatcagtatcattaaaatggccgcactgcctaaagcaatcctcagattcagtgcaactcctattaaattgccaacatcattttttcaaagaataaaaataaagtattctaaaatttatgtggaaccaaaagagaacccaaatagccaaagcaatcmtaagcaaagagaacaaatctagaggcatagcattacctgacttcaaactatag

SEQ ID NO: 357017 - DNA, 597 bp, Homo sapiens
gttttcttaccatagtgagttctcatgagatctggtggtttaaaagtgtgtagcatcccccgccttcctcctacttttgccaagtgacatgcttgcttccactttgccttccaacattagttaaaagcttcctgaggcctccccagaagctgagcagatgctggcaccatgttcctgtccagcctgcagaaccatgagccaattaagcctcttttctttataagttaccagcctcagggttttttctgtttttgtttgtttgtttatgtgtttgtttgtttgtttttgagatggagtcttgctctgtcgcccaggctggagtacagtggcgcgatcccagctcactgcaagctctgtctcctgggttcacaccattctccttcctcagcctcccgagtagctgggactacaggtgcctgccaccacgcttggctaaattttgtattttgtagtagagacggggtttcactatgttagccaggatggtctcgatctcctgaccttgggatctacccgcctcagcctcccaaagtgctaggattacaggygtgagccactgcaccccagccggttttttttttttaataacagtgcaaa

SEQ ID NO: 357018 - DNA, 537 bp, Homo sapiens
aacgggaacgtgggagaccctcagaggagcctctctcaggaaaggagcaaaaatcaaaagctgaaggatgattttcataataatrtgggcattcacagtagcttcagggccgaagtgaccatgtgaggccccatattaaagaagcaatgctccctgctctcaagagctttgctctgacaacatagaactggtagctgttttaaatgatagtttcccattatattttctaactggttgtattactttgctagggcaggataccacagactggaaggcttgaatgacagaaatttattttctcacagctctggaggctagaagtctaagatcaagatgttggcagttttgatttctcctgaggcctctctccttggcttacagatggccaccttctcactgtgccttcacaggcacctctttgtctgtgtattgtctgtgtcccaatctccttttcttataaggacacaagtcatattggattatagcccacccacacattttacgttaattctctctttaaaggcctcatctccaaat

SEQ ID NO: 357019 - DNA, 537 bp, Homo sapiens
aacgggaacgtgggagaccctcagaggagcctctctcaggaaaggagcaaaaatcaaaagctgaaggatgattttcataataatgtgggcattcacagtagcttyagggccgaagtgaccatgtgaggccccatattaaagaagcaatgctccctgctctcaagagctttgctctgacaacatagaactggtagctgttttaaatgatagtttcccattatattttctaactggttgtattactttgctagggcaggataccacagactggaaggcttgaatgacagaaatttattttctcacagctctggaggctagaagtctaagatcaagatgttggcagttttgatttctcctgaggcctctctccttggcttacagatggccaccttctcactgtgccttcacaggcacctctttgtctgtgtattgtctgtgtcccaatctccttttcttataaggacacaagtcatattggattatagcccacccacacattttacgttaattctctctttaaaggcctcatctccaaat

SEQ ID NO: 357020 - DNA, 537 bp, Homo sapiens
aacgggaacgtgggagaccctcagaggagcctctctcaggaaaggagcaaaaatcaaaagctgaaggatgattttcataataatgtgggcattcacagtagcttcagggccgaagtgaccatgtgaggccccatattaaagaagcaatgctccctgctctcaagagctttgctctgacaacatagaactggtagctgttttaaatgatagtttcccattatattttctaactggttgtattactttgctagggcaggataccacagactggaaggcttgaatgacagaaatttattttctcacagctctggaggctagaagtctaagatcaagatgttggcagttttgatttctcctgaggcctctctccttggcttacagatggccaccttctcactgtgccttcacaggcacctctttgtctgtgtattgtctgtgtcccaatctccttttcttataaggacacaagtcatattggattatagcccacccacacattttacsttaattctctctttaaaggcctcatctccaaat

SEQ ID NO: 357021 - DNA, 526 bp, Homo sapiens
acaaaaccaaaacattggttagagcaataagggtttcttaaagtattgatttgctcttcattaaattccaagaagttttaatgtttaatgctatttttttctttttgaaacttctcagatatctcagaagttcaacttctggtgtatcctgctgcttttagccttttcttcatttgagaatagctgagatsttaactctctctttcaactttttgttggctctggcaaattttttttttcttcaggtctaaatctgttgctatagcctgatgctgaagtgtttcgtcttaaagcttcaaaaaaagcaatgttttcttccattatcacttaattctgtgctgttggcttttcctcctatgagtaagggccagaaaccctctgaaggattactgaaaaatcaactcacaaaagatagatcagttgaagagaaggcatgcagatttgtttggagtgtgtatgctggagtcttcagaataaagaccccaacacacaggggaaattgtcctttttatgcttaggtgcgaca

SEQ ID NO: 357022 - DNA, 526 bp, Homo sapiens
acaaaaccaaaacattggttagagcaataagggtttcttaaagtattgatttgctcttcattaaattccaagaagttttaatgtttaatgctatttttttctttttgaaacttctcagatatctcagaagttcaacttctggtgtatcctgctgcttttagccttttcttcatttgagaatagctgagatcttaactctctctttcaactttttgttggctctggcaaattttttttttcttcaggtctaaatctgttgctrtagcctgatgctgaagtgtttcgtcttaaagcttcaaaaaaagcaatgttttcttccattatcacttaattctgtgctgttggcttttcctcctatgagtaagggccagaaaccctctgaaggattactgaaaaatcaactcacaaaagatagatcagttgaagagaaggcatgcagatttgtttggagtgtgtatgctggagtcttcagaataaagaccccaacacacaggggaaattgtcctttttatgcttaggtgcgaca

SEQ ID NO: 357023 - DNA, 622 bp, Homo sapiens
agttgtcagatatcatctcaatccattccccttctcactgactgtgctccagtcaccctggcttcctggatgtttcctcaacactygggacaggttccagctaaggatcctggtactttctgttccactgcatggaacaatcctcctcacacatatccacagaacttattctctagcatccttaaagtcttagtgagcctttctttaaccaccttgtttgaattcagtgctctccctgtgcacccactaacccctctttttgttttcaccaggcacttaccacaatctaacagactgcatgttttatccatttattcagtttcctatttgtgtcccttcaactcccattaaaatataatatttttgagggcaagcaagtactagaacaataggaaacacatcaagagtattctgtaaactatttcttgaatcaatcagtgaatgaatgaattaatcaatatattttttgagtgaggagctttgtgttaggtacagctaaatgggaaatcaagtgggtcatgtaccatgaataccatatactctactgtataattatcctgcttatatcagaaactgtttataagcctattataattgataccaattggaatctcttttttac

SEQ ID NO: 357024 - DNA, 531 bp, Homo sapiens
actgcatggaacaatcctcctcacacatatccacagaacttattctctagcatccttaaagtcttagtgagcctttctttaaccaccttgtttgaattcagtgctctccctgtgcacccactaacccctctttttgttttcaccaggcacttaccacaatctaacagactgcatgttttatccatttattcagtttcctatttgtgtcccttcaactcccattaaaatataatatttttgagggcaagcaagtactagaacaataggaaacacatcaagagtattctgtaaactatttcttgaatcaatcagtgaatgaatgarttaatcaatatattttttgagtgaggagctttgtgttaggtacagctaaatgggaaatcaagtgggtcatgtaccatgaataccatatactctactgtataattatcctgcttatatcagaaactgtttataagcctattataattgataccaattggaatctcttttttactcatcaccaagaacaccacaaacaagttgtttacc

SEQ ID NO: 357025 - DNA, 555 bp, Homo sapiens
attgtcgatgctgggtctggaagctcctcccagatgtggcagcctctagaattaatttctgggaaggatcagcctcaggtgccttgcattttctgcttgacagaagagagaggaatctggtacctggaccaaatcaggagagagcagtatattacaaacaaagaatttcttaattctcatctcctgccaaagaagaaacaccaaaaaatatacttatttacgcttgaacctcgaacaattgaagattttgagtctatgaatacatacctgcagacgtctccaacatcttcatttataaccacatcattttgttccttgcagaccccagaaggggtttactgtttggtgggcttcatcctcacctatagaaaattcaattataaagacaatacagatctggtcgagtttaaaactctcactgaggaagaggttgaagaagtgctgaraaatatatttaagatttccttggggagaaatctcgtgcccaaacctggtgatggatcccttactatttagaataaggaacaaaataaacccttgtgtatgtatcaccca

SEQ ID NO: 357026 - DNA, 591 bp, Homo sapiens
aaggttaaataaggttataaacgtggagtcttaatctgataggattggtggctttataagaaaaagaaaagagattgctctctccccagtgcagktaccaaggaaaggccatgtgagaacatagcaggaaggcagccatctgtaacctaaggaaagagatctgtcaaaggacaaaactacaacaaatgtaaagatctcaattggctttatctgcgattctggaatcaggcaatactccatttcataaaacagaactagtgctccaatgagctgagcaaaaggggttgttagttttatagacagagaaggacggaagaaagcagaaataacgaatggaaagtagattggtcaaatttactttccttttaaggcagaaaaatagaacaataactattcaagtaatcttaaggttacttcaggttaagggttaaaacagaaggaattttatcatcatgcttattgaagattcaaactggcctgtttaagaaattggctgttatctctttctatcttttattttaagaggcttcctcagataccatgctggtggaagaaggggagtgccacctttctacggccaggtggacataa

SEQ ID NO: 357027 - DNA, 591 bp, Homo sapiens
aaggttaaataaggttataaacgtggagtcttaatctgataggattggtggctttataagaaaaagaaaagagattgctctctccccagtgcagttaccaaggaaaggccatgtgagaacatagcaggaaggcagccatctgtaacctaaggaaagagatctgtcaaaggacaaaactacaacaaatgtaaagatctcaattggctttatctgygattctggaatcaggcaatactccatttcataaaacagaactagtgctccaatgagctgagcaaaaggggttgttagttttatagacagagaaggacggaagaaagcagaaataacgaatggaaagtagattggtcaaatttactttccttttaaggcagaaaaatagaacaataactattcaagtaatcttaaggttacttcaggttaagggttaaaacagaaggaattttatcatcatgcttattgaagattcaaactggcctgtttaagaaattggctgttatctctttctatcttttattttaagaggcttcctcagataccatgctggtggaagaaggggagtgccacctttctacggccaggtggacataa

SEQ ID NO: 357028 - DNA, 591 bp, Homo sapiens
aaggttaaataaggttataaacgtggagtcttaatctgataggattggtggctttataagaaaaagaaaagagattgctctctccccagtgcagttaccaaggaaaggccatgtgagaacatagcaggaaggcagccatctgtaacctaaggaaagagatctgtcaaaggacaaaactacaacaaatgtaaagatctcaattggctttatctgcgattctggaatcaggcaayactccatttcataaaacagaactagtgctccaatgagctgagcaaaaggggttgttagttttatagacagagaaggacggaagaaagcagaaataacgaatggaaagtagattggtcaaatttactttccttttaaggcagaaaaatagaacaataactattcaagtaatcttaaggttacttcaggttaagggttaaaacagaaggaattttatcatcatgcttattgaagattcaaactggcctgtttaagaaattggctgttatctctttctatcttttattttaagaggcttcctcagataccatgctggtggaagaaggggagtgccacctttctacggccaggtggacataa

SEQ ID NO: 357029 - DNA, 591 bp, Homo sapiens
aaggttaaataaggttataaacgtggagtcttaatctgataggattggtggctttataagaaaaagaaaagagattgctctctccccagtgcagttaccaaggaaaggccatgtgagaacatagcaggaaggcagccatctgtaacctaaggaaagagatctgtcaaaggacaaaactacaacaaatgtaaagatctcaattggctttatctgcgattctggaatcaggcaatactccatttcataaaacagaactagtgctccaatgagctgagcaaaaggggttgttagttttatagacagagaaggacggaagaaagcagaaataacgaatggaaagtagattggtcaaatttactttccttttaaggcagaaaaatagaacaataactattcaagtaatcttaaggttacttcaggttaagggttaaaacagaaggaattttatcatcatgcttattgaagattcaaactggcctgtttragaaattggctgttatctctttctatcttttattttaagaggcttcctcagataccatgctggtggaagaaggggagtgccacctttctacggccaggtggacataa

SEQ ID NO: 357030 - DNA, 514 bp, Homo sapiens
gtttacttatccataactcagattttctgttcgtagattccagtatcagggctatagtttaaacttcagactgattcttacgttactctctttctcttcaacttgtgatcattttaataagcttaagagaaaagcagggaccagaatggagaaatattcgttaagaaaataagatacattggagcatcagtattttagacagcaatataatagttgggagatactggcgagtgtgaatgatatgctttgactgtatccccacccaaatctcattttgaattgtagytcccataatccctacatgttgtgggagggacccagtgggaggtaactgaatcatgggtgcacgtttctcccatgctgttctcatgatagtgaataagtctcacaagatctgatggttttataaagggcagttcccctgcacatactcttttgcctgccaccatgagagatgtacctttgctcctccttcaccttctgccataactgtgaggcctccccagccatgtgg

SEQ ID NO: 357031 - DNA, 591 bp, Homo sapiens
ttcaacagcaggctagatcaagcagaagaaaggatcagtgaactcaaaagcaagtcagttaaagtcatccaatctgaggagcaaaaatagaaaagaatgaaaaatactgaagataacttaagagatgtatggaacagcgtcaggctgtacatcatatgtgttattgatgtaccagaaaagagaaagtgacattaaccatattcaaagagataatgaaagaaaacttcccaagcctgtagaaggaaatagaaatactaacttaaggagttcaaagcaccaaacaaggtgactcwaaagaggcatacattgagaaacatcatactcaaattgtcaaaagttaaagacaaagagagagtttttaaagcagctagagaaatgcaaattgttatgtacaaggaaatcccagtgatagtatcagcagattttttcatccaaaatcttgtaggccagaaaggagtaagatgatatattcaagacctagtagggggaagccaactaagaatactatacccagaaatcatgtctttcaaaaatgaaggattgaaaaaacttcgtcagacaagcaaaagttgagagtttatcaccactaga

SEQ ID NO: 357032 - DNA, 591 bp, Homo sapiens
ttcaacagcaggctagatcaagcagaagaaaggatcagtgaactcaaaagcaagtcagttaaagtcatccaatctgaggagcaaaaatagaaaagaatgaaaaatactgaagataacttaagagatgtatggaacagcgtcaggctgtacatcatatgtgttattgatgtaccagaaaagagaaagtgacattaaccatattcaaagagataatgaaagaaaacttcccaagcctgtagaaggaaatagaaatactaacttaaggagttcaaagcaccaaacaaggtgactcaaaagaggcatacattgagaaacatcatactcaaattgtcaaaagttaaagacaaagagagagtttttaaagcagctagagaaatgcaaattgttatgtacaaggaaatyccagtgatagtatcagcagattttttcatccaaaatcttgtaggccagaaaggagtaagatgatatattcaagacctagtagggggaagccaactaagaatactatacccagaaatcatgtctttcaaaaatgaaggattgaaaaaacttcgtcagacaagcaaaagttgagagtttatcaccactaga

SEQ ID NO: 357033 - DNA, 547 bp, Homo sapiens
tagggggaagccaactaagaatactatacccagaaatcatgtctttcaaaaatgaaggattgaaaaaacwtcgtcagacaagcaaaagttgagagtttatcaccactagacttgcattgtaaaaatttcaaaggtagttcttcaagatggagaaaaatggtaattagtaacatgaaaatataaatcttactgataaaagtaagactgttttaaaatccagtacactctaacactgtaatgacaatgggtaagtcaatcatgtcttcagtataaaggttaaaggtcaaaacgattaaaaatgactaaagctacaataatttcttaagggatacaaatgctgaaaagatgtaaattgtgacatcaaaaacataaaacataggaggaagaggattaaaactgtagagcttatatatgtgattaaaatcacattgttatcagtattattcacaatacccaagatatgaaatcagcctaaatgtccatcaacagatgaatgggtaagaaaggatgctgtatatattcacaatggaatattattcagtcataa

SEQ ID NO: 357034 - DNA, 583 bp, Homo sapiens
gagatagactgcaatacagtaatagtgggcaacttcaacaccccattttcagcaatgaagagatatccagatggaaaaccaggaagtaaacatcagactttgtgttaggctgctcttgcattgttataaaggaatacctgagactgagtgatttataaataaaagaggtttaattggctcacagttctgcaggctacacaagcatggcactgtgatctgctcggcttctagggaggcctcagagaacttttattcatgctagaaggtgaactgggaccagacacatcacacggccacaataggagcaagagagagacaggagaaagtgtgacacacttttaaacaaccagatcttgcgagaactcactcactattgcaaggacggcactaagaggatggtgctagaccattaatgagcaatccactcccatgattcactcatgtcccatcaggtcccacctccaatgttggggagtacaatttaacatgagatttagggggacaaacaaccaaattatatcagacttaatttgatactctagaccaaatggacctactagacawacacagaacatcccaccca

SEQ ID NO: 357035 - DNA, 588 bp, Homo sapiens
ttgacctcctatgtgaggagcagccaccagggtgcctgctagatacggtgraaccaaaatttcaaagggcaagaaaagagggttcggccaaggggcagactccagcgtggcaggctggcaggctgaagactgcagattgcagcataaacaaatactgaggaagtcaggaaaaaggtcacactgagccattaggattgctctgcttcagtctctggcgtgggaactacaagcttccaggagacagggacatggatgaaaacggatggacaggaagggagggatgggcttggctgccatgaggtgggaggctgtagagctggtgagtctgaggagcagcaaaacaattcggactgaatttcactcccgtgcaatgaaaagccaatccctgcatttgttcaacacccaggaaacgtatgccaagctcctcagtcaggcactgtgagaaatgagacagacaaagccttcacttctccttcagggaggaaactgatacgaaaacaacgaatgttgacctaaaaacatgtttcttttactgcttgttgtaatgcacatttagtttttgtctcctggcaaagagaaaacgggatt

SEQ ID NO: 357036 - DNA, 492 bp, Homo sapiens
aagctggccatacaaactagaatctcccttgcccaaggaaggccttagaaatcagaacacctttttctcaaaaccatccatgatgcctaaaaatattacttaactttcctctactttcctgtgtaagaactggccataaaaaattatatgacctaccttcttggactgtaggttataagatccccataccctcagtaggaaggagtacatgctctgagaggtcaagagggatctggacagacaggcatttctgggtttcctcattcaaccaattagcattagattatgccttttagctcaatcttatttttacatctgcccataccttgttgtacctaagcataagatggacaatttcccccatgtgtttgaatctttattmtgaagactccagcatacacactccaaacaaatctgcatgccttctcttcaactaatctatcttttttgagttgatttttcagtgacccttcagagggcccctagccccta

SEQ ID NO: 357037 - DNA, 492 bp, Homo sapiens
aagctggccatacaaactagaatctcccttgcccaaggaaggccttagaaatcagaacacctttttctcaaaaccatccatgatgcctaaaaatattacttaactttcctctactttcctgtgtaagaactggccataaaaaattatatgacctaccttcttggactgtaggttataagatccccataccctcagtaggaaggagtacatgctctgagaggtcaagagggatctggacagacaggcatttctgggtttcctcattcaaccaattagcattagattatgccttttagctcaatcttatttttacatctgcccataccttgttgtacctaagcataagatggacaatttcccccatgtgtttgaatctttattctgaagrctccagcatacacactccaaacaaatctgcatgccttctcttcaactaatctatcttttttgagttgatttttcagtgacccttcagagggcccctagccccta

SEQ ID NO: 357038 - DNA, 545 bp, Homo sapiens
agctgagaagccctttcaaaggtcacagcccaggacacaggctcagtggaagatagcaacccaatcataagactatagaatgctgttttccccataccttacaaccacatcaacaggactactgtaaataatggagaattacaattgaaaaattgaaagtttcagaatttatttaagaatgatttcctagagaaacctgaaaacacaaggggtgacacaaagacgctaagggaaattgaagcctcagtcacctgtgggtacaataaacagtaagcacagtataattcctagccagataaacataaccgtcacactaaaggccaatctatgtcagtacctgtaacccaagatgtaatatccaacttctaacataaaatgacgtgaaatgctaaaatataagaaaagacaagttgaaactaagtatcataatctaattcagatatggcagagatttgaggattatcstacgaggaatttaaaataacaacgattaatatgctcaggtctctagtggaaaagtggacaacatgcaaaatagatgaata

SEQ ID NO: 357039 - DNA, 592 bp, Homo sapiens
caatgtgacctacagagaaggtattggagggagacagggcagctgtccacccaagactggcacagtgttaggggtaggctcctcaccatgtggaaatggtgagttagtaataccctctgggacccacacttctgccacaaacctttataaccctgggctcgagagatcccccatgatcccccttaccccctcgaccagggcctccaaactaaaacagagagctacgtggtgtgtgggcagagccatcactcaagctcaggtggtgatatagcttggccgtctccatccaaatcccatctcgaattgtagytcccataactcccacatacagtgggagggagccagtgggagataattgaatcatggaatcccccatactgttctcatggtagtgagtaagtctcatgagatctgatagttttataaggggaaactcctttcacttggctctcattttctctttgcctgtggccttgtaagacgtgcctttgttcttccctcaccttcccgctgccatggtcgtgaggccaccccaaccacgtggaactgtgagtccattaaacctccttttctttataaattacccaatctc

SEQ ID NO: 357040 - DNA, 592 bp, Homo sapiens
caatgtgacctacagagaaggtattggagggagacagggcagctgtccacccaagactggcacagtgttaggggtaggctcctcaccatgtggaaatggtgagttagtaataccctctgggacccacacttctgccacaaacctttataaccctgggctcgagagatcccccatgatcccccttaccccctcgaccagggcctccaaactaaaacagagagctacgtggtgtgtgggcagagccatcactcaagctcaggtggtgatatagcttggccgtctccatccaaatcccatctcgaattgtagctcccataactcccacatacagtgggagggagccagtgggagataattgaatcatggaatcccccatactgttctcatggtagtgagtaagtctcatgagatctgatagttttataaggggaaactcctttcacttggctctcattytctctttgcctgtggccttgtaagacgtgcctttgttcttccctcaccttcccgctgccatggtcgtgaggccaccccaaccacgtggaactgtgagtccattaaacctccttttctttataaattacccaatctc

SEQ ID NO: 357041 - DNA, 598 bp, Homo sapiens
gtcccttggacccctgggcactctggcaccagtggctgcagctctagtagttggggaggctaggctcccttgcatgcccccaagatagaagctgaatccatggggctgatgaacagatatactgcaggctttgcctgcatctatccagacaaagcccactgtccttggagtctagcatggccaccccagccctgcctgagctctcaggtcggtagcagccttacactttcctgggacagagctcccagagggaacaggtggacctaccagttttactgctccgcagccctcaatcctgctgccctcagtcttggaaaggagcaaagtgattatgaactaacgtgggccctcagtgtagcacagcttacagaaaagtggccggactgttttccacatgggtccctggccattaatcctcactaagcaggcttctcaacctgggccmccagtacaaccaccctgccctgcctgaacacttcagtcagcagcagctctgcatttctttggggaggaaatctcagagacaacccacagccccttgcccatcacagctgcaatggtactgcccttattaccctcaggctggggaaggaaccaa

SEQ ID NO: 357042 - DNA, 535 bp, Homo sapiens
aaaaatattatccaactttgcatagttattttgtacaaagttaagtgtgtagagttcaaggaattatccaggcgttatgactatttttaaaatcattgaaggctaaggagaacagatacacttgttcattttaatgtcaacagtaaawccagcaggccgtatgatcttaattctatgctgtacagaaaagttttcatgagtacttccaccagtgtactcctcctagaaataacgtttctgtgccctataacagacattttatctgaccctctcattcttacccagaacttaagtaattgctttgaggcagataaaccccaaatttatatctcgagcttcaaagttttccccaatttctgatgcctcatttgtaactgtcctggagacctccacacctgagtgtcttgccagatcttgtccaaaacccaactgttcatgcacctgctccccaagccagctgtttgttctaatggaaccttttttacccatagcatcatcgtctcctagtcacccacagtcagaaattttgcagttg

SEQ ID NO: 357043 - DNA, 538 bp, Homo sapiens
cccattgcttttatttttactatgggaaaaataaatttcgaagtggccaatattgatgaaaattagcccatgctagggactgtataaattaggtcagatttggctgcaagtaacagaaaactccaaaatatggtggtcagaaccagataacagtttctcttttacatttaagaagtgccaatcacttttaggttcatagcatatttaagcagaaggtatagagatttgacatatatccctgccaccacatatacacagcctctcccatgttcaaaattccctaccccagtggtacatttgttacaattgataaagctacattcacaggttattatcacccaaagtccatagttacaagagggttcacccttggtgttgcacattctttgggtttagataaatttataataacaygtaaccaccacataccatcatacagaatagttttacctccctaaaatcctctgtgatacatcctattgatcgctccctctccctaatctctggcaaccactgatctttttactgtgtccaattc

SEQ ID NO: 357044 - DNA, 562 bp, Homo sapiens
tatcatctcctatgatagcaatgcctttttctggaatattcttgaaggacctgcctaaggctgttttacagttaacttttttttttaagaastagaagcagtacactctaaaataatgatgaaaaacacagcatggtaaatacataaaccactactgtagtcacttatgatcattatcaagtacaatgtactatacaaaactgtatgtgttatacttttatacaactggtgagacagtaggtttgtttacatcagcaccaccataaacacagaaaatgcattgtgctatgacactgtggcggctgtgatgtcactaggtgataggaatttttcagctccattataatcttatgggaccactgttgtttatccaatccattattgaccaaagtgttattatgtgctgcgtgactacttaatgtgggttatttctgggtcctttattgtgttccaccgatttatttgtctcttcttttgccagtatatcgtgtcttgattactgtacttttatagtaaattttgaagttggataatgccagtcttctgactttgttcttcaata

SEQ ID NO: 357045 - DNA, 598 bp, Homo sapiens
agcttgggcaacatagtgaagcctccagtatctaataaaaaagaaagaaagaaagaatacagagagatcatgtgtaccctttaccagtttgcccagtggtaacaccttgcaaaaccccagtacaatttcacagtcaggatatggacaccaccaatcttattcagactccccagttctccttgtgttcttgtgtgtgtgtgttgctcgtgtgtgtgtgtgtgtgtatttaattctatgcaattttatcacacaggtgggcttctagatccaccatcacagtcaagatacagaacagttccaagaccataaggattcctcacctttytttttataaccacacacaggtctctcacactccacacctcactgtccctaacttccagcaaccggaaatctattctccatttctatacttttcctagttcaataattttatataaatggaatcatgcagtgtgtaaccactggggactagccttttttcactcaacctaattacttggagattcaaccaagttgtcacatgcatcaggggtttgttcctttgtatttctgaatagtactccatgccataaatgtcccacaatttttcaaatca

SEQ ID NO: 357046 - DNA, 605 bp, Homo sapiens
aaaacagcaagagttatggatcaatgccattaatgtaaataaaaaacacaagccgaaatgaaaatcataaaacatgtcatactcatatcatacatgcagttatttcagatacattacatgctacctttgagtagagaggtgagtggaagtaaggaatagagataaaaggaagaaaaaaaaacatagaggccttaaagaaattgattaataaactgtgccataaacctgaaatgtgactaaaccttccatcttcctcttctgcctcctctaggttattggttctgcttttcctggacttttcccaagctctcaccttccacgtaacacatgggaagtctcgcattaggctyccagatagcagaaaccaggtgaaataaaagggcacagccctcccagcatgtatcatggagatcatcgcataatataactctctgcactttttaatgaaaggatttgaataagagatccaaagcagcaacctggggccctgcaactatacacttcccagggattcctgggatgattctaatgagaatctggagttgggaccagttgcaaatctaaagagatcacttcactttcagacttcagaagtggcagcactt

SEQ ID NO: 357047 - DNA, 605 bp, Homo sapiens
aaaacagcaagagttatggatcaatgccattaatgtaaataaaaaacacaagccgaaatgaaaatcataaaacatgtcatactcatatcatacatgcagttatttcagatacattacatgctacctttgagtagagaggtgagtggaagtaaggaatagagataaaaggaagaaaaaaaaacatagaggccttaaagaaattgattaataaactgtgccataaacctgaaatgtgactaaaccttccatcttcctcttctgcctcctctaggttattggttctgcttttcctggacttttcccaagctctcaccttccacgtaacacatgggaagtctcgcattaggcttccagatagcagaaaccaggtgaaataaaagggcacagccctcccagcatgtatcatggagatcatcgcataatataactctcygcactttttaatgaaaggatttgaataagagatccaaagcagcaacctggggccctgcaactatacacttcccagggattcctgggatgattctaatgagaatctggagttgggaccagttgcaaatctaaagagatcacttcactttcagacttcagaagtggcagcactt

SEQ ID NO: 357048 - DNA, 605 bp, Homo sapiens
aaaacagcaagagttatggatcaatgccattaatgtaaataaaaaacacaagccgaaatgaaaatcataaaacatgtcatactcatatcatacatgcagttatttcagatacattacatgctacctttgagtagagaggtgagtggaagtaaggaatagagataaaaggaagaaaaaaaaacatagaggccttaaagaaattgattaataaactgtgccataaacctgaaatgtgactaaaccttccatcttcctcttctgcctcctctaggttattggttctgcttttcctggacttttcccaagctctcaccttccacgtaacacatgggaagtctcgcattaggcttccagatagcagaaaccaggtgaaataaaagggcacagccctcccagcatgtatcatggagatcatcgcataatataactctctgcactttttaatgaaaggatttgaataagagatccaaagcagcaacctggrgccctgcaactatacacttcccagggattcctgggatgattctaatgagaatctggagttgggaccagttgcaaatctaaagagatcacttcactttcagacttcagaagtggcagcactt

SEQ ID NO: 357049 - DNA, 565 bp, Homo sapiens
tttgccagctaaggcattatataaaaacacacagtgtggaataaacttagaaaacacagcagattaaatatgcatgtttatctctatctccttcccaaacaaaggggggtggcagttaaaaaaccataagaattatgatattttgaaagaagacaaagatacatcaatgaatatctgaaacataaagagtagatgaacaaatgaatggtaaatgacttagaagagcagtagaagctgttctactgctctccagaagggtctggaaaggagaatactgatgaaaagaaagacaatcatttcagacagaaatctgaaaaaaacrtaaggtttagaagcaccaagtatcatggaagatgcaatgaggagacaaggtggaaattagtagagcatcagtctatgattcagatcagttagatccacatggctcttcctccagcccatacaactgggcaggaatttttccccctaaaactgaaaggagaactaaggttttcctacagagaagttgatccagaaggggcaggcataccatggaaattgaaggtggacaaatgccactaaacag

SEQ ID NO: 357050 - DNA, 574 bp, Homo sapiens
aagcaaagcagttcaatttgttaacatcagggaatgacttactgcattcctgcctgctcacttgaccatgggaaggtcaggcagacacacacatggatagtccaagggtgatgaagggtattgtaacaaaattcaaattgtgtgcttcacccaggacacaagagtatagagaaagaagtggctggtgtaattagtgatcatccagatcctgagtgataaaggaaggtaaagtagagatttaacatagaatttggaatttgatgccatttataataataatctatattactgcattaaagctgctgcattgtagtggaattaggtgaaaaggggatagctgtataagacaaycttttcaagaattcatcttcagagaactgacatttccagaagagctagcccagagtttgtcagatgctcttcttttggacaaatgagcttcctggtgagtttcattctgctttttgagacagaaaaatcaaactagctcacagatttaataaaaggccaatgagggatcttcactgagaatctctatggatccattcattttgtgactatacctgaatatttg

SEQ ID NO: 357051 - DNA, 574 bp, Homo sapiens
aagcaaagcagttcaatttgttaacatcagggaatgacttactgcattcctgcctgctcacttgaccatgggaaggtcaggcagacacacacatggatagtccaagggtgatgaagggtattgtaacaaaattcaaattgtgtgcttcacccaggacacaagagtatagagaaagaagtggctggtgtaattagtgatcatccagatcctgagtgataaaggaaggtaaagtagagatttaacatagaatttggaatttgatgccatttataataataatctatattactgcattaaagctgctgcattgtagtggaattaggtgaaaaggggatagctgtataagacaaccttttcaagaattcatcttcagagaactgacatttccagaagagctagcccagagtttgtcagatgctcttcttttggacaaatgagcttcctgrtgagtttcattctgctttttgagacagaaaaatcaaactagctcacagatttaataaaaggccaatgagggatcttcactgagaatctctatggatccattcattttgtgactatacctgaatatttg

SEQ ID NO: 357052 - DNA, 573 bp, Homo sapiens
tagtaatgtctgcaggtcatgtcagagatttgggttattagctaaaagcaatagaaagactgaccaggggaaagttrttgacaagaggaggtctgaggtttgtgaagaccattctagcaacagaatggagaaatgtttggacaatgctaatctaatagaatttcttccttctttcctttcaaaggatctcttcatgtttatatttaaatcctggtctcttagattaatattcaaagactctttgtgaactgtctctgcctctcctaccactttagtcagtcactgcaccttctattacagtttacacatctggtttccaatcagaattatgtgcagacatgttacagtgttcagattcccaagtcccattcccagagattttgttccattacttgcaggtttaacttaaaaattaacatttttaaacagtaccctaggctcagtaccctagagcagtgctgtccaaacagaactttctgtgatgatggaattgctctatatcttcactgtccagtaaggtgtccattagccacaggtaactattgagcaattaaatatggctagtgcaactga

SEQ ID NO: 357053 - DNA, 573 bp, Homo sapiens
tagtaatgtctgcaggtcatgtcagagatttgggttattagctaaaagcaatagaaagactgaccaggggaaagttgttgacaagaggaggtctgaggtttgtgaagaccattctagcaacagaatggagaaatgtttggacaatgctaatctaatagaatttcttccttctttcctttcaaaggatctcttcatgtttatatttaaatcctggtctcttagattaatattcaaagactctttgtgaactgtctctgcctctcctaccactttagtcagtcastgcaccttctattacagtttacacatctggtttccaatcagaattatgtgcagacatgttacagtgttcagattcccaagtcccattcccagagattttgttccattacttgcaggtttaacttaaaaattaacatttttaaacagtaccctaggctcagtaccctagagcagtgctgtccaaacagaactttctgtgatgatggaattgctctatatcttcactgtccagtaaggtgtccattagccacaggtaactattgagcaattaaatatggctagtgcaactga

SEQ ID NO: 357054 - DNA, 573 bp, Homo sapiens
tagtaatgtctgcaggtcatgtcagagatttgggttattagctaaaagcaatagaaagactgaccaggggaaagttgttgacaagaggaggtctgaggtttgtgaagaccattctagcaacagaatggagaaatgtttggacaatgctaatctaatagaatttcttccttctttcctttcaaaggatctcttcatgtttatatttaaatcctggtctcttagattaatattcaaagactctttgtgaactgtctctgcctctcctaccactttagtcagtcactgcaccttctattacagtttacacatctggtttccaatcagaattatgtgcagacatgttacagtgttcagattcccaagtcccattcccagagattttgttccattacttgcaggtttaacttaaaaattaacatttttaaacagtaccctaggctcagtaccctagagcagtgctgtccaaacagaactttctgygatgatggaattgctctatatcttcactgtccagtaaggtgtccattagccacaggtaactattgagcaattaaatatggctagtgcaactga

SEQ ID NO: 357055 - DNA, 550 bp, Homo sapiens
gtaatcaacttgagaaaatttcaaggttgcaatattggcacttcttgaggtgaagaggaaaagctagatgtttaggggtatcaggtaagaaataaggatttaataagggaaatcgtgtccaaaagtctgtccctagattagggattaagaaacttttctgaaagagccagagagttaatatttcaggcttttaggatacgatggtctgaatatttatgtttgcccaaatccttatgttgaattctaagcccctaggtgatggtattaagtagagcctttgggaggtgactagattatgaaagctctgccctcatgaatgggattagtgcccttattaaacagggtycagggagcttgtttgcctcttgcaccatgtgaggacacagctagaaggcaccttctatgaagaagaggccctcaccagacactgaatctgctagtatcttgatgttggccttcacagactccagaactgtgagaaataaatgtttattgttcataagtctcacacagtttatagtacttttgttacagcaggctgatttgacta

SEQ ID NO: 357056 - DNA, 589 bp, Homo sapiens
aagcaaatgaacatgactctgtttcaataaaactttataaatagagacagcagacagaatttggtccatagggcatagtttgctgacagctgtcttagagctgtgcctggtatctattaggcattcaataaacattcattcaccagatgaataaagaaggaatcagtwtataggtttggcacactttctgtctgatggcttctattttctctgagtattggcagtgtgaggtcagctatcaatagtgaaatagagttggggctttgagataattgatgaagttctaaaataactgctggtttgggataatgtctaataccagcatcaaatttctatactttgttagtaagtttactgcaaggaaaataaaaggaaattaacatccattaagagcctaatacagtgtttctcaaagcgtgtatgttctttaaaacacttgaattagtagtacctgaggtgttgaggttaatagatgtgggttctcagacccctctccagatattttgaatcagcacttctgaatgtagtgatttttttttttaaatcaagctcttaaactgattctcttacaaattagtgcttgagaacc

SEQ ID NO: 357057 - DNA, 575 bp, Homo sapiens
tgtgcctggtatctattaggcattcaataaacattcattcaccagatgaataaagaaggaatcagtttataggtttggcacaytttctgtctgatggcttctattttctctgagtattggcagtgtgaggtcagctatcaatagtgaaatagagttggggctttgagataattgatgaagttctaaaataactgctggtttgggataatgtctaataccagcatcaaatttctatactttgttagtaagtttactgcaaggaaaataaaaggaaattaacatccattaagagcctaatacagtgtttctcaaagcgtgtatgttctttaaaacacttgaattagtagtacctgaggtgttgaggttaatagatgtgggttctcagacccctctccagatattttgaatcagcacttctgaatgtagtgatttttttttttaaatcaagctcttaaactgattctcttacaaattagtgcttgagaaccactggcttagctggtatcaggaacttaaaatatattatgtaatctgcacaacaactttaagaaataaatattaaccccattttacag

SEQ ID NO: 357058 - DNA, 575 bp, Homo sapiens
tgtgcctggtatctattaggcattcaataaacattcattcaccagatgaataaagaaggaatcagtttataggtttggcacactttctgtctgatggcttctattttctctgagtattggcagtgtgaggtcagctatcaatagtgaaatagagttggggctttgagataattgatgaagttctaaaataactgctggtttgggataatgtctaataccagcatcaaatttctatactttgttagtaagtttactgcaaggaaaataaaaggaaattaacatccattaagagcctaatacagtgtttctcaaagcgtgtatgttctttaaaacacttgaattagtagtacctgaggtgttgaggttaatagatgtggrttctcagacccctctccagatattttgaatcagcacttctgaatgtagtgatttttttttttaaatcaagctcttaaactgattctcttacaaattagtgcttgagaaccactggcttagctggtatcaggaacttaaaatatattatgtaatctgcacaacaactttaagaaataaatattaaccccattttacag

SEQ ID NO: 357059 - DNA, 564 bp, Homo sapiens
ttttttttaaatcaagctcttaaactgattctcttacaaattagtgcttgagaaccactggcttagctggtatcaggaacttaaaatatattatgtaatctgcacaacaactttaagaaataaatattaaccccattttacagatggagatactaaagcttaaagaagcaaggagaattgcccaaagtgatacagatagtaaacgaaagtctgagatttcgcacccacatttgtctacattaaaactcacacttccccactatgctattcagcctcaagcagcaccagcagaaacaaaaatatgaattaaattctagtacattactcaattggtaccattcatgaagatgtctaaaatactaatgacgttaaatctgaaaatgaaagatctgaagatggacaattttggattgagatttaaggaatgctgtataagttaaggagaagcagtcatatgctactgctgaagtcaccaggaytggggaagaatttggaatcaggaggagcttctctgaaatgtatatttttcttttcagtgatcttccacaaaggagatatattaaa

SEQ ID NO: 357060 - DNA, 241 bp, Homo sapiens
ccctcactagacttcgaatatggcggcaccatgatcttggatttcccagcttctaaaactttgagaaatacatttcagttgtttataagcaacagagtttgtggtatttcrttgtagcaacaacaatggaccaagacaaccctatggctatttacagagatttgttgtgaaagaaacatcaaaaataagcatttgaggactggacaaatgggtttgagctattttttgctggtactataat

SEQ ID NO: 357061 - DNA, 241 bp, Homo sapiens
ccctcactagacttcgaatatggcggcaccatgatcttggatttcccagcttctaaaactttgagaaatacatttcagttgtttataagcaacagagtttgtggtatttcattrtagcaacaacaatggaccaagacaaccctatggctatttacagagatttgttgtgaaagaaacatcaaaaataagcatttgaggactggacaaatgggtttgagctattttttgctggtactataat

SEQ ID NO: 357062 - DNA, 241 bp, Homo sapiens
ccctcactagacttcgaatatggcggcaccatgatcttggatttcccagcttctaaaactttgagaaatacatttcagttgtttataagcaacagagtttgtggtatttcattgtagcaacaacaatggaccaagacaaccctatggctatttacagagatttgttgtgaaagaaacatcaaaaataagcatttgaggactggacaaatgggkttgagctattttttgctggtactataat

SEQ ID NO: 357063 - DNA, 584 bp, Homo sapiens
gggtgggtcctaaatccaatgactggcatttttgtgagaagaggagagaacacacagatacagggaagaaaaagtccaagtaaagacagaagcagaggttgatgttatgctgcacacacaccaaggaatgccaagagtcactggaagctggaagaaagaaggaaggattcttccttagagccttcagagcaaacatcgccctgctgatacctcaatttcagattcctgawactggcctccagaactgggagaggatatatttctgtgttttagcccaccgagtttgtagtactttgatatgacagctctggtaaactgatcaaaagagcaaacaaccctgtaaaactgcctgagacaaccacaagtctgcattaacccactgcatctgactacatagaggtgggcttgttcagattgaaaacatctcatttgttagtagagagagactaacagcagataacactgcatgggtggagtgaacctagccaagtgaatatctcattatatgcacccacattttaaaaaattgcatgtatgtggggagtggtatatgggaaaatattaacatgaaaattgtatattaa

SEQ ID NO: 357064 - DNA, 584 bp, Homo sapiens
gggtgggtcctaaatccaatgactggcatttttgtgagaagaggagagaacacacagatacagggaagaaaaagtccaagtaaagacagaagcagaggttgatgttatgctgcacacacaccaaggaatgccaagagtcactggaagctggaagaaagaaggaaggattcttccttagagccttcagagcaaacatcgccctgctgatacctcaatttcagattcctgaaactggcctccagaactgggagaggatatatttctgtgttttagcccaccgartttgtagtactttgatatgacagctctggtaaactgatcaaaagagcaaacaaccctgtaaaactgcctgagacaaccacaagtctgcattaacccactgcatctgactacatagaggtgggcttgttcagattgaaaacatctcatttgttagtagagagagactaacagcagataacactgcatgggtggagtgaacctagccaagtgaatatctcattatatgcacccacattttaaaaaattgcatgtatgtggggagtggtatatgggaaaatattaacatgaaaattgtatattaa

SEQ ID NO: 357065 - DNA, 584 bp, Homo sapiens
gggtgggtcctaaatccaatgactggcatttttgtgagaagaggagagaacacacagatacagggaagaaaaagtccaagtaaagacagaagcagaggttgatgttatgctgcacacacaccaaggaatgccaagagtcactggaagctggaagaaagaaggaaggattcttccttagagccttcagagcaaacatcgccctgctgatacctcaatttcagattcctgaaactggcctccagaactgggagaggatatatttctgtgttttagcccaccgagtttgtagtactttgatatgacagctctggtaaactgatcaaaagagcmaacaaccctgtaaaactgcctgagacaaccacaagtctgcattaacccactgcatctgactacatagaggtgggcttgttcagattgaaaacatctcatttgttagtagagagagactaacagcagataacactgcatgggtggagtgaacctagccaagtgaatatctcattatatgcacccacattttaaaaaattgcatgtatgtggggagtggtatatgggaaaatattaacatgaaaattgtatattaa

SEQ ID NO: 357066 - DNA, 625 bp, Homo sapiens
caaaccttcccacattaaatgcttttattcaattatatacaatctgataaaactacatttgactttcttgaatagcacatttgtcttctcatctcatctcatctcatttagaagactactgattcttcatttgcaacctattacccaaaattgcttggcggaatatagtaggtgatatatgatgtagttggggaaacaagactaagatggaaaatcttgcctacaggagttatcactaagaaacgtaaagagaaatgttcctacatttctctttgccctaacatatcattgttcttgctacaactattcracacctgctgattttttaaggccaccttttatattgtacctctactgtgaactcttttctatcttccccagggataatctctttgttattatgataccatatgacttattacacagttttcttttctattttttctttcctcccctccctccctccctccctcccttccttccttctttccttccttccttccttccattttcagagtctcgctctgttgtccaggctagagtgcagtgttgccatcttggctgactgcaacctctgcgtcccaggttcaaatgattcttgtgcctcagcctcccaagtagctgg

SEQ ID NO: 357067 - DNA, 611 bp, Homo sapiens
ggagatgtttatccatactgaatgactttcttgtctccttggtatgagaatggagattgaatggagagaaaaggagcagaagccagtgrttgaaaatgcttcaggactccaaccttggttctagatcatcatcccgggaaagaaacaatgacagtatggagggaaccctgctaatccactgaagtttttttttctggggtcagtgcttgaatttcagcttcacctcacagtcctacacacatatacttttagccctatttcctggaagaatgaggaatgtgatcatcagtgctatgcattccctgcagaacagttaatcttgctgaagagtatgtgttggtaaacacatctccttttgttgagaaagctgctgctccttgagcccaggcaaagttggatagaacaccctacactcagtcccaaactaagaacatgtccctcatcaggttttttccaggtgtttcatgggcccttctctgccagacaccatggcagtcttctgccttggaatggatgaaggtgggctttataccatcactcactgtgaaaccagacttcctccctcctctatgagtacgtgggcttatctgcttctgtcttctggctagtta

SEQ ID NO: 357068 - DNA, 611 bp, Homo sapiens
ggagatgtttatccatactgaatgactttcttgtctccttggtatgagaatggagattgaatggagagaaaaggagcagaagccagtgattgaaaatgcttcaggactccaaccttggttctagatcatcatcccgggaaagaaacaatgacagtatggagggaaccctgctaatccactgaagtttytttttctggggtcagtgcttgaatttcagcttcacctcacagtcctacacacatatacttttagccctatttcctggaagaatgaggaatgtgatcatcagtgctatgcattccctgcagaacagttaatcttgctgaagagtatgtgttggtaaacacatctccttttgttgagaaagctgctgctccttgagcccaggcaaagttggatagaacaccctacactcagtcccaaactaagaacatgtccctcatcaggttttttccaggtgtttcatgggcccttctctgccagacaccatggcagtcttctgccttggaatggatgaaggtgggctttataccatcactcactgtgaaaccagacttcctccctcctctatgagtacgtgggcttatctgcttctgtcttctggctagtta

SEQ ID NO: 357069 - DNA, 578 bp, Homo sapiens
tgtgatgacagaagaagagattggaaagatgcagctgcaagcaaaagacagccaggagtgagggtcactgccagaagctatgaagaagcaagaaagaattctactcagagctccagagagagcatagatctgctgacagcttgatttcagacttctaattttttattgttttaagctacccagtttgtggtactttgttatggagccctaggaaactaacacagcatgtatcactccgaaacactacacattttactaatttatttttgtttgtttattgattgtctatctccccagtgttgtaatgtaagcttcaaaaggagcacaagagtcccggccctttgtgtcacactgccaygaactctactgcgttctactaattgacttctgcctaaagattgattggtcctaatgcttcatgggtgaacctgcaaatgaatgtcctgatgataagaactgaactcaaggcaagaagtgaaaaattccaactatttccctagaagaatggaagagtaattttggattagatagaaccttggcaattatagactttggtgctaccacatagtaagttgtct

SEQ ID NO: 357070 - DNA, 591 bp, Homo sapiens
taatacatcaatcaatacaggtaagatgtattgtgttgatgcaaaagtaattgtggtttttgcaattaaaattaattttacttgttctgtgtaaaataatgtgacataccacattatgtctcttatatgtgggatctcaacagacttagcagtaacytaagtaatcaaaagtaatgataaaattgcaattacttttgcaccaacctaatacattagttcaatctggaagagtgaaacaactttgggggcacttctacataataggtagatttaaacatattctgactggcaattggttgagttattaccagtagaaaggaatgtctgggttaagataaggggatgtgaagaccaaggttttattatgcaggtgaagcttccaggtagcaggctttagagaaaatatattgtaaatgtttcttatcagacttaaggtctctgttgatgctaatgctggaggggcataataaggcatgtctgacctcagcttccatcatggcctgaaccagtctttcaggttaaattttagagtgcactggttgaggagggagtccattcagatggttgcagggggccctttgaattttattt

SEQ ID NO: 357071 - DNA, 591 bp, Homo sapiens
taatacatcaatcaatacaggtaagatgtattgtgttgatgcaaaagtaattgtggtttttgcaattaaaattaattttacttgttctgtgtaaaataatgtgacataccacattatgtctcttatatgtgggatctcaacagacttagcagtaacttaagtaatcaaaagtaatgataaaattgcaattacttttgcaccaacctaatacattagttcaatctggaagagtgaaacaactttgggggcacttctacrtaataggtagatttaaacatattctgactggcaattggttgagttattaccagtagaaaggaatgtctgggttaagataaggggatgtgaagaccaaggttttattatgcaggtgaagcttccaggtagcaggctttagagaaaatatattgtaaatgtttcttatcagacttaaggtctctgttgatgctaatgctggaggggcataataaggcatgtctgacctcagcttccatcatggcctgaaccagtctttcaggttaaattttagagtgcactggttgaggagggagtccattcagatggttgcagggggccctttgaattttattt

SEQ ID NO: 357072 - DNA, 604 bp, Homo sapiens
ccttctattattggaaagaggtcctgatccagacctcaagagagggtcttggatctcatgcaagaaataattcaggatgagtctacagagtaaagtgamagcaagtttattaagaaagtaaagaagcaaaacaatggctactccataggcagagcagtggcatggtctgctcgactgagtatacttatagttacttcttgattatatgctaaacaagatgtattagtctgttttcatgctgctgataaagacatacccgagactgggtaatttataaagaaaaagagatttaagggactcacagttccctatggctggggaggcctcacaatcactgcaaaaggcgaaaggcatgtcttgaatggcagcagacaagagagaatgggaacaaagcaaaaggagtttccatttataaaaccatcagatcttatgagatgtattcactaccataagaacagtatggtgtaaactgccctcatgattcaattatctcccacctggtccctcccacaacacatgggaattatgggaggttcaattcaagatgagatttgggtggggacacagtcaaaccatatcacaaggggtgaataattcatgagtt

SEQ ID NO: 357073 - DNA, 590 bp, Homo sapiens
ttccatttataaaaccatcagatcttatgagaygtattcactaccataagaacagtatggtgtaaactgccctcatgattcaattatctcccacctggtccctcccacaacacatgggaattatgggaggttcaattcaagatgagatttgggtggggacacagtcaaaccatatcacaaggggtgaataattcatgagttttctcagaaaggagtgggcagttcccagaactgagggttcctccctttttaggccaaataaagtaacttcctgacattgctatggcatttgtaaactgtcatgacactcgtgggagtgtcttttagcatgtgaatgcattatagttagcatataatgagcagtgaggacgaccagagatcactttcatcaccatcttggttttggtaggttttggctggcttctttaccgcaaactgttttatcagcaaggtctttgtggcctgtatcttgagccaacctctatctcatcctgtgactaagaatgcctaacttcctgggaatgcagccaagcaggtctcagtcttattttacccagcccctatttaagatggaatcactctggtttgag

SEQ ID NO: 357074 - DNA, 548 bp, Homo sapiens
attttacccagcccctatttaagatggaatcactctggtttgagtgcctctgacacgtcagcagactattttgggactgctcacatggtgcctggatatggttcagagacagagttgggtatgtgaagaatcttgtctgagaactggggcacgattactcccactgcattctattgacaaaagtcacattccagtccagattgaagaagtggacaattggccacctcttgatggatggttaaaaaaaaattgcaraacgtgtggatgtgaaaaagagttatatggtcatttttactattatctttatataaaggggataatatggcatgtgctcttttgtgtcttctggcgtttttttctgctaacataaaatttttgagggttatccatattgttaagtcagagtgatttaaaacaacagaaatgtattatctcatggttctagggactggaagtctgaaatcaaggtgttggcaaggccatgctctctccatcggctctaggagagaatacttcctgtcctcttctagctttggtgtgaagactaa

SEQ ID NO: 357075 - DNA, 568 bp, Homo sapiens
tatgctatgtgaaataagccagacacaaaaggacaaatatcttataattccacttatatgagatacccaaaataatcaagttcataaaggcagaaagtagaatagcagttattagggtctggggcagggagaaacaaggactttttgtttaacaggtacagagtttcagtttgggatcctgaaaagtttctggagatagatagtggtggttgcacaacaatgtgaatgttcttaatgccactggactgtacccaaaatggttaagatggtcaattgtatattatgtgtacttcactaaaataaaaaaaatgaccagtgactctgttgggcaaatttaccctatttcttttatcagttataaagtagccattgtaaccacttagttttaataatagtttattctccacctgatgactaccaagagcgcatctcaagttgaacaaattgaacttatcacttgttgcgctgagtgagaatgtgcatcatgggaacytgggacaccttagaaagaggatgttagaaagaacttaaaatatttgagcttgccttaggtgatttggaagagagt

SEQ ID NO: 357076 - DNA, 601 bp, Homo sapiens
aaaacaccaagattaaaatgggggtaattcattcaattatttagatattttgcttacataagtaaagcctgaggttctcttcttcttcatttagatattttggcagtaaatatyattttaatagaaatcaatctgaggtagtaatttttgttttgtcagggacatatggcagcccaaaagagggtgaaaaataacatattaaaaataaacttaaatattttaaaaatagtattaaaatatatcttcatctgacataataactaaaatagaaattaatcagacatactcagtgacacatacttgctgccatttgaaaaaataactacaggatggaagccaggccaactaataatattaggtaacaattactgtgtcctgaatatatgctgtaggcaccagagcagtgcattatgtatatgattctgttatatcctcacatggggattaagatgcattaacctatcagtgctcatggacccatctccaggctcgaacttgcaattgagtctgagaaatgtaaaggtctcaatgatattctctcaaaatgtatttctcatttggttaactgtagccatggtctacatgtttcttttgctaatgt

SEQ ID NO: 357077 - DNA, 580 bp, Homo sapiens
tgtctccttctggtatcgtaattaggtatgttgatctacgtattttatcttctatgtcccttaacttctctttcatgttttccatcttttggtctctataggttgcattataaataatttttaaatttttaattctacagttctctctttagctatatttaattggcttttatctcttacatttcatttttaattcatattattatattctttacttcctgaatttctatttggttcttttttgtckttttatggtcacttgtatcttgctcatattttcaagtcatttttgtgtcttaaaccatattagatgtacctattagatggtagataatttcaggaatttaagtatttcctagatggcgtctgatgtctgttgtttgtgatttttggctgtaaacacatgacccttggaacatagtcttcaagaatttttggggaacttagttgaaatttcatttctttggaacaaagtttcaattgcttctgctagatgtctttggccacattaaattaaatttctaacttaagggcatttcccctaccttccagagaccccacccgacaggttgaatatggg

SEQ ID NO: 357078 - DNA, 597 bp, Homo sapiens
aaattttgggattcagatcatgggacactggtccctttttcctttgtacagttcctgtcatggctgacttgctgtattccattctgattgctaaattattagaggttcatttacttctcacaaataagtgaaacatggtactgggattgggcaaacatgtcccattaaaatgattagtaaatcttggcatatttagccaagagtagaaaacagattgtataaaaacttacactaattacttcttctcatttctttcacatcttattattgttgaattttcrcaaaagtaagttatttgtcctctctttttcatatatcctaactccattggccattgcatctgatctcatggcttcaaataccatctatatactggcaactgccacatgtatatctctatccctggcctctcccaggaactctagagtctcatattcaactgttcacttgattttcatatggatgcataatacatgtttcaaacataataataaaactccttttttttgattgccttcatcccctacctccaaacctgcttcttatgcattcttccccatataaattagtgacaactaatccttcatctgctcagat

SEQ ID NO: 357079 - DNA, 597 bp, Homo sapiens
aaattttgggattcagatcatgggacactggtccctttttcctttgtacagttcctgtcatggctgacttgctgtattccattctgattgctaaattattagaggttcatttacttctcacaaataagtgaaacatggtactgggattgggcaaacatgtcccattaaaatgattagtaaatcttggcatatttagccaagagtagaaaacagattgtataaaaacttacactaattacttcttctcatttctttcacatcttattattgttgaattttcacaaaagtaagttatttgtcctctctttttcatatatcctaactccattggccattgcatctgatctcatggcttcaaataccatctatatactggcaactgccacatgtatatctctatccctggcctctcccaggaactctagagtctcatattcaactgttcacttgattttcatatggatgcataatacatgtttcaaacataataataaaactccytttttttgattgccttcatcccctacctccaaacctgcttcttatgcattcttccccatataaattagtgacaactaatccttcatctgctcagat

SEQ ID NO: 357080 - DNA, 490 bp, Homo sapiens
gacaactaatccttcatctgctcagatcaaaactactgaagtcatgcttgattccactgcttctctctgatcactgcagaagggacatgaggcatggcagatttgtgggaagaagaaggaggataggcatagataaaggaggagccagtcttattttagaatatgtataggaagccttagaaagtacatgttaggaagagacatttgacagtgaagactcatcactagatgtgcctttcaaggagagtcctgcagttctggacacttgctgctcatgtcaggtctgtggctgaaggagagaarggcatgataaaaattacattctaaaatgggtagcctcctctaggaattgttggttcaagatgtttgagagtctgactctacgaataccctggaatattggcaactatgaggcacacagcgatgcctgtttttggtgacactgagaacaaagctgctaatgatggcttcacccacactttgcaatgca

SEQ ID NO: 357081 - DNA, 579 bp, Homo sapiens
ctttggggtatttatccaaaagaaatgaaattgagatcttgaatcgagatctctattctcattgcaataagcttcagtatcgttcacaatcaaaatgtatatcaatggatgratggattaataaatatggtatatacatacaaatgtactattattcagtcataaaaagaagaaaatcctgtcatatgctaccatatgggtaaaccttgaagacattatgcgaactgaaataaaccagtcacaaaaggacaaatactgcatgattccacttagatgaggtatctaatagtcaaactcactgaagcagagagtggaatgctggttgccagaggctgggaaagagggggaaaagggaagtttctattcaacaggtatcaagttttagtcatgcaagatgaaaaagttctagaggtctgctgtgcaatattgtacttacaggtagcaacactgtattatatacttaaaattttaagatagtaaatttcacgttatggatgtcatagtttttaccacaataaaaaaataaggtgtgctaagaagccaaaggaagaacatgtttcatgaagagaggtgtggcga

SEQ ID NO: 357082 - DNA, 579 bp, Homo sapiens
ctttggggtatttatccaaaagaaatgaaattgagatcttgaatcgagatctctattctcattgcaataagcttcagtatcgttcacaatcaaaatgtatatcaatggatggatggattaataaatatggtatatacatacaaatgtactattattcagtcataaaaagaagaaaatcctgtcatatgctaccayatgggtaaaccttgaagacattatgcgaactgaaataaaccagtcacaaaaggacaaatactgcatgattccacttagatgaggtatctaatagtcaaactcactgaagcagagagtggaatgctggttgccagaggctgggaaagagggggaaaagggaagtttctattcaacaggtatcaagttttagtcatgcaagatgaaaaagttctagaggtctgctgtgcaatattgtacttacaggtagcaacactgtattatatacttaaaattttaagatagtaaatttcacgttatggatgtcatagtttttaccacaataaaaaaataaggtgtgctaagaagccaaaggaagaacatgtttcatgaagagaggtgtggcga

SEQ ID NO: 357083 - DNA, 591 bp, Homo sapiens
ggaagtttctattcaacaggtatcaagttttagtcatgcaagatgaaaaagttctagaggtctgctgtgcaatattgtacttacaggtagcaacactgtattatatacttaaaattttaagatagtaaatttcacgttatggatgtcatagtttttaccacaataaaaaaataaggtgtgctaagaagccaaaggaagaacatgtttcaygaagagaggtgtggcgaaccacatcaatgttgctgaaatgtcaaataagatgatagagaattaaccattacctttggcaaaatacagatcattggctaccttgataagaacaattttagggaagtgatggggaaatgagattagtatggactaggaagagaaagagatataacaacctgaaggtagggaagatatttttacaagaataagagaaatagtttactgattgagaggcaggtgtggtaacaaatttttttttgcaaggagcattattacatatatttgtgtgctgactggaatgatcccatagaggtggagaaaactgatgacacaggaaagagagagtggataaattcaaaagtaagctttgaacagatttga

SEQ ID NO: 357084 - DNA, 352 bp, Homo sapiens
cattagcactaacaggaaaacatacatacccaacccatatgagtcaatggggcataagagctttctgcaaaaataaatcttkaaaatgtttttgctactttataagtctgaaaaataattcaagccactctaaacccttgaaattctgttggataatgaacttaaggagctgttgacatccatgtcgcctggtgtccacacttggcctcatatcagacagccactggaaagcgattggcatgaacatgtatctgagaaccctctgttttatttttaaatgataacaaaagtaagtacaaccatgatagtagcctactaataataaagggagctatttatacatttttaagtg

SEQ ID NO: 357085 - DNA, 601 bp, Homo sapiens
aatatgttttcagttctcttggatacatagctaagagatatactgggccatgtggtaactctacgtttaaccttttcaggaactgccaaattgttttccaaagtggttgtgccattttctttgctatttgatatattttggttccttctgtgtctgctttctggtttttgggggctcagctgggaaagtaattgggatacttcaaaagatattttacacatagtggacaatttttagccattataggtagacacaaatacacagtggctgagcttgggagccacagaatgtggtgctatagggcacaccgaaaggatatccatgctagttagcaatgatacctggagttcagagaacaatttaggaagatctgggtgggttttgatatgatatagcaataaacaacacatggatgcacgcacttagacctttatctcaggtgcttaaactataaccaggacaattcaagacgtacrtaaataatgacaggacacatttttgagattcctttgcttttttttttttttttaagaatatataagaatatttccagctggccatatcagagaagatggttttggaacagaaaccatcttcactg

SEQ ID NO: 357086 - DNA, 621 bp, Homo sapiens
cagctacaaaatacgtgaagtgaaaactgatagaatagaaaggagaaacaggcaaatctacaattatatgtggagagttcaacacccctttctcaaaagttgataggacagttatacagaaaatcagtaaggatatagaatatctcacaaaaccatcaactaataggatcaaatttacatttataaaacagtccacccaataacagcagaatatatatattttttcaaatgcctgtggactatatcccaaaaaagataatagcttgagtgattttaaaaacccttaatataaggccattgaaaccgtatagagtatgttctctgatccaaataaatcaagctagagataacagaaatataagaggacaatttccaacactttgaaactaaataatatacttttagtcaatgcgtgggtcagagtatcggggacataaaaatatattgaactaaatgaaaatgraaacacaacataaaatttgtaggtagataaagcagtgatgagagggaaatttataggactaaattcatacattaaaaatgaggaaataatcttgaattaataatttatcaccccaaaaaactaaaacaaaacaagttaaacttgaagcagaaaaaggg

SEQ ID NO: 357087 - DNA, 356 bp, Homo sapiens
tatggctaacattccttaaagattcaaacccatagtatattgttcacctccaaactggaaaaaaacctagtcctgtcacagaagtgaattcagttgcttgatctttacagctgctgataaaagtttgaggagttcrcagacttatgggaaaagtgagataaacttcagtatccagcattaaaggctttccaaggcaaaatacattgtgcaatattaatttttcaagttaaaaattggaggtatttgaaaaccattgcttccccaaacaggaaggaaaaccactgtttgggtggtaaaatgtgctaattctgtacaaaatgcctttaagcccttgacctaatgaggttagtgacagg

SEQ ID NO: 357088 - DNA, 356 bp, Homo sapiens
tatggctaacattccttaaagattcaaacccatagtatattgttcacctccaaactggaaaaaaacctagtcctgtcacagaagtgaattcagttgcttgatctttacagctgctgataaaagtttgaggagttcacagacttatgggaaaagtgagataaacttcagtatccagcattaaaggcttyccaaggcaaaatacattgtgcaatattaatttttcaagttaaaaattggaggtatttgaaaaccattgcttccccaaacaggaaggaaaaccactgtttgggtggtaaaatgtgctaattctgtacaaaatgcctttaagcccttgacctaatgaggttagtgacagg

SEQ ID NO: 357089 - DNA, 539 bp, Homo sapiens
tttacagctgctgataaaagtttgaggagttcacagacttatgggaaaagtgagataaacttcagtatccagcattaaaggctttccaaggcaaaatacattgtgcaatattaatttttcaagttaaaaattggaggtatttgaaaaccaytgcttccccaaacaggaaggaaaaccactgtttgggtggtaaaatgtgctaattctgtacaaaatgcctttaagcccttgacctaatgaggttagtgacagggatatggatgactagaacagaaaatgaaactcagaaagaattttgttcatgaactgccatatttctcctgtcatttagccaattttccctctcaaaattacaacatggactgcaaatcttcaaggctaatgctgcatatgacagactaagtgctatttaaaatgtaataatatatctgtcaatctgataggaaaaaacaagaggccacgcgaaggacttttcaggtagacatgggtcctaaaaggttataaagacggtaatcaggaaagcaagccaccacacagct

SEQ ID NO: 357090 - DNA, 539 bp, Homo sapiens
tttacagctgctgataaaagtttgaggagttcacagacttatgggaaaagtgagataaacttcagtatccagcattaaaggctttccaaggcaaaatacattgtgcaatattaatttttcaagttaaaaattggaggtatttgaaaaccattgcttccccaaacaggaaggaaaaccactgtttgggtggtaaaatgtgctaattctgtacaaaatgcctttaagcccttgacctaatgaggttagtgacagggatatggatgactagaacagaaaatgaaactcagaaagaattttgttcatgaactgccatatttctcctgtcatttarccaattttccctctcaaaattacaacatggactgcaaatcttcaaggctaatgctgcatatgacagactaagtgctatttaaaatgtaataatatatctgtcaatctgataggaaaaaacaagaggccacgcgaaggacttttcaggtagacatgggtcctaaaaggttataaagacggtaatcaggaaagcaagccaccacacagct

SEQ ID NO: 357091 - DNA, 564 bp, Homo sapiens
ggggactgcacaggactttctcaattgatggcataatgagaaccattaggaagcttgactccattttacatcttaaatctccaagtcctcyttgcaaaaggaagcaaacagtacctgcttcccaagtgagacttgagtggaaagtcggccaaaatgagacagttttcagaaaacaaatttcagttaagtctcaggaagctacactacttctactttgtctattctccatgccctgctcctgacagatgggaaatacatcaactacactctgggcagaggtaagtgacacagaagatttccataggtagtgttcaggtcacaccttcttgaacaacttgttttattaagctgttcataagaagaacttctgccttcctgttgaccttaaaatcttctcaagaggattataacacaagatgcttttatattgtggttattaacagctaccatttatcccagaggctcaaaacaataggatgaggattgttaccagaagaataagacatagattcctcggtaatttagcaaatttccagctgtagtactccttgcccagtaaaatgc

SEQ ID NO: 357092 - DNA, 643 bp, Homo sapiens
catttcagtctccaatatccagcagatgcatttctactattttcacaagggattcagtgtcttctccatacttgcagaacttcctgtttatctttcactatccatgtctatgttattgatctccccatgagaccacaaggaatcagggtggaggaacatgggaaatggagcacaggcattctgggagacagaacactgagagctatgcttgctcagaaggctcatggtaaagaaaattgaaggcaaacctgaaggggaggaattgcaaagactttgagatcttcaaataagtcaaaaacaaaacaaaacaaaaacactacaattcttaattagaaaggaagaacttaaatttatccaaactcaaagcagcccatattctactgtaagtggagggatatgacactggaaaccaactgacatytcccaaagtggtcctacagtaggaaagagttcaaggtgttcttccagatgcccaccaatacagccagcaaggagggtaggggtagggtggtgagggctgtggaaaggggtgcacccacatgcaagcagatagtaatcatgcctttttaaaaaagaagagagacctgaaaaatctaaatccaggtgcagacttgagaatgagaatgagtcaatgggcttctac

SEQ ID NO: 357093 - DNA, 537 bp, Homo sapiens
caccttgttggtcttggataagatctggaagaattctctggattaccaggcagagactcttsttctcttcccttactttctcccagacaaacagagtctctctctcaatgctgagctgcctggagctggaagaggggtgacataagcatccctgtggccaccattattgggattgtgctgtgtgagacctgaagccagcacagcactgggtcttgccgaaggcctgcggtaaccagtgcctggataccacttgtgttcactcaaggccttagggctctacaatcagcaggtggtaaagccagccaagtttgtgttcttcctgttagggcagaaagatcccccccaggttagagatgctgtcctggagccagggcctagagttggaaaccttaataatctacctgattctctattctactgtagctaagctggcacccaagccacaagggaaagtcctcctgaatcttccctctcctttccaccagcagaggagtctctcctcatggttaccactgccccaagtctgcagtgagtact

SEQ ID NO: 357094 - DNA, 537 bp, Homo sapiens
caccttgttggtcttggataagatctggaagaattctctggattaccaggcagagactcttcttctcttcccttactttctcccagacaaacagagtctctctctcaatgctgagctgcctggagctggaagaggggtgacataagcatccctgtggccaccattattgggattgtgctgtgtgagacctgaagccagcacagcactgggtcttgccraaggcctgcggtaaccagtgcctggataccacttgtgttcactcaaggccttagggctctacaatcagcaggtggtaaagccagccaagtttgtgttcttcctgttagggcagaaagatcccccccaggttagagatgctgtcctggagccagggcctagagttggaaaccttaataatctacctgattctctattctactgtagctaagctggcacccaagccacaagggaaagtcctcctgaatcttccctctcctttccaccagcagaggagtctctcctcatggttaccactgccccaagtctgcagtgagtact

SEQ ID NO: 357095 - DNA, 639 bp, Homo sapiens
agcagtaaggcttaaatacctattcttattctttgtattttaataaatctgtttgcataagagctttaaattgtatcagtgacaagtaggtatgttttcataatggaataatagtgagcaataacgccccccaaaagaggcrgagcaaggcataagtaaacaaaatgtatgtgtgtcgcatacatttcaacaggtgaatccagcatggcatgatggaaacttaagttccggggcccacacaggccccttccaaggaccaggaactaactttgcattcaaaattttgttctctcttcttacagacagcctcaaaaattacataatcttaaaacttcacaaaacctggaaccatgcctgatctaattaatcatgaaaactcttcttaagtttattattattattataatactttaagttctgggatacatgtgcatagaacgtgcagttttgttacataggtatacacgtgctatggtggtttgctgcacccatcaatccgtcatatgcatcaggcatttctcctaatgctatccctcccctagcccctcaccccccgacaggccctggtgtgtgatgttcccctccctgtgtccatgtgttctctttgttcaactcccacttatgagtgaggacatgcgg

SEQ ID NO: 357096 - DNA, 473 bp, Homo sapiens
tttgtctgtgagcttccaaattagcagtttggacaaaatcaggaacagcaggaaatccaagggtgagctatgtataaatcaagaccaggaaaactaggacagttgctggtgcatcactaaccttttaagatttatgttaaaaaacaagcaagcaaaaaccccaccatgccatcctagtaaacatcccttaggatcattctgaaaaacaaaacagatccactgatggatagaaaatgaatctcactggttatggcagtttttaacgagatttttctatttgtttggcctaatttttaaattcttgatcctcgtaatcaccatgtgggttgcagtagcaaaataacttgtgactgatgataattaagaaaaggaaatttaagaaatgyatgttttcctgagccaagtttcaactaaatgtttttgctactaaaattatgctttcttacacaaatgttgaatataagtaagttgct

SEQ ID NO: 357097 - DNA, 517 bp, Homo sapiens
cacaagcaacttaacattggggacagaactgggaaccaggtctccaccacaaaccaaaaccgcctaaaggctcccagggcctcccagacatggttcttccccttcctcaggggtgttcagaggactgctgtcttcccaccccctagatctccaatcttcaaagcaagcatccccaagagcacacccctcaggtggcctcaatagctcccattgtccaagaggctctttggcctgacccccagccccataagcagcaggacagcaagctcagaggagcttgtcctgccttgtccccctcctctgcctcgtccccctcctccagggccgccttgggggagccagtggggcaggagccccgctgaatgtgacctattgtcttcggggtggatttagraagtgccaagctcccatcaaacagccgtgctccccaggtaaaacaaaaaaagggctgttcatttgggaccttttcccccttatctccttttcctatctcctcaggcttagatatggtgtagtg

SEQ ID NO: 357098 - DNA, 446 bp, Homo sapiens
gagaactcactcgctatatagtaccaagtggggatggtgttaaaacatgagaaaccggctccatggtccaatcacctccctccaggccccacttgtggcattggggattatatttccacatgagatttgggtagggacacagatccaaaccatatgatatamcataaaccatagagcaatggttaaaactcaaaaccaaatgaagcaaaaatagttatatgaaaaaggccaacaaagaagattaaatgaaataaaaatactcaacaaattcaaaagaagtcaaagaggaacaggagaacaaactacagatgggacaaatagtaagcaaacaggaagatgaccaagtaaaaccaaactctctggcattccaccagttgtgtgtgattatttagcaactctctgcctctgacaaccatacatgtcacacagggttgtcatcagagctt

SEQ ID NO: 357099 - DNA, 548 bp, Homo sapiens
ctcccactattctgaagtcaatgtgtgtcttcccatccatgtttaatacctagtgtgcatgtccatgaagaatggatagtatttttttggtctgtttttgcaattttatacaaataactgtccatacatactctcctgaaagttgcttttcccttyaacaatatcttccagatgaatccagaattctgcatttctggtgagcagaggatgcgtgcctccccctgcaaccaccaccccaagatgatgctgatgttctggtccaaagcctgcacgtagcctggtgagacttggggtcttgggacaggtctgttgtcagcccttcctaggaagcacagccagatgaccttggggctggaatcctcacaatgcccctcgccagcagtgctcacaaccatcttcactcattttcatcaatatttgttatcgcactttttgatattgttcctggaatttgcagtgcagctgaacgtgtgccttgtgtttcccagcccttcgggtctccttctctgtgaattgctcctggtccataagtctgttggatctttggt

SEQ ID NO: 357100 - DNA, 544 bp, Homo sapiens
tccaccactttgataatgtcactgtctccatacatttcttcctyagtttgttctcttgtatgtttgtgtgttattttaggttcaaatattaagaccaataggctaggatttatacattgtgtaaaaagtaaattagatagctagtaggtaccctatatatattataattttcacctataagattaagtttagtgcaggcaaaaagggctcattaaaattttcatccactttttcaacttctatccaaactataatataatttatgccccaactgttattttatcaattactcttaaccatatttcataaaatttatatttttttctttatttagaaatgtaaggctattatttgcttttaaaggctgtgatacagctttttttattttgtgaaataatagcaccaacattataaatatttattgtgtaaatacttactcattaaaatcttcccattagagaattttattaattattgtagttcatttctgtaaaattgtactgccacacaccacagggcaatgattcaaaatgcctggtcttca

SEQ ID NO: 357101 - DNA, 544 bp, Homo sapiens
tccaccactttgataatgtcactgtctccatacatttcttccttagtttgttctcttgtatgtttgtgtgttattttaggttcaaatattaagaccaataggctaggatttatacattgtgtaaaaagtaaattagatagctagtaggtaccctatatatattataattttsacctataagattaagtttagtgcaggcaaaaagggctcattaaaattttcatccactttttcaacttctatccaaactataatataatttatgccccaactgttattttatcaattactcttaaccatatttcataaaatttatatttttttctttatttagaaatgtaaggctattatttgcttttaaaggctgtgatacagctttttttattttgtgaaataatagcaccaacattataaatatttattgtgtaaatacttactcattaaaatcttcccattagagaattttattaattattgtagttcatttctgtaaaattgtactgccacacaccacagggcaatgattcaaaatgcctggtcttca

SEQ ID NO: 357102 - DNA, 528 bp, Homo sapiens
ataatataatttatgccccaactgttattttatcaattactcttaaccatatttcataaaatttatatttttttctttatttagaaatgtaaggctattatttgcttttaaaggctgtgatacagctttttttattttgtgaaataatagcaccaacattataaatatttattgtgtaaatacttactcattaaaatcttcccattagagaattttattaattattgtagttcatttctgtaaaattgtactgccacacaccacagggcaatgattcaaaatgcctggtcttcacagatgcacagtcactgttgaacattgtggttatttagaaaaattmttttctagtgttatatcaatgttccaaacaagattttatgggtaaatatttctcccattctagttttgcaattccattttaactgtatttttattttagggtaggttccttgagattggtttatagtatttttggttttacctaagtattattttggatgactgtgtgcagcaacttttaatgtacag

SEQ ID NO: 357103 - DNA, 498 bp, Homo sapiens
cagtgtggtgaagtggggacagtgggcattctgccacatggcctagagtttcttgtgactctggactgcccaggtgtggtgaccagaaggcaaaccatttctaggccacagctcaaggagggagaacccaggctgagcctggtgttggttctgagttgaggagatgaagctgggagtccagggagactaaagaagctcaggtaaactctgcagggcagagtatttcgggaatgaaaaggacaaagacacaaaacaaaaaacctccagagtcttcagctaaatactgatcagcacktgtatgtgtgtaaactacaagtctgggggaaaaaatacctgaaggtaacagaaagaacaatgcttgaacctcccacagaaccagcatatttgttgttcccaccagcaacagtggacaaatcttatacttcccggaccatttgatggaacactcagaaaagagttgcctcagtagtgtggaagattagatctaggctgaggctg

SEQ ID NO: 357104 - DNA, 356 bp, Homo sapiens
aagcccaggagtttgaggccagccttggaaacatcacgagacctagtctacgggttgagggtggggaggagggggaaagttggtggtaatgggaggtggtaatgcgattataaggtgtgggcaaccatattttgtgcctctaaatttgtggagttaccactaatctaaaattaaggatacagatcagctgaagaaagaaaaagayttatgtcgagatgaaacctcctcgtgagggtctgcagctgcaataccgccaggtggcagcatcccacctctttcgcctggctgcagccccaccaggagcccggctccagccggggcactgcagcaggtactagacctggaaggcgcaggcg

SEQ ID NO: 357105 - DNA, 460 bp, Homo sapiens
ttatgaagacagcttaattttgcctcaaggcatcttttttccctgtgcattctatatagtgccaattcttgctatttggtgttttaaaggtcactcagaacctggaactatccatcgtagccattccagcctttagtaatgtcaatcatcatatcactcctctcttactattgactgctgaacatgttagaaaaagtcatgcagtgatggcagctggaatgacagccaatccatgttatctaacatcagctgcccatcaagactcctgggcaatcatttatctgcagttgactctcacttcatgcaatttgtgttataaatgtttcctgtgtttccaactcctacaaaaccctcaaatccatgtgtatcttcttcactttcagccaataggaatctcgcctcctatatacttgaraaagtaaaggccatatgatatgaattgtctccatttgaccacaac

SEQ ID NO: 357106 - DNA, 572 bp, Homo sapiens
cattagttcacacttggaacactttttcttcattatggtagcctggagtaaaagctttttttcttctaacacattttatcctgctatttttcaaaaaccctttttttacagtatttgggggaaactgtattttttctatgggggccataatatttatcattttctttttttaaaaaaactgcatctttatctcacacaaagaaagcaaatatctgtttcaagttcttatttcaatagtcagcataaaaatgtgcaaacttttacctctggctttcactcatcgcttacttcctgctcttattcctataaaagaaagttatttcattagggagaaaccttggcactaagctagaggtactgcagagttataaagatgtgtattttccatactggaataaccttacagtgatttattagtcatcacgctctgagaagttaaaaatcctttaagtggtaaggttgtttgtctgaggtaggtgattaatagacagccttcctyagcacgtgcaaattaaaatagaagaaggaattatgattggagctctccttttccacttctaaacacgctagtc

SEQ ID NO: 357107 - DNA, 614 bp, Homo sapiens
gactgcaattaataacagagttcttgctcgcaattcatcttgtgtgacctgtgccagtggtatgatttgttagtcatgaaacttctttaacctacctccattatgcaaatacaacaggaaacgcgctcttctgtttcagttgctgaagygtaggctgtgatcctgtgttgtacactccagctcacagcccacgggagggacgccagagtgtggtaggcaccagttgctgcaaagagagatgctcaatggactctgcactcagttagaacgacaagcctgatgtggccatgcattcagcatgacgtcaaaatgacaggttatgttctgttacgtgtccgctggtatcagctgtattgatcctgaggttggtgaatgaaagatgccctcactttaccactaatgctgattgcactaaccttgcactaatccttctaggtgagagttcagattctctgagagccaagctgtatcctcagagaaaaaaagatgaggagaatttaaagcacttggccaagggcctgggtttttcctcttctctgctgaccccaacatcaccaacatagaacatgtcagctccttcagttattagacagccagctctgaaaggtgcagaa

SEQ ID NO: 357108 - DNA, 611 bp, Homo sapiens
ttctgcatctctaatagactcccaagtgatattgatacttctggtccaaggaggactttgaataaaaaggaaatgaagaagaaaatcccatcagaaatatattttactaactccttgatactgggagagccacatcttgagcatcagggttttaacacctattctacagtgtccattcattcattcattcaggaaacatttcttgagtacctactgtgtaccaggcatcatgacagttgctgaaaagtacagggtttcagatatcaaaaaattgagtctagtggaccgttgcgtgagttaaatgacttatccttaaatggaagcacatatcratatatttatatgcatgtatgcacttaagtattaggggtagacacatacatgtgtgcatttaagtaacatgcacacacacgtgttgccacctgaagcctttgatttactcgtttccatttgagactatctcagcctggacttttctgtacatatcactatcagcattttggtcaaaactgttcaacaagtctctaggaagttctaaaccttccctcatcttcctgtctgcttctgagccctccaaactgttccaacctctgctcattgcccagttccaa

SEQ ID NO: 357109 - DNA, 556 bp, Homo sapiens
tgctacttttaggtcccactatgcctctgctctggactccctgcagtttttcgaacatgacattctcatttctggcaccactctttgctcttcgtgctttgcatgctaaagaaacccttctcctgtctctgtgtccatccttcccttgatgttcatttcatgccttctcatccctccaggagattttccctaagtcttgctaacagccactcatttctgaacacttatacgtggtattttcttatcactcacttggctttccacccagtagcgcctaatatattttttctatagtgtctagcatgagtagagcgtgttgcacagtagtaccactgctacatttgttcttctggcatttcttccattttaccaaacagcagctgctcaggatttggggagtcatgcatctttcacataccccagccaacagtgttgtcttccaacaaacattgctcctgggttcaggagatatctataaactagggtccygcttgttattcattatcgtactacatgcttttaacttattaatatccactacttaattatccttttc

SEQ ID NO: 357110 - DNA, 613 bp, Homo sapiens
aaaatgagacatagaacaaatgcaacaaacagaaaacaagtattaaaattgtgtacttaaaaccaggtagatcagtaatacttcaattaaaaatcaaagataaaactgsataaaacaggctatatagagcaacaaaatctagctacattcagtttatgtaaacactgaaagtaaagggatggaaaaggatataccttttatccagtaactaaagaaggcttgtattgttataataatataaagcaaagtaaacacctaggttagaaatactgtagataagaagaacataaaggtgtcattccacccaaaacacagaacaattctacattagtatggatccgataatttagcttcaagatatgtgaaaccaaaattgatggaagtaaaagtagaaaaattaataatcttccatacacaagcaccagacctactaggtcttctcattatccatgtaaaccacatgttagatacatttttgaaagtagaggaaagaaggaagcaaaatatcacattttggtgtctctcaggcttttttccccaactatagtttcgttgcattatgttttaacatagttatgctgctgtcttctgtaatgattcagttttgtgcagc

SEQ ID NO: 357111 - DNA, 613 bp, Homo sapiens
aaaatgagacatagaacaaatgcaacaaacagaaaacaagtattaaaattgtgtacttaaaaccaggtagatcagtaatacttcaattaaaaatcaaagataaaactgcataaaacaggctatatagagcaacaaaatctagctacattcagtttatgtaaacactgaaagtaaagggatggaaaaggatataccttttatccagtaactaaagaaggcttgtattgttataataatataaagcaaagtaaacacctaggttagaaatactgtagataagaagaacataaaggtgtcattccacccaaaacacagaacaattctacattagtatggatccgataatttagcttcaagatatgtgaaaccaaaattgatggaagtaaaagtagaaaaattaataatcttccatacacaagcaccagacctrctaggtcttctcattatccatgtaaaccacatgttagatacatttttgaaagtagaggaaagaaggaagcaaaatatcacattttggtgtctctcaggcttttttccccaactatagtttcgttgcattatgttttaacatagttatgctgctgtcttctgtaatgattcagttttgtgcagc

SEQ ID NO: 357112 - DNA, 577 bp, Homo sapiens
aatttgaggtttaagagtgagaaggagttaaagccaataagaaaacaaaatatgatttccatattgcagacttgagttaaggaaaaaaaaaaaactaccaagcccttaatgctgcagtccttgagatttatttattccatcactcattcaacatgttatggcattcctctagccaaaaacataacagtaaacaaaacaaatgtggtgtctgtcctcactgagcttagattttggtggaggagaagagtacagaaaataaatagaaaattttaatgtggcaagtgctagaatagaggacatttaggattctacgggtacaaataagatgtatatcatctacaatctggtttagagtgagtcaggggaagtttcctagaacaagatttgtctaagctcaacttaacaaataagtaggaaatattcatgtcaaaagaagtgtatgggggaggacagaggaggtcatggctactggtataagccrtcttaatgggagtcctagctagagcaatcaggcaagaaaaagaaataaaaggcatctaaataggaaaagaagcagtcatatatttcttcatggaca

SEQ ID NO: 357113 - DNA, 533 bp, Homo sapiens
agttgtgacaaaattataagataacattcccagacttggaaaggcaatgtctttctttttgttaattagagacaatctgtattttacaatatgtaacaatttacaaggcaagggtgtgttttctgctgacataaaatgaatgcatttccagacttctrttcaacagggaaagtggctaaggtgataatttctcatttctctaggtacaacttttataatctccaggctctccatcattttctttttgaaattaaactgcatatatacaccatgtgcatcaaagctcaggctagagcaatatatattttttcatttggcacagatcttaaaatacctgtttatttacacatatagctgagtgtaaatatgaaataataaaatgtcacagagttctctctgtgcagttatattcctcttcataatactcatgcccgtattttaaaccttatgaaatgaatattatattttgtgaatttaacagatgttgaatgtgttgctgttacctcatttacatatacagactagaatgtttt

SEQ ID NO: 357114 - DNA, 511 bp, Homo sapiens
agaataagcacccaatatatctcagaacatgacatgctttctcaattctttaggatttgacattgctgcagtggccaaagtaatttcttttttcatgtaaaatttacctgggggaagggactgaacaatgtatctttggttgatgtagaaagattgaagagataggacaytatttatttttttaaccaacaaaatccagattgaaattacccctgtcatctttgccattacagtgatagatatttgccttatgcataaatacctgaaagagtgaagtgtagagtatcagaaaatttattgttgtacataatttatcaagaattttcaaaatccttttaaaaaccagagtttcttaatctggggttccaccgactggctttctggggatccataaaacccctgaaattttatatagcattctctgtttacattcattttctagagagaagtttcatagctttaatgagattcttgctgtggtctttgatctgtagatcaaaggcaaaattct

SEQ ID NO: 357115 - DNA, 532 bp, Homo sapiens
atagactagcaaaagtctgataataaaagtgcatacccattaaaagttaaatgacatctgatgttaaaattttattagtacagaatgtgacacaaaatagcacttatttctccatgagctttgcagtaagccctgatcaaccttcaaaggaaycctcctgagtttacatgagttggaaaatatgttttcctggctcgttaaagtggaaccaatctcctccgtgtggtagagagaggcagtacatgattccctaagtatttaccctgaggttgaaatagcattcctacaatttacttcgttcctcttaacttatacctctcagaagctcagtggaagcattggaaaaggttactaccttacttctaattctgcgattttgttccaagaactggaagatccattctggactgaatcctatgaggtacacaaaggaaaatgatctcatcttctcactgtggagacatccattctccaactctttggggataatctgatagaatgcattccttaggttgttctggtgaaggagaat

SEQ ID NO: 357116 - DNA, 532 bp, Homo sapiens
atagactagcaaaagtctgataataaaagtgcatacccattaaaagttaaatgacatctgatgttaaaattttattagtacagaatgtgacacaaaatagcacttatttctccatgagctttgcagtaagccctgatcaaccttcaaaggaatcctcctgagtttacatgagttggaaaatrtgttttcctggctcgttaaagtggaaccaatctcctccgtgtggtagagagaggcagtacatgattccctaagtatttaccctgaggttgaaatagcattcctacaatttacttcgttcctcttaacttatacctctcagaagctcagtggaagcattggaaaaggttactaccttacttctaattctgcgattttgttccaagaactggaagatccattctggactgaatcctatgaggtacacaaaggaaaatgatctcatcttctcactgtggagacatccattctccaactctttggggataatctgatagaatgcattccttaggttgttctggtgaaggagaat

SEQ ID NO: 357117 - DNA, 551 bp, Homo sapiens
ctaaagctttcaaggtgttaycagaggcattcatggccccaagtgggctaacttctttctcatgggctgatccagttaacactaaccagtgtttttcaaagacgactgttgagttttttaaagatgttccaggctccaatatgtttaggaaacactgttaaacataactcttcttttggtaattagtatacttaaggcttttatagggacactgctgtgaagactctggtacatacaggttgagtacttcttatccaaaatgcttgccaccaaaagtgtttcagattttggatttttttcagattttgggttttttcagatgttgggtatttgcattataccagttgagcatctcaaatctgaaaattcaaaagtctccaatgagtatttcctttgagcatcatattaattagcacacaaaaatttcatattttggagcattttgatttttggatttttggattggggaggtcagcctgtgttattttagttatcttagtgtccacaaactaatttgaaaaaggaattagaatttcctttcctcaactgtt

SEQ ID NO: 357118 - DNA, 551 bp, Homo sapiens
ctaaagctttcaaggtgttatcagaggcattcatggccccaagtgggctaacttctttctcatgggctgatccrgttaacactaaccagtgtttttcaaagacgactgttgagttttttaaagatgttccaggctccaatatgtttaggaaacactgttaaacataactcttcttttggtaattagtatacttaaggcttttatagggacactgctgtgaagactctggtacatacaggttgagtacttcttatccaaaatgcttgccaccaaaagtgtttcagattttggatttttttcagattttgggttttttcagatgttgggtatttgcattataccagttgagcatctcaaatctgaaaattcaaaagtctccaatgagtatttcctttgagcatcatattaattagcacacaaaaatttcatattttggagcattttgatttttggatttttggattggggaggtcagcctgtgttattttagttatcttagtgtccacaaactaatttgaaaaaggaattagaatttcctttcctcaactgtt

SEQ ID NO: 357119 - DNA, 551 bp, Homo sapiens
ctaaagctttcaaggtgttatcagaggcattcatggccccaagtgggctaacttctttctcatgggctgatccagttaacactaaccagtgtttttcaaagamgactgttgagttttttaaagatgttccaggctccaatatgtttaggaaacactgttaaacataactcttcttttggtaattagtatacttaaggcttttatagggacactgctgtgaagactctggtacatacaggttgagtacttcttatccaaaatgcttgccaccaaaagtgtttcagattttggatttttttcagattttgggttttttcagatgttgggtatttgcattataccagttgagcatctcaaatctgaaaattcaaaagtctccaatgagtatttcctttgagcatcatattaattagcacacaaaaatttcatattttggagcattttgatttttggatttttggattggggaggtcagcctgtgttattttagttatcttagtgtccacaaactaatttgaaaaaggaattagaatttcctttcctcaactgtt

SEQ ID NO: 357120 - DNA, 443 bp, Homo sapiens
tgggggactgttgggaaggcatgatcagttttgaaatgtaaaaatgacatgagattttggagggrccagggataaaatgataaaatgatatggtttggttgtatccccacccaaataacatcttgaattgtaactcccacaattcccacgtgacatgggaggaagctggtggggggtaattgaatcataggagtgggtctttctcgtgctgttctcatgatagtgaataagcctcgcaagatctgatggttttaaaaatgggagtttccctgcacacgcgctctctttgcctactgccaaccatgtaagacgtgacttgcttctccttgccttccatgatgactgtgagacctccccagccacgtggaactgtaagtccactaaacctctttttcttcctagtctcggttatgtctttattagcagcatgaaaacaggctaat

SEQ ID NO: 357121 - DNA, 631 bp, Homo sapiens
tggggggtaattgaatcataggagtgggtctttctcgtgctgttctcatgatagtgaataagcctcgcaagatctgatggttttaaaaatgggagtttccctgcacacgcgctctctttgcctactgccaaccatgtaagacgtgacttgcttctccttgccttccatgatgactgtgagacctccccagccacgtggaactgtaagtccactaaacctctttttcttccyagtctcggttatgtctttattagcagcatgaaaacaggctaatatggcacgtatatagtttacacataaataaatacagagaaggtgcatgcatataatttattttgtggatgcaggtttggagatagctactgtagaaaatcattcttaagaccaatgagtatcttactttgggttccctggaagcagggcctgagatgggaatttttgttcaagtgacttactgagagagattgctctcagaagaagggatgtgagaagcagggtggagcatggaaaaaaagccaagcaaaaatatggggtcaaatggagtctagcaagagtctgctccctcaggaaccactggaaacagattccaccagaatagtccccatcttgagaaaaggggaaggtgttttgt

SEQ ID NO: 357122 - DNA, 631 bp, Homo sapiens
tggggggtaattgaatcataggagtgggtctttctcgtgctgttctcatgatagtgaataagcctcgcaagatctgatggttttaaaaatgggagtttccctgcacacgcgctctctttgcctactgccaaccatgtaagacgtgacttgcttctccttgccttccatgatgactgtgagacctccccagccacgtggaactgtaagtccactaaacctctttttcttcctagtctcggttatgtctttattagcagcatgaaaacaggctaatatggcacgtatatagtttacacataaataaatacagagaagrtgcatgcatataatttattttgtggatgcaggtttggagatagctactgtagaaaatcattcttaagaccaatgagtatcttactttgggttccctggaagcagggcctgagatgggaatttttgttcaagtgacttactgagagagattgctctcagaagaagggatgtgagaagcagggtggagcatggaaaaaaagccaagcaaaaatatggggtcaaatggagtctagcaagagtctgctccctcaggaaccactggaaacagattccaccagaatagtccccatcttgagaaaaggggaaggtgttttgt

SEQ ID NO: 357123 - DNA, 631 bp, Homo sapiens
tggggggtaattgaatcataggagtgggtctttctcgtgctgttctcatgatagtgaataagcctcgcaagatctgatggttttaaaaatgggagtttccctgcacacgcgctctctttgcctactgccaaccatgtaagacgtgacttgcttctccttgccttccatgatgactgtgagacctccccagccacgtggaactgtaagtccactaaacctctttttcttcctagtctcggttatgtctttattagcagcatgaaaacaggctaatatggcacgtatatagtttacacataaataaatacagagaaggtgcatgcatataatttattttgtggatgcaggtttggagatagctactgtagaaaatcattcttaagaccaatgagtatcttactttgggttccctggaagcagggcctgagatgggaatttttgttcaagtgacttactgagagagattgctctcagaagaagggatgtgagaagcaggrtggagcatggaaaaaaagccaagcaaaaatatggggtcaaatggagtctagcaagagtctgctccctcaggaaccactggaaacagattccaccagaatagtccccatcttgagaaaaggggaaggtgttttgt

SEQ ID NO: 357124 - DNA, 631 bp, Homo sapiens
tggggggtaattgaatcataggagtgggtctttctcgtgctgttctcatgatagtgaataagcctcgcaagatctgatggttttaaaaatgggagtttccctgcacacgcgctctctttgcctactgccaaccatgtaagacgtgacttgcttctccttgccttccatgatgactgtgagacctccccagccacgtggaactgtaagtccactaaacctctttttcttcctagtctcggttatgtctttattagcagcatgaaaacaggctaatatggcacgtatatagtttacacataaataaatacagagaaggtgcatgcatataatttattttgtggatgcaggtttggagatagctactgtagaaaatcattcttaagaccaatgagtatcttactttgggttccctggaagcagggcctgagatgggaatttttgttcaagtgacttactgagagagattgctctcagaagaagggatgtgagaagcagggtggagcatggaraaaaagccaagcaaaaatatggggtcaaatggagtctagcaagagtctgctccctcaggaaccactggaaacagattccaccagaatagtccccatcttgagaaaaggggaaggtgttttgt

SEQ ID NO: 357125 - DNA, 535 bp, Homo sapiens
ttttgctttaatctaatatattatagtccattttcagtacttgaaagataaaatgttatttaaatctggtagtctcacccatgtttaaaaaaacaggaaaaataaaattgctcttaccttattaataataggcctggaaaatcttaagtaaaaaaactgcacactgygtaccaatgtattgggagatggagacatttgatatccatgggagattcacaaatagttgtgtttactgaatatatcaatttgtattagttgaagttctccaaagaaacagaaccaactaaaggtaggtaggtaggcaggtaggtaggtagatgggtagatatagtataaggaattgactcatgcaattagggaggctggcaaatccataatctgcagagatgatgtctgagtttgaaggccatcaggccagaaaattcttcccatcaggccagaaaattttaccatcgtagaagataagacatttctcatcccaaaggcttttcataagacctataaaaatatgcaaatatctagtcctaaaaactag

SEQ ID NO: 357126 - DNA, 521 bp, Homo sapiens
ctacagtttggtttataccattcctaggagaagggggagaacactacatcatgggagcaccctatgggacaaaagaatctgaacagcagctcttgaatcccatatcttccctctaacatagtctacccaaatgagaaggaaccagaaaaacaattctggtagtatgacaaaacaaggttctttaatacccccaaaagatcataccagctcaccagcaatggatccaaagcaagatgaaatatctgaattgccagaaaaagaattcagaagattgatatcaagctaatcaaggaggcaccagagaaaggtgaagcccawcttaaagaaattttaaaaaaagattatatagttcatgaaaggaaaattattcagtgaaatagatagcataaataaaaaacaatcacaacttctggaaatcaaggagacacttagataagtgcaaaatacactggaaagtctcaggagtagcattgagcaagaagaaagaacttcagaggtcaaagacaaggcttttgagttaa

SEQ ID NO: 357127 - DNA, 555 bp, Homo sapiens
tgttaattgcattccacagaaaacatgctttcattgagttcaaggggaaaaaatacattcattatgttayagtttacataaggaagaaaggtaagattcccaacccccacctttcgttccccaccactaccacagacaaaacatggttttgcttttaaatctcaagacataacatagggtctaagcctgtctactgctacgatgtaaaactaacatcatttttcccctttgcttcttacagatttttgcatatatgaatgaaacctcttcccgaaaggaaaaatgggacctccaagctcttaggtttttatcaattaattcaataattgacccttgggtctttgccatccttaggcctcctgttctgagactaatgcgttcagtcctctgttgtcggatttcattaagaacacaagatgcaacacaaacttcctgttctacacagtcagatgccagtaaacaggctgacctttgaggtcagtagtttaaaagttcttagttatatagcatctggaagatcattttgaaattgttccttggagaaatgaaaacagt

SEQ ID NO: 357128 - DNA, 595 bp, Homo sapiens
agtagagataaagcggggttagtacccagaacaattcatgacacatatattaggttattgatacactggagctactaatattatcattattatttatattgttaaaagattctattctagatgacaagaaaagtttatttctctccactcccaatgacaccaagacattgtgcatggtgttaatgttaattgcattccacagaaaacatgctttcattgagttcaaggggaaaaaatacattcattatgttacagtttacataaggaagaaaggtaagattcccaacccccacctttsgttccccaccactaccacagacaaaacatggttttgcttttaaatctcaagacataacatagggtctaagcctgtctactgctacgatgtaaaactaacatcatttttcccctttgcttcttacagatttttgcatatatgaatgaaacctcttcccgaaaggaaaaatgggacctccaagctcttaggtttttatcaattaattcaataattgacccttgggtctttgccatccttaggcctcctgttctgagactaatgcgttcagtcctctgttgtcggatttcattaagaaca

SEQ ID NO: 357129 - DNA, 560 bp, Homo sapiens
tatatccaaaaccaattagccataccttccccaaccaccagagcttcctgtttctctagccaaactgcctttcactcggcttcaaacctcagtcactttttccttcttctccaaaagtcctctttaccttccacccttggtccagccaaacattcctccctccatgcctttttttccatccatgctttcttctctagcgctgccatcttctctcttctctatgctcatgcacagagcaggtgtggtgacctcttgacctctcctcatctccccacctcaaatgcttccaacccctatatcctattacttgtaatgcaaatttrgaatacggctcaactgatgttttggccattctacaatcctaccttgaacttcctgtctctatgctttggcaaatcctcttctcttgtatctttctctctatgtaagtaccaccttctccttaagacatcacagtcaggttcctaatgaggactttatttcaaatgacacttaacccactctcttttgtattactgtttgtattcatgtctaatctctcccacaggattaaaggcttt

SEQ ID NO: 357130 - DNA, 634 bp, Homo sapiens
tagattaatatattgtggtaaattcatacggtggaattcgtacagtagaacactacagcaaagagaataaacaaaatataactctgaacaacacggacggatttcacaagcatactgctgagtgaaagaaaacaagtacatactgattccatttatataaagttcaaaagtggacaaaattcatgtattagaactcaaggtggtttcctcttgtgggtgaagtcagtagctaaaaaagggattttggaggggtttgggattctgtgttttttgttttttttttttttaatctggatattagtaayttaggtgtattgctttgtgaaaattcatttcactgtctacttataattcgtatatttctctgtatgcatgttatacttcagtaaaattttgaaacttttataaagagacattgaaaaggacataaataaattgaaaagtatacaaaattaatcaatagattcagtgcaattccagtgaaaatcccagcaggttttggtggaactaaagcactaagattaaaagggcccccttcaaagagagctaggtggaagcattaatgtacctaagacaacaggccaatggaatagaaacaaacatacaaatatggaaacttcatatgtgacagata

SEQ ID NO: 357131 - DNA, 579 bp, Homo sapiens
gtttaagttactgtttcatcatcaagttaaataaaagaacagaatttacttagcctgatatattaaagactgaattgtgataaaagaagatctagactttattctttgcccctagtagtcagaatgaaaagggagaaagaaaccatagtcgggattccctgcagcatgccagccctaagtttaggtgtttcgatatgagatggaccaagctctctgctctgagctgaattgttcctaaatggttcagtgtggccctggtcatcttttccaagaaagaactgaaaaattctggtgctaaattgtggccttgaatctccaaaaatctgatcgggatctgagtttgtttagaaggtataagatgactctagaagacctgcatcacaaagtgggttggacccatgacaacccagagcaagacygaaactctagaaaccactccaactccaaatcatgatgcttgcagaggtctcgaaccctgaggagggagggcaaaactgattcacatcactacacgctcatgtaactcagttacactttggcatctctgtctcctcagcatcagtgcactttgagagaggg

SEQ ID NO: 357132 - DNA, 556 bp, Homo sapiens
atatcctataaccctgcaatcccactcctagatgtatgccttagagatactcgtacacatgtccaacacaagacataataagaacagttaaaacagcattgtttatttttcttttctttttttgccccttgaatcataaaacagcattatttctagtaggcaaatctagaaataccccaaatgtccattgacagcatgcgatatattcataccatggaatactatttggccatgaaaatataggaactcagctacacgtacaaaaagtatgaatctcacaaacatactatatggtgaatatcatccagatctccttttccaagccattgcccccagcccctgtgggttatggtttctaatggctcagagctggccccttttctggaaaattgcccttggctcaaagggtaccmccgggaacacgtgggccaaaaacttagtaacaggctttcacaagtgtcttggtgggaccaacagtgtggtgctattcaagctccagagcccccccttgagatcaggcagagctgagacctcatccttgccttgattccgtccc

SEQ ID NO: 357133 - DNA, 592 bp, Homo sapiens
catatattatgatgcacacatggggtaagataaagaaaagcaaaagcatgatttcttaaaagtcggaacagggtttatctcggtgagggggagggactgtgatcagggaaggcacacaggaggcttctggtactggcagtattccgtttcttgacctgcacaatgtctacatggatatttactttataattactatttaactgcatatgcatgttrtacacacaatttagtatgtataatgcatacaaaaagaagaaaaatttccatgtaatcagagagactttttggttttaacttaaataaaaatgtatttcctaatcgaagaaaataaactgttaatttctgctttcttatatttattgagatttttcttgtagcctagtatataatcagagcttataaatatttcttgtatcatatttgtcaacaaaatatgctatggattcatatataatgggatgcccattaatttaattataattcaatgaattatattagttatctatgactgctgaaaaaaatcaccccaaaatgtagcagcatgaaacaacattttctcacctcacgatttctgtgggtgaggaatctgggt

SEQ ID NO: 357134 - DNA, 534 bp, Homo sapiens
ggcaggtatcttccactcaagcctcttgttgaacctgtttgagctgctttgaaggatcattccttgtctttcttgagttgcctttagcatcaccaaagaattgtaggtctgtatcacagcctatgctgaaacacagtccagcataaacatattctgcttattttataaaaatccgtctgagttttgcgtgatatagaaacaaaaatatgaatatatttaaaccaatgtctttttgtctatttgatctaccttgattgatggtagggcatgaaaatcatccacgacartagtgacattttgatttctcatgtttctaatgctttttcttttgtactttcattgccatgttatttggtcaaagtaactccatgctgtaaattcactattgattgtatcttatagccatatattgactttcattttaaaaacaatttcataaatagattcttatacaaagaagaaacatatatacagagcacccaaattaccagtaaggtggaccctagcccttcttttctgcattgggaaacagaa

SEQ ID NO: 357135 - DNA, 609 bp, Homo sapiens
acttgtgtatgcttcacgaagttcttgtgctgtgtttttcagctccatcaggtcatttatgttcttctctaaactggctattctagctagcaattcctctaaccttttatcaaggttcttagcktccttgcattggattagaacatgcccctttagctcggaggggtttgttattacccaccttctgaagcctactgtcaattcatcaaagtcattctccatccattttgttcccttgctagcgaggggttgtgatcctttggaggagaagagggattctggtttttggaattttcagcctttttgtgctggtttttcctcatctttgtggattaatctacctttggtctttgatgttggtgaccttcagatggggtttctgtgtggatatccttttagttgtattgatgctaccctttctgtttgttagttttccttctaacaatcaggcctctctgctgcaggtctgctggagtttgctggaggtccactccagaccctgtttgcttgggtatcactagcagaggctgtagaacagcaaagattgctgcctgttcctttctctggaagcttcatcccagaggggcacccactggatgccagtcgaag

SEQ ID NO: 357136 - DNA, 609 bp, Homo sapiens
acttgtgtatgcttcacgaagttcttgtgctgtgtttttcagctccatcaggtcatttatgttcttctctaaactggctattctagctagcaattcctctaaccttttatcaaggttcttagcgtccttgcattggattagaacatgcccctttagctyggaggggtttgttattacccaccttctgaagcctactgtcaattcatcaaagtcattctccatccattttgttcccttgctagcgaggggttgtgatcctttggaggagaagagggattctggtttttggaattttcagcctttttgtgctggtttttcctcatctttgtggattaatctacctttggtctttgatgttggtgaccttcagatggggtttctgtgtggatatccttttagttgtattgatgctaccctttctgtttgttagttttccttctaacaatcaggcctctctgctgcaggtctgctggagtttgctggaggtccactccagaccctgtttgcttgggtatcactagcagaggctgtagaacagcaaagattgctgcctgttcctttctctggaagcttcatcccagaggggcacccactggatgccagtcgaag

SEQ ID NO: 357137 - DNA, 609 bp, Homo sapiens
acttgtgtatgcttcacgaagttcttgtgctgtgtttttcagctccatcaggtcatttatgttcttctctaaactggctattctagctagcaattcctctaaccttttatcaaggttcttagcgtccttgcattggattagaacatgcccctttagctcggaggggtttgttattacccaccttctgaagcctactgtcaattcatcaaagtcattctccatccattttgttcccttgctagcgaggggttgtgatcctttggaggagaagagggattctggtttttggaattttcagcctttttgtgctggtttttcctcatctttgtggattaatctrcctttggtctttgatgttggtgaccttcagatggggtttctgtgtggatatccttttagttgtattgatgctaccctttctgtttgttagttttccttctaacaatcaggcctctctgctgcaggtctgctggagtttgctggaggtccactccagaccctgtttgcttgggtatcactagcagaggctgtagaacagcaaagattgctgcctgttcctttctctggaagcttcatcccagaggggcacccactggatgccagtcgaag

SEQ ID NO: 357138 - DNA, 609 bp, Homo sapiens
acttgtgtatgcttcacgaagttcttgtgctgtgtttttcagctccatcaggtcatttatgttcttctctaaactggctattctagctagcaattcctctaaccttttatcaaggttcttagcgtccttgcattggattagaacatgcccctttagctcggaggggtttgttattacccaccttctgaagcctactgtcaattcatcaaagtcattctccatccattttgttcccttgctagcgaggggttgtgatcctttggaggagaagagggattctggtttttggaattttcagcctttttgtgctggtttttcctcatctttgtggattaatctacctttggtctttgatgttggtgacmttcagatggggtttctgtgtggatatccttttagttgtattgatgctaccctttctgtttgttagttttccttctaacaatcaggcctctctgctgcaggtctgctggagtttgctggaggtccactccagaccctgtttgcttgggtatcactagcagaggctgtagaacagcaaagattgctgcctgttcctttctctggaagcttcatcccagaggggcacccactggatgccagtcgaag

SEQ ID NO: 357139 - DNA, 634 bp, Homo sapiens
ttttacatcatttatggtgtcttttaatgtgtaggagtattacattttgacgtatgcagtttatcacctgtgcttttttattgtgttaaaatatgtatagcataaaatttaccattggtgatatttagcggtgcaaccatcatcactcaaacttctcatcactcaaaaagggaacccatatccattaagcagttactccccattttcctcccacctctgatcctggaagccactaagctgttagcgctataaatttgctgactcatgatatttcgtataaatggatccatacactatatggtcatttttgcctggcttctttcgtttagtataatgttttcaaggttcatccatattgtagtgtgtatcagtacttcattcctttttatggctgaataatattgrggtgtatgtgtatgtatataatatgcataatatgtatatatagataatatttacacataatatattatgcatatatgtaatatatatgtagcacattttatttatccgttcatcagttaatgaacatttcagttgtttccacctttcatagtagtctgataaacgttggttaaaaagtatctgtttgagtccctgttcaattctggggggtatggaattgctgggtcat

SEQ ID NO: 357140 - DNA, 634 bp, Homo sapiens
ttttacatcatttatggtgtcttttaatgtgtaggagtattacattttgacgtatgcagtttatcacctgtgcttttttattgtgttaaaatatgtatagcataaaatttaccattggtgatatttagcggtgcaaccatcatcactcaaacttctcatcactcaaaaagggaacccatatccattaagcagttactccccattttcctcccacctctgatcctggaagccactaagctgttagcgctataaatttgctgactcatgatatttcgtataaatggatccatacactatatggtcatttttgcctggcttctttcgtttagtataatgttttcaaggttcatccatattgtagtgtgtatcagtacttcattcctttttatggctgaataatattgaggtgtatgtgtatgtatataatatgcataatatgtayatatagataatatttacacataatatattatgcatatatgtaatatatatgtagcacattttatttatccgttcatcagttaatgaacatttcagttgtttccacctttcatagtagtctgataaacgttggttaaaaagtatctgtttgagtccctgttcaattctggggggtatggaattgctgggtcat

SEQ ID NO: 357141 - DNA, 581 bp, Homo sapiens
tcctgcaaaatcggaagaatgatgcttacctcatataactactgtgagaattacgtgtgatcatgcttatcatgcacttagtgcctaataactcctaataagcattattgtaaaatgaatcatcagaccactttgtccctttcctgatcacatgaaaatataaaatttaaagtacccactaagcataaacagctgccttcctctcccctatatcccatctaatccacaggacaagtaagaattacagttgctcttctcttgttacacttggtttctatctcatcttcaagtcacaggaatgtagaagtagaaagtgttctgataatactgcatgtcttcccacccactgccttgygttcatgaagactgagtagatggactaggccaacatagcaggcccttgcagccgccttgctaccaccacgctttagtctccctgctacttttgcttggcaggactaagcatgaggagggcacctggtgttgttcagagtttcctgatttcctgactttgctcctgctgaccctgctatcatgtttgacccatcgatattgttggtgaatgcctgggccagttcctc

SEQ ID NO: 357142 - DNA, 525 bp, Homo sapiens
agttcttattacgatgagaaaactaattaatgtatatacagtttgatagaaaaatagtccttgcattataaaagatgggaggaaggtatgattctaggatttctccagaagatataagacttgctttactagatagtctaagataaggagagtatacgctaacaaaaaagaaacttataatgcaaattatttgtgctagtaaattataatactgaatatggtcattaactgattaacaaaattattataaataaataaagcaatgtaattatataaagcaaaataccctacagakaaatgtgtattagttattccataaggtgatattgtccatcaacaatcctgctgaatttctccatcatctctaacttcaaagcagtttaaagatatattctgcacctcaggaggccagagtcatatttagataaaaaggcaggaacacaggaattcccttcctggtataaatgttagagaaacgcttgcacatgttcacctacagtagcatacaaggatgtttactgcccc

SEQ ID NO: 357143 - DNA, 576 bp, Homo sapiens
ctgaaacataaactagcaagaaaaaaatccaacaacaaaaaaatagcaacagactcccagtaattagaataatttctagatttctgctttttgtagaaaaactacagtttgagagtaatactgtgaggaagacagcagaagtcaaagatttgtgagtggtcattttttcagatgggttctcttttctcttttttgttggtgtcccatccatatcccctcaacattcacctcatcggaaactcccagcccttgtggctctccactttatggctttcttcctagtcagggagttagccacactacaagtcaagtcacaagtgtcagrgttcatgaccctgagtaatcctcagtccaatgtaagatgagtagttggtagataaatactctaacttcctcactcctcggttggtataactttgaggccggttctacactggatgccagggttccccagggggattgagctctgcctgcccacgtagtaaccccataacacaccgtttaaaggctgccttcccctcccatcttacttctccagttccccattggtatttcctgggatcatttccctcccca

SEQ ID NO: 357144 - DNA, 601 bp, Homo sapiens
tgttggtgggcacctgtaatcccagctacttggaaggctgaggggaaggattgcttgaacctaggaggcagaggttgtagtaagctgagatcacaccactgcatttcagcctgggtgacagagtgagtctctgtctcaaaataaatacatacatacatacacacatacatacatacatacatgcataaaaatattctgaggcatttctcccttccccagatgttgcaggaagtcagggaccccaaatggaaggactggytggagccgcggcagaggaatataaattgtgaagatttcatggacatttatccgttcccaaataatactcttataatttcttacgcctgtcttactttaatctcttaatcctgttatcttcgtaagctgaggatgtacgtcacctcaggaccactatgatatttgtgttaactgtacaaattgattgtaaaacatatgtgtttgaacaatatgaaatcagtgcaccttgaaaaagaacagaataacagcgattttcagggaacaagggaagaaaaccacaaggtctgactggctgtggggtcgggcaaaatagagccgtatttttcttcttgcagagagccta

SEQ ID NO: 357145 - DNA, 601 bp, Homo sapiens
tgttggtgggcacctgtaatcccagctacttggaaggctgaggggaaggattgcttgaacctaggaggcagaggttgtagtaagctgagatcacaccactgcatttcagcctgggtgacagagtgagtctctgtctcaaaataaatacatacatacatacacacatacatacatacatacatgcataaaaatattctgaggcatttctcccttccccagatgttgcaggaagtcagggaccccaaatggaaggactggttggagccgcggcagaggaatataaattgtgaagatttcatggacatttatccgttcccaaataatactcwtataatttcttacgcctgtcttactttaatctcttaatcctgttatcttcgtaagctgaggatgtacgtcacctcaggaccactatgatatttgtgttaactgtacaaattgattgtaaaacatatgtgtttgaacaatatgaaatcagtgcaccttgaaaaagaacagaataacagcgattttcagggaacaagggaagaaaaccacaaggtctgactggctgtggggtcgggcaaaatagagccgtatttttcttcttgcagagagccta

SEQ ID NO: 357146 - DNA, 601 bp, Homo sapiens
tgttggtgggcacctgtaatcccagctacttggaaggctgaggggaaggattgcttgaacctaggaggcagaggttgtagtaagctgagatcacaccactgcatttcagcctgggtgacagagtgagtctctgtctcaaaataaatacatacatacatacacacatacatacatacatacatgcataaaaatattctgaggcatttctcccttccccagatgttgcaggaagtcagggaccccaaatggaaggactggttggagccgcggcagaggaatataaattgtgaagatttcatggacatttatccgttcccaaataatactcttataatttcttacgcctgtcttactttaatctcttaatcctgttatcttcrtaagctgaggatgtacgtcacctcaggaccactatgatatttgtgttaactgtacaaattgattgtaaaacatatgtgtttgaacaatatgaaatcagtgcaccttgaaaaagaacagaataacagcgattttcagggaacaagggaagaaaaccacaaggtctgactggctgtggggtcgggcaaaatagagccgtatttttcttcttgcagagagccta

SEQ ID NO: 357147 - DNA, 606 bp, Homo sapiens
tgccttgtgatctttgttggactcttatcaggagtttctgattttgcccttgtcctgtttcctcagaagcatgtgatctttgttctcctttttccyctttgaagcatgtgatctttgtgacctactccctgcttacaccccctccccttttgaaatccttaataaaaacgtgctgattttgcagctcaggtgggcatcatggtcctacagatatgtgatgtcacccccagcggcccagctgtataattcctctcttcgtactctttctctttctcagccggccaacacttatggaaaatagaaagaacctaagttgaaatattgggggtgagttcccccgatacccagagactccaacttaattagtctaggctgagccatgggcatcaaggtttgcaaagtgctccaagtaattttaatatgcagccagggtgtgagacatccctttagaaccttatctaaaacctggaatagtttaaaattattcatttatcacacttaaaaacaaaaggcccacttaggtcaatcaaacaaatgactttgagctttcagaattcatttcctgaccattaatatacaatctgattttcccttgaaatggaatcc

SEQ ID NO: 357148 - DNA, 606 bp, Homo sapiens
tgccttgtgatctttgttggactcttatcaggagtttctgattttgcccttgtcctgtttcctcagaagcatgtgatctttgttctcctttttcccctttgaagcatgtgatctttgtgacctactccctgcttacaccccctccccttttgaaatccttaataaaaacgtgctgattttgcagctcaggtgggcatcatggtcctacagatatgtgatgtcacccccagcggcccagctgtataattcctctcttcgtactctttctctttctcagccggccaacacttatggaaaatagaaagaacctaagttgaaatattgggggtgagttccccygatacccagagactccaacttaattagtctaggctgagccatgggcatcaaggtttgcaaagtgctccaagtaattttaatatgcagccagggtgtgagacatccctttagaaccttatctaaaacctggaatagtttaaaattattcatttatcacacttaaaaacaaaaggcccacttaggtcaatcaaacaaatgactttgagctttcagaattcatttcctgaccattaatatacaatctgattttcccttgaaatggaatcc

SEQ ID NO: 357149 - DNA, 511 bp, Homo sapiens
tgtgtgttaggcatggtgccaagcaatttataaggcatattttgtttaatatttacataaacctacgaagtattattattcctatgttagaaggaaatgaaggtttagaagatcagttactttgcataraattacagtctgggtaagtagagaaaatgtggagtcaaactgaatccatgggacaccaaacttggcttttagccactagacactctgctgccatctatataaaaagcctgtaatgtaaagcttagcatgaaattcacaaatgtctgaccacattatgggtttggaggagatttctcttcaaagatttctcttcaaaagtttatggatatcatggttcctgtttatggactgaaaaaccatggctatttctaagtagctacttagctttctctgggacttgtttttcctccacacttttccacagctaaattgcaagcatagattgttatatgtttacctgccttctgaaagacactaaggtgtcctgactatagactttgcc

SEQ ID NO: 357150 - DNA, 511 bp, Homo sapiens
tgtgtgttaggcatggtgccaagcaatttataaggcatattttgtttaatatttacataaacctacgaagtattattattcctatgttagaaggaaatgaaggtttagaagatcagttactttgcatagaattacagtctgggtaagtagagaaaatgtggagtcaaactgaatccatgggacaccaaacttggcttttakccactagacactctgctgccatctatataaaaagcctgtaatgtaaagcttagcatgaaattcacaaatgtctgaccacattatgggtttggaggagatttctcttcaaagatttctcttcaaaagtttatggatatcatggttcctgtttatggactgaaaaaccatggctatttctaagtagctacttagctttctctgggacttgtttttcctccacacttttccacagctaaattgcaagcatagattgttatatgtttacctgccttctgaaagacactaaggtgtcctgactatagactttgcc

SEQ ID NO: 357151 - DNA, 563 bp, Homo sapiens
aatcttagattaatcttctcatctgttacccctgaaatgagtactttctcttggatagtgttgtggttaggttaattggctcagtgcttaaattgcctagctttgagtcccagttccaccacccattagctgtgggacacagggtgagtcatttgcctcgtctgtacgatagaaatcatcatactatttcctacggtgctgtgaagataatgggttaatgcaaaagttagcattcaaaagtctgattttgtggtcgataataatgacatatgaggttgaattggacttcacttgaagggactgggcctttaaaaaaaactacagttttacttccaaaattttggaagccctagactggcatctttggaggaagcagtaattccaacctgcccaaaccttgggacaatgcctgacattagtagttctaggtttctgaattyccccatttccctcctctgtccactactggagtgctgtggaatagactggtgtcccactgggtacagctgtcctccttgttgccagtggtttggtccacttttgagggacaaagaaagcagctt

SEQ ID NO: 357152 - DNA, 565 bp, Homo sapiens
tccagggtctgggtcacatgcagggttgggagggttggcagtggttcccccttggaaggaaataggaagtacagcagcagctccttctcttgggggtcttctgcagcaggatggcattggttaccttggtggtgagatatgccagtgtcctctggagaacagaggactgtggtgacacccaccatgtgactgagactggcagcccccacccttcttctttgttcttaggcatctccagatgtcttggatrggctgatctccccagtgatcctttctgtggggttatgcttttccgttttgctctactgcattctgcagattcttaattggacccttaagtcctctcaaagctattttcatttatggatatctgcctatttgttagtttttgtggggagatagaggttggcatctcctactccatcatctggctgatgtcactctcctgtaccattttgaacataactaactttgtacattaacatttattcaacattgaacacatttattgagcacctactttgtgtcaggcatagtactaagctctgggattactgtggtaatt

SEQ ID NO: 357153 - DNA, 521 bp, Homo sapiens
ctacagtttggtttataccattcctaggagaagggggagaacactacatcatgggagcaccctatgggacaaaagaatctgaayagcagctcttgaatcccatatcttccctctaacatagtctacccaaatgagaaggaaccagaaaaacaattctggtagtatgacaaaacaaggttctttaatacccccaaaagatcataccagctcaccagcaatggatccaaagcaagatgaaatatctgaattgccagaaaaagaattcagaagattgatatcaagctaatcaaggaggcaccagagaaaggtgaagcccatcttaaagaaattttaaaaaaagattatatagttcatgaaaggaaaattattcagtgaaatagatagcataaataaaaaacaatcacaacttctggaaatcaaggagacacttagataagtgcaaaatacactggaaagtctcaggagtagcattgagcaagaagaaagaacttcagaggtcaaagacaaggcttttgagttaa

SEQ ID NO: 357154 - DNA, 541 bp, Homo sapiens
tctaaaagtcatattttcaactcagaagacattagacaattatttgaagtagctctagaaatgccattgcccttactatatttcccttgacttttataaagyaattaaattctctttccccttaccctttcctccatcatcaactccctcatttcaattttccaagaaagactatgtataaaaggcaaaataatagatttataaccaaaattatttagtaaagaaaagggcaacatagaactctaaaagctatgcccaaatggtaaattccattacaaaaaaaaatggatctgctttggcaaatgcagagatttaaatggtgttgggttatgccaagttggtgtgtgcgccacctggaagctgccttcaccagcattgtggccttaagcacaaaagagaaaaaagaagcaaactaaaaagacaactccctcagcagccagattaccctctgcaaatcctaacttctttgtttctcctttctgatcaggtaggctgcccatcagaaaccaaggaagaatggaatgcattgaggacccctgta

SEQ ID NO: 357155 - DNA, 536 bp, Homo sapiens
tttcaccatctgcttcctcctagcagatccaacccaaatccaaaaatgaacaggtgaatttaagccctagagattggtgctttcccagggaaaacagaagactttcatgaactgttagcagtttgaaattctaatttacaggctgaacccagaggactccttctctgaatatgtcttcccaggttgagatgtatgaatatgagacatccaggaaataggctaatttagaaggaatttaagttcttaatgaatgtttcctacagattctataatgactccattctgtttttgccatgcaaagaagtatgcccttttcactgttgttggcatgaactttttaaagattcactcctacacagcacagtgacaattatttttccatggatatctacrgattcagcacctaggagttctgcaatgagtattagaactgcttcattcaagccatatctctcctaagactaaaaatccaaatgcagcaacatcctaaattaggccagagagtatataaacttctaaattgtcacatgcaagtg

SEQ ID NO: 357156 - DNA, 607 bp, Homo sapiens
acatgatctgcttaagatctgatcaagaggtagagaacatcttagataggggttggaaaaaagtcattttctattagttgtctaagacattcagactatcccataaacaatcatcaatcaatcaaccaggaagttttactgaatacaaactctatgagagactgtgtgttctgaataaacaatttataatgcctttattccaccaagcaaaattgggctagacagtacatgaagctgtattgcctagtagagatagcccactgcctctctatatcgtttggtacctatgtaacccttctctatatgaatgggaatggaataagtgaggatacttgctagacaggtattcctgttaactatgtggactagtacagtagtggaacctaatgtcccttccaaagataggaaagtttcgattaaaataaataaatgtagagaaaaaatagtagctgggggtaagaaatttwaaaaatggttatatattaaggcaaaccctattggatattaaattggtaatttcagagatgttcaaagcaagagaaagatattgtcccttagcacaatcataccagatgcccaaaacgatgaacccatgtctgccaagacc

SEQ ID NO: 357157 - DNA, 686 bp, Homo sapiens
gtatgacatcagtttcaacaacagaaccaaactttgggtgggtgacaaagtccacagtgtctttggggtagccacaacaagcaccatctaagtgtgatccttattattaaggtgaactaggacttgagtcattattcctttcactgtttagtccagcatttttatttgtcaaggaaaaaccagtaaccagtattttatgacattacttatgtgaaagtggttgtaactctttgataatgactatgggaatagggctctaatttttctctgggagtatcacaagtcccttgccccaagctctccagataccttgggaaactttactgggcagctcagtatttttaacaccaactccttacattgtaggcacacagagaaaaataaataagatcaaaggtttagttaaataaaatttaaaactatcaagcatcatcccacactacattataacctgtcataaagttttctatatctaattagtaacttacttccaaagaataaartggccttaataaaacaaagagatgatttggggacatccaaaatcaagaaaaatgggcttctaccacaatctcaatctgtttctatcttaataaaagcagaacaagctgatacaaactaaataggagacacttatgagacacataagtgacacctgagtcttgggctaagagtgactaccacaa

SEQ ID NO: 357158 - DNA, 604 bp, Homo sapiens
tttttcatgtactaactcatgtacatatcacaaaaacattttaaagaagttgctattattatctccattttctggctaaggaaatggatagagagagaattaagtaactttctcaagttacatagctagtaagccagagctgggattcaaactggataaaatctagcagctaaagtcttaagtgcaaaaccaacagccatgggctaataatgcaattaatatataatgaaaagaccctttcagaatgaacagaagatggagagatatgactgacttggagcagaagaaagatcctaaggagagagaaggtatagaacagtcagacgttcacattaaaataagtaaactaggggattagagaagagaaaactgaagaaaaggaaaagaatggcaagcccarcaggcttaggaatgagctagctgatgtttatttgaggagccaggaggaaattttacttatgaactatagtgagagggtaaggtggggctaggaaccatccccactccaactttctgattttgtaagcttcagtcacagctcaaagctgttgtgttggtgggaagtctgcaatgaagtagttaactccaatgaatccagttcttc

SEQ ID NO: 357159 - DNA, 551 bp, Homo sapiens
ttcaacatatgaattttagtggtgcaggaatacagttcagcctacaacaagtgattacatcatttaattcttttcctgaattcttgacaaagtacttagttatttgagtctgttccttttgctacattttgtggtcagtattcttcatctaattgtaaaatttgctgtttccctctgtattttttaaatcatattttcatattgattctgtgagaatttcttttatattactcactgaataagttaaattttcctggattatttctttgtataatgtttctgtgtgtgtgtatgtgtgtgtgtgtgtttgagttgtgagtgtgtgtgtggtgtgtctggygtgtgtgtgagtgtaagtgaatatatgtgagtgtagatgagtgtgtgagttgtgtgtgtgtaagtatgagtcagtgtgtgtgaatgtgtgtggcatgtgtaagagagagggagtgtgtgtgtgtgtgtgtgtgtgtgtgtgtgtgtgtgttattcctagcagccttccatgcttctcaaccccaaggctctctcctgctctgctgccacag

SEQ ID NO: 357160 - DNA, 279 bp, Homo sapiens
gcaggtttgtgtgtgacctaacttctatcaagcagatgtctgtccatggtattgcgaatgcagacatgaggtggaatccacacttctgttgcttctgaagcagtgtratggaggcatttattgttttgcaacagtgataacaaggtggttatagagaggctgagttcaggcatccatcttcaggagtgtgttctggaagccaacagttgtggtagcagttttagatctctagatcctggtggaagtggtatggaattagcagttgagacagtggctttg

SEQ ID NO: 357161 - DNA, 520 bp, Homo sapiens
atcctgtgggcagcctttcctgactttctgtttaggttaggtcttcctgaaacacacatccaaggtctctgagcttctacctttatgtactcatctcaatcataattgttttaaatgcataattttcatgcaagattaaaagctctatgacctttttatttacttttctattcccactttctggcatatgtccaatatgtatatatattgactarttgacaataatggacctttgattaatttttgttaaatatcatgttgatggtttcggcccacttagtctatcaagacctttgggatttaaaactgtaccacagagaatatttgtcactatcattaacaaattttgttagcatgccatctatgttttcattcaatggatggttagaatcctgtatcataatactagagagctcctttcaggccaatgtcaacccttcgaattatgtccattcagagaaaattgaattcagtttgctatatgaccattcaactcatatttctttagtttgtctacatg

SEQ ID NO: 357162 - DNA, 566 bp, Homo sapiens
tgaacttttgatggttcagtctttcagataagcattattgatgatactgtgctataataatataagtaagtgcttttgtggtcattcgttatgggtccagcactgttctaagggcctttcaacaaataagttatttacttctatgtttacttaaatataactctwtgtcataggtaccatgattgccttcattttacagggaggaaactgaggcccagagagattgagaagcttgtccaagaccgtaatctagtcagcagagaagctgagattcaaacccatgctgccagagttcacaatctgtgccttcaccaccatattatattctttcctcctgccttacacggtggatgcctctgggctggcaagggctgtttgccttattactgttcattgtgagttcttacatctgtatgttaacatgtctccttaagcttccctgctatcatctactatttctcaacatttttactcttcctgcttttcaatttgctgccattcacaggatttgggctggaaaatcagaataaaacttattagaattgtgtaccatcaccaagtatgaa

SEQ ID NO: 357163 - DNA, 612 bp, Homo sapiens
tctgatgttttcttagctacataatgcccactaaaactttatctttgggattcatactgggaactatctcacgataccaaaaattatcagttaataatagatactctgtctatgtggccctaaagaatattccatagactttccttttctctagtaagctttatattgtggagcctagaaagagaaaagactctaagtttgtatattctgtatcttaaagccagagaagtcaatgcaatcctgggaagggacttttctattaatgttctaaggtttggcatcctcaataaagcgattaatatttcaacattacaagtttctcaaagagccctaagaaaaatttgaagggagcataataatgcttcacagctgttgaaattttatgtgcccagcacaaattaaggagaaattgcttgattattattaggcttagctgatctattaaaatagccagttgaaataaagagagccactcttctgcggtaattatctaagctgattatctgtgttaaccatatctgagtcattatcatttttatayatcatttcaagagatacagcctaaaagcctgaaaattataaggggaaaaacctaattgtagattttcttct

SEQ ID NO: 357164 - DNA, 538 bp, Homo sapiens
ttattataatattttcttaaatcacttgcagtatatattctattcctggcaaacaaccctgagtgtctcatattaattgtgcttagagtgtggttgtttccttaaaatacaccccaagtcacatctaagctgaagcaccaaatgccagttctttagaaattaattttgaaaaaagcagaactatttcccttattatctacctgaaagttttgttacatttgatctaaatcagagcttttactaagamaaaaagaatagtcaccagtcgtaatggttaattttacgtcaacttgactgggctgtggcatgccaaacatttggccaaacattattctggatgtcttcatgagggtgtttctggatgagattaaaatatgagccagtagactgagtaaagaggatgtttctggatgagattaaaatctgagcccgtagactgagtacagcagcttgctctgtccaacgcgagcaggcatcatctaatccgttggatgcctgaatagaataaaaaggctgtgtaagggggaagtttgctcat

SEQ ID NO: 357165 - DNA, 496 bp, Homo sapiens
tgcctttctaacaggacagttgtcgtgagatgatctaattttgtatccaaaaaaatrctttgagcatcctgggaaaggacagtctataaaatatgccattttaatgttttgtgaaaagtttgctacactgcaggttaaggagatacatttttagcatgtgtgccatgtggcagtataaaattaaaatggaaaaggaaagtacaaacataaaaatgacttagcattcttgacattcttgtgcatacttgtagaaaaattatctttcgtttggggagagttgccgggaaatttaatcagtgtttatactactgaaacgcccccttctacctttctgccctgtaaaattttatgacccagttctcaccggaaaggcgttgtgactgtagtaagtgctgagggttgagaggagagattgagagttgttaggggaactgttacacagggttcagagactggaatcggaaggaagacgccactatcctgaaagagcagagca

SEQ ID NO: 357166 - DNA, 496 bp, Homo sapiens
tgcctttctaacaggacagttgtcgtgagatgatctaattttgtatccaaaaaaatactttgagcatcctgggaaaggacagtctataaaatatgccattttaatgttttgtgaaaagtttgctacactgcaggttaaggagatacatttttagcatgtgtgccatgtggcagtataaaattaaaatggaaaaggaaagtacaaacataaaaatgacttagcattcttgacattcttgtgcatacttgtagaaaaattatctttcgtttggggwgagttgccgggaaatttaatcagtgtttatactactgaaacgcccccttctacctttctgccctgtaaaattttatgacccagttctcaccggaaaggcgttgtgactgtagtaagtgctgagggttgagaggagagattgagagttgttaggggaactgttacacagggttcagagactggaatcggaaggaagacgccactatcctgaaagagcagagca

SEQ ID NO: 357167 - DNA, 586 bp, Homo sapiens
tcttgtgcatacttgtagaaaaattatctttcgtttggggagagttgccgggaaatttaatcagtgtttatactactgaaacgcccccttctacctttctgccctgtaaaattttatgacccagttctcaccggaaaggcgttgtgactgtagtaagtgctgagggttgagaggagagattgagagttgttaggggaactgttacacagggttcagagactggaatcggaaggaagacgccactatcctgaaagagcagagcaatgttcgtctggagaaagcagttgagcagcataggataacagatctagcattgcttgtcctctgctctcagattcaggaagaggactccctgagatagcccagagggctaaccaaggtatttttccctcctccattgggtaaaagcactgcctccttctagactttggattggtattaacttctctcttcctgtcagtcatagygcagtagtcttctcttaccatctccaagagactcagatgtaccctctaccctctcagacccttatacatttgtaaatatcccccaagttctgaagcttctcaaagacctgcagctgttg

SEQ ID NO: 357168 - DNA, 558 bp, Homo sapiens
gacttgtattcacataacttgaggccctgtcctccctggagacagtatcttcctgtaatgctctagttttcaactactttctcctctaataaggtatctaaactccagcctaacaatttgtcttcatcggcattattattcactacatgaatgaagggacaaactttytagggtactatcactaatgcacagactgggtttgattttgtttgttttttggcctcatctgacaaccagaacacatgtccaagtaaagacaaaactattctctatgtgatacctgactaaatattaggtcaattatgatgaaaaaaaattagtcaaccacggtttgtgtgtcacataaataaaaataactggttgacaggattttgttgttatttattattttggcttgacattgacacagtgtgagttttagaaatggttactcatttttttctatttatgtctaattttgacaggtttcctggattctccagaacggcatgctctacctccaggtatcctagagcatacccgagccttctgagaagcctaattaaaattgtagttaga

SEQ ID NO: 357169 - DNA, 558 bp, Homo sapiens
gacttgtattcacataacttgaggccctgtcctccctggagacagtatcttcctgtaatgctctagttttcaactactttctcctctaataaggtatctaaactccagcctaacaatttgtcttcatcggcattattattcactacatgaatgaagggacaaactttttagggtactatcactaatgcacagactgggtttgattttgtttgttttttggcctcatctgacaaccagaacacatgtccaagtaaagacaaaactattctctatgtgatacctgactaaatattaggtcaattatgatgaaaaaaaattagtcaaccacggtttgtgtgtcacataaataaaaataactggttgacaggattttgttgttatttattattttggcttgacattgacacagtgtgagttttagaaatggttactcatttttttctatttatgtctaattttgacaggtttcctggattctccagaayggcatgctctacctccaggtatcctagagcatacccgagccttctgagaagcctaattaaaattgtagttaga

SEQ ID NO: 357170 - DNA, 566 bp, Homo sapiens
caatgttctcttatgttttactctgtccaggctgaaatgacaaaatcccatagacttggcaactaataacagaaatttatttttcatggtcctggaggctgaagtccaagatcaaggtgccagcatggtccgtttctggtgagggccttcttctgagctgcagactgctatcatctcattgtattctcacatgacagaaagaggacaagagagctgcctggggtccccctttttttaagggcaagaatttcattcataagggctgtatctaccctgattacacaatgactgccttgagccccccccccgcctaatgccgttccattgtgggttaggatttcagtatatgaaattgggggagacacaaacactcacasgtcattgcatctcatcttcattttctaatgcaagaaacaatacagtttccaatatttctttttcaaatcccttgattccctgcatcaaagacttcacatcaatttgcagaggcaccaaccatcattacctcattgaaagcaagcaccacacttgagagcatgtgtcttgtaggcttttttggaatatta

SEQ ID NO: 357171 - DNA, 530 bp, Homo sapiens
agtattgttaccatcttcactttgtagatgcagaaactgaggcaggatgaagtggtcaccacaagaggtttcaaacacaggactctctggctcccaygcctgtggtcttcaccactcagttctactgcttcctcttcccaagcagggtttctcaccctggctatcactactgacattttgcctggcaaattctttggaacaggaagtcccctatgcattgtaggatacttaacagcatctctgtcttctactcactagataccaataatatcttcccacttgggacaacacaaaatgtctccagacattgccaaatgtcaaatccagaagcaaaagtacccctagttgagaaccactgccatagtaaagttcaattttcatgtattccttattatagtatacattttcaatttaagagtagggcatctattttccagatcataatgtagatagttcccatggttacatcagccacattatatatgatttgtaaaaaagatatatatcagacaaaactttaggagaaaaaa

SEQ ID NO: 357172 - DNA, 530 bp, Homo sapiens
agtattgttaccatcttcactttgtagatgcagaaactgaggcaggatgaagtggtcaccacaagaggtttcaaacacaggactctctggctcccacgcctgtggtcttcaccactcagttctactgcttcctcttcccaagcagggtttctcaccctggctatcactactgayattttgcctggcaaattctttggaacaggaagtcccctatgcattgtaggatacttaacagcatctctgtcttctactcactagataccaataatatcttcccacttgggacaacacaaaatgtctccagacattgccaaatgtcaaatccagaagcaaaagtacccctagttgagaaccactgccatagtaaagttcaattttcatgtattccttattatagtatacattttcaatttaagagtagggcatctattttccagatcataatgtagatagttcccatggttacatcagccacattatatatgatttgtaaaaaagatatatatcagacaaaactttaggagaaaaaa

SEQ ID NO: 357173 - DNA, 591 bp, Homo sapiens
tgactgttactggagcatatttatgtgctgcaaaatgatcaccagaaagagagaaaataaatatacagaagagaaaggagatgcttgcaggatccagctccttcaaggtgaaagtaggtggactgtactccacaagtggcatgttagcttttgatagaaggagcaaattaataatagaaattttagaaagagtgggcccaggtacaagcagattagtgtttatttcactgtggaaactaaagaggtgtttttgcatrggcaataaccacatttatactactatactaattattcatccatttcagcaagaatggggatgttttattccagtgttaagcttagatgtcataacttctttgttggaaactgaattttatggggctgaaagcagtgcttagaacaatgtctgggacatatatgacacttaatatttattgaataagtatacaaattcattttatattgctgaatggaattttcatactgtctaggtgatgtcatatctcctatacaaaactgtcctgattcttagtacttccatgtcagtatgtaatatttgtaacttcaccatatggtgtagtagaaaaggca

SEQ ID NO: 357174 - DNA, 525 bp, Homo sapiens
cccctaagcctacctgcacttcttccagcagagctgatacagaacrtgaattttgtgtgagctaaaaagtgctagttcaagtttcacagtcagatgaatcattaggagcttctttggttttgttgtcatttattttcataacagaaagtctttccttatatatggggttagtactgtaacttttatcaagctccattatatttgtcatttactgtgtatctcatccccttatactgttaattccttgccaggaggatggttttgttcacatgacagcccaagagccacccacacaatttgtgggacacagtaggagctcaaatatttattgaatgaaagaggtgatgaagaaagaataaattgtgcctttgccttaaactcctgaagaatcccagcttctttaataagtttctaagtaaacgcttttcttctcactccaaccctattagtaaccctaaaatagggaacaaaaataaaactcaactgttgatgttattggccagtaatagatctgctatttcttca

SEQ ID NO: 357175 - DNA, 570 bp, Homo sapiens
tgccacatgggcctctgcatacagcagtgcacaacatggcagcttgttttattaaaatcagtgagagagagagagagagagagagtctgctagcaaaaccaaacttacatcagtgatctcatcatctttgctgtattctattatttagaagcaagtcacaagtcccatctgcactcaagggaagaggactacacaggggcatgaatacctgtaggtgagaatcactgcaggtggtctaagacggagaccccagacattagtcaacccagaacctgagggggcttgcagaagggaatagacggccagtcatatttccactttcattactacatccaataaacagaattttcttcagcacagtggacagaaatagggatttattaaatagaactgtttggattcaggggtatggctaactgcttcgaatgccagcttgcctagggtgtcccaaggagtttagagacagaaatactgcacccattatccaagagcaaatagamccaatggaacttcagacccttgacaacattaagggtctttaatctattaagtatgtgtaggactttcaaa

SEQ ID NO: 357176 - DNA, 540 bp, Homo sapiens
ttggtgaatctaaacccctttctcctctgctcccacaaaacccctcagctcacacttcttttgtaatacctcttatagcactttgcaaattatgttgagctcacctcttcaactacttgtctccattacyggaatgtgaatattttagggataatgatccaatctcgttgatctcatgtctaaggcccaagaactcctctcatggttcaaaacatatttattcaattagtaaatacacacataaacttgaagggttacgacttttggaacagaattaagagtcattgctactcgtgagatgaagaggaaaatggttctaaggctagtgtacactcactgggagacagcagggaggctgggggatactcagatcctatgatttatattccttccagacagatagtaccaatttggatcatgactactggcaggctcaggtggaagctgataacgattcattgcccagaagctcctaggtttgttttgcttttattttttttttccaactgtcaaaggtccttctggcttcattcagcacct

SEQ ID NO: 357177 - DNA, 540 bp, Homo sapiens
ttggtgaatctaaacccctttctcctctgctcccacaaaacccctcagctcacacttcttttgtaatacctcttatagcactttgcaaattatgttgagctcacctcttcaactacttgtctccattaccggaatgtgaatattttagggataatgatccaatctcgttgatctcatgtctaaggcccaagaactcctctcatggttcaaaacatatttattcaattagtaaatacacacataaacttgaagggttacgacttttggaacagaattaagagtcattgctactcgtgagatgaagaggaaaatggttctaaggctagtgtacactcactgggagacagcagggaggctgggggatactcagatcctatgatttatattccttccagacagatagtaccaatttggrtcatgactactggcaggctcaggtggaagctgataacgattcattgcccagaagctcctaggtttgttttgcttttattttttttttccaactgtcaaaggtccttctggcttcattcagcacct

SEQ ID NO: 357178 - DNA, 554 bp, Homo sapiens
taaatgttcttcaagccccaatttgayatgaaggaatggtaccctaatgagcaaatgttatggtaaggggttcatcgaggcagttattttagacatgtacctgggcgggttgtgaaccttcagtctaaaactgtttcattaacagcagatgaccctggtcactgacaggtgaagaaacaggcctttcctcaactctgcaagccacaaggcccagcaaagcctcctgcctcttggcaaaataaccatcccaccaagagctgcataagatgctttttaagtcctatgacaagtgcttgggctccctcctacaaccatcttgatactttgcaagaatggtaaacatagacttagggacttccataaacgtttaagtgcatgtgagcgccagggcagcaataactttagaaagcaaatgctgaacagtgttttaaatcttttgctcaatattgtccggattggtgggcatgaagcagtccttcctaagaacaggaagtcacccgatttaatttgcaaagttaacgttaacctcaactaaatcagagttcactggcaga

SEQ ID NO: 357179 - DNA, 625 bp, Homo sapiens
gttatgatttgtgattttctgaaaatcataaaaatgatattgtaaaccaggaatatatttttaaaattctattattgtaaagcaatgttgatttaaataaacataatctatttaagatatatcaaaagattttgattttatttcatttattctccctgaaaattagccagaaattaatagcgataatacaatatacatattgtaagcccaggatccaaatttttaaataatttttcaaaataattcatgcacaaaatttatattttcctaaatggtttataatgaaaaatggcaaatcttgctccatccctttccactaccaattctcactcccaaagaccaaccactttcaaccctcttagctgttcctttcaatgtttacttctatatttattttggcatctgtacagggacagcttcatactttttaaaatgtatttatactgctatttttaacttcttagttttaggaattatctgtcaactttgttttatagtaaataaagatttatctctyttataccaccattatcccacatcccacctacccatctgcctccatactcctaattaacataaatggatgttaatatattaaacaaaatgttatatattattgttcaat

SEQ ID NO: 357180 - DNA, 445 bp, Homo sapiens
taaattcaaaaattaataacaggttttgaggaaaataaaatttctgtaccagttaagggtacagaaattcagaatgctattgtcagggaggattctattttaaagatttcagctgaaacctctcaatgggcaatacttgaatggagctcccaaaatacgaagaatcaagtcgtgccaagacctgtaagaagagcattgtaggcagagacccctgtacagaggagcctgtggctgaagcatgggaagagcagtaggggatgatgttggagagatgggcaggagttgagtaggcagttgactaaggagaattttgactttactctaagtatgacacaaggccatttaggaattataagtaaaatcacatgcctgaaaaagcttactgttggtactacatgaagaataatttgtrgactgagatatggaagcagagaagcagtttgag

SEQ ID NO: 357181 - DNA, 571 bp, Homo sapiens
taacagggtaaattaaagagaaagtttaaagagagaaaagaagaggaacaagaactgagactggaaacacaaccacacataggggtcacagaaaagagggaggtatagcaaaagaaatttaaaagcccatacattcagaagaaaaaatgaagaaaaaagtagagaaagtacgtccagaargagaggtttatgtaggaaaaccacctcctattttggagatgcatactaaagtatttaaagatgctttcaaatgaatctgtacatctgtaactttcaaatgaatcagcaaaaattagaagataaaatacatattgtaaacataaaggaaacacaacaaaatgtgtttgagattattgaatctaggtgcaaaacatatgaggggttcattgtagtgttccttcaacttcttgtatgtttggcattttgcataattaaatgttgggcatgagaaaagatacagctaatggcccatgccaacatattcctgagaaatccagaaggtagggcagatcacagacgcttggaatttggtatcggaaaaggcaggagacaaaaatccagagtgaagaaa

SEQ ID NO: 357182 - DNA, 571 bp, Homo sapiens
taacagggtaaattaaagagaaagtttaaagagagaaaagaagaggaacaagaactgagactggaaacacaaccacacataggggtcacagaaaagagggaggtatagcaaaagaaatttaaaagcccatacattcagaagaaaaaatgaagaaaaaagtagagaaagtacgtccagaagragaggtttatgtaggaaaaccacctcctattttggagatgcatactaaagtatttaaagatgctttcaaatgaatctgtacatctgtaactttcaaatgaatcagcaaaaattagaagataaaatacatattgtaaacataaaggaaacacaacaaaatgtgtttgagattattgaatctaggtgcaaaacatatgaggggttcattgtagtgttccttcaacttcttgtatgtttggcattttgcataattaaatgttgggcatgagaaaagatacagctaatggcccatgccaacatattcctgagaaatccagaaggtagggcagatcacagacgcttggaatttggtatcggaaaaggcaggagacaaaaatccagagtgaagaaa

SEQ ID NO: 357183 - DNA, 558 bp, Homo sapiens
acgtccagaaggagaggtttatgtaggaaaaccacctcctattttggagatgcatactaaagtatttaaagatgctttcaaatgaatctgtacatctgtaactttcaaatgaatcagcaaaaattagaagataaaatacatattgtaaacataaaggaaacacaacaaaatgtgtttgagattattgaatctaggtgcaaaacatatgaggggttcattgtagtgttccttcaacttcttgtatgtttggcattttgcataattaaatgttgggcatgagaaaagatacagctaatggcccakgccaacatattcctgagaaatccagaaggtagggcagatcacagacgcttggaatttggtatcggaaaaggcaggagacaaaaatccagagtgaagaaatttaaagagagaatgagaaaggagaaagatgtgaggagagtttctctaaagaaaggcagagaaattgagcacaggctataataatgtagtgagggccctcactacataaagtggtagagagtgggagggaataggaaacttcaagcttcaaaagaa

SEQ ID NO: 357184 - DNA, 537 bp, Homo sapiens
tattgcagcaccgtccttgaaatgagaagctcacgatcattctttcgaaatttaattccactgttggtgacttaggtgcttctaaattaagcaaataagtggacaaccgtttattttgtttgtctgttagacacaagtaataagtgattaccatatgttaggaaaagacattttaaagtcaacaractctgggatatattgaattcataaaccgataacatttatgtttgacttgtttcataagggaactaataaaaaataactctatcagttgccctctctatagccagtaatgttaaacctttacaacattgtttgaagaatcaattttggaaactagggacctttaccaagctttaattattattgcattttaaaacagaaaaaaattacatggctagataaactatcttaaggataaaagacatttacaccaatttagtcttttgcagtcatttattttagaattctcagtaacatttatcttcaataacttatttgtggtgatattagattccaaaagtatttttagaagaa

SEQ ID NO: 357185 - DNA, 589 bp, Homo sapiens
ctcaatttatatcagaactttaagacatgaagctatacaaaatgaaatatttggatgtcaygtgttacccttatacataaaaaccaagtaatgagttgatttttttaaaaagcatttgccagccaggtttttcaaaacaacaaatatccctgatatcaaaataattctctggaatcagaaatccacagacatttaaactgaaacaacatggcagtccttttcttagacaaagatacccttataatgataagctttaaatgggcatcacctccacacttgtaaagagacatgcttctaaggaccatgacagagcctgtgacagcatctcatcttttcttaattcactgaaaaacatctaacaaacatcttttaaactgagttactccccttacgatttttttattcttccattacaatatccctcagcttatatcatctaagtaatgttaaaattcagttctctttaccttgatttcttaaatattcaaaatgataatcatttacatttaaatatggcaattaccttagtacatcacaaactgccaaggtctatattttcataacatctttggactgggacacaaaagac

SEQ ID NO: 357186 - DNA, 525 bp, Homo sapiens
ggtttgccacctcttttctctccatcagagcatcaccatctttgctggagatggcattttcaagccctcaatttatatcagaactttaagacatgaagctatacaaaatgaaatatttggatgtcatgtgttacccttatacataaaaaccaagtaatgagttgatttttttaaaaagcatttgccagccaggtttttcaaaacaacaaatatccctgatatcaaaataattctctggaatcagaaatccacaracatttaaactgaaacaacatggcagtccttttcttagacaaagatacccttataatgataagctttaaatgggcatcacctccacacttgtaaagagacatgcttctaaggaccatgacagagcctgtgacagcatctcatcttttcttaattcactgaaaaacatctaacaaacatcttttaaactgagttactccccttacgatttttttattcttccattacaatatccctcagcttatatcatctaagtaatgttaaaattcagtt

SEQ ID NO: 357187 - DNA, 546 bp, Homo sapiens
gcttaaataataaacatttatttcttatagttctggaggctggtaagtccaacatcaaggtactggcagttttagtagcttgtgaagacacttttcctggtttaaggatggttgctttcttgctgtgttctcgcatagcagagaaagagggaaagatagcgtgttgcctcctcttcttaaagggcattatctcatcagggcggctccaaactcatgacctcatctaaacctaattacagaggtacaagtattgtgggcaacctgtgctttaaatgttaaaagaagtgtattctgttgatattggtcggattgttctataaattacctagttcaatagactgatagttttttttgttttcctttaaagaactttttggttgttttctatctttttgtgctattgctaagagagaagtgttgaaatctccaactaaaattgttgatttatatattttttctttcagttctgtattttcttacrgagttttgaaactctgttattagaaaaatacacattcaggattgttgtatatctttgaaaaattg

SEQ ID NO: 357188 - DNA, 573 bp, Homo sapiens
caatattgaataaacaaagagtcaagattgattaaattgattctcttatagatgaaattgaacttttcacaattcttttcagattgaagttagggatcatttttttgcatcaagtatgtaaaaattgacacatttttggctatagtttcatttaatgtttcattatttttatagccgtttcaaaacaggttccacatttatggtcactattctttgagatttaaaaacttagagttaataacatatttcactttactatcttttaaaattttaataacacactggttttctgaaaagtaatgatttcactactattttcatatttcttaaatttctttttgaagttakatttttaatgccaaaagctctggagatttttgttttttggcataattcctttgctctgccacacatgtttaaaatatgcattatcataaaaagactattgcttcaaaattttatcttctttaaatatatttttcagatttccaaagtcatactgaagcttcttaaaattcatacattacagaaatctataatgttcaaagaacagccttaaataaatccaattcc

SEQ ID NO: 357189 - DNA, 603 bp, Homo sapiens
caacaaaattctgaaaaataaattagctatatacatatagatgtgtttatgtaaatttagtgtatatatacacatacaagagtagttttgaagatgtttggtgttgaaactagcgctgaaaagttggctaaattaagacctcaattttcaaggcttatgccattaaactacaagatagataatggctatttttctcccaatcagcctctgaatcttcaaagtagtatttgtagcatacctacttatgcaaatttttattcagccacataaaatataattggagaatgcacatttttcaaacactccttggaatatctcaaatgtagcagacataccacaaaattaccttgataggtttaatgtaagaaagaaaatactatatatacatataacatatgccaaaattgtgcctaaattatagatattgttaaatttttggcagctttagtttgggctttattcccctttctaagtggatctatgagatcttggggtgyatattaagctacccatattttctatatgccctcgtatttgaagatgatcaagaatgccctactatgtctgatttggtcaaattgccatatgccaccaggactgatc

SEQ ID NO: 357190 - DNA, 609 bp, Homo sapiens
ggcattgctctgaattaggctttggctgaaaaaaatgttgtggctggtttgatcttttatccagaccactaaaactttctctatatcascaataaggctattttgctttcttataatttgtgcatttactggagtagcacttctaattccttcaagaattttactttgcatttgcagtttggctaacagtttggcacaagaggcctggctttctgactatcttagctttcagcacggcttcttcattaaccttaatgatttctagcttttgattttaagtgagagacatgcaactctttgcttcagtttgaacacatagaggccattgtagggttataagttgttataattttaatattgttctattttagggaaaagagaggcctgaaaagacggagagagaaggggtaatgctgggttggtggagcagtcagaacatacttaatattcatcaattaagtttgcactcttatatgggcttggttcattgagccccaggcaattgcaatagtaatatcaaagatgataatcacagatcaccataacaggtataacaataacttaatagtttgaaatattgtgagaattaccaaaatctgacacagagac

SEQ ID NO: 357191 - DNA, 431 bp, Homo sapiens
aaaaaaatctgaaatttttagaatttagtttcttcatattcattttgtccctattgaaagatacatttaaaaatacaaaaattagccagatttggtggcacaygtctgtaatcccagctactcaggaggctgaggcagagaattgctcaaacccaggagacggaggttgcagtgagcagagatcacgctactgcactccaggctgggtgacagagcaagactccatctgaaaaaaaaaaaatattcaaggacttactgtcaaagcaggactcagatcctgcaggctcacatatttcattttcactatgatattgatatttttcctatttaatcatatatgacatatttttattaatagctattaattgtagattaaaattatcaacaccaccccattccatattttttagacttaggtctgataacagtaa

SEQ ID NO: 357192 - DNA, 511 bp, Homo sapiens
gaaacatcactatcagccacaaactgggaaagctttagccagcttttgggctggtcatttctatagtaagagagaagaaagataatttatccacgctctgagcacccttccctagcttctaaaggtcaggagtgttcatgcataaattgttgctttgggaaatagctagtattcttgttattctccagtaggcataaactctatagaaatcccacagaaatgcttctgcctccaatgatgacttctgaagaacaacaacaacaacagcaatagaaaggaaatgtgtagaaaatgtatgataaccatagcaatattcctcacttccagagacatcgaatcataaaatccccaagaaatgatatggtgtwatcctagtagcaaggatccaaaatcatttacatcatatccatccagtcatactcattcgatgaattgtaaatctccatctattcaccttggtgaagattcgtgtgaattagagggaaagagtgagttttgagatacagaaact

SEQ ID NO: 357193 - DNA, 533 bp, Homo sapiens
tccatatctaccttatgggttttacatacgtatatagtgagaaaggaaatgtgaacttttttattaaaataatatttaaattatttttgtcattattataaaataatcatttatatcatcgttataaaatatgttcatattcttcaatttaaaagcaaattcaaaccaaatcaaaaaacaataatagatacaactaaggctgagattacttgcacattaaatataaaatacttatatttccaatttatagtcagaaaataacttacttccttcatcctatcctgccaatgaccttctttactgaccagtgtaagttttcaaggaagctgtaattccttagcgcagmacagtgtagccttgagtgtaggaagatattttttgcaatgagtgggctctagctaagactaatccacgtcttcttaccttattctgtaataagtaaccagaggaaaataatgttgctgcttcatagtgacacgtttcaggccattcatcaaagattggttagctagtgcttctaaaatttttcattg

SEQ ID NO: 357194 - DNA, 533 bp, Homo sapiens
tccatatctaccttatgggttttacatacgtatatagtgagaaaggaaatgtgaacttttttattaaaataatatttaaattatttttgtcattattataaaataatcatttatatcatcgttataaaatatgttcatattcttcaatttaaaagcaaattcaaaccaaatcaaaaaacaataatagatacaactaaggctgagattacttgcacattaaatataaaatacttatatttccaatttatagtcagaaaataacttacttccttcatcctatcctgccaatgaccttctttactgaccagtgtaagttttcaaggaagctgtaattccttagcgcagaacagtgtagccttgartgtaggaagatattttttgcaatgagtgggctctagctaagactaatccacgtcttcttaccttattctgtaataagtaaccagaggaaaataatgttgctgcttcatagtgacacgtttcaggccattcatcaaagattggttagctagtgcttctaaaatttttcattg

SEQ ID NO: 357195 - DNA, 533 bp, Homo sapiens
tccatatctaccttatgggttttacatacgtatatagtgagaaaggaaatgtgaacttttttattaaaataatatttaaattatttttgtcattattataaaataatcatttatatcatcgttataaaatatgttcatattcttcaatttaaaagcaaattcaaaccaaatcaaaaaacaataatagatacaactaaggctgagattacttgcacattaaatataaaatacttatatttccaatttatagtcagaaaataacttacttccttcatcctatcctgccaatgaccttctttactgaccagtgtaagttttcaaggaagctgtaattccttagcgcagaacagtgtagccttgagtgtaggaagatattttttgcaatgagtgggctctagctaagactwatccacgtcttcttaccttattctgtaataagtaaccagaggaaaataatgttgctgcttcatagtgacacgtttcaggccattcatcaaagattggttagctagtgcttctaaaatttttcattg

SEQ ID NO: 357196 - DNA, 455 bp, Homo sapiens
tctaaaatccttgaagcaaaaacagtacatccctggaaaaacagtccgaagaggatacaaataaacttgtctaatggctatgtgaggaggatgcaaagatggttgacaatatctcttatatatcttctataattaattttatacaaaaaaagcataatgtgctatttkcaattctcattacagaacttcggttctggtgggatttacaaagttttcattgtgtttgtaaataattaaaatcttatctacatttttgtatgcaaatatctggatgaggcagatatcgcagtaaatattttggttatgttagaataaagctagaagagcaacgcctcgttcctaatttgatttaaaggcacatttaattttctgtctggtgtgctggttttccccaaaagacctcaattaggatggtggctcacatttagagaagctgaataaacttttagcaatgt

SEQ ID NO: 357197 - DNA, 582 bp, Homo sapiens
actataaatgcatgtagattatatatgtagactacttagaaatacacatacacagtcttacttcagtacctttcaggtataataggtggcaggcagattgaaagcattttatttatggtgagacattgagaaaggttgagcataaataaaatggaaatcaaattgctattagagtcaaatagttaagcatgagcctaaccattgcaaggaaattagaggaaagaaaaattgagaattaaaaatatattttattaaccaacttttagtactctctttaatgggaatgtaccacaagttctactaaaataaatgcggtaacaaaaatgcttcaaaatgcgtatgcatgggagctgggtacaatgttgagaacaagtgcaagtgatgacttgattcagttaaggtggctgtcagtttagtttactatcaaacctgcaacaagctgtgtagaggrcaaacacaaggttaagaacacagtgagcaggatcactcatgcctccttcgttcatcctgggatgcaccaataattctggagattcagcagcatgcttgttgcaagaaatacattaggactaaggaatccca

SEQ ID NO: 357198 - DNA, 559 bp, Homo sapiens
tgtttttaaatgatttttttacattaatatataatttatattaatcactattaagataaactactactggaatattctcaacaagattccacagaaagtaaaacaaattccaaaatatgttccttgggagaatagtctctcaaaataactacagtggtrgacataagaaaatacaaaatatatgctgctaaatgtctcagttatgaaacttaatcgaggtttctcacttctttagatgatgtaaaaagttgaaaagaatattgcacctgtcattacaacaacagagagctgaggatacagggcaaccaaataaccaaaaagtaatgaaaatacagacttcctccaaggagaaaaggtacatgcatttgcttacctggggcagattttgccaaacatcatacaagttggtaaaaaaaaaaaggctaaaattttaacaaagtgttgaagcttgattgtggactggcatgagaagttaggagttatgcacactttatacaatcattcaaatgattttctccatggacatcaccaggtgctcataagaaacatttgggcaaaa

SEQ ID NO: 357199 - DNA, 559 bp, Homo sapiens
tgtttttaaatgatttttttacattaatatataatttatattaatcactattaagataaactactactggaatattctcaacaagattccacagaaagtaaaacaaattccaaaatatgttccttgggagaatagtctctcaaaataactacagtggtagacataagaaaatacaaaatatatgctgctaaatgtctcagttatgaaacttaatcgaggtttctcacttctttagatgatgtaaaaagttgaaaagaatattgcacctgtcattacaacaacagagagctgaggatacagggcaaccaaataaccaaaaagtaatgaaaatacagacttcctccaaggagaaaaggtacatgcatttgcttacctggggcagattttgccraacatcatacaagttggtaaaaaaaaaaaggctaaaattttaacaaagtgttgaagcttgattgtggactggcatgagaagttaggagttatgcacactttatacaatcattcaaatgattttctccatggacatcaccaggtgctcataagaaacatttgggcaaaa

SEQ ID NO: 357200 - DNA, 592 bp, Homo sapiens
gccttggccaaaacaattaaaactcaggagaagaagtcatgagaactctttacccctgaaacccaaacacgatgcctgcttaagaccaaggccaagaaaaatcagaagagaatatccactccccatataccatcatgaggccaataagcataaaaaggtaaggaacactgtcttcagagaaagggataagagagatgaggcacagygcaaagtaatcctggcatattgaaaggccaaggcaggagaatctcttgagcccaggagtttgaaaccagcctgggcaacatggcaagaccctgtttatacaaaaaatatagaaaattagcttggcatggtggcacgtgactgtagtcccagctacttgggaggctgaggtgggaggatagcatgagtctgggaggttgaggccacagtaaaccattattgcaccattgcacttcattctcagtgacagagtaagactctgtctcaaaaaacccattcaaaatacaagttaaactagagacatttgaaatctacgttgcaacagggtaaatgtaataacgcaacccaaacatagttctattcctgacaatgttaacacaaactgcac

SEQ ID NO: 357201 - DNA, 592 bp, Homo sapiens
gccttggccaaaacaattaaaactcaggagaagaagtcatgagaactctttacccctgaaacccaaacacgatgcctgcttaagaccaaggccaagaaaaatcagaagagaatatccactccccatataccatcatgaggccaataagcataaaaaggtaaggaacactgtcttcagagaaagggataagagagatgaggcacagtgcaaagtaatcctggcatattgaraggccaaggcaggagaatctcttgagcccaggagtttgaaaccagcctgggcaacatggcaagaccctgtttatacaaaaaatatagaaaattagcttggcatggtggcacgtgactgtagtcccagctacttgggaggctgaggtgggaggatagcatgagtctgggaggttgaggccacagtaaaccattattgcaccattgcacttcattctcagtgacagagtaagactctgtctcaaaaaacccattcaaaatacaagttaaactagagacatttgaaatctacgttgcaacagggtaaatgtaataacgcaacccaaacatagttctattcctgacaatgttaacacaaactgcac

SEQ ID NO: 357202 - DNA, 592 bp, Homo sapiens
gccttggccaaaacaattaaaactcaggagaagaagtcatgagaactctttacccctgaaacccaaacacgatgcctgcttaagaccaaggccaagaaaaatcagaagagaatatccactccccatataccatcatgaggccaataagcataaaaaggtaaggaacactgtcttcagagaaagggataagagagatgaggcacagtgcaaagtaatcctggcatattgaaaggccaaggcaggagaatctcttgagcccaggagtttgaaaccagcctgggcaacatggcaagaccctgtttayacaaaaaatatagaaaattagcttggcatggtggcacgtgactgtagtcccagctacttgggaggctgaggtgggaggatagcatgagtctgggaggttgaggccacagtaaaccattattgcaccattgcacttcattctcagtgacagagtaagactctgtctcaaaaaacccattcaaaatacaagttaaactagagacatttgaaatctacgttgcaacagggtaaatgtaataacgcaacccaaacatagttctattcctgacaatgttaacacaaactgcac

SEQ ID NO: 357203 - DNA, 564 bp, Homo sapiens
accattattgcaccattgcacttcattctcagtgacagagtaagactctgtctcaaaaaacccattcaaaatacaagttaaactagagacatttgaaatctacgttgcaacagggtaaatgtaataacgcaacccaaacatagttctattcctgacaatgttaacacaaactgcacaataaaggcctatcataagaatattcacgtccacttccaggcataaagctcttcatttyagtgtttactgtcctacccaacaacatggatgaatctcaagtgatttatactaaaagaaggtgagatactgtatgattacatacacatgatgttctggaaaacgtaagacaacagggaaagaaaacagaccaatgattgccaggacctggagttgggggagagattaactacaaagggacatgggttaattttattctatattttgatggtattgttggttttacaacagaatacatttgtcaaagtgtgcagaactatacaccaaaaagggtgaattttagttagaaagttgtactctgagaaaatgaaaataaattataaaatatat

SEQ ID NO: 357204 - DNA, 467 bp, Homo sapiens
atataaaccctcacatatgtggtcgaattatttttgacaaggatgccaataccatccaatggggaagggtcagtcttttaaatgtatggtgctgggaaaatttcaaagaatgaggttggatcataawgacaaataatgacatgagactcttacgtaacacatatacaaagattaactcaaagtggatcaaagacttaaatgtactacataaaattataaaactcttagaagaaaatatagggaaaatgcttcatgacattggatttgacagtgcattcttgggtgtaacaggaaaggcatgagcaacagatgaaaaaatagacaaattagaccacaaaaatgtaaaaaataagtgcatcagaggatactatcaacagtgtaaaaagacaacccagagaatggaagaaaatatttatgaattatgtatttgataagggataaacatctaggatacatagagaacttct

SEQ ID NO: 357205 - DNA, 467 bp, Homo sapiens
atataaaccctcacatatgtggtcgaattatttttgacaaggatgccaataccatccaatggggaagggtcagtcttttaaatgtatggtgctgggaaaatttcaaagaatgaggttggatcataaagacaaataatgacatgagactcttacstaacacatatacaaagattaactcaaagtggatcaaagacttaaatgtactacataaaattataaaactcttagaagaaaatatagggaaaatgcttcatgacattggatttgacagtgcattcttgggtgtaacaggaaaggcatgagcaacagatgaaaaaatagacaaattagaccacaaaaatgtaaaaaataagtgcatcagaggatactatcaacagtgtaaaaagacaacccagagaatggaagaaaatatttatgaattatgtatttgataagggataaacatctaggatacatagagaacttct

SEQ ID NO: 357206 - DNA, 490 bp, Homo sapiens
ttgaaaaaatggacaaataactcgaatagagatttctccaaagaagatatcaaataaccaataagcacatgaaaaaatgctcaacatcactagtcatttgaaaamtgcaaattaaaactacagcgagagaccatcccatgctcattagaacagctacaattaaacaacaacaaaaaaagaaaataacaagtgttgtcaagattaggagagaggagcaggtggagcaagatggcagaatagaaagctccaccaattacctccccctcaccctgcagggacatcaagtcagcaactgtctacacagaaaaacactgtcataaaaaacaaaactcaggtgaacactcacagcaccttgtttatcttcatatcgccgaaagaggctctgaagagatagaaaaaacagtcctgaatcaccaacaccaccactcctcagcctttggcagtggtgatgtggtgtggagaccatctctgggtgcttgagggagggaga

SEQ ID NO: 357207 - DNA, 505 bp, Homo sapiens
ctgaaggggcatttaaaccagccctagccagaaggaaatcactgataccagtggtccaaacctgagtacccacaaaccttgtcatggagggctacagcactctgtgtctccaagtaaacttgaaargcagtctagaacataaggactgccaactgccaactcttagtgagtcttagtgctgaactaggcctagagagactggactgagggggcagtcaacatactgagacaccagctggggcagccaagggagtgctggcatcactcgtccgttaacccctggctatagggctattgacttcaaaagagactccttccttcagcttgaaaagaggagtgggaagagtggggaggactttgccttgcctctaggaaaccagctcagccacagtagcacaggacactggtcagagttgtgaggcccctgttccagaccctagctcccagattatatttctagacacattgtgggtcagagtggaacccactgccttgaaggaaggac

SEQ ID NO: 357208 - DNA, 505 bp, Homo sapiens
ctgaaggggcatttaaaccagccctagccagaaggaaatcactgataccagtggtccaaacctgagtacccacaaaccttgtcatggagggctacagcactctgtgtctccaagtaaacttgaaaagcagtctagaacataaggactgccaactgccaactcttagtgagtcttagtgctgaactaggcctagagagactggactgagggggcagtcaacatactgagacaccagctggggcagccaagggagtgctggcatcactcgtccgttaacccctggctatagrgctattgacttcaaaagagactccttccttcagcttgaaaagaggagtgggaagagtggggaggactttgccttgcctctaggaaaccagctcagccacagtagcacaggacactggtcagagttgtgaggcccctgttccagaccctagctcccagattatatttctagacacattgtgggtcagagtggaacccactgccttgaaggaaggac

SEQ ID NO: 357209 - DNA, 505 bp, Homo sapiens
ctgaaggggcatttaaaccagccctagccagaaggaaatcactgataccagtggtccaaacctgagtacccacaaaccttgtcatggagggctacagcactctgtgtctccaagtaaacttgaaaagcagtctagaacataaggactgccaactgccaactcttagtgagtcttagtgctgaactaggcctagagagactggactgagggggcagtcaacatactgagacaccagctggggcagccaagggagtgctggcatcactcgtccgttaacccctggctatagggctattgacttcaaaagagactccttccttcagcttgaaaagaggagtgggaagagtggggaggactttgccttgcctctaggaaaccagctcagccacagtagcacaggacactggtcagagttgtgaggcccctgttccagrccctagctcccagattatatttctagacacattgtgggtcagagtggaacccactgccttgaaggaaggac

SEQ ID NO: 357210 - DNA, 552 bp, Homo sapiens
tctatgtttggcagaaagtaagggaagagaacaagaatctctgcctcatctccagagaattctactggatcttgtccaaaacaataaargtagtaacctctatgagtctgcaagaaccacagagttactgggcttgggaatgctccctaaagcagataaagcttagatcatgatgcctaagtcttttcaaatatctgacaagccttcccaagaatgatgtctacaaaaaagcccagacagtgaatactccaataaatatataactctttgatgcccagacgctaaggtcatctactagcaacaacattatccaggaaaacatggcctcaccaaatgaactaaataagtccccagggatcaattatggagaaacagaggtatgtgacctttcagacacagaattcagaagagctatgttgaagaaactcaaagaaattcaagataacacagagaaggaattcacaattctatgagataaatttaacaaggagattaaaataatttaaaagaatcagacagaaattctgggctgcaaaatgcaattggcatact

SEQ ID NO: 357211 - DNA, 552 bp, Homo sapiens
tctatgtttggcagaaagtaagggaagagaacaagaatctctgcctcatctccagagaattctactggatcttgtccaaaacaataaaagtagtaacctctatgagtctgcaagaaccacagagttactgggcttgggaatgctccctaaagcagataaagcttagatcatgatgcctaagtcttttcaaatatctgacaagccttcccaagaatgatgtctacaaaaaagcccagacagtgaatactccaataaatatataactctttgatgcccagacgctaaggtcatctactagcaacaacattatccaggaaaacatggcctcaccaaatgaactaaataagkccccagggatcaattatggagaaacagaggtatgtgacctttcagacacagaattcagaagagctatgttgaagaaactcaaagaaattcaagataacacagagaaggaattcacaattctatgagataaatttaacaaggagattaaaataatttaaaagaatcagacagaaattctgggctgcaaaatgcaattggcatact

SEQ ID NO: 357212 - DNA, 600 bp, Homo sapiens
tgatgaatattgatgcagaaatcatcaacaaaatactagaaaaccaaattcaacacatgagaaagagcattcatcatkaccaagtgggatttatccctgggatgcaaggatggttcatcatatgcaaatcaatcagtgtgagacattatatcaacagaatgaaggataaaaaacatatgatcattttagttgatgctgacaaagcatttggtaaaattcaacatccgttcatgaaaaaaacccaaaactaggtatagaaggaacatacctcaacgtaataaaagccataaatgacagacccacagctagtatcataatgtatgggaaaaacttaaggtcttttctctaaggtctggaacacaccaaggatgcccagtgtcaccactgttattcaacataatacataataccagaagtcctagctagagcaatcagacaagtgaaataataaataaagggcatccaaattggaaatggaggaagtcaagttgtcctttttagatgctatgatctaatatttggaaaaacctaaagaatccacaagaaaactaatagaattgataaacaatttcagtaaattgtcaggatacaaaatcaaca

SEQ ID NO: 357213 - DNA, 600 bp, Homo sapiens
tgatgaatattgatgcagaaatcatcaacaaaatactagaaaaccaaattcaacacatgagaaagagcattcatcatgaccaagtgggatttatccctgggatgcaaggatggttcatcatatgcaaatcaatcagtgtgagacattatatcaacagaatgaaggataaaaaacatatgatcattttagttgatgctgacaaagcatttggtaaaattcaacatccgttcatgaaaaaaacccaaaactaggtatagaaggaacatacctcaacrtaataaaagccataaatgacagacccacagctagtatcataatgtatgggaaaaacttaaggtcttttctctaaggtctggaacacaccaaggatgcccagtgtcaccactgttattcaacataatacataataccagaagtcctagctagagcaatcagacaagtgaaataataaataaagggcatccaaattggaaatggaggaagtcaagttgtcctttttagatgctatgatctaatatttggaaaaacctaaagaatccacaagaaaactaatagaattgataaacaatttcagtaaattgtcaggatacaaaatcaaca

SEQ ID NO: 357214 - DNA, 563 bp, Homo sapiens
ctaggaattcaccaaagtgaaagatgtctataataaaactataaaacactgatgaaagaaattaaaaatgacaccaaaamatggaaaaatattccatgtttgtgggttggaagaatcaatatagttaaagtgttcatgctacccaaagcagtctacagattgaatgcaatccccatcaaaatatcaatggcattctttacggaaatagaaaaatatcctaaaatttatgtggaaccagagaagacctagagtagtcaaagctatcctaaacaaaaagaatgaaactgaaggaatcacattatctgacttcaaattatactatagagctatagtaaccaatgcagcttggtaccagcataagaatagacccatagaccaaatagaacagaatagagaacccagaatcaaatctaaacacctacaatttactcactttcaacaaaggtgccaataacatacactagggaaaagacagtctcttcaataaatagtactggaaaaactggacatccatatgcagaagaatgaagttagaacccatctctcaccatatacaaaaatca

SEQ ID NO: 357215 - DNA, 616 bp, Homo sapiens
acttgtgaatttgaggactagaggctagtacaaaggcaaattttgagtacgtgtgagttctcatatgatattaaattggcatcatagatgagagttttttctgagtgagaacagaatttagcttagatcagtctttaaaaaaatgtaaaattcttcacactttacttcttagaagagactgaaaatttgaagaagagggcaagagattaatttaggatttggcatcagaggagttcctcagaaatgaagtcacataaagactctttagaagcaaagtcatcttataacaagagagaaatattagcaaacttttgcttcacaacacggaagaaaatggatcagtttacttraactgtttaaaaataaatttatatattattatatctgcacaaagctagattatttttaatgttagcaaaggagaaaaatattaattttttacacaatcttctaattgtctcagcatcattatctataatttattaaatcgctcaataatttaaaaaagaaaatgtacttaaaatatttaaatgtttttaataaagaaaacaatttttaagttcttaagcttatttcaagataattataattgtgatcaccttctaaaatagcacca

SEQ ID NO: 357216 - DNA, 630 bp, Homo sapiens
tgtgacatctattttctggctttatacaacttggttgtataaagttgrctttatacaacttggtttttattaacatcttggctttcttgattatcgattctctaccccacttcagatacagttcttcctattaaaggaaacttgtgtgtgtgcctcccagtaggcataacttttatcctttccaccaattttctatttttctatataaaaaattgtatacatcagtaaaataaattgaacttcaagtattgttttgaaatgtataaagaaaagggccatgaataaaaccttcatcaagtgagcaatttgcagttgaacagcaattccaattaccggtacccaagttcccaggcttctttgtggtggtatttgtagctgattaaatttctcctaattttatgtatgggtacacaacatgaaaattaaaacaaaatatattaccactttcagaaatgaaaatgtattcctgaaacagcattttgaatgtggccttctgctccaaacaagtgaaatcacagttagcattttgtgttttgaatgaatgaattcttactgggtttatacaaaacagtaagtggaaaattaattattatatagatggataatcccgtttaactatttataaaatag

SEQ ID NO: 357217 - DNA, 607 bp, Homo sapiens
aaagccactcaatgcaagctttatagtcacaggaatggagccaaaaataactcttattttccacctactgtgcaagtaatattaaaggtgtatcgtctcatgactttgttgaaggcagtcctgctggagctgggagctgcatgctctccttaatcaagagcccactgtgagctgggcctataaagtcattgggtagcccctgccagcaattaacacacaacatgctgaccattcttggcaaacctgaagtaggattctggtgccagaaaggcaagatcaatcttgaaaagagtgtggccatctgttggcactgcccattcttcccacagggcttagagatggcactaacacccacaatgcctgcttgaatggatagcactgcatttaaatttttaattgtaaagagaagttttttttttctattttgaggctttgctgctccctggttctacaagacraaaaggccagacttaagtcattaaaccccaaaaatgaaagccttctttctgcaaaacattagcaagaagtcttttatttggctcatgagaaaccaatccattggggtttgtctggtaatgatagtggaagtcaaagcgataacacatct

SEQ ID NO: 357218 - DNA, 597 bp, Homo sapiens
acttggctttaaggactacaaaatgtgacaaagcttgaaattaggtaaaggagcctaaattttcgtttttggaggagaaatttaattgtgcacatacacaactagggggaagtcatcaaaatagcatttggaaaagtgttcaaattaaaattttctacacaatttttaccaaaacacttttgtacatatattacttccacatgcaagacattttctgtccaaccactaatcaatcttggtttttgcttttcaactttacactgtaacttatgaaagccttatttacgatagataacactaaaggattattatataaagctggcacaattgacttcaaatgygcaacattatcgattggtcactggactcattgagagttccacccacaaagcctggtttcttttgctgtcataactagatgcagccattattgatgtcacggtacaacacatcatcctttgtggactcctcttttctgggcgatgagatcttttttgtcatatttgtgtcacagctgaaatgcccactatctccagtttaatcacttatgggaaaaaatgaatcaaaaatattgactgtgtattagtggcccaaggg

SEQ ID NO: 357219 - DNA, 606 bp, Homo sapiens
aatcactgggtcaacaataaaatcaagatggaaatttaaaaattctttgaactgaatgataatagtgacacaacctatcaaaatatctgggatacagcaaaggtggtgctaagagaaaaagtcatagcattaaatgcctacatcaaaaagtctgaaagagcacaaatagacaatctaaggtcacactctatggagctagagaaacaaagaccagttaaaccaaaacccaaaagaaggaaagaaatatccaaggtcagagcagaactgytacaaataaaatcaaaacaaaaaatataaaaaaaaaaatgaatcaaaaagctggttctttgaaaagagaaataaaattgatagaccattggtgagattaaccaagaaaataagagagaagatctaaataaacttaattagaaacaaaatgggagaaattacaacagatagcacagaaatacaaaagattattcaaggctactatgaacacctttatgtacataaactaaaaagcctagaggagatggataaactcctagaaataaataaccctcctagattaaacaaggaaggtatagaatctctgaaaagaccaaacaagcagtgagattggaatgg

SEQ ID NO: 357220 - DNA, 597 bp, Homo sapiens
atcttttttaaggctagtgttactaatggatcaaaagtcatttatttatattcctacgcagactagaaggaccattgttgttttaaggaatatcttaggctcaaacttaaacatctcaactgaatcctataactaccaacacaaaatttattttccatgtgcctgccctgtcttatcttttgaggcagaggagtatcttttgagatgccgtgtgttatatgtcattagaaagcattcaagaactgcctgttttaattaaatggttaatgttatgaccataaacaccgtcccatctttttctgcttcaatctaggtgaagcagatctttggctctaaaataattagaagtatcatcttaagaggcaaactaagtatagctttttcagaaagctctaacaccattttaaatgtctgagaagagagagccctaagctgcttaaggcatgaatgttattttaagggtttttctgagtttgtacctgtggtcactgcctgtttagcttctgaccttagtgaaacttgatttcattggagaattatccactttgtgwtgtgattttatggaaatgtttgcagctgcaagctgtgagaggagtt

SEQ ID NO: 357221 - DNA, 560 bp, Homo sapiens
ggtgtcatgccaattgcatggcatcagattctccaaagaaaacccacttggaaaagccaaactagcccctggaaaagcaacccaagcatctcgtggacatgtgaggaaatggaaaaacggaaaaagaaaaaaaaaagggaaacaaaaaaataaataggcaaatgggagaaaaaaatgaaaacaaaataaaaaccaaaaataaaaaagtagggtttattgactcttatgcattgttaaattagagggtagaaagacagagctggtagtctttccctgaaagctgtaaggttatttttgtggtttggtgacttctcargttggcagccgtcttgttgatgtcccctatgtcatccaaagggcaggagcgggcagctctctaccttggcaactggttcctctctctccagcttcatcttttccattgttttttgtttgtttgcttgtttttgtttttcatttttaccttttacagattgatttaaacattttttaaaccacatgcttctttttctgggctccagccagatctctgggggaggagttgttggcagtggtgatgg

SEQ ID NO: 357222 - DNA, 551 bp, Homo sapiens
aatagcttactaattgattagccataggggtgggcagtagtacatggtagtggattggataaccaggtgacatacttagtggcactgtgtaaaggtggcactctgttcaattcactgagggtacctctggaacaagaagagccattttctttctttctttctttttgaggcagtctcgctctgtcacccaggctggagtgcagtggcacgatctccrctcactgcaacctctgcctcctgggttcaagtgattctcctgcctcagcctcttgagtagctggtactgcagatgcctgccaccatgcccggctaatttttgtatttttagtagagatagggtttcaccacattggccaggctggtctcgaactcctgaccttgtgatccacccacctcggcctcccaaagtgctgcaattataggcatgagccaccgcgccaagccaagccattttcttaaagcttcagagaatcacccactgtccttgcaggcaaaagagctcagcaaaatcaccccatgaatctctaacgctattaggttcttgtcagcta

SEQ ID NO: 357223 - DNA, 471 bp, Homo sapiens
aagtgttaatgttacctattattagtctgatcccaagtctaatgcagttgtcaccacctaaacctgcctttacagagctggcctttctgagaaaccctgtgcctctgtagattcaacactcccatctgtgcagatggctaacagctaggctgaaaacagaaaccttaggttggaaagggtcagctggagggctgaggcccatggccccaaatcctccccaggagagagagtaggttcagaaaggagagagctataaacagagccttcctcccttgccctcagatcccaaaataacacttgtctaccgccatcctgcccaactggcagagtggcaggctgagtaaggtgccatttaaagataacctggccctcaccatctgcyccactggctgggctgggctcctgaggccaggccttggctgcctgggactgctgctgctcccacagccacccagagtgtgcctgagtagg

SEQ ID NO: 357224 - DNA, 553 bp, Homo sapiens
ccctctgggtgctgctgccagatgggcatagtggtcctgcaaggctgcagctatcttggtcttatatgcccaggaacaagcattccagtggctccagggttgggggggtcagcatgggctttggacatggcagacaggcttcacacaaacttgggcgtgccctgggccttgggcatctacttggtgggaaacctgttcctgaaggcaagctgcagcttatcccatgtactgaactctgaggggactagctgatcttctgtttttggaactttaaaagtggccagtgatcccggtggacaatgtccccaaagtcccacctctgggtagggatatggccagacagctggccctgaaccagcaatgaagggtaggcaagtagagcctcagccaccctctyaccatgatgggttgagtgtgtccgtgtggcctcattttcttcatgaggagggcatggggtatctggcagggagtagtgggcaggaatcaagcccaccgtgtactcacatgcagtgaaacccatgtagaaagggataggccctgggggctgtagatg

SEQ ID NO: 357225 - DNA, 594 bp, Homo sapiens
agggtcagaagctacagacacatcaagaaagaaggactaaggggaatcctgtrtttagcgacagagagagcgtttatgacctaggtgggggcagcttcaggggagaggtggggtagaatccagattgcaatggggtgaggagtgtgtgagctgaggaagtaggaaaagagtgcagcatcctggaagcttgtttatgactgagggagagggagagggaagatggtgataaagacagatgcagccggctatcctacgttgatgacaagatcactagctttgcaacttgccccaaggtcatgctcactcaagcatccttttggacatacacagattccaatgcccatatgaacacctagcccactgacagagtaatgacttgaggaattggcattctagttgatacactttccctcaaaagtttggttagctcaaggttagatctgacaagatcaagtttttgaaaatgcaaagctcaagacattgaactgtttggagatccccacatgcccacactgcacctctcttctatgtctttcttaaaccgtcctccctccatgaaatgtcatccctcagaaacacacaacttgttttatt

SEQ ID NO: 357226 - DNA, 552 bp, Homo sapiens
ggcctaatgcaattacaagggtccttaaacctttgtaaaagagagactaagaagagaagcagtctgggtgctgtgatgtgagggagtctgtttgtttttwaattttttttccatttagtgactctcttctttaaaataaaatttagtttagatatacaaacactcatgaggtatttttatatgactatcactcttctagttgataaatattaggcaagagatctagaactacaaaaagtgttttctaaatactgagccccatactatggtagtatagataatgggcattctatatgggtgattatgaatgtgctggtgtgctgtgtgtgtgtgtgtttgtgtgtgtgtgtatctatatatgtatatataatttggtgtacaaaataatgtgactatttttaaaatttcatgatagaattaatcaagaaaacattttgagtgtttgacatcttgtaaactaaaaattaaaaaatagaaaagtgtaaaaaatcaagaaaacattgaatggaataaaaaagatatcatatgtgataattttgaccatatagtaaa

SEQ ID NO: 357227 - DNA, 496 bp, Homo sapiens
taaaaatcttttccactacaaaccaccataaatgctggacaacagaatatgtgctcaactgggcaaattattcctaagtggggaatgaaagtgaagaagcagaggtggcaggaaggagggaggatgacagcaaagctggcagggtggggctgcccatgatggtgcagtcataataggggcatcctttgttgggttytaacagcatttgggtgtggatacaatgctacagcaacaccagtgaaggggagaagaaactgaccagcctaactaaaggaaaagcctcaaagttccacaagtctaagaaaaatggcctagaatactcagactgcagtcaaaggaagataaacagtgaagctcctcaggctatgccttggctgattcaggaaggaaggcagcccattgttactttggggcttctgtacacagtttttgcacagaaatatttaagtgactataaattaattcaaatgttttccaggtggatattgagggagaa

SEQ ID NO: 357228 - DNA, 623 bp, Homo sapiens
ccgcggcgctgggagagggtggcgccaggcggccctggagccctgggcgacgcggccgggccggccagagggcggagaagtccaaagcagcagcccggacagccgcttccgcccctgcgccgccctcccggcccaggtgaccggtcgccctacccggggagcagcgccctcctcctcctgggccggagccgggcgtgggggtcgcaggctggtgccacagcctgaggacaccgcggcctctgccccggggagcacgccaaatgccggacggagcggctgttgcagacggtgaggccgcagccccgcttgagggtagggtcgggcggggtgtcggggtcctggcagaggccgcggcgagggcaggagcsggtgcgctggccgctgcacatgcgccgcccggcaccgggaccctgcgggcgcgccccctggtggcagccagcgggaggtggcgtccctgtccccagccaggcggcagcgcgaagctgcctccccgcggggggagcggaagtggcccagctgctcgagtgacttactagttaaaaagctggggttggagctgccacgcggggaagtgtggaggcctgcggggctccgcctagactttctgggtgtcctcctgggac

SEQ ID NO: 357229 - DNA, 447 bp, Homo sapiens
tcactgttggggtcaagggtagtgcagggctggtgtcctggactgcatgggccccaactactgcaggcgctgacttcctcccatgaagaaatcagagccaacagctgcagcagctcacccagtgcgtgctgtgccccttccgtgtgcatgtgacagagggtgcctgctggatctgcaccagtctgtgggtaggaggccttggtggctatgttcactgagtggctacctggcccaggagtggccaaagggtctcaggaggtatggccacagcatcctctccgtgagggtctgtctgatgattggtagagargagggcacccccagggggtgaggggctccaaccccatcagtgagggacagctggggtcctcctggggaaagtcaaaggctgagccccaggacagaaggacgctgccctcagctgagtagcagcaggcacttggacgt

SEQ ID NO: 357230 - DNA, 447 bp, Homo sapiens
tcactgttggggtcaagggtagtgcagggctggtgtcctggactgcatgggccccaactactgcaggcgctgacttcctcccatgaagaaatcagagccaacagctgcagcagctcacccagtgcgtgctgtgccccttccgtgtgcatgtgacagagggtgcctgctggatctgcaccagtctgtgggtaggaggccttggtggctatgttcactgagtggctacctggcccaggagtggccaaagggtctcaggaggtatggccacagcatcctctccgtgagggtctgtctgatgattggtagagaggagggcacccccaggrggtgaggggctccaaccccatcagtgagggacagctggggtcctcctggggaaagtcaaaggctgagccccaggacagaaggacgctgccctcagctgagtagcagcaggcacttggacgt

SEQ ID NO: 357231 - DNA, 577 bp, Homo sapiens
ggacatgttgaatactatactgtagtcaatctggatagcaaattctcctccctccctaggctttgtggctgtttcttgtgagttgcagttgcttatttagtgaccatttcagtttatttttaaagctgtattatttgtcataagtgctcactgatacctatgtttcattagttgttggctcttgatttgagagaggattttttacatgtctagagaatacacattttctatctttgcaattgtactctgcctctgtaataaaccatgcctttaacacagccacrcagtttacaactcgacttttgtcttcacttcctgttactcagagaataaatttcaagaatacatgagatcttaacctttcccaaaacttttgttggggcatgagcgtagcattctagatttttagaaatatatggaagcttttcaaaatgcttccttattttccaaattatcacatcatactgactttcttttcaggctttttagtgtgtctattgttttgacatgttttgcttcataaggcagcaagattactctttttccctaggcatggataattattcaagccagagtg

SEQ ID NO: 357232 - DNA, 494 bp, Homo sapiens
aaaaaggctgaaaattccaaaaaccagaacaccccttctcatccgaaggatcaaaactcctcaccagcaagggaacaaaactggactgagaatgagtttgacaaattgacagaagtaggcttcagaagttgggtaatcacaaactccttcgagctaaaggagcatgttctaacccaatgcaaggaagctaagaaccttgaaaaaagattagacaaattgctaactagaataaacagtttggagaagaatataaatgacctgatggagctgaaaaacacagcaagagaacttygtgaagcatacacaagttatcaatagccaaatcgattaagcagaagaaaggatatcagagattgaagatcaacttaatgaaataaagcaagaagacaagattagagaaaaaagaatgaaaaggaatgagcagagcctccaagaaatatgggacaatgtgaaaagaccaaatttacatttgattggtgtacctgaaagtgaca

SEQ ID NO: 357233 - DNA, 494 bp, Homo sapiens
aaaaaggctgaaaattccaaaaaccagaacaccccttctcatccgaaggatcaaaactcctcaccagcaagggaacaaaactggactgagaatgagtttgacaaattgacagaagtaggcttcagaagttgggtaatcacaaactccttcgagctaaaggagcatgttctaacccaatgcaaggaagctaagaaccttgaaaaaagattagacaaattgctaactagaataaacagtttggagaagaatataaatgacctgatggagctgaaaaacacagcaagagaactttgtgaagcatacacaagttatcaatagccaaatcgattaagcagaagaaaggatatcagagattgaagatcaacttaatgaaataaagcaagaagacaagattagagaaaaaagaatgaaaaggaatgagcagagcctccaagaaatatgggacaatgtgaaaagaccaaatttacrtttgattggtgtacctgaaagtgaca

SEQ ID NO: 357234 - DNA, 605 bp, Homo sapiens
gtgaaattcctatctacctgcaaactagatatagcaacacattgcacaaggtgggcactgaagtattcatttaacaactttaatgcacactgggcctatgcatgtgctgccttttatgggtgtgaaggtaatgactccwtctgtcttcatgatacccttggctgagatgtccagtcattcctgtgatcaaaattggactggaaatttctaaggacagagtagatggcagagacatctgacttacaactgtgatttgatctcttgctttggctgactaagcaaaatctgaagaatataaaaataaaaggcatttattttctggccaaaaacagaagtaatctatcattcatgcattcttatcacagcagctaaattgaactaaaataaaacatcagtgctctctttgcaaatttacctggaaaggatcttgacttatgctgaaattgacatttgtccatctaactggaaaaggatttccttgggagtcattctttttgcctccaagattatgcatgatcaagctgtacaaagtggaaaactgtcagatcttcaaggatatcccagtaaaagacatgtgagtttataaggttttgttaaactttcta

SEQ ID NO: 357235 - DNA, 652 bp, Homo sapiens
tgcagtgggctctgcccagttcaaacttccctgyggctttgtttacactgtgatgggaaaactgcctactcaagcctcagtaatggcagacgcccctccccccaccaagctccagcatcccaggtcaacttcagactgctgtgctggcaatgagaatttcaagccagtggatcttagcttgctgggctctgtggcgggggtggggggatctgctgagctagaccacttggctccctggcttcagccccctttccaggggagtgaacagctctgtctcgctggcattccaggtaccactagggtatgaaaaaaaaaactcctgcagctaactcaatgtctgcccaaatggctgcccagttttgtgcttgaaacccaggtccctggtggtgtaggcacccaagggaatctcctagtctgtgggttgcaaagaccatgggaaaagcatagtatctaggccagagtgcaccattcctcatggcacaattcctcatggcttcccttggctaagggagggagttccccaacctcttgtgcttcccaggtgaggtgacaccccaccctcctttggcttgctctccatgggctgtacccactgtctaactagtcccaatgagatgagccaggtacctcagttggaaatgcagaaatcacc

SEQ ID NO: 357236 - DNA, 537 bp, Homo sapiens
ttctcctccagcccaagcagttgatctttttctataggcttgctgttgaaaggaataaaacccaactgtattagtctgttctcacactgctataaagaaccacagaaccacttgagactgggtaatttatgaagaaaagaggtttaattgactcacagttctgtatgctgtacaggaatcatggctgggaggcctcaggaaacttacgatcatggcagaaggtgaaggggaagcaagcacgtcttaacatggtgaagcaggagrgagagagtaaagggggaagtgctacacacgtttaaataactagatttcatgagaactcattcaatatcatgagaacaacaaggaagaaatgtccctatgatccaatcacctcctaccagatccctcccccaacattaggaattacaatttgacatgagatttagatggtgacacagagccaaactatatcatcctaccctggaccctcccaaatctcatgtctttctaacattgcaaaacacagtcatgctatcccagcggtcccccaaagtt

SEQ ID NO: 357237 - DNA, 603 bp, Homo sapiens
cccacagagtgggagaaaaatcttcataatctatacatctgacagatgactaatatccagaatctacaacgaactcaaacaaatcagtaagaaaaaaaaaaccatcaaaaaatgggctaaagacatgaatagacagttctcaaaagaagttatacaaatggccaacaaacatgaagaaatgctcaacatcactaatgatcagggaaatgcaaatcaaaaccacacaatgcaataccaccttacctcctgcaagccataataaaaaaaaaaatcaaaagacagtagatgttggcatggatgtggtaaacagggaacacttctacactgctggtgggaatgttaactagtacagccactatggaaaacagagtggagattccttaaagaactaaaagtagaactaccatttgatccagcaatcccactactagkcacccacatagaagaaaataagtcattattcaaaaaagatacttgcacatgcatgtttatagcagcacaattcacaattgcaaaatcatacaaccaacccaaatgcccattaatcaacgagtggataaagaaatatatatgatggaatactacgcagccatagagaggaat

SEQ ID NO: 357238 - DNA, 603 bp, Homo sapiens
cccacagagtgggagaaaaatcttcataatctatacatctgacagatgactaatatccagaatctacaacgaactcaaacaaatcagtaagaaaaaaaaaaccatcaaaaaatgggctaaagacatgaatagacagttctcaaaagaagttatacaaatggccaacaaacatgaagaaatgctcaacatcactaatgatcagggaaatgcaaatcaaaaccacacaatgcaataccaccttacctcctgcaagccataataaaaaaaaaaatcaaaagacagtagatgttggcatggatgtggtaaacagggaacacttctacactgctggtgggaatgttaactagtacagccactatggaaaacagagtggagattccttaaagaactaaaagtagaactaccatttgatccagcaatcccactactagtyacccacatagaagaaaataagtcattattcaaaaaagatacttgcacatgcatgtttatagcagcacaattcacaattgcaaaatcatacaaccaacccaaatgcccattaatcaacgagtggataaagaaatatatatgatggaatactacgcagccatagagaggaat

SEQ ID NO: 357239 - DNA, 570 bp, Homo sapiens
ttttgtataaatatcttccaataattgcttaaacatattacacacaaatatgcaaatattcatagctatgctaaaaagttattcattgtttatcctagttttaaactttactgtgtttcttatattttcttttggtgaatctgacacatccattatggaagtatcgtaggatttacaataacattgtacagacgtggggaaaaaagaataaaaggtcayatggattggtaagagtataaaagaaaactgagtttcaaatgataccttgaaaacataaatcaggatgtacatctgagctctcaccaggaaatgtggcaaccagattgtccttgggctgagggtgaagtctctgagcattctcagagacagacaatgcaaatcaagttcattctcattgtgcttgctttaccttcaaaattgtataagtccctaagcgtatatataatcaataattgtgggaaaaataacatcattaaatgtaccaaaacaatagactgatcacaaatactgcaggtgtttaaatcagatgtctgaagcaaagaaagagagtgtaatgaaaaataatttgaa

SEQ ID NO: 357240 - DNA, 544 bp, Homo sapiens
gaagatctgtagacaaatcatgtcattttttttaaatctcaacataatagaacatttcttttttaaagtacgcaagctctttgaccatcatgtctctgtgcatgactgtaataagatagccagagcaactgcttccactgtggagttgggaggagataaatacacatgctttgtactttgagtgctctgatcaggatcaggggaggtccctgcactctgactttatctctcctaaatgtgcaaattgcagagatttttaacgtgaactgaatattactgttagatccttttggtctatagctgtttcagttcactattcttttactgattttctgtctggataataaatccattgttgaaagtgtagtattggagtcccctagcattagtgtattgctgtctatttatcccttcagttctgttagtatttgttttatatagttaggtgctcagatgttggktgcatatatatttacaattgttataatctctcaataagtttacacttttcttgaataaaaaagagacaaatgaaaaattctct

SEQ ID NO: 357241 - DNA, 507 bp, Homo sapiens
ttatttgtgataaatgtcattattgtaaaatatttaaaacacctcatgtattaagaaatcctaatttagatggggccaagctggtggattagaagcagctgtggctcatggcgctcatggagagcaatgaaaactgcgagtgaattctacaccttcaattgaggtatccaggttcttgcattgggactgactaggcagacagctcgacccacagagagtgaggaaaagcaagtagggcgatggcccacccaggtgtggcacagagctaggggagccccactcgcagccaagggaggcggtgagtgattgtgtgactctacccggggaaaccatgcttctgccagggatatttgcaacctgcagatcagaagattccctygtgagcccagtcaccatggccttgggtctgaagcacagagctgtgtggagtctcaggggagtactcgctggctcactgtggtgtgcttggaaacccaggagttttgcattctctgcccccagaagtcc

SEQ ID NO: 357242 - DNA, 581 bp, Homo sapiens
gggggaaagggccactcaatcatttcccagcaccacatgctgggcccaccagggcacttcgcacaggtttagttctgcggcagggttgctgggtgaataaatgagggaatgtctaacctccttacctgattctgatcacctcataatggtatatttcttacaagaaacacagtaattatagttgatagtaaaacataaatgacaaaataaaatttctgaagtttcctgttgagcatttatgatagcttttattatataattatcccagttaagattttaagttttataacttttacatagatttttaataaaaacccgttttaactctgagttstgacaatgttttatagtctatctccaaattcttctataatttaataattttattcatgtttttatgaatgattttgaccctgatatttattctggaaagaggaattctacaaatttcctaccaggtcagacatttcatcatccaggatttagcatctgatgttccaattaacaggtgtacaagttgatatgtcaagtaaccctgggccatgtatgccctaaataattctaaattatttgatgaatat

SEQ ID NO: 357243 - DNA, 594 bp, Homo sapiens
aatcacattattctgaaatgattcagaagaacaaagtacactatttacrtctgatttttttctaagtaaccaaaataattccattcttcattgtagtaaaactaaaatgttttacatctaagtaggaatttctcagtttccaagtaaactgatataaaattgtccaaactaaagatattaacagcaaattgttaatgtcctgcctcagtttctatggaaacttaggaattgtaggcaaatgctgaaattgaggtttcgcttatcactttattgaatgccagaaaaataaatttcaagaggcaaattgaaatgaaaatttaagtgtcatgcaaataaacataaaatgttaaattctgtgctcacaaactatttttttaacttttctgatttaacactccttattattgttctatgcttaaggcatgataccttacctctcctgtctccagcttctcttgtccaggaaattctcagcttcaatttacagtgacaagagaaaactctttaaaaattattaacctgcttgattggtaaatttgggtaattttattacctctacttttatccgtatctgttgaaattaatgtatagaca

SEQ ID NO: 357244 - DNA, 594 bp, Homo sapiens
aatcacattattctgaaatgattcagaagaacaaagtacactatttacgtctgatttttttctaagtaaccaaaataattccattcttcattgyagtaaaactaaaatgttttacatctaagtaggaatttctcagtttccaagtaaactgatataaaattgtccaaactaaagatattaacagcaaattgttaatgtcctgcctcagtttctatggaaacttaggaattgtaggcaaatgctgaaattgaggtttcgcttatcactttattgaatgccagaaaaataaatttcaagaggcaaattgaaatgaaaatttaagtgtcatgcaaataaacataaaatgttaaattctgtgctcacaaactatttttttaacttttctgatttaacactccttattattgttctatgcttaaggcatgataccttacctctcctgtctccagcttctcttgtccaggaaattctcagcttcaatttacagtgacaagagaaaactctttaaaaattattaacctgcttgattggtaaatttgggtaattttattacctctacttttatccgtatctgttgaaattaatgtatagaca

SEQ ID NO: 357245 - DNA, 594 bp, Homo sapiens
aatcacattattctgaaatgattcagaagaacaaagtacactatttacgtctgatttttttctaagtaaccaaaataattccattcttcattgtagtaaaactaaaatgttttacatctaagtaggaatttctcagtttccaagtaaactgatataaaattgtccaaactaaagatattaacagcaaaytgttaatgtcctgcctcagtttctatggaaacttaggaattgtaggcaaatgctgaaattgaggtttcgcttatcactttattgaatgccagaaaaataaatttcaagaggcaaattgaaatgaaaatttaagtgtcatgcaaataaacataaaatgttaaattctgtgctcacaaactatttttttaacttttctgatttaacactccttattattgttctatgcttaaggcatgataccttacctctcctgtctccagcttctcttgtccaggaaattctcagcttcaatttacagtgacaagagaaaactctttaaaaattattaacctgcttgattggtaaatttgggtaattttattacctctacttttatccgtatctgttgaaattaatgtatagaca

SEQ ID NO: 357246 - DNA, 571 bp, Homo sapiens
tgcttgctgccacctgctcatagatctcagccctacaatcgggctccaccagccctgtgcagcagccccacacagggctggcattggggaagatgcaagagttcagcaygttaccaatggggcacctccactcctctccaccactgcctgtgcctttgttcaatgctgcatgctcatagatctcaaactcataatagggctccactgacctcctgcaccagctctattgggggctggcagcatgggacacgcaagaggtcatcatgttacccatgtggcacctgcacttctctccaccgtggcctgcacctttactcactgctgcatgcttatagatctcagacccacaatagggctccacaaatctcctgtgccagccctacttggggctgggattgagggacatacaagtagtcagcatgttccccagagggttcttccagtcctatccactgccatctgtacctttgatcattgcctcctgttcctcataaatctcagacccccagtagagctccgccaacctcttgtaccagcaccgctcatggctggcatttcaagacacataaat

SEQ ID NO: 357247 - DNA, 559 bp, Homo sapiens
tccatggaataagcaaagagatagtgaacaaaatctatgtgggaatgctagagaggcaatctgatggaagtatatagtgcagtttaaactgtgtggaaaattctccttttgggccacctcagtgagaagaaaaaggaattattagtaaaattgcgtttattgagccaagaagaagccactatgwtaatgtttctagaatccatttatattatagtataaacatttgatattaccaataaagaacttcttatttattaactgctcaaaaaataactgcaactattgttattgtgtgtttatcttatttatgtaataaggtacaattttcctttgaaatattgtattttgaaattaaataactgaatttcctttgtaattaagttattaagagcagcttacgtttataaagacagtgttcactaaaactctgtgtgaaaacaaggagagaaatcataaatcttactgcaagcttggtagataaagctgtaactatgatctaaaagctaaaatattttgttttagaagtgggttatcatagcatgaaataatattaagcatt

SEQ ID NO: 357248 - DNA, 560 bp, Homo sapiens
tataaagacagtgttcactaaaactctgtgtgaaaacaaggagagaaatcataaatcttamtgcaagcttggtagataaagctgtaactatgatctaaaagctaaaatattttgttttagaagtgggttatcatagcatgaaataatattaagcatttagggaatgctgataaaaatacataaaaatgttaaatatagattattttgagttctggggaaaatattggtttcataaattcttttctgcttttgtgactttcctacatattttttcaatgaacatttgctatctataaaattggacaaatctatttgttaaagatcagatggaaggtattactataagcaagggtttttagatgcattatcaacattctttttagggtagaggacttattgttccaattttataaataaacaaactgaatgccatagaagataatttgtcaaaggatagactaaggatcagaattgtgatacttacttttccaacagtgctctactgggttactcctattggggtataatctcgggtagaatcaactaaaaagctgtccata

SEQ ID NO: 357249 - DNA, 643 bp, Homo sapiens
gaactctgttaacattatgttcttaggcagaaggaactttgttgagtctgaggtcactcaaaccctggcttactagccagtaagtcttgttttatattctgcctcaacgagaacaaccaagttcttgtttttttttcttaactattgattatttatttattttgttttattttttwaatttttttattattatactttaagttctagggtacatgtgcataacatgcagcttggttacatatatatacatgtgccatgttggtgtgctgcacccattaactcgtcatttagcattaggtatatctcctaatgctatccctcctccctccccccacccccaacagtccctggtgtgtgatgttccccttcctgtgtccaagtgttctcattgttgatttactttcctatgacaaatctccattattaccctttctacttacaatatacagtgctgtgtatctgtataaactaccaagttcaactgtatagtatcttccccaactgatgatgcctggatagtctttttcagtttaaacagcattatgtctcaacataggagctacctttacagaaaaaaactatatgaagaaggtacagaaaaaattagaacatatgccagactgatttgtataggtataaaaag

SEQ ID NO: 357250 - DNA, 586 bp, Homo sapiens
ttttaaaccagaaatactggaaggacttatattatagaatttcaagtattaattggataattgtaagttgtgtgccacatggtaaactatttaaatgttagctattattctttagattactatcatagtttttaatttcatcataagcctttagactatatgagattttaaaatcttttctgtggggaattaatttagaaaccatttttgaactctattttaaaattacaattcacattcaaactaatgagcccacagttatgtgtcattkatctaatgcaactttatccgtgatttcttgtctcctaattttgttaaacagtgatctttataatttatatatggtatacttcaaatttccaataaaatagtttcaatttagtaaattattgttcaccaaatatacattttatttattcaattttataaatctattttgcaatttatttcaaagtattttaatttgaaatctatacagtttaccatgcatggccagaaacacacaggtgaaaaacacatagttcttattttcaacaaaagaaagtaaggtgcagaatgtaataactataagaatatgtgttaggtg

SEQ ID NO: 357251 - DNA, 562 bp, Homo sapiens
actattatttatataagtgagaaaacttagtttcaggagataaaagtttagtgatagtttcaggcagtaaacttcacaatctacatgacactctatgtgaagcaaaatgtttttcatttctaggaattattctcagataattcatgtggtcaatatatctttaataactccctaatagttactatttttaaaagtgattcaactatagtattatgtgaatatatataacagcagtgttacatatcactatgtgatattcacataatactatagcatttatgatcaattatattatttcatgatcatgaactaatgtattttatagttatcaattccaaatattatttcttaatgtagaatttattttcaagacaagagtgccataratttgttttaagaatatattctagtaactggtagaagtcatggttacattttaaaaaataaactaaacaaataactagaataaagaaaaggagaacaacccgcaatcatagggaagacataacagctaacttgcacaggtaaagcacatctttattacttggtgttgttgtgatta

SEQ ID NO: 357252 - DNA, 573 bp, Homo sapiens
cttgtttaattcaactattatttatataagtgagaaaacttagtttcaggagataaaagtttagtgatagtttcaggcagtaaacttcacaatctacatgacactctatgtgaagcaaaatgtttttcatttctaggaattattctcagataattcatgtggtcaatatatctttaataactccctaatagttactatttttaaaagtgattcaactatagtattatgtgaatatatataacagcagtgttacatatcactatgtgatattcacataatactatagcatttatgatcaattatattatttcatgatcatgaactaatgtattttatagttatcaattccaaatattatttcttaatgtagaatttattttcaagacaagagtgccataaatttgttttaagaatatattctagtaactggtagaagtcatggttacattttaaaaaataaactaaacaaatarctagaataaagaaaaggagaacaacccgcaatcatagggaagacataacagctaacttgcacaggtaaagcacatctttattacttggtgttgttgtgat

SEQ ID NO: 357253 - DNA, 602 bp, Homo sapiens
atgtattttatagttatcaattccaaatattatttcttaatgtagaatttattttcaagacaagagtgccataaatttgttttaagaatatattctagtaactggtagaagtcatggttacattttaaaaaataaactaaacaaataactagaataaagaaaaggagaacaacmcgcaatcatagggaagacataacagctaacttgcacaggtaaagcacatctttattacttggtgttgttgtgattatattcagttttttcatactgttaaagaaggaaatatttaatcataacttagaattaaaaggtttattgtagatgctacatattcaagtactaaaatgatctaacaaaaagtcacttacaataaggtacactacttttttaagattaattttacaaaataagcatagttatttatttaagcatttcataataaaatatgttttagatttggatattatatgaacaactattttcctctttgaatcccaggtgcacagacaaatgcaacagatagaaagattagcagcatcagtaaaattctacaatgtcagcacattgaagaggtactggtatctattttgcatgcgagttct

SEQ ID NO: 357254 - DNA, 641 bp, Homo sapiens
tgcttggctgggtgcagtgactcatcccagtgcttcaggggatcaggacgagaggatctcttaaagccaggagggtgagaccagcctgggcaacatagggagaccagatctgttaaaaaagaaaaagcatcagatgctctatatgracactgtgcaagcactgttaaatacctggtgtgcaaagcacattgttgtttatagctttatgccagaaacaaataaaccatggtaccctaaatgtcctcatttcttgaacaatgttggtttcaggtgtacttagtagcagaaaaaaaaaaaaaaagtttatattttctattgcttcttaaatcatgtcttatttttctctctctgttatcagaatatgctttggctctcttattctctccttcccccacccccattctcatacacacgtacacatgattttgaattctgaatattcaaaatccatggttaagccaagacaatctattgctaacaatcgaggcattgcaaaattgttgtttattttcactttaggggtcactcctaaataatgcatacaattaatatctctgctgccccaatatacagtcatcagtgatataatgactgattatgtcagcccttcctaactccaacaaaacttttgtatgcatact

SEQ ID NO: 357255 - DNA, 641 bp, Homo sapiens
tgcttggctgggtgcagtgactcatcccagtgcttcaggggatcaggacgagaggatctcttaaagccaggagggtgagaccagcctgggcaacatagggagaccagatctgttaaaaaagaaaaagcatcagatgctctatatggacactgtgcaagcactgttaaatacctggtgtgcaaagcacattgttgtttatagctttatgccagaaacaaataaaccatggtaccctaaatgtcctcatttcttgaacaatgttggtttcaggtgtacttagtagcagaaaaaaaaaaaaaaagtttatattttctattgcttcttaaatcatgtcttatttttctctctctgttatcagaatatgctttggctctcttattctctccttcccccacccccattctcatacacacrtacacatgattttgaattctgaatattcaaaatccatggttaagccaagacaatctattgctaacaatcgaggcattgcaaaattgttgtttattttcactttaggggtcactcctaaataatgcatacaattaatatctctgctgccccaatatacagtcatcagtgatataatgactgattatgtcagcccttcctaactccaacaaaacttttgtatgcatact

SEQ ID NO: 357256 - DNA, 538 bp, Homo sapiens
tgaaaggactctttgcctcttctatgctataatgtttctaagcacccaaacctgtaacattctgtaattttttgcctcttacaagataacaaggaaactcatggcagaagacacaagactcttaagtcagagactaaggacttactactcatagcactgcatacatctagaacatgagcttatttgtttatgtctgattcctcttacccccacattccatggagtaccgtggtatgggcccaggtatatcctccaaasagtgatttttgtatcgaagctaagaaacctagagcttagaaaatctgtttcttctataatgagtgataagcaagcctccattttgtctagagagagacattacctcatcctttcaagttacttgttgcaaaggcaaccctgaggaacgggctttgtaaagagcaatccagaacttgtatttttgtctatatattaaagatgtgcaacagtgctcagaggccatggaggattgtcttatccaacagacctgtgtatggaacatagtataaactaaacaatc

SEQ ID NO: 357257 - DNA, 587 bp, Homo sapiens
caaaattagcaaaataagatgaagatttaaaaaggaagatgaagaggaggaaaagggagaaagaagaaaagaatggaaagaaaatatagtaagaaaagtgacattgtcaagatgacagaataggaagcactggaaccttccatttcactacagatacactgattcaataattatttgcagacaaattccctttgtgaaaaatccagaaacaaattgtgcaaattgaaaggctcaatttgtacctaagccactttttgwagccggaaaagagcccttcttagaatcctggggttcttctttcttttctgatattttgttaaatatcttatatgattcattctactggtgtggcttgtatcttatttccataagagaatacttacaattgtgaatgtgaaatcacattcatcaaagccagtggacagatctgtcacacattcacactgtactccttaccctcagcagaggccacacaatcaagaagagacccccaggtcaatgcttatctcagggctaggaaaaagtttgtctatgtgtttaacatctaacttttctttgtgggttttccagagaactgacttctgtac

SEQ ID NO: 357258 - DNA, 587 bp, Homo sapiens
caaaattagcaaaataagatgaagatttaaaaaggaagatgaagaggaggaaaagggagaaagaagaaaagaatggaaagaaaatatagtaagaaaagtgacattgtcaagatgacagaataggaagcactggaaccttccatttcactacagatacactgattcaataattatttgcagacaaattccctttgtgaaaaatccagaaacaaattgtgcaaattgaaaggctcaatttgtacctaagccactttttgtrgccggaaaagagcccttcttagaatcctggggttcttctttcttttctgatattttgttaaatatcttatatgattcattctactggtgtggcttgtatcttatttccataagagaatacttacaattgtgaatgtgaaatcacattcatcaaagccagtggacagatctgtcacacattcacactgtactccttaccctcagcagaggccacacaatcaagaagagacccccaggtcaatgcttatctcagggctaggaaaaagtttgtctatgtgtttaacatctaacttttctttgtgggttttccagagaactgacttctgtac

SEQ ID NO: 357259 - DNA, 625 bp, Homo sapiens
tttacatatggtataatattttattgagaattttgtagtttacacattttagtgacatattttcttcagattacgttctcaaagctgttacatatttgtggttccttaaaatttcaaacctatasaatttctgaatttaacagattgttctcaagaatttgtccaaaagttgaaaataatttagaaggaatcaatgctttagcaaatattattttacaagctaaatgaagaggaaacagtacagaagagggaactctgggcttccctagaagacataaatcttaagttatatcattagtcttttctatgaccttaggaaaaccatttaatattcaacatacttagtgtcattattgtaatttgaatgttctctagcaacattttcaagttgtttataggaattctgaattacttactctttttaaaagtaaatatattagggagtatgcaacctgctcaaatcttgttctataaaaacaattcactaaacatgttccacaaaacccaagagttccatacagactttcaggggaggtccctgtagttcacattctttaaaataatagtgccaaacattatttctcatatctactgagtttatatattcactggtcatgcaaaagca

SEQ ID NO: 357260 - DNA, 448 bp, Homo sapiens
ggaattctgaattacttactctttttaaaagtaaatatattagggagtatgcaayctgctcaaatcttgttctataaaaacaattcactaaacatgttccacaaaacccaagagttccatacagactttcaggggaggtccctgtagttcacattctttaaaataatagtgccaaacattatttctcatatctactgagtttatatattcactggtcatgcaaaagcaatgaagggtacaattgctcgtgccttagcatgattcaagatactaaagcttggcctaactagcagttagactttaccagcacacactaacaataatagtaacgctgaaaaaaaatcccaaattttatttaggaatgccctgatgaagcagaaaaaagtcacttttataaatcttgatttttgaatacagatcttttaaataaaatattagataaataaaa

SEQ ID NO: 357261 - DNA, 567 bp, Homo sapiens
atcacatccctgagatcagatgtgggtggggatgtgtagttacttgaaatggcaaagattggacattgtcatatggcttaatcattgcaaagcactgattgcataagtaagaataacatttctggcacaacagcaggttcacaagacaaggagtgatgacagaaacaacaggtccagaagagctactaatacaaagatagaggggataacaacagaaatagggaaaacagtggacttgggtagattacaacaataacaacaacaaaaaatggtgctggagaattgagcattgtttttgttcctgaccacttatagagcaatttagtagagaagggtagggtttttgttgttgctgttgttgttaagtaaccattttacttaaayagatttcacgttttgtttaaaacttcgtcaagtatctgagagaaacaatttcatgacaaatttcaatggcagtatggtttaagtctaaagtgatatttgggtgttcaagtgaacattgaattatgggataaattttaaattttaaagattaaattgaaagattaaatttgattcttttggcag

SEQ ID NO: 357262 - DNA, 544 bp, Homo sapiens
tatacaatttgctattaataagattagataaaatctcctaaagcaacattttcccctcattctcagttgatgtttcagaaaaacctttgacagaaaaatttgaaaataaagatttttagcaatagaagtgacatactaaaatgtactgatccaaactaagaagtctttggaacaggcctgtgcacatttgcttacagcccaccaaattcagaatatttaatctgaaagataatttagagactataggaccatctctgcaattttacaaaggcccagaggctcaggttgcttagccaatttgcccaagtcataagctcatcaggaacatctccttggagatcatcccagattcaagaccacgtcacctctttcatgctctaatacatcagcctcttaactcatgtgtctgcttccatcctccatacacctccccaccttccagcagatttcctcccagggcctcawgatctggcaatgacacctctccccttcaagccagtttctaaacggaggaggaaagatttaaacagggtctggaaggatt

SEQ ID NO: 357263 - DNA, 580 bp, Homo sapiens
gcataacacaaaaacatacaagtgtttgagacaaagaagactcttaaccagggttcctagctttcattgagaaaatcctctcaatacatccttatcactcaaaaaattgaaatccattataataataatcatactaatctattgatgaaataataagaaacagcggaaggaaggatggtaggtaacagtcggcacaagacacacaaagaggaaactctatgggttctgcgtgcgtgagttgctgaaaatgagctttaaggttaaagccaggagtttggaattaatgtgtagcatgtgaaatataaaaaactccattcaatgccctcaattttatcagaggattagggtaacctcctggatacttgcagaaaaaagaaagccagcaataagcatttggctgtggcttggagttttaatttactctcagcatgtagcatgggaacctttttgcctgagttgagaaaatagcctataaactagcacyacaaccccagaaaaacacagggccccagtagagacaaacagaagaacttccaacagagatgcccacagccaaaagcacatctggtctctaaagaat

SEQ ID NO: 357264 - DNA, 569 bp, Homo sapiens
ggacaaacttgatgtagttggtgaaggggccagagcagattatgaccaccctatctgccctttgaaataagtataatcttatctcttgttgaagaagaaaaccttctgaggtttcaagcagggaagtgatgagattttcttaaacagcttactctgtcagtagctgtgtgcagagtttgcctgaaggcactgatcgcagaatcctagctaatggaacaaacttgggattttacttcaaatattcaccaaatgctagccctttaagcaaccctgtggacattagaaggataaattttcatttagtctgtgccagattcagagaaagcggcaagtgcagaatgcctggggaggcagtgagatgagttgcaaagtggaccttgaactggtcttcgaggaaagagcacttgatttttatgggcagcgatggaaacatcctaatgaagatgtcagcgtaaacaggacgaggatgaggcaatctgtttggaaatactggctctcatcagcaaagggaatcacattataatttaatttggatyacatataactttttccttaaaacatccataaaa

SEQ ID NO: 357265 - DNA, 576 bp, Homo sapiens
ttataagattgttgtaatgttcattttactggtaagaaacggaagcacggagaggggaactaactttctctaaaccagattgcccataagtgctgggaacatgatggagcctaggccrgcttggctcttagctaccagttatactcaaagtttacttacccccttcctataaagaaaaagctaatttttacaaaattatcaagtaatgagatcttcagggaggaattatttaatccacttaagagaacaagttgctttcaagtatcctcaggcagagtagaagcaccacttatttactttctcacccctagtttattgatgaagtgccaaatataagctaggtagcggggcagacaaaggaagacaactgttatctgtctccgaggagaccaactggcaaatcattaatatttcttctttggttaccggggaaatttcttcacaacgaggctggcctagttgaagttatttgcttgcacatacagcaagcaaaatataaattgttgagtctgaaaatatgcccaacattgaaccaaatgatcttacaactagcaacatacttaataaatgccagca

SEQ ID NO: 357266 - DNA, 576 bp, Homo sapiens
ttataagattgttgtaatgttcattttactggtaagaaacggaagcacggagaggggaactaactttctctaaaccagattgcccataagtgctgggaacatgatggagcctaggccagcttggctcttagctaccagttatactcaaagtttacttacccccttcctataaagaaaaagctaatttttacaaaattatcaagtaatgagatcttcagggaggaattatttaatccacttaagagaacaagttgctttcaagtatcctcaggcagagtagaagcaccacttatttactttctcacccctagtttattgatgaagtgccaaatataagctaggtagcggggcagacaaaggaagacaactgttatctgtctccgaggagaccaactggcaaatcattaatatttcttcwttggttaccggggaaatttcttcacaacgaggctggcctagttgaagttatttgcttgcacatacagcaagcaaaatataaattgttgagtctgaaaatatgcccaacattgaaccaaatgatcttacaactagcaacatacttaataaatgccagca

SEQ ID NO: 357267 - DNA, 534 bp, Homo sapiens
attgcaccttccaaaatggccagtctgacatgccctttggccaactgcctaaactaaatgattggttgtttctcacatcactcatgaatatttaggcttatgaagaagtctgtcaattatatctcttgatctattcaaactgttaaggaaatttcaaacatctgactgtaaaaatctatattttccctcatgcatgaatgaatgaatgaggttaagacatgaatttaagatatatatttttggttactgattttctatcaactctctttgtttcaaaaacttcacaaacacaattctgcttctgtgtgcatttccaaatttctgctctaattatgtcagttaactttattttttaactgacaccgtattgcagatcagtatttgctgttgaaatttccatggtaccaatcccaggagcatcattaagaaaaattcgrgaatataaatgaaaaatcatgttgaatgttgacagttttacagacattaggtttggcatggcttcctcaatgggataatcactccttaaaattaata

SEQ ID NO: 357268 - DNA, 591 bp, Homo sapiens
ggaatttctgcatgccaggccctaatcaggtgtactttacctccacaaaaaaagcaatgatgttggacttttttctctctctctttcactttttagatgagaaaactgtgcttcagtgagattaaaactcttacataggttacaaaatctgagacacttccagggcaccaatttggttgatctgaccgttaagccccatgactattcgaattgacagcccatcctaccaaacacaaatatgtgtgtccatgtctgttctacgtgcatatagaatgcaaaccatcctgaccagctaacatctgcctgatcakcagagcaatgaactgtactgggctggacccaagtattcaacctcagatgttcctctatttaaatggttctttttttaatcattcagttattcactcattcacttttaaaattcattgcattaattaacatttttttctgttgccataatatttgtctgaagtgagaataagggaaaaaactattgctaccattgtaattgtttccaagactaattgctgagcttccttttatgaattctttatttagcaaataagcttttccttttagaaaatatgcatc

SEQ ID NO: 357269 - DNA, 581 bp, Homo sapiens
ggagcggttttccccatactgttctcgtggtagtgaataagtctcacaagatctgatctgatggttttataagaggaaacccttttcgcttggttttcatcckctcatctgccaccatgtaagacaagccttccgccatgattgtgaggcctccccagccatgtggaactgtgagtccattaaaccttcttcttaataaattacccagtctcgggtatgtctttatcagcagcatgaaaatggacaaatacagatgagttcagctataaagcagagtatgtagaacataaaagaaatatatatgtgtgtgtgtatatgtatataattaaaacagaactaagatacacctgacacctggtcttaatgaagtcaatattcataaatattttatttataaacttcaattatttctttaaaaaaattcatataaagaacaaattcacaatcagctatgtagcaagaagttatacattttacaccacaactcaattttccatgttgcactaacttctctaaatctttgttgagcatgagactgtcatcacaaaataaaaagaatattccttacttttatttcaaat

SEQ ID NO: 357270 - DNA, 581 bp, Homo sapiens
ggagcggttttccccatactgttctcgtggtagtgaataagtctcacaagatctgatctgatggttttataagaggaaacccttttcgcttggttttcatccgctcatctgccaccatgtaagacaagccttccgccatgattgtgaggcctccccagccatgtggaactgtgagtccattaaaccttcttcttaataaattacccagtctcgggtatgtctttatcagcagcatgaaaatggacaaatacagatgagttcagctataaagcagagtatgtagaacataaaagaaatatatatgtgtgtgtgtatatgtatataattaaaacagaactaagatacacctgacacctggtcttaatgaagtcaatattcataaatattttatttataaacttcaattatttctttaaaaaaattcatataaagaacaaattcacaatcagctatgtagcaagaagttatacattttacaccacaactcaattttccatgttgcactaacttctctaaatctttgttgagcatgagactgtcatcayaaaataaaaagaatattccttacttttatttcaaat

SEQ ID NO: 357271 - DNA, 589 bp, Homo sapiens
aagcatcagctccgattacgctgaaagtgtgatgctcctcttacctagatgacatttaaactcccttcatattgaaaaacagaattatctaaacaaaaaatatggttgaaagagtttatggcaaatagaatttggctgtgaattatgttttccaatccctgctgtatagagmaaattgttagaatcagcatttataattgagtttcaactaaatgctttgttttataatttgctgtgaggtaattagaaaaatgtgcatgaaagcatgacacgtataaatcacaggtatattcatctgaagtattttgtgcagtttatatttatagctcattctgtgaagctaaatccactgtattgaaacagacaattaaaggaaggtaaagggactattttcccagcaattgcaatgtgctaggcatgatgccaggcactgcacaagctctatctccattaatcttctctaatgtaaatattgccaccacttcacaaataaagaaactgaactatgtataaaactgagcttaaggggatcaatgaatatattatttgttgttgaacatatgcaggtctaattaaagtaattgcaagt

SEQ ID NO: 357272 - DNA, 588 bp, Homo sapiens
gccccaactcacaaatgtcttaacagaaacttacgcatcttttaaattaacagcattgagccacattggaaaacatccaggcagcttgttgcaagaactgagccctggggctaggaatggtcagatatggataccaaatggagtcatagctgattcatccacaacctggggccaattaccccagtcttcttctttgagttgaagattctttttatgtaaaatgaaagcacagagtagctgattatggtatccttcatatcaaactctctatgattatgagctcctaatgcttgacaaagcttaaaacagctaatcaaaatttaatttaaacatataaatgcaaaaatcttcaattccagtaatctcttacactttttcctttagaacttctgagcataaagtttactccatggtacaatacaataagctaaaatatctccaaaaagacaatcaatctgtaaacatctagacacacaatgtaygctaaatgtactactttaatttctttttaaataaataagcagaaatccactccatcttgcacattaacatataatatatagaaagtatgcatttttaacagcctgg

SEQ ID NO: 357273 - DNA, 510 bp, Homo sapiens
aatccataggtgcaaatcttcatgaccttgggttaggcaatgattttttagatataacaccaaaagcacaagcaacaaaacaataaaaaagatagacctgacttcatcaaaatgacaaatgtttgtactttaaagaacaccatgaagaaagtgaagacagcatagagaatgggagaaaatatttgtaaatcatgtaactgataaaggacttggatgyataatacataaagaactctgacaactcaataataaaaaatgaccaactgactgggtgtggtggctcacctctgtaatctcaacactttgggaggctgaggaaggaggatgtcttgagtccaggagctcaaggccagcctgggcaacacagtgagaccctgtctctaagcaaataagttagctgggcatggtcgtgcacacctgtattcccaactacttgggaggctgaaatggggggatgacttgagcccaggaggtcaaggctgaagtgaaccattatcatgccactacact

SEQ ID NO: 357274 - DNA, 597 bp, Homo sapiens
tcccggtagtctgggtctgtttggactcagagttctggaatgtggtgctgaagcacggtcccacattattctttgggcaggtgttcctgctggaaacttctctgggcacatcctggtgacttttcattataagtccagtttgcactcatctctgagaaacagagctgttttcgccagttctgttgcttttcagggaaacataaaccctctatgtttcagtcctgtgggtctccattgactcatgtgtctgcagggaaaccgaagaccatactggctgctgctataattttggaatccagttctgccttttgcaagcccagctggcatgtggggggcagggtagcagggaaggagggagaaatgtaccattcaacctttccaccatattcagaagagtaattgtttagatcaaaaagggaagtggaaggttcaattatacattgagtgtcagcctttttatgtattttgtcatatttgagcctcagagtagtgatgagtgtaagttggtaatacctctgtttttcaatgggaaaatgtagtcagggaagttaagtgacttrcctggaagctctctgcagatgttaaatgcagtattgc

SEQ ID NO: 357275 - DNA, 594 bp, Homo sapiens
ttttctcagagctgactgtgcctatactctacctatttttctgttatatggttactgttttattattgatatgtaggaactttagatatattaaggaaataagctcttggcgatgtgacatactgttgcttttaagtttgttgtttgtcctttgactttgcttaccgtgttttgccatgagggatatttttatatttatgtaatggaattgtactaattttaaaaattgcttccaaattttgtgttacactcaaaacatttcagatattacctttatcatattctgaatacctgttatgtgtttgactctatctcgggaattccagttatattttattgatctatctgcttatttgctcatcattctagcttttaaaaagatttgttctagtctctgaaagtgcagtcaatccaccgtcattacaaatttcttggctatctcacatgtttatrtttctctattaatttttaaattgacttttgtttttaaaaaagcctattgacatttttattgtatggacttatatttaatgattaacataaggagaaatgaacatctttatgattctgagtcttcctgtccaagaatggtgt

SEQ ID NO: 357276 - DNA, 553 bp, Homo sapiens
cacatgtggagtgtgcacacgtgtcccctgggtggtctcaaactaagcatatccgaggtggaattcattcttcccctggaactactcttcctctctgcatttcccaatctcgattaatgttgtcatcatccatgaacgttcccattttttaatcccccctcatctggtgactggtcctgacagatccagtcccaagtactctttgaatttgtcctctcttccatcctccagcagctccaggccttcctttctcacggggactggaatggcagcctcctgacctgctgctcctgcacactcagtgtcccgttccttcctttgtggaagcagagggccagtcacatcactttcttattttaaaaatcttcaatggttttgtcatcactaagggctcaaatgccttggcatggtatacaaagcccctcacttytgaaccatccaccttccagcttcatctttcaagatccctttccactctgtgctcatttgagctttcatgtccaagtgcttccttcacgttgttttcttcattagaatgctctttcccttattg

SEQ ID NO: 357277 - DNA, 622 bp, Homo sapiens
aatttaaacaaatgttaaaattgcatctcctacccaggcacttgtttgaaatttctgttttatttgctctttggagattacttcttggtatacttacattttctatgtcaagataaaaagagagaagtgatagtgtgtgtctgtctgtgtgtgtgtgagtgtgtagtatttttcacagaatttgtgtttccaagcttacttgtaactcaggcttgtcagagttctcataacaaatacatgattaaaccatattacaatctgtcacctccaatgtcaaagttttatggtacctcaatgcttccagggaggatggtctaccttcatgatttatttacagaccaaatcataatcaaaaataattcctaggcttatacctattatcaggggtaagaaatagtttaaacmcatttgcatgaacaaaggtagtctaatgtttataaaaaacaatttgaaatgatctttccctttagaatacaatgttttttaaaatttcttgatgtatatttttatatactgtgaattatatattttatatacagttgggcacattagtgtctttgtgatatagcaagattttgtacagacttttaatctatcaaagacaaagctagataagtaagcg

SEQ ID NO: 357278 - DNA, 622 bp, Homo sapiens
aatttaaacaaatgttaaaattgcatctcctacccaggcacttgtttgaaatttctgttttatttgctctttggagattacttcttggtatacttacattttctatgtcaagataaaaagagagaagtgatagtgtgtgtctgtctgtgtgtgtgtgagtgtgtagtatttttcacagaatttgtgtttccaagcttacttgtaactcaggcttgtcagagttctcataacaaatacatgattaaaccatattacaatctgtcacctccaatgtcaaagttttatggtacctcaatgcttccagggaggatggtctaccttcatgatttatttacagaccaaatcataatcaaaaataattcctaggcttatacctattatcaggggtaagaaatagtttaaacacatttgcatgaacaaaggtagtctaatgtttrtaaaaaacaatttgaaatgatctttccctttagaatacaatgttttttaaaatttcttgatgtatatttttatatactgtgaattatatattttatatacagttgggcacattagtgtctttgtgatatagcaagattttgtacagacttttaatctatcaaagacaaagctagataagtaagcg

SEQ ID NO: 357279 - DNA, 525 bp, Homo sapiens
gattcaaagatatacatggactgaatataaaaggtgcaaatagtagctaagagagctgaagtagtaacatggtttgagtgtgtcctctaaaagttcttgtgttgaaaacttggtctccaacatagcagtgttgagaggtagaacctctgggaggtgaccagtagaacctttcagaggtaaaacttttgagaggtagaacctttgggtggcaaagtcctcatgagtgaattaatccattcatgggttaatgagggagtgggtcacttatgacaaaagtggatctcttataaaagccaatttggctatcgcttgtgagtaatttataaaatagtctcaggtattcagttatagcaacaggaaagagactaagktaagtatacatactaacgtcagacaaaatagacttaattttcagctaccaccctgatccctggcactgtttctgctctgatgaccacttaaagagtttgctctgggaataaaaactcattcaaatatatttctaagatagataaatatagattc

SEQ ID NO: 357280 - DNA, 484 bp, Homo sapiens
tagcttgctgttgattgcttacagggaatcacgaactggccaaaaccagtttcaatacctgtcgcaagtattacccacgcattttgtaaatttaaatcctaagtttgcaccactttgagagggaaacaaattccttgtagtatgaggcagcttccaggagtagccaatcctcaggcagaggtgggaaccgcttccatatgccatttgtatgcatgcacttgcaagcaaggcacaaaaataaaaaggctgtgagcaaagacctttatgattgatggtctctgatctcggaaaaatactcttgagagtgtttgtcttgytgtcttctcctccccaaggcaagggttgaggctgccccccccagtggagcagagatgtgttgcacaggccacatgggcctcctggctggataagctcccccacctgagaggtgaagtctgggtggaagtgctccagataggtgacatggcttcctatccacatcaca

SEQ ID NO: 357281 - DNA, 589 bp, Homo sapiens
tgtgcctaaaaaagccacaggctctaatgccagcccatgaaaggaactgtggaggttgtactctgaagagtaaaaataatcttctttgacttatttctcacagggacagagctgtccaagatattgggagcccacctctcacattagtgtccactggatgtgagacttagagtaaagagaatttttttggagctttaagatttaatgaatgccctgttgggtttcagacttgcatggggcctatggcccytttgttttggccaatttcttacatttgaagcaagaacatttacccaacgtttgtacccttattttgccttcaaagtaactaacttgtttttgattttacaggcttataggtggaagggacgtgccttgtctcagatgagactttggatttggacttttgagttaatcatgaaatgagttaaaactttggggaactgttgggaaggcactaggagttttgaaatgtgaaagggacatgagatttgggagggtccaggggcagaattatatgatttggctgtatgtttccacccaaatctcatcttgatttgtaatcctcacatgttgagagtgagacctg

SEQ ID NO: 357282 - DNA, 621 bp, Homo sapiens
tgagtttttaggaacaatgtaacatgctctagtgtgaaggaagttcaccttttattgggctgtgatttagcttccaacctcttactctcaggctcgtctcactatccattgttgttaacaatacaatagtgtatctaggttgtgtttgctgtagaatgacacaatttgctgtgttgcctccaaaactccagcttcttgtagagagtccmattttcaagcatttctgccagttttgctgatgatacagctgtttttgttttttaacctcactttgccaaaatattttactcaaagagataattttaatttttattcactctttattatacattcttcactacagagaaacatagatttaaatctggtgatgattgtgttatagaagaagacaatcagaatactagatgctgattatcttagaatcttctctgacacctaccttccccttttgtttccttgaaccaaacttgtgcttcctctgggcttttcccataaaatcaggtcattgttggatgagtcttttggttcattctaaatagtgagcatcgttaagttcttcaaaaatttctataggtatctaaattcttggtaaacgctatttagacctagtgtttaaaaaat

SEQ ID NO: 357283 - DNA, 621 bp, Homo sapiens
tgagtttttaggaacaatgtaacatgctctagtgtgaaggaagttcaccttttattgggctgtgatttagcttccaacctcttactctcaggctcgtctcactatccattgttgttaacaatacaatagtgtatctaggttgtgtttgctgtagaatgacacaatttgctgtgttgcctccaaaactccagcttcttgtagagagtccaattttcaagcatttctgccagttttgctgatgatacagctgtttttgttttttaacctcactttgccaaaatattttactcaaagagataattttaatttktattcactctttattatacattcttcactacagagaaacatagatttaaatctggtgatgattgtgttatagaagaagacaatcagaatactagatgctgattatcttagaatcttctctgacacctaccttccccttttgtttccttgaaccaaacttgtgcttcctctgggcttttcccataaaatcaggtcattgttggatgagtcttttggttcattctaaatagtgagcatcgttaagttcttcaaaaatttctataggtatctaaattcttggtaaacgctatttagacctagtgtttaaaaaat

SEQ ID NO: 357284 - DNA, 558 bp, Homo sapiens
tgatagtgatgtttgctcaatgttcgttgaagatgcagggtttctgaaatgggacataagtcggctattggttgtgatttgaaaaatctgtgttccatttctggataaatgtcacttttgtaaacttggttgagatattgtctcataataaaaatcaggaaataaatatgtaataattactccatatctaattgccataatgtcaatagaatacccgctacatatggcattaattatgtatatattgaatgaataattgactgaatctcatgataactcgttttgcctaaacatatgatataaagattaattatatgaaatctgttactgtttttcaagggcattctatctatgtaaacaaaytgagcttattactctgtcatttaaatatagcattaggccaatacagtcatctcagctttctctggttctaagatttggggtcacatgcctagtaaaccaatagctaaatgagactggaatttgaatgttttggtaaataagatttcaattagattcttcagattatattattcagatgtgggggcttattaatat

SEQ ID NO: 357285 - DNA, 593 bp, Homo sapiens
tcattggcttgaaaactttagttagaggagcttccatgttggtagatcagacatggtataagtatttaaatagtggtgctggctgaacaacagcgcaaagaaaggaaaaggcatttctagagtacattacaatcacatttaagatgaatcactgccttttccagatcctaatgagttcattataatcaaattgacaccaaatgctttgctgtcttctatgtgtgctttattatggactgagcaccattctgtgttactggcagatgaagttctcagtagcagccagacgtagatcaaattagcttgccagagaatccatgctgctggacccatacacagtctctatgycaccatgactatttattccatgatctcatggtaaagcactggaatacttaaggacaaagactagctagcatttaatggctgaggtgttatgtgcacttggtgattccatactctctgatggagattaagctgtgatgcagatatctgagcactatattttatggtttacaggtacatctttgtgacttctccccagactgcccttataatcgtgcatatctttaccccaggttaattctgtttcc

SEQ ID NO: 357286 - DNA, 593 bp, Homo sapiens
tcattggcttgaaaactttagttagaggagcttccatgttggtagatcagacatggtataagtatttaaatagtggtgctggctgaacaacagcgcaaagaaaggaaaaggcatttctagagtacattacaatcacatttaagatgaatcactgccttttccagatcctaatgagttcattataatcaaattgacaccaaatgctttgctgtcttctatgtgtgctttattatggactgagcaccattctgtgttactggcagatgaagttctcagtagcagccagacgtagatcaaattagcttgccagagaatccatgctgctggacccatacacagtctctatgcmaccatgactatttattccatgatctcatggtaaagcactggaatacttaaggacaaagactagctagcatttaatggctgaggtgttatgtgcacttggtgattccatactctctgatggagattaagctgtgatgcagatatctgagcactatattttatggtttacaggtacatctttgtgacttctccccagactgcccttataatcgtgcatatctttaccccaggttaattctgtttcc

SEQ ID NO: 357287 - DNA, 566 bp, Homo sapiens
caatcataaatttgttaaattatgtttagaacatatatttatttatgactttgattcaagaccattgtattcacagtttccactatttctgattcaccaactttggatgtatcccactgaatatgacagaacagtggaaagcattgcagaataaagcaaaaggccctctaatttcagacagatgctcccctcagtctgtttaaaactttgagcaattcacgtaatcaaatatctttcttaaagtataagtggaaatagaagaataaacatcaaaatttgaataaaytaaatggcagacaacctatgaaaaatataatttttctagagctcttgacaaatatctatcagagggtaagaatgctttaatgttgttaaaattaaaaagaataccaagctttggtttccacattgtctatcgtttactcagtatcaagctgtattttaaacatgtgttatatttatgtaacacttgtgtttcattacaatcttctcagtcatctattcacccatccatgtattaactaatgcattcgtgctgtatcctaaaatattaatatttgtgctat

SEQ ID NO: 357288 - DNA, 624 bp, Homo sapiens
aaaaaataatttatttcataggcatgcctcccaatttcagcacttctttatatttttattatttatgcttctcctagattatttaaaaattttgtagataacaggttgatgagtgcagcaaaccaccatgcacctgtatacctgtataacaaacctgcacgttctgcacatgtatccctgaacttaaagtataatttaaaaaaattcagctctatgaagatataattgataaataacactgatttaaggacatttggtaaggtttgtcatatgcatatacctttaaaatcatcaccacaataaaaataatgaacatatccatcactctctaaagtttctttgtatcccttgtaatccttccttcctgtccctcctcaaacctacatatattcacaggaaccactaatctgttttctaggatgatagattagttttcrttatctagaattttaaatacatggaattaagcagtatgtacactttttggtttctgctttctttcagcacaattatttagagattcatacacttttgcatacatcaatagtcaattattttatggcttgaaagtattttattgtataaatatacaataatttggatttccttaacctactgatgaac

SEQ ID NO: 357289 - DNA, 563 bp, Homo sapiens
tgtgaacacagtgccaaaattatttaaaatttaattataaaaattcagttaatcaatgacttcaacaatatcactgatttttttcccatagggggaaacaaagcattggaaaataaaattttcaaaaataatactgcttatttcattactaaagtactgggaaaaaatcttttcacatggtaaaaccctgtctctagtaaaaatacaaaaaattagcaaggggtggtggcacatgcctgtaatcctagctacttgggaggctgaggcaggagaatggcctgaacctgggaggcagagctggcagtgagccgagatcrtgccactgtactccagcctgggtgacagagggagactctgtctcaaaaaaaaaagacttaaatgtaaaactcaaaactacagaaaccctggaagacaacctagacaataccattctgaacataggagtgggcaaagctttttggacaaagacaccaaaagcaatttcaaaaaaagcaaaaattgacaaataggatcaaataaaactaagcttctgtacagcaaaagtaactatcaacagagtaaac

SEQ ID NO: 357290 - DNA, 563 bp, Homo sapiens
tgtgaacacagtgccaaaattatttaaaatttaattataaaaattcagttaatcaatgacttcaacaatatcactgatttttttcccatagggggaaacaaagcattggaaaataaaattttcaaaaataatactgcttatttcattactaaagtactgggaaaaaatcttttcacatggtaaaaccctgtctctagtaaaaatacaaaaaattagcaaggggtggtggcacatgcctgtaatcctagctacttgggaggctgaggcaggagaatggcctgaacctgggaggcagagctggcagtgagccgagatcgtgccactgtactccagcctgggtgacagagggagactctgtctcaaaaaaaaaagacttaaatgtaaaactcaaaactacagaaaccctggaagacaacctagacaataccattctgaacataggagtgggcaaagctttttggacaaagacaccaaaagcaatttcaaaaaaagcaaaaattgacaaataggatcwaataaaactaagcttctgtacagcaaaagtaactatcaacagagtaaac

SEQ ID NO: 357291 - DNA, 285 bp, Homo sapiens
aatgaaagtggtaaaagtaggcatccttgctttgtttcagtccttagaggaaagaccttcaattttgccccattcattatgatgctagtagtgtctttgtcatatatgatatttattattttgaggtattttcaatccgtaactattttggtgagggtttttgtcatataaagggatgttgaattgtatcaaatgcttttttggcaactattgaaataattatgtagttttgttcttgattctgttaatatmatgtattatgtttatcgatttgcatatgttaaa

SEQ ID NO: 357292 - DNA, 596 bp, Homo sapiens
cagtttgttagtgtatactatgttcacaatagcctctaatggttttttgtatttctgaaatctcggtaattatgccttctttaattgtttttcactttatttacttaggtcttctctctttttttcttagtccaactaacratttgtcaattctatctcttcaaaggaccaactttccatttcaagaatcttctgtattatgtttctagacttaatttcatttatttctactctgatctttattatatctttccttctactaattttggatttggtttgtttttgcttttctagttccttgaggtgttattgttagcttgtttatttttactttttgatataggcatttattgctataaacttccctgtcagttctgcttttgccatatcgcatagattttcttatgttgtatatccattttcatttgtttcaagatatttttaaaaattccttctattcatatctggattagataaattttagtattagtacagtgttagcctctaagtgttattattctttgttttatttaacgtattaatataagctctaatccccaaatctttgacattttggtactatgtttatgtatatt

SEQ ID NO: 357293 - DNA, 596 bp, Homo sapiens
cagtttgttagtgtatactatgttcacaatagcctctaatggttttttgtatttctgaaatctcggtaattatgccttctttaattgtttttcactttatttacttaggtcttctctctttttttcttagtccaactaacaatttgtcaattctatctcttcaaaggaccaactttccatttcaagaatcttctgtattatgtttctagacttaatttcatttatttctactctgatctttattatatctttccttctactaattttggatttggtttgtttttgcttttctagttccttgaggtgttattgttagcttgtttatttttactttttgatataggcatttattgctataaacttccctgtcagttctgcttttgccatatcgcatagattttcttatgttgtatatccattttcatttgtttcaagatatttttaaaaattccttctattcatatctggattagataaattttagtattagtacagtgttagcctctaagtgttattattctttgttttatttaacrtattaatataagctctaatccccaaatctttgacattttggtactatgtttatgtatatt

SEQ ID NO: 357294 - DNA, 610 bp, Homo sapiens
ttataaaaagtattataataaaacttaaaatattctttcacaattgggaatgaacactaagtgggtaaattggtatcgaggcaggatggggaataaagagaggttgctgtcctggtagaattgccctggatttacgtctcccatgtggcaatgtttaataagactttctcttaaaaatactattttgatactaatcccttaaatatcatttatacaacagggaaaaatggatgagcatagcataagaataaatggcagctattgcgataatcaactgggaaaagaaaaacaaattaaacctaattttctaacactgtctaattgcaattatatttttaaaaaggtgcttaactatatcaatatgttgtaattagactaagaaatggaggagggaattaatgacagaraataaatgtataaaatttctagttcttaactttgatcatgtataagaatcacctgtaggttttctttctctcttgctcttgctctctgtctgcaaaagaagagtgaagaagagtaacttagaccccatggatgatgttatttttcttataaaaaatcaatttattaaaatctctggaaaataaacttgggagttcacgtacac

SEQ ID NO: 357295 - DNA, 654 bp, Homo sapiens
ttcttttctccacagcctcagcctcaccagcatttttttttaatcttttaacaatagtcgttctgaccggtactagatggtatctcattgtgcttttgatttacatttctctagtgattagtaatattgagcattttttcatttgttggcctcatgaatgtcttttgtgaaatgtctgctcatgtcctttgcttatttttttaatggggttatttgctttttcttgctgatttgtttaaattccttatatattgkggaattagaccattgtcagatatacagtttgcaaatcttttctcccattctgtaggttgtctgtttactctgttgatagtttcttttgctgtactgaagctctttagtttaattagatcccgcttgtcaatttttgtttcggttgcatttgcttttggagtctttgtcatgaaatttttgccagagcctgcacccagaatggtatttcctagcttgtcttcagagattttattgttttaggtcttatatgtaaacaataaccatcttgagttgtttttttatatggtgtaagaaagcagtcagtgtcagtcttctgcatatggctagtgtaggcatattttaattaagtatatagtaggtattattagtagtataagtaggtattactagtattaatat

SEQ ID NO: 357296 - DNA, 484 bp, Homo sapiens
atcttacttggattttctgaaattcccaaatttcatgtcaacatttctagtgaggttttggaaattttttgaatggtatcctatcctcaaatatgttttccaagttgcttgttctctccccctctctttctgagataccaattagtgataaatttggtccctgtacagaattcctcatttctcagatgttgtgttcatttttcagttcttttttctttatttttgtctgactgagttgatttgaagaaccagtcattgagctctgagactctttcctcaccttggtwcattctgctgttaatacttatgatattgcattataaaatgcttgtagtgagtttttcagctctagaaaataagtctggttctttctcaggatggctgtttcatctttcaactcttgtatctttttattgaattcctgggattgagtttcaactttcttctgaaacttgataatttttgttgccatccagcttctgaa

SEQ ID NO: 357297 - DNA, 580 bp, Homo sapiens
cagtggttgtttctggttggtgagttagatatgattttcacgttaactttyttcttttaaatcttaattgaggtacaattaacctcaatacataaaatacgtaaaacaaaatttatatatatttaaggtgtgcaatttgatgttttgatatatacaaacattggaagataatgaacacaatcctgctaattaacatatccgtcacctcacatagcaaccattttcaggtatacaaagtattattattaaatatagccatgatgctgcctctcagatctccagaacttgtttatcttttaacagaaagtttatatcctttgatcaacatctccccatttccccccacccacccccagcatctcctcatttctctcattctggattcatggtaactacctttgtactctgttctgtgaattttccttttttggattccacatgtaagtaagatatgtagtatttgtctttctgtgcctggattatttcagttaacataatgtcctccaggtttattcgtattattgcacatgacaaaatttttttcctttaggccaaaaagtattccagtgtatctatgcct

SEQ ID NO: 357298 - DNA, 584 bp, Homo sapiens
tccttaggacaagtcctggacctacatccactggctcctatcctctgttagttgaggatttccctggaaaacttaactttcttatgcttcagtgttgatcaagtaggctccctaractttggaaaagactgtgagattaaaaaaaaaaaaaaagcaagaaattgatggtaagaagtagaagtaaagtagtgtcaaaatgattgagctcacaggaagttgtgcaatgtagctggggctgatcccagggcagtcttagagatgtgaggagatacaaaaagtaacatttttgcatggcagttgcaatccagagagcaattaattataagtccatctctcgtttactaaaagtatgtaatttttgtttgagtattttagtcttagtttgaatttgatcaacatactttatcaaaaatatatgtacaactaataagacaactatacatttttcttttaaatgaatgctatggtgcattatatcaccacaattactaatgacaatatgtcataatcaaagtgaagacaacctgagaattatgtactagtgttgagtctataagagtgtcattgtgaaaatattttaaaat

SEQ ID NO: 357299 - DNA, 542 bp, Homo sapiens
ttccaaggacctggttcttctgactaatatccaaggagaaactgacttttttaacaaataaagagcagacacacacccttatggacactggagctagcctttctgttcttaaccctatcatttaaactgttccctttcatgaagtaaaaagagtayacaaatggtaggggtgccaggcatagtggctcacatctgtaatttcagtggtttgggaggctcaagcagaaggatcatttgaagataggagtttgcgatcagcctgaccaacaaaaaaatagccaggcatgatggcacgctcctgtagttccagctatgcaggaggctgagatagtaggatctcttgagtccagtagttcaaggctgcagtgagccatggtcctgccactgggttccagccctgtctgtaaaaactaaagtttaaaacagaacaaaacaaatgtatctaatcaacctgtgacttcacataagtccaaacccttagaatcccaggtaggctcatttagtggccttaatttctttctggttagtccctcagctcccat

SEQ ID NO: 357300 - DNA, 542 bp, Homo sapiens
ttccaaggacctggttcttctgactaatatccaaggagaaactgacttttttaacaaataaagagcagacacacacccttatggacactggagctagcctttctgttcttaaccctatcatttaaactgttccctttcatgaagtaaaaagagtacacaaatggtaggggtgccagrcatagtggctcacatctgtaatttcagtggtttgggaggctcaagcagaaggatcatttgaagataggagtttgcgatcagcctgaccaacaaaaaaatagccaggcatgatggcacgctcctgtagttccagctatgcaggaggctgagatagtaggatctcttgagtccagtagttcaaggctgcagtgagccatggtcctgccactgggttccagccctgtctgtaaaaactaaagtttaaaacagaacaaaacaaatgtatctaatcaacctgtgacttcacataagtccaaacccttagaatcccaggtaggctcatttagtggccttaatttctttctggttagtccctcagctcccat

SEQ ID NO: 357301 - DNA, 544 bp, Homo sapiens
gcaatgtggacagacagtatttatggacagaaaaaggaagtgacatacagtaacagtttggttgattacagcttgacttttaccttaaatgcacatgttctaatcctttggcagcctgtgattggctaaagcttgtctgctatgattggctgagattcagctacttgataggttacagtttgtttacattgtaagttaggatgcagtttgttacatatagagatagttttaagacaaatgtagtttttattatagttctatcttatacttttagtttatactacatatgcacttcaraaaaacaatttctattactaatttttgcttcaaaccaatgtaaaacgagtataaaggaaaaagaacagtaagtattattactaaaatgtcaaagtcatacttgtagaacatgaggcagttctgaaagctctatgatattgagaaacatacactgatgaataatatttatggaataatttttcttacactagtatttttgtggctaataactatcagtattcatcagtgggggatactcaaacagtac

SEQ ID NO: 357302 - DNA, 588 bp, Homo sapiens
aagcaatattatgataaagcaggtcagacaaataatttggttttctagtacatgaaagttatgttcacactatccttagactgttaagtgttcasttagtattatgtctaaaaaaaacccaaaatacataccttagctaaaaatacattactgcaaaaattgctaacaattatgtgagacttcagcaggtcatacttttgccggtggagtattttgctttcatgttggtcactgctgacttgggggtggtggctgaagcttggggtggctgtgataatttcttcaaataatacaacaatgaagtttgccacatcaattgagtatacctttcatgatagatttatctgtagcatgcatcgatatttggtagcattttactgttggtagaacatctatcaaaactgaagtcaatcctctcaagccctgctactggtttagcaactaagtttatgtaatattgtaagtcatttgttgttgcaggaagtcagggaccctgaatggagggaccagctggagccatggcagaggaacataaattgtgaagatttcatggacatttaccacttcccaaataatactttcataatt

SEQ ID NO: 357303 - DNA, 574 bp, Homo sapiens
tgagtttctgattagcctctctaaatgaggcaaacagatatgcattcatctctgtgagcagaggggtgactttgaatagaatgggaggcagatttgccttaagcagtttccagcttgacttttccctttagcttagtgatcttggggccccaagatttatttccttttctcaatatacactatatatacttttatctatattgcattcatcattgaacaatatattttggagttaactacttagtaaattatggagtttattccattttccagcagtacagcatacttcttgatttttcattgtttactcagtttcctaagcaacataattcatccaaccagtcaacctaaacagcatttaggttgtttctggtcttttgctattttaaataatgctgaaatcaatgttcataagtcattttctattttttgtcaatttaaatttgaatagattcccagtattctgaaataagtttgctggttcaaaggataaaggaatgtacaattttgatraacattgccaaatctcccctaaagagtgatatgccagtttgcatttccatagtgatatata

SEQ ID NO: 357304 - DNA, 540 bp, Homo sapiens
ttttatttgcttttctcttattattattgaagttgaacatattatcatatgtgtaacagccactgacatttctttttctggcattcaatattcatactatttgctcttttattatgatacattgttgattttttcctgattaattttagaagccctttataaatttaacagtcattttgtttcaaagaagttgcaattttatttttcagtttgtcatttgtcattcttatctatgatgttttkgagatgaaatgtttattataatcaaatttatattttccattactgtgctgaattttgaatacttattaaattttactacttgtgcatttctaagaattcactcattatttactaatttttatagaaacttcataaccgaaattttatacatttatttatctgcttacaatatatgctgatgtagagatgagacatggatccagtttttccttttagaaccacctagttatcaaaacatcaattatcttttcctcactgatttgagatgccttgttagtgtacactgaatttccaaat

SEQ ID NO: 357305 - DNA, 540 bp, Homo sapiens
ttttatttgcttttctcttattattattgaagttgaacatattatcatatgtgtaacagccactgacatttctttttctggcattcaatattcatactatttgctcttttattatgatacattgttgattttttcctgattaattttagaagccctttataaatttaacagtcattttgtttcaaagaagttgcaattttatttttcagtttgtcatttgtcattcttatctatgatgtttttgagatgaaatgtttattataatcaaatttatattttccattactgtgctgaattttgaatacttattaaattttactacttgtgcatttctaagaattcactcattatttactaatttttatagaaacttcataaccgaaattttatacatttayttatctgcttacaatatatgctgatgtagagatgagacatggatccagtttttccttttagaaccacctagttatcaaaacatcaattatcttttcctcactgatttgagatgccttgttagtgtacactgaatttccaaat

SEQ ID NO: 357306 - DNA, 520 bp, Homo sapiens
ttaaataaactgtcatgaaatatctaccagtcaaatagtaatatgaaagaatatgataaacttggatttgaataaaagatgtctttttatccaatgacttatctcctgagtaaaactgagagagaaggtatgggtttttgaattggtatatttgaaatgatgaaaatgaactaaatcawctaagtgatggtgtatgtggttttgttttgtctttttaatccacaatttttatttaaataatatttaaaacaatgtgtaatgtggatgaaagttaagttactgtgattgaggtgttcgtggcaacatgtagcattccagactctatgtgtagactgtggatggcacaggaagagaaaggggtaaagcacaaagttctaatcctacattacagtgccaaagaaatacagaaaacggcaacaagattaggtgagaggctgtgggataaagaaagcaagaagagggatttgtacttagaaaagacaggtattcatatgtctatgtaggaagggaaggatggatt

SEQ ID NO: 357307 - DNA, 520 bp, Homo sapiens
ttaaataaactgtcatgaaatatctaccagtcaaatagtaatatgaaagaatatgataaacttggatttgaataaaagatgtctttttatccaatgacttatctcctgagtaaaactgagagagaaggtatgggtttttgaattggtatatttgaaatgatgaaaatgaactaaatcatctaagtgatggtgyatgtggttttgttttgtctttttaatccacaatttttatttaaataatatttaaaacaatgtgtaatgtggatgaaagttaagttactgtgattgaggtgttcgtggcaacatgtagcattccagactctatgtgtagactgtggatggcacaggaagagaaaggggtaaagcacaaagttctaatcctacattacagtgccaaagaaatacagaaaacggcaacaagattaggtgagaggctgtgggataaagaaagcaagaagagggatttgtacttagaaaagacaggtattcatatgtctatgtaggaagggaaggatggatt

SEQ ID NO: 357308 - DNA, 520 bp, Homo sapiens
ttaaataaactgtcatgaaatatctaccagtcaaatagtaatatgaaagaatatgataaacttggatttgaataaaagatgtctttttatccaatgacttatctcctgagtaaaactgagagagaaggtatgggtttttgaattggtatatttgaaatgatgaaaatgaactaaatcatctaagtgatggtgtatgtggttttgttttgtctttttaatccacaatttttatttaaataatatttaaaacaatgtgtaatgtggatgaaagttaagttactgtgattgaggtgttcgtggcaacatgtagcattccagactctatgtgtagactgtggatggcacaggaagagaaaggggtaaagcacaaagttctaatcctacattacagtgccaaagaaatacagaaaacggcaacaagattaggtgagaggctgtgggataaagaaagcaagaagagggatttgtacttagaaaagacagrtattcatatgtctatgtaggaagggaaggatggatt

SEQ ID NO: 357309 - DNA, 582 bp, Homo sapiens
gccttgtaagtctgttcaaacttcctctaaaattctaagcctgctaagtaaattagggcctcaaatacttagataaaagtattgttttgtttagtttttcctcacagatccagacttttattaccctggtwgctctatatcttacaacatatattttctgtatatactctccagtttttctatttgttcttatcatgtggatttgttcaagtacctaattcactgttatgggaaagataaatctgataacttacctttggacctaaaaattaggcactaataacatttatgacagctgaagtctgttgtttgtaactatattttaaggcgttaagtgtgtgtaagctaagagttatccatacttttagtataagtaagtttatttttgttactacatgggaacccaaacaatattgctgctaatataaattgatgattcagttgaaaaatgggcaagttctactaattttaaccattgacattgctgtccaaatctactgatttgtttcaacagaaaaatgtatgctccaacatcttctgctgacctcttcattttctgaaaaaccaatttacctgcagata

SEQ ID NO: 357310 - DNA, 560 bp, Homo sapiens
agttaaaaaatttttgcacagaaaaagatacaatcaacaaagtgaagagaactcacagaatgagagaaactatttgcaaactacccatctgacaagggattaataactttaataatctgattttaaatgggtaaaggatttgaatagacatataaataagacatattaatggcaaacaggtatatgaacaggtggtcaatatcattgatcatcagacaaatgcaaatcaaaatcacaatgagatatcatctcaccccagttaaaatggcttatattcaaaagataagcaataacaaatgctggccaaaaggtggagaaaagggaacaatcataaactgttggtggaatttaaattagtacaatcactatagagaacagtctgtaggttcctcaataaactaaaaatagagctactatttgatccagcaatcctactgctgggtatatacccagaataaaggaaagcagtacactaaagagatatctgcactcccatgtatgttgcaggamtgatcacaacacccaagatttagtagcagcaagctaagtgtccactaaca

SEQ ID NO: 357311 - DNA, 605 bp, Homo sapiens
accctgggccatgcagtgagtgttatagctctattagaagccgtgggtcacggaagagaaccgtggaacccagcgactagtgttcagctcgattaggactaacccaggcactcagccgtgcagaaacaatggtgagcctttagtcccatagggagcagcagtgggcgcctcactggatcaggagcgcagcggacaccctgccggatccagargggtggaagccagcagcggatctgcaacagtggcgttcagcaggggtggacggcgagcaaaagctcagctgcagccataacaaacacggaccagaagagtgtgcagttgcaagatttaatagagtgaaaacagagctcccatataatgggaggggacccaaaggcggttgcccactcccggcccaaatgcctggggtttatatcgaaatcattttccctccctctgtgttctcaggcgatatatgatttgactatttctttacctcctgattttagcctaatttgtatttttagtgagccctctttactacctgattggttgggtgtgagctgagttacaagtcccgtgtttaaaggtaggtgcagtcaccttccccatttaggcttaggaaa

SEQ ID NO: 357312 - DNA, 605 bp, Homo sapiens
accctgggccatgcagtgagtgttatagctctattagaagccgtgggtcacggaagagaaccgtggaacccagcgactagtgttcagctcgattaggactaacccaggcactcagccgtgcagaaacaatggtgagcctttagtcccatagggagcagcagtgggcgcctcactggatcaggagcgcagcggacaccctgccggatccagaagggtggaagscagcagcggatctgcaacagtggcgttcagcaggggtggacggcgagcaaaagctcagctgcagccataacaaacacggaccagaagagtgtgcagttgcaagatttaatagagtgaaaacagagctcccatataatgggaggggacccaaaggcggttgcccactcccggcccaaatgcctggggtttatatcgaaatcattttccctccctctgtgttctcaggcgatatatgatttgactatttctttacctcctgattttagcctaatttgtatttttagtgagccctctttactacctgattggttgggtgtgagctgagttacaagtcccgtgtttaaaggtaggtgcagtcaccttccccatttaggcttaggaaa

SEQ ID NO: 357313 - DNA, 605 bp, Homo sapiens
ttggatcatatttatgtttttgaataatcactataactatgctgggaagactaaatggacttactttagcctccacacttgtctctttcttcttcaatagcctatcttcatgcattaagaggccactttgcatgtaaggactttttataaaacagcaaggaaatgaattttcctcaaagagcctccagactgaaatggaagaagaaaccctgtcaacaccttgatgttaggacttctgtactgcagaactgtaagataataaattgatgttaagtcactacatgtgtgtaatttcttagcctagcaatgaaaattaatacaggtagyaaatatgtggatgaaatagtcaaaaagaaaaataagcatcttaatatgtatatttctttaactaaaacaaatgtaataacactttcaattacctttgtggaacagcagggaagattatataaacacttgccagcatactctcagttgatgcttacattaatttcttgaattagcactgcttttcttcattaatgaagaaactgaaacaaggaggttaaagagttgacacagtgtcacatggttggtcaaaattgactcttcaagaagaaaataaataa

SEQ ID NO: 357314 - DNA, 602 bp, Homo sapiens
ggggattacattaccaatggatatgagggtggtctggctatgacatcgtcacctgatcaatcatcatgattgaattggccaatgtggctggctaggcaggtgtcccttccctcactcactgctccatgttcattcctccagaagctgtgcrctcagttaaagaggatgaccttccctgatagaagatgaccttccttgatagaggaggaccttctttggtcaagggtatataaacagctgtactcccctgctacaacctccaagcaaactctcaaggtccataagtttccaacacatgaaatctggggatattaaaaccacagcatccaccaactatccaagctgtccaagtcagatccttctgtgtcatctccaattattttctctcagaactacttggctctctgaccttgcctctccaccatcacccccaggatcattacacctgtcaattcttatagtaagaaacatctgggaaatttgtttcctttatattcttatttccattggtgagttttggcctaagtcatttcagtggattttaaaatattttctctctctgtagtttgcttccttcctccttgcttcctactcattttcta

SEQ ID NO: 357315 - DNA, 602 bp, Homo sapiens
ggggattacattaccaatggatatgagggtggtctggctatgacatcgtcacctgatcaatcatcatgattgaattggccaatgtggctggctaggcaggtgtcccttccctcactcactgctccatgttcattcctccagaagctgtgcgctcagttaaagaggatgaccttccctgatagaagatgaccttccttgatagaggaggaccttctttggtcaagggtatataaacagctgtactcccctgctacaacctccaarcaaactctcaaggtccataagtttccaacacatgaaatctggggatattaaaaccacagcatccaccaactatccaagctgtccaagtcagatccttctgtgtcatctccaattattttctctcagaactacttggctctctgaccttgcctctccaccatcacccccaggatcattacacctgtcaattcttatagtaagaaacatctgggaaatttgtttcctttatattcttatttccattggtgagttttggcctaagtcatttcagtggattttaaaatattttctctctctgtagtttgcttccttcctccttgcttcctactcattttcta

SEQ ID NO: 357316 - DNA, 590 bp, Homo sapiens
caggtttagtataaaaagcatgcagtggggtgggccagaaggtgcaggtctacatgacttgctctgatgatgtatcttgaattattgcctcatctggtagctggattggtaacactgaggtcatatcggggttgtaaattaatcaccatattgagacaatttcccagtggggagaaatccagaggtatttaatgtaaatggttactggttggtatctcgccatacatattgggggcagttaatgctggttataaaaactygtgtacgccaggcaccatggctcatgcctgtaatcccagcactttgggagaccaaggcactcagatcacgaggtcaggagtttgagaccagactgggcaacatggtgaaaccccatctctactgaaataatacaaaaattacctggacatggtggcatgcgcctgtaatcctagctactctggaggctgaggcaggagaattgcttgaaccccggaggtggaggttgcagtaagccgagatggcgccactgcactccagcctgggagataaaccaagactttgtctcgctgggactctgacttcaccactaagcagtctatgcatgtaac

SEQ ID NO: 357317 - DNA, 441 bp, Homo sapiens
agggaaacatgtgcatgggcaattgagcttcttgcctctttgtgagtcccatgyacaaaaaaatggctgtgttagcataatccaacggtggaatttttggccctctgaagtcaaaaggtgaagcagaggacacaaaaacccatactgagcttctcctggactgtccagaacaactcctttgtgggtggtcccttggagtcttctgaaagggctggtttcagcccaagcttatccagcctgcagcccacaagttacatgcagcccaggaaggctttgaatgtggcccaacagaaatttgtaaattttcttaaaacattatgaattctttttgcatctttttttttttttaagttcatcagttatcattactgttagtgtgtttcatgtgtggcccaaaacaactgtttttattccaatgtggcccagggaagccaaaagatt

SEQ ID NO: 357318 - DNA, 441 bp, Homo sapiens
agggaaacatgtgcatgggcaattgagcttcttgcctctttgtgagtcccatgcacaaaaaaatggctgtgttagcataatccaacggtggaatttttggccctctgaagtcaaaaggtgaagcagaggacacaaaaacccatactgagcttctcctggactgtccagaacaactcctttgtgggtggtcccttggagtcttctgaaagggctggtttcagcccaagcttatccagcctgcagcccacaagttacatgcagcccaggaaggctttgaatgtggcccaacagaaatttgtaaattttcttaaaacattaygaattctttttgcatctttttttttttttaagttcatcagttatcattactgttagtgtgtttcatgtgtggcccaaaacaactgtttttattccaatgtggcccagggaagccaaaagatt

SEQ ID NO: 357319 - DNA, 446 bp, Homo sapiens
tttctggcacatagtagggaccaaataaacattttctagctttaagtcataacacgtgaaattcttttttttttttttttttttttttttttgagacagagtctcactctgtcaccctggctggagtgcaggggcacgaccttggcttgctgcaacctttgcctcccaggttcaagcaattytccttcctcagcctccccagtagctgggattacaggcaccaccaccaggcccagctaattttttttttaagtacatatacaccatgtatttcaccatggggtatttgtatacaccatgttggccaagctggtctgaaactcctgacctcaagtgatctgcccacctcggcctcccaaaatgctaggattacacctggcctaaattctttattagtcattgatagcctaccccaaaagaattatttcagtaaattaccagctact

SEQ ID NO: 357320 - DNA, 533 bp, Homo sapiens
ccctccttgtaagataaaaaatgtaaccaaatttgaacagaacctttttcaagataaagattgtttccaaggatcattaaaattgcaaacagaattatttacaagttcatctctgtgcctggatccattcattctctgatagtaatcattgattcctcctcaagagaattcctcttttccttcttctcacaacctgttttacaaggatccaagctcccattctttttgaaaccttgagawagtatataagtttctgtagcttattaagaagttgggtattcattccgaaggctcctgttaaataaatacacgttaaataaatttgcatgcctttcctccaattaatccgtctacctcatatcaataatttttagctaacctccagggggccaagagcaattgcccccacagttgctactaggatttttaccatccagaattaattcagccaagttctggaccccagctcctccacaaaaaaagagtctctaaagatagaaaatgaacatttcttgctctttcttaaccgaaga

SEQ ID NO: 357321 - DNA, 614 bp, Homo sapiens
cttgaaaactattccagaaaatagaagagaaagaggtactgttaaactcattctacaaggccagtattatcctgataccaaaaacacacacctcaaaaaccaaccaaacaagcaaattaaaggccaatatttccaatgaatattgttgcaagaatcctccaaaaactactagcaaactgaattccaggagacattcatcatgactaagtggaatttatcatagaatgcaagaatagttcaacatatgcaaatcaacctgtgatacattataataacaaaatgaaggacaaaaaacatatgattgtttcaattgatactggaaaagcatggaataaaattcaacatcctttcatgataaaaaccctcaataaactgggaatagaagcaacatgcctcaacacaataaaacccatatatgacagacccacaactactatcacagtgaatgaagaaaagctgtatgtctagmatctaagatatgaaacatgacaaggatgccactttcaccaccattattcaatagtattgggagttttagctagaacaatccaagtgaaataaacaaagggcatccaaattgtaaaggatgatggcaaattattttttgttcacag

SEQ ID NO: 357322 - DNA, 478 bp, Homo sapiens
aataatctttttgcatttgaattctcctgctatatgcagctataaattattctatgcacacacacatacactcacaaatgtgaaaaaaattaaaaacctaaatagaataaatcacaccgaacttgtttcttcttatgcatgttttctatgtgaaggcattcttctgatatttggactacttattcgtgttagctgtttcttactttgcccatttcaaagtaaggattaaaaattcttaactatgtcacatacatcatgaggattgatgattccaagaagctttcaggatgaaatttctctcaagtataaagcatcattaataataaaaaaaggaaattaaacattagcataaatatccttgcayatgatgacaaattgtgtcctgatgaacataattggcatttcacattcctgaccataaggcagacttttcagtggagcataatactatgcaggtgcacaaatgatacacagaatg

SEQ ID NO: 357323 - DNA, 553 bp, Homo sapiens
gtatctgtttcttttctcctgcttcctgagtctcactctgtctcccaggctggagtgcagcagagtgatcttggctcactgcaacctccatctccctcgtttaagtgattctcatgcctcagcctccagagtacctgggattgcaggtgtgtgtcaccatgccctgctaatttttttttttttttttttggatttttagtagaaatggggtttcaccacgatgaccaggctggtctcaaacttctgacctcaagtgatccacccacctcggcctcccaaagtgctgggattacaggggtgagccactgtgcctggccggggatcctttctttttccttgayctttggtagtttgattattaaatacctagaggcagtattctttggataaactgcttgatgttctataacattcttgtacttgaatgttcctatcttctctaggtttgggaagagctctgataatatccttttgaataaactttctaccccagtctctttctctacctcgtcctaaggccaacagctcttagatttgccgttttgagcctatt

SEQ ID NO: 357324 - DNA, 581 bp, Homo sapiens
tacataactcagacatttcattagctatctttcctttttgattccaaaaagtgtttgtggtatacattatagtctgttcaataaatacagaattataaatattattcaccatctgttcaataaatacagaattatatatattattcaacattgtaaatgtttatttgcagtgttatcccccagatttctaaattatagtgatttttaaattttgaatactagcagtgtataraacacaaaagtgtacctgtaagactaaacagattttaccctctaccaattcttctctctacaattaaatgccatcaaataactaagctgatgaaactttctaatggcctttagttttggaaactattaagaaaataatataataacattaaaataaaactttgaagaaaaggctattattcaaaaattttaatgaaacattttcagttcttattcatatgtgcgcatatattatcctaagtattatcatattgcaaacttttgttgcttaagttagcattatattcctgcattttccatgtggccatacatgatgaatcatttattgtatgtatcattatttaagtatt

SEQ ID NO: 357325 - DNA, 490 bp, Homo sapiens
tagacacttaaatgtttaaagttaaatgtaaatcaagttagaagtatttgtgatgagatgagaataattgtccctgrcaacattttcaatcactatttatagactctcaaaattaaattttttttatcttatgccataagttgatgaggctatgacaaatcagtggttagaaaaaaaaggaataaaaaataaaattgagagaaaaaaatctatgaaaacaataatggcagtgagctatttctaagttatggctgctgggggattagaaagctgcacaagaaattttggggcattttattatattttattttatttttttattttatttcattttattttattttattttattttattttattttattttattttatttttgcacaataagagaaaccttttatcctggactccaagaaataaatatatccctaataatgataataaaataataataatttaattttcctccctttcttaaccactcatac

SEQ ID NO: 357326 - DNA, 490 bp, Homo sapiens
tagacacttaaatgtttaaagttaaatgtaaatcaagttagaagtatttgtgatgagatgagaataattgtccctggcaacattttcaatcactatttatagactctcaaaattaaattttttttatcttatgccataagttgatgaggctatgacaaatcagtggttagaaaaaaaaggaataaaaaataaaattgagagaaaaaaatctatgaaaacaataatggcagtgagctatttctaagttatggctgctgggggattagaaagctgcacaagaaattttggggcattttattatattttattttatttttttattttatttcattttattttattttattttattttattttattttattttattttatttttgcacaataagagaaaccttttatcytggactccaagaaataaatatatccctaataatgataataaaataataataatttaattttcctccctttcttaaccactcatac

SEQ ID NO: 357327 - DNA, 533 bp, Homo sapiens
gaagagtagtcataaaataaatgctctttaccgagcaactaagcttaatcgataaagtgttacatattcaatggaggccctggacatttctcacaggtgccattgccttccctgttctcctccctaccaccaacacgtgccctctaaattactaccatcctgaattttaggtagcagtcatagcgttcaaccccaaattatagggactttattgactcataagaaatgctcatttttatttctgcaattaagctttaaaaaaggtataatgattataaacctgagaaatttttccacactgctttctgggttttaatttctcatttataaagcaaataacagcatgaatccctacctttgctaacagcaccacagcattagaaagcatcaaggtcaattctgaatcattaagataaatttgtatgcctatccrtttaaaaaatgaaatggcatgctaaataatctattcaaacgcaaaagaaacattatatacaaggcaccatgctaagactgtaaacataaaaatgagtaag

SEQ ID NO: 357328 - DNA, 610 bp, Homo sapiens
aaaaaatcttgtaaaacaatcaagaccataacattcacataccttctatttggtcagtgcagagacacagatctttgttccgaaatttgcatttaaatggaaagcttcagagcctgaaaacatctaaaattatacccaggactgacaactggcctagrctcaatgtctttggaatttgctctactaaatttgctaccgtttgaatgtgttccctccaaaactcagctgtttctaatgtgaatatgatgcaaaaagtgaaaaccttatacatctttacagcagcctagaagtaaagatgaagcaatcctttttttttttttttttaaagaatctacagttactacaactaactgaaaaagtgggaaatctggagaccaacacatagaagaagaaaaatggcagtcaaagactcactctccaaattggacatttatttaaaccagggtttctcagcctcagcgatgtgtatatactgggccagacaatttgtggagggttctcctgtgtgttgtaggacgtttagtaacaccccctctacccaagagatgccaatagcacctcccatcatgaccagttgtgacaaccgaaaatgtctccagattatttccaa

SEQ ID NO: 357329 - DNA, 586 bp, Homo sapiens
ctgcgctaaccctccagtgactgacacccaggcaaagtgggagatgacccaggaaggggctgggtcaaccaggcagcagaggcagctgcccatcaaccactgacacccccttctcctggtcacctgcctcacataccaggtgccactctgggtccgtttgtagggaaggtggaagctccgccgcttacagcccccagagctgcagaactagggagaattccatttggttttgttcagttctcaaatgagaaaatcttcaccaaccctttgtaataccattgcttaggggccagcatggctggttcttcatgtttgctgcaaacacctgcaatttttccatcctgctaacttaaaagcaagaagccctgtgtgcatagtttaatgacagcaacctastggggctaaaaatcattcacgtggctctatcgaaggctcaagcctgcagttctcgcaggaggcttgacctgtgacctctcctgtattcacccagtggcctccacactcggcctcgagccctgcacacattctgagaaaactagcttgacatctgaaaaatgaatgtaacgatggtgcccaagccagaagg

SEQ ID NO: 357330 - DNA, 586 bp, Homo sapiens
ctgcgctaaccctccagtgactgacacccaggcaaagtgggagatgacccaggaaggggctgggtcaaccaggcagcagaggcagctgcccatcaaccactgacacccccttctcctggtcacctgcctcacataccaggtgccactctgggtccgtttgtagggaaggtggaagctccgccgcttacagcccccagagctgcagaactagggagaattccatttggttttgttcagttctcaaatgagaaaatcttcaccaaccctttgtaataccattgcttaggggccagcatggctggttcttcatgtttgctgcaaacacctgcaatttttccatcctgctaacttaaaagcaagaagccctgtgtgcatagtttaatgacagcaacctagtggggctaaaaatcattcacgtggctctatcgaaggctcaagcctgcagttctcgcaggaggcttgacctgtgacctctcctgtattcacccagtggcctccacactyggcctcgagccctgcacacattctgagaaaactagcttgacatctgaaaaatgaatgtaacgatggtgcccaagccagaagg

SEQ ID NO: 357331 - DNA, 458 bp, Homo sapiens
atttagtggaactttcagtctgactagaaagtggacatagcatttattaaaaggacaagaacaacaacaaaaaattaaagtaggacaaatgtgtttaaggtactttatagttttatttttatttatttatttctttgagacggagttttgctcttgtccccccaggctggartgcaatggtgcgttctcggctcactgcaacctccgcctcccaagctcaagcgattctcctgcctcagtctaaggaatagctgggattacaggcacacgccaccacgcccggctaatttttgaatttttggtagagacggggtttcgctatgctggccaggctggtctggaactcctgagctcaggtgatcgatcacgcccgcctcagcctcccaaagtgctaggattacagtcgtgaaccaccgcgccaggcctactttatagttttaattttttttttttacata

SEQ ID NO: 357332 - DNA, 622 bp, Homo sapiens
gttgacttttgttgctgattttaaagaaattatttgttttgatcattcatttttttcttttcttttcaattgtttgtttttcagacctgagtcagaactccatcacaggggaacacagccaactgttaggtatagtattactgtggggattgactttatccaaagtcacccttaactcatttatcctaacagacattactcccktctctgattctattttctatcccctccttttctacttcccacccaacaacttttttcctgctgtttctattcccaacttgccaagttttaggaaactacttctataattgattactaagactcagttaaattaaaaagtaattttgcatggtttatggttaaaaaaaatctaagaactagaattttttaaagataatttggaaaagaagatattataatagctttgtaatatctgactttgcagctaattttccctttttattacttttcttggccttttgatcccctttttaattattgaaagtacttcataaacagtatgtccttaagcagtccttagaatttggtgttccagttccttatctatgaaacaaattatggaaatgaatttacttcctctgggtaccacttctttaaa

SEQ ID NO: 357333 - DNA, 581 bp, Homo sapiens
tcttccttctctaagccctggaaatgtttaagtgtcatttcatattctggtctttgatggcttattagaattctgttggraaattacatgggcctgtgatgttaaatatatatgtgtgtggggtgaggacagtgagggaagatttttggtaactatatttttttctatggaaactggtctgtttaaacttcctattgttacaggatcaattttgctaaattacatttcctaggaaattagccatttcatctgtattttaaaattccttagcaaaggaatttttattagtctgttatgaatattttaaatttcttctcttttagtaatcttccttttgttatttcttactttgtgtttgtgacttctccttttccctccagattaactaatggtttgtctattttgttgattttttttcaagcaataattctgacttttatatgaattgcactgcttttctgttttgtaactcaatgttttgctattatctttataaatcccttttactttctttcagtttaccttgttatttttctggatttttgagttgagtaattgatttcttttcatcttttaaccat

SEQ ID NO: 357334 - DNA, 581 bp, Homo sapiens
tcttccttctctaagccctggaaatgtttaagtgtcatttcatattctggtctttgatggcttattagaattctgttggaaaattacrtgggcctgtgatgttaaatatatatgtgtgtggggtgaggacagtgagggaagatttttggtaactatatttttttctatggaaactggtctgtttaaacttcctattgttacaggatcaattttgctaaattacatttcctaggaaattagccatttcatctgtattttaaaattccttagcaaaggaatttttattagtctgttatgaatattttaaatttcttctcttttagtaatcttccttttgttatttcttactttgtgtttgtgacttctccttttccctccagattaactaatggtttgtctattttgttgattttttttcaagcaataattctgacttttatatgaattgcactgcttttctgttttgtaactcaatgttttgctattatctttataaatcccttttactttctttcagtttaccttgttatttttctggatttttgagttgagtaattgatttcttttcatcttttaaccat

SEQ ID NO: 357335 - DNA, 584 bp, Homo sapiens
gatccatgtttaattaaattcatttgaatttttatggcttcatattatttttttcacatacataaattgacagaaaagaaaatattttgtcagattacgtgttctaactttagattctgaaaatgtgtccttgtaaggggtcaggcatcttaaggctgaagactgtagaggatgagaaataactattactgttaagagtaattaataggtccaatctctgaagattcttccttgtcataggtgataggaagtatgtatcagttatctttttctgcataacaaaacaccccagaacttagtggtgtaaaacaacaatccctgttcmtgatgttttgggttaggaatttgagccttattcagctgggaagttttcactcagctgcagttatctagtggtttgagtgagctgagtggtctaagacggccttagtttatctacttggcctggcatttggtactggctgttggctgggccatgtgtcttcaacagcctagcccacatgtcttcccatgatagcagtgtttcaaaaaggcaagtcccagtgtgtaaacacttttcaggcttctgtgtgcatcatgtttgt

SEQ ID NO: 357336 - DNA, 583 bp, Homo sapiens
ttctttctcccacacatgttttagatctgacttgactttttcccaccattcctactcccatctttgccatggtttccagttgtcacttgctacattagttttgtaccattattgtacaaagatcacagagcaaaaaggggtgtgtgtgtatgtgagagagagagagagagagagagagagagagagagagagagagattgagattgagatttctccttcagaaaaatgtattactgggctgggcgcagtagctcatgcctgwaatcccagcactttgggaggctgaggtggaaggattgcttgagaccagcccaggcaacaaagagaccccaggtgtggtggcttatgcccatggttgcagctactcaggaggcagaggcaggaggatcacttgagcccaggagttggcagctgctgtgagctaaggtcatgccactgcattccagcctgggtgacagagtgagaccctgtctcaaaaaagaaaatgtatattgctagatcactgaatgtttgttttcctatctctttccccattccttccctcaaagcccagtaatgaggactaaataagttttattgttat

SEQ ID NO: 357337 - DNA, 532 bp, Homo sapiens
acagagaaattttacagatggtattaacttttcaaaaattagacaaacaacctaacttcagaagttggtatttcttacattaaaatcctgggaaaattaaatattttgccactagtttttacatctctaaaactagggtratactgactacctggtgttggccatgaagagtcaatgaggcaatgcttgtagattaacttcttgtagattggtagtgtaaacttcagaatttaaaatttatccatgctcaccctccctccctctccttctttatctctccccctctctccctgtctcctcacctttgatttaagtcaacaaaaattcattttgtgccccgtgtgccaggactgggcatacagtggtgaacaagacacacatggctctgcctcatggaactttccattctggccaagatgatagacaaggaacaataaaggatatatgtaataatgacagctggtgataactgctgtgaagaaaagtaaagcaggtgtgaggcttctagagggtggcatgtataaggtgggca

SEQ ID NO: 357338 - DNA, 527 bp, Homo sapiens
gtgttagcccacggtggtgatgctggtctttctggtgatggtctcggccctagttggggctttcctgggccccagacccttcccgtttggtctgcaagcttcaccgctatttatagtcgtgggggtgggagcaatagaaacacataagctgtccagttgaagatacacgtaagttgtgggggaaaaaaaaagctgcttgcttgtgaatgaaggttgactttgatttaactgagcaaagtttgtaaacttttaaaatcacttctccagcaggaacttggatactgtacaagtattgttcctattgatttttctgatgttcactttttgtggttttcatgggtctgtgtgaccacagatggactactcagtggttgactgcgattgartgggttataataaagaccgaccagttagtcattaaaaagaaccctcaccctccacacacacacacacacacacacacacaaaaatgctgaatagtgagttgtatgatctagttagtttggctgaaattgagaagcaaaatt

SEQ ID NO: 357339 - DNA, 527 bp, Homo sapiens
gtgttagcccacggtggtgatgctggtctttctggtgatggtctcggccctagttggggctttcctgggccccagacccttcccgtttggtctgcaagcttcaccgctatttatagtcgtgggggtgggagcaatagaaacacataagctgtccagttgaagatacacgtaagttgtgggggaaaaaaaaagctgcttgcttgtgaatgaaggttgactttgatttaactgagcaaagtttgtaaacttttaaaatcacttctccagcaggaacttggatactgtacaagtattgttcctattgatttttctgatgttcactttttgtggttttcatgggtctgtgtgaccacagatggactactcagtggttgactgcgattgaatgggttataataaagaccgaccagttagtcattaaaaagaaccctcaccctccacacacacacacacacacacacacacamaaatgctgaatagtgagttgtatgatctagttagtttggctgaaattgagaagcaaaatt

SEQ ID NO: 357340 - DNA, 499 bp, Homo sapiens
acgatatcacacataaaactatcacagctgacttttagtgtagccttggtcagatgcacaaaggttgtccttgtcaccctcttgtggtccagctcagctaccaaggttggactcttcctatatggttttggggacaaagcaagagaaaacttgcatttttttcaccctgacctctttcttatctctcctctaggaacctgaagtaggtgcaagcaagtggccaaggaatgggggattaggagtcttggtcctctcttcctcaattttaaataaatcagaggaattttgaataagaatctgctatgatcaaaaagctgtttatctgaaatggttgttatgagttcttgatcagagaaaatattagatgccagtgtcataagtccactggcataagawatatgccttgtgagtgtttgcaatattgggattaataatgggacatcaagcctagggtttctccaagctttcttgtggacatttcctagaaggaccacttgta

SEQ ID NO: 357341 - DNA, 592 bp, Homo sapiens
cttggacaagttatgtcatctctctgtacctcggtttcttcatccataaaatggggatggcaagaatctccatctcatagggttcttgtgaggtttaagaagtcaagcttacaagatcaggagattgagaccatcctggctaacatggtgaaaccccgtctctactaaaaatacaaaaaattagctgggcatggtggcaggcgcctgtagtcccagctactccggaggctgaggcaggagaatggtgtgaacctgggaggcrgagcttgcagtgagctgagatcatgccactgcactccagcctgggtgacagagcaagagtctgtctcaaaaaaaaaaaaaaagaaaaagaagaagtcaagcttaacaatgactggcacattgtctgtggtcaatatgtgagtggagaatttttaacctttttaaacctgtctgggtccttagttgtaaagcaaaggtgtcagactagatgaccttatcagttggtaaaacctaattcacatgctgcctgacctgctcccccactcccactctgagagctcatcattccttcctaggcctttccacagtgtgctgggacacctctagttgg

SEQ ID NO: 357342 - DNA, 550 bp, Homo sapiens
caatgccttcagcttctactaggaattaagaaaacagagtactgagaccaatttattatcacgcagttggatgataggaaaatgaaaacaaaggttagaggtgaacattatagaggagccgagtggccaatggccagagaaacttcaggcaacagaaggaacactgggctgagcaaaagacttggattcttgttctagctccatctctctccctttgaaaatgcacttgaacccctctgggctttatttttwtttatttatttatttatttatttatttatttatttatttatttatttataaaatggtggggtgaggatttcttcaagctaagatcttcctggcttgaagctcttaaaatttcttgttactgcagtcttcctaagacattccatctgatggtttattcttttgactctgccattttactcaactaaacctcaaaattcttgactatggaagcctccagaggtgttgttaaagctttaactctttcattaaaagccatgtgacttgctttatccaatgggaggttagtagatgtgacaca

SEQ ID NO: 357343 - DNA, 600 bp, Homo sapiens
cctcttctgtcgaaaagatgcaaccattccttaagaaggagggatggggagtaaccactagacccataggggttaagcctacatatattttgtaatttgctcacatgtatttatgcatcttaatgtgggcataattatgaatttaatacatgcacttaaatagaattttctgaagacattgctttagtgactcttaaatactggttccaacagtaggaagttcaagtgcaatggaagggcagtaaagggagacactttggaagtgggcagtatcttgcactgttattgataccatctcaaggaagcagccttctaractgctgctggatagggccaattctgctcggaatactgtatagtatattgcaaatgggattagtctgctgaaaagctaaccctatgttccaggaaatttgactttccatcacaaatgatgctaagatcaggccccatgccagagggagaatggcctgagtgccaggcattcacccgaagggcaaggtctctggaggctgctgcacattctacagggcggagtcagagcccttgcttggaaaggggactcctgagccctggccttgggtgtgccccaccccaccc

SEQ ID NO: 357344 - DNA, 658 bp, Homo sapiens
aggactttatttaaagcctcactgctttatttaaaatgtcagaaatggtagtgttcatttgttcagatcctaggtgaatacagcaggccatcctaaattactttgcatatgttgcttttaagcagaaaagctaaggataacccgggaaagaaaacttgcaatttatttaacatcatgacctatatatgcagaaaggtaggcccctgctctctgtcatggataggagagaagagaggatgcctatgctctggtgaccgcacctcttagataacgcaggccaactgctgtcctgtttgtccctgaggcgagagcgaggagatgsgaggaacacaatgaaggaggggactctaatgcttcaaggggtactgccaatcatggcacacgagaaaacacatgcaattcatagtgccagtcagcacttacttcgactgaaagaaagtaaaatgaggcaataacacccagaccttgctaaaatgtacaatgtttccctttcttactctcttcatatatctccatatatctctctttgggatgactattttctccaaaggagacagtgtctgttggaatgtgtatgtatttgaggtgatctatatcagcatctgtgatggttcatgttctgtgtcaacttcaccaggctatggccagctgtttggtc

SEQ ID NO: 357345 - DNA, 634 bp, Homo sapiens
gaacagttagtttacaaaagatgagttacaaagtactaataaaaacaaataaaaatgtaaaaaccttccatcttacaacagaagtaagaaaataaaaacaatgagatttttctttaaaattrtaacagtcaataaaagaaagctataaggaaatgaaccagggtatagtctactgatggagtttaaattagcaccacattttttagactgccatggtagtttttagcttgtaaaactataaagtatcaaaaaccttaaaaatgtgtgttttttgatttagcaattccacgtttggaaatttagtgtaataaaatagtcacatagacaaaaatgtaggttcaaggatatttattataatgctttttgtttagtgaaaaatgggaacattccactgtttactaaaagcatgttgattgaagaaattatggcccacttttacaatgaaatgctgtgactatcacaaataattttaaagaaatatgtccaaagacatggaaatatgctgaaatacattattgagtgaagaatgggagtcatgaaatagaagtaccatgatccttctcttacagtatgtatttatatacagagatacacagaaaataatcttctgagcaacactgtccaacagaaatat

SEQ ID NO: 357346 - DNA, 646 bp, Homo sapiens
ttctaacagttatatattggaaatatgatagaactggcaaaaataagtcaaatcacctaaataaagcatgcaacataagctttgattcaattactatttatgcctaggcagagtaaaaattacaaatttttttcatccaggatgaaatgaaaaccaaggaaatatatgatcactttctttgggagggattggacagaagtccctggtactctcagatttacgaaaagcatgcatgcccctggaaggcaatggcatttcagtcacatgtttccttctgtatatccatgccccccccctccgccccgcacccaccacacacacacacaccaaataacaacacaacattttggggggttgcactgtataacactacacattgcagagaaacagacacatacacgtaagctttatccacaacttcccacttttctttaagcacctgttcaaatcttgcataccagagacacagaatcttttatctggaataatttttaggaaatagtggacaagaacaaaaggggagaactgatggggaaaataataatatctgtcatttatccgatgcctagttgtgcaagatatcgtcccagaagattattactttttaattcttgcaataacyctctaagacaaggtataaattctt

SEQ ID NO: 357347 - DNA, 530 bp, Homo sapiens
caatttatttattgattattgttttgttttattttttaatttggagatggggtatccttgaggtaatttargtatccttgaggtaattgttggattacctcggagcagtgcctattcacaggtgcaatcatagcacactatggcctcaaactccaggcctcaggggatcctcccgtctcagctttctgagtagctgggactacagacgggtgcaactgcaaccatgcacagtcattttctcaaaatttcccagtgtggttgtttgaaaaaatttcccatagaacataatccattttcaaatataggttactggtggggtaagttcaacatacttagaaaaatttaaaaattactttgaattgtataatattttaattatccatgcttctattatctgccattgtatggagaaaaaaactttgttgtgttatctgttttttaaaaaaatcagtttgtgtctgtttgtgtgatatcacatatatacatatatgaatttcaatacatacgtcttggaatacaccttcacagat

SEQ ID NO: 357348 - DNA, 552 bp, Homo sapiens
caccagctccctgtccatcactggttgagaacagcttctgagagcattagcttgttgctgttggcttgctcttggccaagcatgttcccaaaaccagaggaaaaaaaaaaaaaaaaaaaaaccttcaggcatagatttggagacattcacggtaaggaactttctgtgtataaaggtgggtgctgagagttatggccagggtaccaatagcagctgctacaacactgagacaagaactggattctgagacaaagaagcaaagaaaagagatttacttttttttttaacttcatcaggagcccagaatgtctagataaaccccaagtctatttcattttgtaccaaygtttccttgttgaatatttccaagcatgattccatttcctggactccagagtgaaatgatctggtgaagaaaggctatccattagtctccacctccaggtcaacctaaggattcttggcttgaggtggtgaggcaaccagtgctcaaatccacagtgtacccaaaactaccccggcatcgttgcacatccacccaagcctcagctt

SEQ ID NO: 357349 - DNA, 572 bp, Homo sapiens
tatctccttctttctctaggtgccacccacactatacctcctctggttcttcaatcatatggtgatttctgccacatcaggcctcaacacataagtttcctctgcatggaacacgcttcctccttcttcactactgattcattaggctcaggcagagtgccattaccctcactgtagactaggttattacctctttgccctctctatgtgctctgccattactttttatcgagttacctgcctagtaactgtcttcttttctagacttagccccaagagggtaggaatgtctctatcagtcactcatgcatcccacacctcagcataatacccagattcttagttaggaaggctaagctgctggaacaaaaaaacttcaaagtctgagcattttacagaatgcgaagtccttttttctttgccatgtgacagtccmgagtgggagttccaggtctgtgactgttttactccatgcagtcacgtgagacacaggatgatcagcatgtggcttctaaagtcttcctgataatttccaccttagtcagcttgaatggggaaaagcatggaggagc

SEQ ID NO: 357350 - DNA, 607 bp, Homo sapiens
ttgggcctatgccccaatctcatgaggattaggaatgcagggtgagtatatatttgcctctaacacccagggtatttttgcagtgggaaaatttgagaagcactgggaaaattactggcctaaaaagtagacagcagggacctagtttttagttctgatatatactacctatgtgagcttgagcaaacaacttctctcctgtaggtcttcacatcattcacaaaaataactgatattaggacaagttctaaaatgaggagattctttcattcttctgtattgagactggtatttccatgacaccattcaatgtgaactgacagtgaacgaattaggagatttagtgttccacattccagagcaggtgaggaggaagaggcagaggatttttytgaagttcaaaacagcccagtttaacacatgtatagtgaagcctacaacatgccagggcctgggaatgaatgcaaagataaacaagaggcaataactgtccacaaagaatatatagtccaatgtgctatacagtatagcagccaccagcttcatgtagatactgagcacttgaaatttggttaatttgaattgagatgtgttaagacttaggaga

SEQ ID NO: 357351 - DNA, 473 bp, Homo sapiens
ttaactgaaaaattagttgctcaaaatgctttgatgccttctctttccactttgaagaaaatcctgattcctttacacggcctacaagtcctgcatgatctagcttttgcctacaaacacccttccagcccctagactctactcacaactgtcttctttcagaaatctgccaaatatgtcagatttcttctgacctgagacttcacgtatccagcttcccaagcctggaacattcagcaaattcmtaatctcaccctgaacctcacccttttcgtggctggctcctcctcatcctagtaatcttagcttaaatattaatctactcacggaggccttccagaccacccatctaagtagttttcctcccagacccactctgtaatttttttcctgtctctgtaccttccttgcctcatacatcacaagttgtaaatatatatatatatatatatatatgtaaaatatatataagt

SEQ ID NO: 357352 - DNA, 581 bp, Homo sapiens
tgactgtgagagttgaaggataggaaagaaaatgatgacaacccaatttctgacttacaaaaggaatggtggtgtycccactcctagagaagaaaaaggctaaagaataagcaggtttgaggtgggatggaggtagggaggagatggcgagtttcattaggttgtgtcagtgtttagatgtccatgaaatatttaagaggaagacttagcaacaggacagatgagttcaaaggtgagaatagagatctgtgttcaaaatatggaaatgagagtcagcagtatataatcagtcactggcctaaaggttactaccttactcacctaagggtatatttctcgaatttcagtcattgaataccatatttagtatttttcccacaactgcctatagcctgtgttgcttagaacttttcctttatgttttctctctacttaagtaaatttttataaggacaccgtatcattattcttattgtaaattcagtggattagagtaaaaaataatagtgaaaaaatagacgactatcaattcttatttagtgtttaatatttattcttgcatcacctaaaatggcattaca

SEQ ID NO: 357353 - DNA, 581 bp, Homo sapiens
tgactgtgagagttgaaggataggaaagaaaatgatgacaacccaatttctgacttacaaaaggaatggtggtgttcccactcctagagaagaaaaaggctaaagaataagcaggtttgaggtgggatggaggtagggaggagatggygagtttcattaggttgtgtcagtgtttagatgtccatgaaatatttaagaggaagacttagcaacaggacagatgagttcaaaggtgagaatagagatctgtgttcaaaatatggaaatgagagtcagcagtatataatcagtcactggcctaaaggttactaccttactcacctaagggtatatttctcgaatttcagtcattgaataccatatttagtatttttcccacaactgcctatagcctgtgttgcttagaacttttcctttatgttttctctctacttaagtaaatttttataaggacaccgtatcattattcttattgtaaattcagtggattagagtaaaaaataatagtgaaaaaatagacgactatcaattcttatttagtgtttaatatttattcttgcatcacctaaaatggcattaca

SEQ ID NO: 357354 - DNA, 526 bp, Homo sapiens
tcacttgaggacagcaggccccagtagggtagctcagcatatggcaatgggcactcaaggtccccagagcgggcactgggcaacagccagaggcacaagccttcatcaaccctggctttcagagatgccatcttactctatctttacatgggagtaataatgtyccccctttccaactgcaggaactgaggattacagtagctaaatgatggtccaggatcattgaggcaatcaatttcagagtcagaatcctggcagaagcaaagaggtgccaaaaggggaggagaaacaggagacatagttttccggctttgattcccattttgttccagtcacttgctaagttccacaatcaggcaggcagtcacctaacatgtattgcacttctaccgcaggctgttgccaagagagaggcaaagaggaacgagtcacagtctttaccttccaggagtttatggctggcaaaacatgtatgtaaatgtggtctattggagctattctataatcctgtcaaatgcatggtagg

SEQ ID NO: 357355 - DNA, 604 bp, Homo sapiens
tctgaagtaggaatcaggctttgttcctcctaaacttttgggtatgaactctatgattcaggtgccaccatatttctcaggccccaaagtgattctgtgaagatgcttctgtgctcagcctgacatgragccacatggtatatcaggggccaggcctggcataaggaggtgagacgggaaaatgcttagtcctatttccttgctctgatagagttcaagcaaaggcagagtcaagaatggcatgtcaggatagggagttttattcaggaaaatgaagaagtagaaagaaaggcttgggggctattcacatgatggataagagcatggactttggagtgaatattctgtgactgccacttctagctgtgtgactttggatgagttgcctgaaatctctgagcctctgcttcctgatgagaagcatggtctaacacagctacttgaggtggtggttctgatgatgtaatgagaaaatgtttgtaaagcccttaaaggtgcaatcctcaataaatggtaaatgtcatcattaccattatcattaccacaactaccacctagtggtggtggtcatcataatcaacatcatcttccttattaccttatt

SEQ ID NO: 357356 - DNA, 604 bp, Homo sapiens
tctgaagtaggaatcaggctttgttcctcctaaacttttgggtatgaactctatgattcaggtgccaccatatttctcaggccccaaagtgattctgtgaagatgcttctgtgctcagcctgacatgaagccacatggtatatcaggggccaggcctggcataaggaggtgagaygggaaaatgcttagtcctatttccttgctctgatagagttcaagcaaaggcagagtcaagaatggcatgtcaggatagggagttttattcaggaaaatgaagaagtagaaagaaaggcttgggggctattcacatgatggataagagcatggactttggagtgaatattctgtgactgccacttctagctgtgtgactttggatgagttgcctgaaatctctgagcctctgcttcctgatgagaagcatggtctaacacagctacttgaggtggtggttctgatgatgtaatgagaaaatgtttgtaaagcccttaaaggtgcaatcctcaataaatggtaaatgtcatcattaccattatcattaccacaactaccacctagtggtggtggtcatcataatcaacatcatcttccttattaccttatt

SEQ ID NO: 357357 - DNA, 636 bp, Homo sapiens
tgttcacattcacagcaggcaaatgcaaatggccctccactactgaggagaaaaggcagggccatgatatgaatttcaggctgatttgcattgaaagaaaaaaagaagcattcgacctaaagagatcactttctaatgatcagggtcacaatccacttcaaagctattactcacaaacaaaatatggcaaataaatgacattaagctacgtaaacagctggaaactctacaaagaaaaatccacacaaatccaataagagtggaagacatctctcaatccttaacagatcaagtagattacaaaatgattaagaatttagaatatgagcaaaattaaattaatgagaagtttaaacatctaagtatgtatcctgcatacasaaaatacactcatttaaatacccaggaaatatttacaaacatacaccacgtactggacctgtgaggtctaaacattttttatcatgggccctcaatatggatacctattaattttacttataaattatcattcacaatatatgatatggatatataatatctcatgtccattataaaacatatgcaatgcttgacatttgaaaagctgtgataacagcgtgcatacacagaagctttatcttttctccctctggt

SEQ ID NO: 357358 - DNA, 621 bp, Homo sapiens
tgctggcttgggttttggtggtagttcctttaatcatgccacattatttcaaatactggtgcctcaattagattattaaaagaaaactatgctgttaattggattgtgcagggaataataagtcctctttgacttagcaaagggtggctgccgggggcctctgtcctgtgcagagaacagactggctgcttgatccaaggttgagtttgtggagacctctgtgtgttttccacgggccaggctgccatggaatagatgtctatttccgagaacaaactttcatgataggatgataaggrctgctcccctaacacaggcattgaccatttcagtctttacctaccaatctccttgcatcttaaatatatttcttccatctcttcctgtgatgtcctcttgtaggagagtctgttctgtagaacacatcagcgaaccaagccttggctgaggttccagtgctatgggagactgctggggactgagtccctggctccactgcaccctgggcttatttgagttgggttgtgcccttgacagcccccatgggaggcaagaggggtcagctttccatgctgtaaacaaatgaccacaaatgtggtacttataacaccaccacttatt

SEQ ID NO: 357359 - DNA, 584 bp, Homo sapiens
tcagcacggttaacaaaagctgaattttctgcacactgacaaacaggatgccgcacgggacggcactgacctgggtttccaccttccccaattcctatctcagcaagcccagctatggcacacacctgtaacatttaaaggcttttttggaatctcaactgggaaatgcatgaccatgtcctcaagataaggaaatactgagtttccagaatggcattttgccgtcatggtttgatgcttattcatgaggtttccaagcagtgactgagggctgggctgcagtgcatagcaaggaaactattccttccactctggaagctgacgttcccatgatttatttttgcaagttgcaggcargcattgctaaaggcaataggaaaagtctccttattttagaaggtaataatccccagacttacaggaaagtttaattttgaaagtgcttgtggtagcaaggtgctaactcatgtgttcagaggggggccattttgataaaaaacaacacctatgtagagaaaggcgtgcgttcatcttttatgaacacagagagacgtgaggaagaataagcaatgaaaaaaatgatt

SEQ ID NO: 357360 - DNA, 623 bp, Homo sapiens
tgagccatagaaaaaagaaaagcaatcaatgtaaatatactgtgatttgacctatattttggaattagcagacaaataatttaaaatattgttacagaaatgttcaaggaattatgagaaaggcagactgtaatgagtgaatggatgaaagaattctcaacataaaatgggaaaatatgtaaggaaccaaacagatactttaacacttaagtgtaagatagctaaaatgaaaaagtcactggataggcttagcaaaagattgaagctggcagaagaaaacattagtaaacttgaaaacagattttttaaatgaccaaatttgaagaaagagagaggaaaaatgtacaaagaacagttcctcatgacctatgaaacattaccaaacaacctaatacacttgtaactggagtcacaaaaggaatggagayagcaagtagagtagacaaaatattagaaaaaaggtagaaattctcctaaatttggtgaaagcacaaatgtacagattaaggccaatgaaccctaagtcgaataaattcaaagcaaaccactgcgaggcacaccacaaactgtttagagctaaagagaaagagaaaatctcgtatacagcctgaggaaaagggctc

SEQ ID NO: 357361 - DNA, 509 bp, Homo sapiens
taaacaggtacattataccagcatgcagaaatataccctgttatgggctgtgagactcagtattgttaaaaatgctaatcatctccaaattgattaattgctatctcagtcaaaatcccaggagttgaggggggacaagatggccaagtatagacagccagggagaactcctactgagacagaacagaatatcaagtagactggcatactctgaacagatcatctgagaggatgtattgagggtggagagagagatgacccagatgctgggaytgaatagaggaggaactgaaaaccctgcacagggtttccaacctccaggatgcatgccaggccttgattgtctactaaggaaggggtgagtagagcaaatgtggaacagcccactcttggcacagacctctaggattatagctgcaggaaacaccataacccccatggacattgtgtgggcagggggagctgccagaaaagtaggcagagacagaacttgaatctgcatggagctc

SEQ ID NO: 357362 - DNA, 481 bp, Homo sapiens
atccaagctaagtaccaaatcaagaatgcaatcccatttagaatagacccaaaaagaataaaatatcaaggaataatacagcttaccaaaaaggtgaaagatctctaaaatgagaattacaaaacactgctgaaagaaatcagagacaacacaaataaaaaaaaaaattccatgcttatgtgtaggaagaatcaatattgttaaaatggccatactgcccaaagcaattacagattcaatgctatttcaatgacactaccaacataagtttccacagaattagaaaaaacagttttacaatttgtatgggacccaaacagatcccgawtccccaaagcaatcctaagaaaaaagaacaacgctggaggcatcacactacccaactttaaactatactactaggctccagtaaccaaaagctcatggtactggtacaaaaaagatacatagaccaatggaacggattagagaacacagaaat

SEQ ID NO: 357363 - DNA, 525 bp, Homo sapiens
aaggaaaataaattgttctatcaaaaagacacatgtacttgtatgttcattgcagcactatttacaatagcaaagacataaaatcaacaargatgtgcatcaacagtgggctggataaagaaaatgtggtacgtatataccatggaatactatgcagccataaaaagaataaaatcatgtcctttgcagcaacatgaatgtagctggaggccattatcctaagtgaattaattcaggaacagaaaaccaaatattgtatgttctcacatataagtgggagctaaacattgggtacttgtggacacaaagatgagaacaataggcattgaggactgcttgagtggggagagagggaaagaggtgagcgtgagttagaagactacgtatcaggtactatgctcattacctgggtgatgggatctttcttacaccaagctcagtgacacataatttgcccatgtaacaaatctgcacatgtaccccctgaacctaaaattaaaggagaggaaaaaatatcccagcagt

SEQ ID NO: 357364 - DNA, 525 bp, Homo sapiens
aaggaaaataaattgttctatcaaaaagacacatgtacttgtatgttcattgcagcactatttacaatagcaaagacataaaatcaacaaagatgtgcatcaacagtgggctggataaagaaaatgtggtacgtatataccatggaatactatgcagccataaaaagaataaaatcatgtcctttgcagcaacatgaatgtagctggaggccattatcctaagtgaattaattcaggaacagaaaaccaaatattgtatgttctcacatataagtgggagctaaacattgggtacttgtggacacaaagatgagaacaataggcattgaggactgcttgagtggggagagagggaaagaggtgagcgtgagttagaagactacgtatcaggtactatgctcattacctgggtgatgggatctttcttacaccaagctcagtgacacayaatttgcccatgtaacaaatctgcacatgtaccccctgaacctaaaattaaaggagaggaaaaaatatcccagcagt

SEQ ID NO: 357365 - DNA, 614 bp, Homo sapiens
catttctgctgctaatgtctgctgtatcataactaattacaaagtcaagagcaggtgccttaaaaacaaacacagtaagaagtaaaaactaaaagaagatcaagcattcattaccagcctgggcaacagagtgagaccctgcttcaaacataaaaataaaaagaaggaaggaagggagggaggaaagaaggaaggaaggagagagagacagagagagagaaagacagacagagactttggcaaaactggaaaagaataaagataggaagcataactatgtactgttaagaaggctgacaggtttaaccagaaatgcacaagaaatttgtttttaaattataagagataaggaggcagaacaagatgaccaattagaagcctccaccaatcgtccttcccacagaaacaccaaactggacaactgttcacactaaaacagcataataagaaccaaaaatcaygtgagtgatcacagtacctggttttaacatcatattaaggaaagaggcactgaaaagggcagaaaagagtcttgaatcaccttccccaaccctgagcagcagccatgtggtatggacagagaatctgtgcattcagagagggagagagcagtg

SEQ ID NO: 357366 - DNA, 425 bp, Homo sapiens
acagcatgcacaaaggccctgaggggagggcatggttaacacacagcaaagagtcctctctgatccagtggaytgagcaagcgacagagtcgtaggcattaaggtcagggggtaaatggaggagcgatccattagggtcttaaagtcaatttttgacatagaatgaactgctcgtatttaaaaataccgtgatgatgtttgacccacgcacgacccataaagtcagcaccacaaacaagatgacagatgtgtccgtcaccaccataagtttccttgtgtttagtaaccctttcctcccacccttcctgcctgaaagagatttttaaaattcaaataaatatcaattaattccagcatcattttaagcttttctttcaaaattgaataactaaattctgataaactgataaacctgataaactgaa

SEQ ID NO: 357367 - DNA, 552 bp, Homo sapiens
ttgcacctattatgtatttaaagcatatattttttaaaatgaacactatcaggatttctctctttatacgtaggccagtgtggtgctggtgcaaggacagacggcccagaggaagattgcaggtcacgcaaatctttaaaatataacgaagccaaaatgataagtcaatggagaagattaaggttatttaatgaataatcaattaagacattttcggaggaggaaaaataacacaaaaactcatctaaagtgaatcaaagtaaatcgcttaaaagttagagttaaatgtaataaaaatcaaaccataaaaagcttatagaatacaaatataaggattaagtcccttgatggggaaaatcacattttaaaagcaaaggaaagccaaaaaaaaaaaaaaaaaaaaaaagggaaaaaagtcaatagatagaactacatacmaactgaagatatttaagcttaataacaacataaccaagttgttattaaggcaaaagacaaaaatctgataaagaaaaatattataaataaatatcagacacatacaacaaccaa

SEQ ID NO: 357368 - DNA, 584 bp, Homo sapiens
ttttttagtataagtgtgtcccaaatattgccagggacatatttatactgataagcatccttgtttaactgaaattccaattttacctgtttttctttctttttctttttctgccaaatctggtaaccctgtgcaggacagaagcatgtggacccgcctggcccctggctccatgcccaggtctggccaaaagccaaggctttgagcacaggctggcggggagaaggggctccaggcccccgaccaccagcgtggccctagccctgggggcaaggcgggcagctccccacgcccacgagggtcttttctgagatgcttcctcctggaactctagggtcatggtcattacacgatgtgagcagatgggctgcagccctgarcctccctgtcagctgaggcccctggcccagggacttatggctgtctggagctggtccgggctgggctcatcacagagagaagctgatagagccagagaggcgggcaggtcactgctggcagagccttcttctctcagacttggagccagggatggggacacagggcagagggagccctcccatgactcagggagagaagcacca

SEQ ID NO: 357369 - DNA, 507 bp, Homo sapiens
atcatgattgattagtgatgtctgccatgggcatgggtaaggggtgtgggtacgtgtgctgtggattttctgtccttgagctagagctttctgctgaggatagaacagtggctcttaaccaggagcatgcatcagaatcttctagtatggttwttataaatgcacatttcttggccttgctctgaatcagaattgccaggagtgaggcttggataactttcagaactctgcaggcaattctgcttgtgaaatttacctatcaataaaaagaggccccaaccctgagcccaggctattcagtggggccctccaaaaacaaccgggtcctttctcccaaatggtttccatagcggaagctggggaaagaacatggccttgctttgtgtggctcagacaggctgcatcattatccgagtcttggttttcttacctggaaaatgggtgctcttataaccaactggccaggcgactttcagggatacctcttccactgggagcacgcccagg

SEQ ID NO: 357370 - DNA, 559 bp, Homo sapiens
ccaaaaatcctgcttctccctctttagaggggtaagacctgactacaaagggatayttttgtcactggaagtttcactgatgttttcctccttttctaaacagtaagattcagacaatacaccctggagccacaaggccagcaccaagtgctgtagttttagggacctgagtggactatctctgacaaagaatcatttcaagggattaaacattctgatgtattgattctgatgactggataatatcttagagatcccagaaattgtcaggcaatgtgactaaacatctctcacctaaagagtcctaggtggactatttctagaagaccattaattccaaacacttttagagagagaacacagaaaataacagaataattatcacttaatatatttgtgtaaattttagtacaattcaagtacaattgttgaaatttctagaatgtaatgtaatagacacagcatgcttcaaaaccatacattagaaaataacatcggtagaataattactctgggtatatactcacagattttaatccgtttctcagtcacgtctgtc

SEQ ID NO: 357371 - DNA, 524 bp, Homo sapiens
atactttcagttactcagcccttctattaattgctttcttcttataatcatcttttaaaatcrtaagtctttcttctttagtgattggcttttcttcatggaactctaccttagctttattgatttaatatccacttaatttttttaagcaattagcattttatctgaaatgaaaagttttgtttcattgttgatcagttattgtgtttattcatcttggttcttcttttctttttctttttttatttttatttttcctaaccactaggctacaagggaggttcttctttttcaatatcattcattttccttcaatatttagtaattctttgttttaaatgcagtacctttggttcttcctctcttggcactttgcaatgctataggcatctggcataggtttctatatgtctgtttccatgatgagtctctctctttctctctttctctccctttttctctcatcttctctcatggaaggtgcaaggggtgattacgatgaggatgctgacagaaaggtttcc

SEQ ID NO: 357372 - DNA, 581 bp, Homo sapiens
ccctcctcatgtctacaaaccaattgcatcattcttgttattgaataatttataacaaaaataactgtggacctcctggtgagacactcctcattgttcccaggccctcctcatacatacaaaccaaattgcatcattcttattacagaaaaatttattttaaaaaataactggctgcagatctcctgccctccaaaaatgatggcataatctgtccagatgtacgtggttctgtgcataagaaaatgtttcagtgagcttcgggtaacatcaaaagaaacgacctttgggtgatactaaaagaaagccagaaagaggcaaatttgaacatttaaaatatttttattttcagtgtttgcaaaraattcctttagagctgggctccctgagtaagataaccagaaggtaaaggaaaacagcgaagtagcagttggtcactttcttatttcactgttataaaaacggcagttcctcacatgattaccatatctgcaagagctattatgtcatctgcagacatcaatattgtaaaagtcagagataagtttcacctcactagggagtcagcaactcatggaata

SEQ ID NO: 357373 - DNA, 570 bp, Homo sapiens
gaacttcacattagatgggttcagaggttttcatctgccccaccttcaccaacaatttcaattcaaaaacctttcacgtggtttcccatttctcatcacgaaactctcacctcctagcctgacattcaggrtatccatgatctagatccagggtacttttcaaatataatttccctagactccactgcttgcattctccacatcaaacgttatacatttgtttcatcagacagcatgagtaactttctactacccaacgttcctcttcctgggtaccttttcaacccctacctgtccgtgctctaacaagcttcaagtcccagctgctctctgaagccctccctgcctggtgtgtatggtgcctctgtcccagtctctcctttcatccctccctcttctgggcttcccatatatagcagttttgtctcttttcctagactgtaagcccctgagagagagatctaattctcattcatttctacttccccagccatgtacacactctggataattaacggcagaaagataaactgtatttctgcacatcttcactgcactgcgagccccaac

SEQ ID NO: 357374 - DNA, 592 bp, Homo sapiens
ggtgtttggttacatggataagttctttagtggtgagattttggtgcacctgtcacccgagcagtgtacactacacccaatgtgtagacttttatctctcacgcccccccacccttcccccaagtccccagagtccattatattatttttatgcctttgcgtcctcatagcttagctcccacatatcagtgagaacacacaatgtttggttttccatttctgagttacttcacttagaataatggtctccaactccagccaggttgctgtgaatgccattatttcattccttttaatggctgagtagaattcatatatgtattccatggaattatatatattatataatatatatataaaatatcacattttcttcatccactcgttcattggtgggcatttaggctggtttcatatttttgcaattgcaaatcgtrctgctataaacatgcatgtgcaagtatctttttcatataatggcttatttcctctgggcagatacccagcagtgggattgccggatcaaatggtagttctacttttagttctttaaggaatctccatactcttttccacagtggttgtactattt

SEQ ID NO: 357375 - DNA, 501 bp, Homo sapiens
tttgtttcagggactaaaagcagtttatctttacagatgctcatctagtcagctcagcaaaaaactaaccagtctgcagggccagcctgaacagtgggcttataggggatctaggctcatgttctaccctgtggtacccctctttataaaagaataacacagaaagacaaaggaaaatggaacaacaacaacaaaaggctatttctgagagaaaaagagtgcaaactgtcaaaggcatttgaaccacagtgcctccatcttgaatagggacgggataaaataaggctgagacatactgggctgcattgccaggaggttaaggcattyttagtcacaggatgagatgggaggtcggcacatgatacaggtcataaagaccttgctgatacaacaggttgcagtaaagaagccagccaaaacctcccaaaaccaagatggcaatgacagtgacctctgctggtcctcattgctcattacacactaattataatgcattagcat

SEQ ID NO: 357376 - DNA, 601 bp, Homo sapiens
atgatttatatttctttgggtgtatacccaataataggattgctgggtcaaatgatatttctcgttctagatccttgaggaatggccacaccgtcttccacaatggttgaactaatttacactcccaccaacagtgtaaaagygttcctatttctccacagcctcaccagcatctattgtttcttgactttttaattgaaaggtgattaaagattgcctgaacttatctctctcatactcactttgatctttcgctgtgactcttcttttgaactgtgctttgcttttactaattcttgctatttttctagacggtcgggcacaaaccctttgcaccagtcttttaaatcctgacaacattagtcagtctaattttggttatgccaatatctagatgatgcaaaagaacctgaaattatttttgtttctgccagtatgagcacctggtggattcagtctagaagatggatgtatgacaagatatggcatccagaaccagagaaacaaagtcacattgcctctcttatggtaagtcaactggacacagaaaagccaccatggaagctcaaaactgtcttttgcttagataaaattactagaa

SEQ ID NO: 357377 - DNA, 601 bp, Homo sapiens
atgatttatatttctttgggtgtatacccaataataggattgctgggtcaaatgatatttctcgttctagatccttgaggaatggccacaccgtcttccacaatggttgaactaatttacactcccaccaacagtgtaaaagtgttcctatttctccacagcctcaccagcatctattgtttcttgactttttaattgaaaggtgattaaagattgcctgaacttatctctctcatactcmctttgatctttcgctgtgactcttcttttgaactgtgctttgcttttactaattcttgctatttttctagacggtcgggcacaaaccctttgcaccagtcttttaaatcctgacaacattagtcagtctaattttggttatgccaatatctagatgatgcaaaagaacctgaaattatttttgtttctgccagtatgagcacctggtggattcagtctagaagatggatgtatgacaagatatggcatccagaaccagagaaacaaagtcacattgcctctcttatggtaagtcaactggacacagaaaagccaccatggaagctcaaaactgtcttttgcttagataaaattactagaa

SEQ ID NO: 357378 - DNA, 583 bp, Homo sapiens
aattgccaaggctttaatgtcccaccccattaattttatcttcctttatctcctgaaaagattaatgttctaaaccctggcacccaaaacaccctcatgttgaaaactcttcaatacccccttctcacactcatcttcagagctaccatgaggcagagaagcctccggaatcagcccacatggggctgggtgaatgccaacaccaagcaaggggaaagtcacaaattgacatccagcaccttattctccacccttcagcccctcaactgactcctgctccacggcccgttctattaatatctagcatttagcaccagcctggacaaaaacctacttggaaagatggtacaagaaccccacacaactccatagaacttcgctgtctaaaaaaatgctttgccgtatattatcccacttaatctccaccactatgctgtacataggagccacaactcytagacaacaaataaaaatcctatcacttttcaaatcctaacattttcatatgacaaagccagaactcaaaatccagacctctagagtcccagatcaggaaaggaagaaacgccaagtcaaagagaag

SEQ ID NO: 357379 - DNA, 536 bp, Homo sapiens
gctcggcaggcggaacttgtaggaacgcggggcttcttggtggggccggagccgagacccagccggagcgagcaacaggtacgcgagcgagcgagcgagagccggggcgcggcagctgggcactggagacgctgggctggcccgggagcgggagagtggcaagtttggctttcttcttttcccttctccttcttcctccgttctcttctcttgcaagcatctccacctctcctcttctacccagtccccagtcttcccttccaagtgtaaggtccaccgtttctgcccccatctctgcgagtccttaagcgcatcttgctactcacttatagctcagtggcttgcggaggacttcagcctccataatccccaccagccccacaaataaacacacaatgcaagtaaaaagtgtgcttgctatgggaatgtagttgtaagccacgccaaatacttaaaatctatcgcacttccaagaaaggtccccggtcccsttccaatcctcttgccgttcctgagtcgcccccgtctccatcacc

SEQ ID NO: 357380 - DNA, 560 bp, Homo sapiens
aagcaagtaccccagggaactaggtggaagctgctttgctttttctgtcccagcttccaaagtcacttgggtcagaagcaagtcacaagctgatacagattcaaggtggggcggaattagactccacctcatgggggagtggtgaggttctagaatagcatgtggaatgggagatattttagtggccacctttggattatgcaatctaacacagagataattttagaaactcctcagggctttgaaggtaatacacaaaggtaacacaatagagagtgccccagggactcctcacctgtggtgatgagggaaggcaggacactttgaagaggaaccaggggaatagtggacttgaatgacagaaaggagccagctatatgaagacatgcgagaaaggtgttttgggaagagagagagctaagtccagtggcccggaggtaagactgcatagtacgtttcaggaaagaaaaacaagcagtgtagcttggtgccagggctgggtgcccagatgcagggatgcagagatgaatgagtcccarccacagccctcaggtgacccc

SEQ ID NO: 357381 - DNA, 511 bp, Homo sapiens
gaatggcgtggtaccctccccaaggtgatgagtgagttattgctatattagttcatgcacgatctgactgtttaaaagagcctggcatctcttttgcttgctctctcaacatgtgacacacctgctcccccttcaccttctgccatgagtaaaagcttcctgaagcttcaccagaggcygagcatatgcaggtgccatgctccccctacagtctgcagaaccatgagccaagataaacctcttttctttacaaatcacctagtctcagccgggcatggtggctcatgcctgtaatccctgcacattgggaggccagggcgggcagatcatttgaggtcaggagttcgagaccagcctgaccaacatggtgaagctctgtctctactaaaaatacaaaaaattggccgggcacagtggcttacacctgtaatcccagcactttggaaggctgaagcgggcagatcacctgaggtcacgggttcaagtccagcctggccaacatggtgaaact

SEQ ID NO: 357382 - DNA, 511 bp, Homo sapiens
gaatggcgtggtaccctccccaaggtgatgagtgagttattgctatattagttcatgcacgatctgactgtttaaaagagcctggcatctcttttgcttgctctctcaacatgtgacacacctgctcccccttcaccttctgccatgagtaaaagcttcctgaagcttcaccagaggccgagcatatgcaggtgccatgctccccctacagtctgcagaaccatgagccaarataaacctcttttctttacaaatcacctagtctcagccgggcatggtggctcatgcctgtaatccctgcacattgggaggccagggcgggcagatcatttgaggtcaggagttcgagaccagcctgaccaacatggtgaagctctgtctctactaaaaatacaaaaaattggccgggcacagtggcttacacctgtaatcccagcactttggaaggctgaagcgggcagatcacctgaggtcacgggttcaagtccagcctggccaacatggtgaaact

SEQ ID NO: 357383 - DNA, 511 bp, Homo sapiens
gaatggcgtggtaccctccccaaggtgatgagtgagttattgctatattagttcatgcacgatctgactgtttaaaagagcctggcatctcttttgcttgctctctcaacatgtgacacacctgctcccccttcaccttctgccatgagtaaaagcttcctgaagcttcaccagaggccgagcatatgcaggtgccatgctccccctacagtctgcagaaccatgagccaagataaacctcttttctttacaaatcacctagtctcagccgggcatggtggctcatgcctgtaatccctgcacattgggaggccagggcgggcagatcatttgaggtcaggagttcgagaccagcctgaccaacatggtgaagctctgtctctactaaaaatacaaaaaattggccrggcacagtggcttacacctgtaatcccagcactttggaaggctgaagcgggcagatcacctgaggtcacgggttcaagtccagcctggccaacatggtgaaact

SEQ ID NO: 357384 - DNA, 484 bp, Homo sapiens
aacctcagtcttgttcttacagcccttcagctgattggatgaggttcacccaggatatcaaggaaaatcttcattgcttatgtcaactgattgtagatgttaacaacatttacaaaatgccrtcacagcaaaacccagatcagtgtttgattgcataactaaatactacagcctagctagctgaatcgagacattaaactaaacatatagtccccctttaaacaagagggcagctttgaagctggcgctgatgttttatcatgttaacaaagtattcatcttggctgggtgctgaggctcatgcctgtaatttcagcactttgggaggccgaggtgggcagatcactcgaggccaggagttcgagaccagcctggaaaccccatctctaccaaaaatacaaaaattagccaggcatggtggtgcatgcctgtaatcctagctacttggaaggctgaggcatgagaatagcttgaacctgggagg

SEQ ID NO: 357385 - DNA, 580 bp, Homo sapiens
cagcctcacacacctgcattacagtggaacagatctgccctctcatgcccaaactccacttaagagcagaaaacacaygcatacactaagtgggagcttatgggggtcatgcctgggtctctaattgctactcttagggactcttacccttattgctattgattattatggaatcacttagaatcacaaaattagagcatctcagagtttagtgttttgtccatgtttccccaggcatggctaccttctaagaggaaaaaaaaatccctcttcttttgaaatgcatatttcagcatgcgtcataaagcaccactctataagtgtttgcaagagatacagaaaccaagggaacacgtggaatccttgaaaaagagacacacccatgctcagtgcacacttccccttcatcacaacttcagatgcaagcccaacgacacagagagttattacctaatgacaaggtagctcaccaaagtctgtgatgactgctataattagaaagtctgaaataatgaacatgtacctgcaagcgtgacacgagcacagaagagaaaatgctactgtggaaatgagatttaat

SEQ ID NO: 357386 - DNA, 423 bp, Homo sapiens
cctcacaccataagtgctgacaagtctgagggaatatcccagtgggtcacttcttaatttcaaggcactacagatgacacagatggtacaagattaattacctaaaaacaaaagaaaattgtgaccttccattagtttcttctctcattagtccatgcacacggggcatttcctaaccgaatgcagctgggcagaattagragggagggtgtgttcctttattcaggaatgtattcatagtggcccatatggggagtgggtgtgggcagtgctaagagattctgaggaggaaggtggtggtgtgggagcatcattgaagtggagccgtgaagcagaggtaggattttaacaggtggaatggaaaaggtggccttccaagaacgtgtgtgacataagcacacacgcatgtgcaatagtttggtg

SEQ ID NO: 357387 - DNA, 492 bp, Homo sapiens
atcttgtcatttgaagacaaaataaatgtaacaatacagtgtgtaaccattaagattgactttttcccctcagaataatttctgaacattattccaagttgttgtatcaatagtttgttccctttgactgctgagtagtagtaatgatatagaggtaccacagtccatctaaaggacatctaggtggtttctcgttctaggctgtcacaaataaagctgttaygaacatacattgtattagttgactaggctggcataacaaagcactacaaactaggttagacaacagacatttaggagttcagcatatgaatctggagtgtgagactcaattcagcgcttaacattcatgtgcaggttttcctgtgaatatcacttttcatttctctggagtaaatgcctaagactgcagtttctcagtagtattgtgattgcatgtctaggcttttaaaaaagtgccaagctgtgttagagaggctgtaccagtttaca

SEQ ID NO: 357388 - DNA, 562 bp, Homo sapiens
tttgctgttatcaaatattagttaggcatatttttgtgaatctatctctgggttctctgctgtgttccattggtctgtgtgtctatgcctctaccaataccatactattttgattactgtagcaataaagtaagtcttaatagatagagtagttcttcctattgtgttttttcccaagattattatggtagggtttgtgcctcttcatataaattttaaaataagcttgttcatctgcaaacaaacaaaaaccttgatgggattttgatggtaattgcattagattagtttgagaataattgacatctttactatgttgaatcttctatgaaaacaatatgcctttttatttagatctttgatttcttttatcagaatttaaaamttttcagcttgaagtttccgtatgtgttttgttaagtacacacttaagtatttcattttttgtggagagattataaatcttgtgttttcgattttggttaatacttgttcttataagcatatagagacatgattgatatttacatgttgatcatgtgtcctgtgaatttgctgaact

SEQ ID NO: 357389 - DNA, 628 bp, Homo sapiens
atggaaaacaaaaaaaggcaggggttgcaatcctagtctcggataaaacagactttaaaccaacaaagatcaaaagagacaaagaaggccattacataatggtaaagggatcaattcaacaaaaagagctaactatcctaaatatatatgcacccaatacaggagcacccaaattcataacgcaagtactgagtgacctacaaagagacttagactcccacacaataataatgggagactttaacaccccactgtcaacattagacagatmatcgagacagaaagttgacagttcttttctttcagcacttaaaaaaccattgtgtcacttccttctggtctccatggtttcaggtgagtaatctgaattgtgtttccctgtgggccgtctgttatttatctttggctgctttcaagatttttctttgtatttagttttgagatgtttaatcgtgttgtgtcttggtgtgaattttggggggtttatcccatttggaatccactcagtttcttgattctctagatttatgtctttcaccaaatttgggatattttcagcaactatttctttctttgtttttttattatactttaagttttagggtacgtgtacacaacatgcaggtta

SEQ ID NO: 357390 - DNA, 628 bp, Homo sapiens
atggaaaacaaaaaaaggcaggggttgcaatcctagtctcggataaaacagactttaaaccaacaaagatcaaaagagacaaagaaggccattacataatggtaaagggatcaattcaacaaaaagagctaactatcctaaatatatatgcacccaatacaggagcacccaaattcataacgcaagtactgagtgacctacaaagagacttagactcccacacaataataatgggagactttaacaccccactgtcaacattagacagataatygagacagaaagttgacagttcttttctttcagcacttaaaaaaccattgtgtcacttccttctggtctccatggtttcaggtgagtaatctgaattgtgtttccctgtgggccgtctgttatttatctttggctgctttcaagatttttctttgtatttagttttgagatgtttaatcgtgttgtgtcttggtgtgaattttggggggtttatcccatttggaatccactcagtttcttgattctctagatttatgtctttcaccaaatttgggatattttcagcaactatttctttctttgtttttttattatactttaagttttagggtacgtgtacacaacatgcaggtta

SEQ ID NO: 357391 - DNA, 614 bp, Homo sapiens
ttcagtgtgtaagtcttctgcctccttggttaatttctaagtattatttttggtgttattgtaaatggaattttcttattttgaaatgttcattattagtgtacagaaatgcagctgattttttgtgattcttttgcatcctggtactttgctgaatttattagttctaacaatttttaagtggagtttttagggtttcctagatataagatcattgcatcaacaaatagataattttacttccttctcaatttagatgtcttttacaggtacaccttgttttactgagtttcactttattgcgtttcacagattttgtgttttttacaaatggaagctttgtggcaaccctgcatcgtgcaagtctatcggtgccatttttctaatggcacatgtgctcacttcatgtctccatgtcacattttgataattctcacaatatttcaaactttttcattattaatatatctgttacagtgatctgtgatcagagatctttgatgttactattatactgttttgggagcaccatgaaccatgcccatataagmtggcaaacttaattgataaatatgtttgttctgactgctccactgactggtcattttccatat

SEQ ID NO: 357392 - DNA, 401 bp, Homo sapiens
atatttctaaatgcagagaatgtcgctgcctagcaaaatagtccattctattttttagcagccctaaaggrttataaagctccttcttatacagaaccaataaatgcctcctgtaacttctacctgtgggcctgagccttagtttcttaaaattgagagattatctaaaattatgtaggtgatttaggatcatttgaaaacacatttatcgaccacctgaggtaacattatttgcttggaggaatacagaagtcacacaagtgagtaaacagctggctaatgaacacttaggcacaaagtccctaccctaaatgagttgagattttggaagtcagattaacagcaaaattattttgctagtgaaaaatagctacatcgtgttcagtaatttttgattgcat

SEQ ID NO: 357393 - DNA, 401 bp, Homo sapiens
atatttctaaatgcagagaatgtcgctgcctagcaaaatagtccattctattttttagcagccctaaaggattataaagctccttcttatacagaaccaataaatgcctcctgtaacttctacctgtgggcctgagccttagtttcttaaaattgagagattatytaaaattatgtaggtgatttaggatcatttgaaaacacatttatcgaccacctgaggtaacattatttgcttggaggaatacagaagtcacacaagtgagtaaacagctggctaatgaacacttaggcacaaagtccctaccctaaatgagttgagattttggaagtcagattaacagcaaaattattttgctagtgaaaaatagctacatcgtgttcagtaatttttgattgcat

SEQ ID NO: 357394 - DNA, 613 bp, Homo sapiens
aatacaaaaaagttaatgtctatcaaaagaaaagtataaaattcaatttaaatgctttctcaagcattattcttttctaaagtaaacactcrctcatgcattccaaagcaatggtccagcccctaatctttaattcagttccaggttgcacagccatcacaaagcacctactaagcaccagacctttgaaagcatcccctgctttcaagcagcgacactcttttcagctgcagttcttaacagccaaaacataaaagcccagtaaaactttaattagtaaattcaaggctcaaattgaggcagtcggataaagtaatataaaatcttatgtaagccacagtaaggagagtgaactcaaccacaataaagagcacagttaagtaaaaatattctttcctgggggcccttcttactctctacatctgggctgtaatgtttgtaaactgtggctaatgtgaatacctgcctcacaggtatgttgtaagcatcatatacgaaatatgaaaggtgctttgggaatgctaaagctctctacaaaggaaaatgacttctacatggaaatagttcacatcaaatgaatgaagagcaagagttaaaaactggtgactggtca

SEQ ID NO: 357395 - DNA, 512 bp, Homo sapiens
cgtgtgaatgtcccctccccacagggtgttggaaagtgagtcccaccaggtatggggcaggaccaggagggaccttaccagcaaccggggtaaggaggaatgaccaagtcattccagccccagcatgggggggtagggtgtgggcttggcctttgcagtgtcagggatctgggcggcccctcctagctcacctgcagatctccctccgcaggcaggactcccataccctgggaacaccacaagccgctcctgaaggcaaacagaagactcaragacagaacagcagagcctgagccataaggtagaggggaacatttcccagccacctcctgttttcaacactgctggccctggatccagtaagtggcatgaccatgcagagtggtgcttgggcccctaacaactgctccctcagttccgcacagagaaggctgttcccagaaagggctccattaaatccttagccaagagccacatctcctctgtttctgtctcagccaaggggagagggc

SEQ ID NO: 357396 - DNA, 583 bp, Homo sapiens
cagaaaaccaggcctgtctggatggggggcctggcatgggaatcaygttctcataggatgttgcttgtgatctgcaacaaacacagtgcattttcaagcatcttcccgtattggggctgagataatgatattccaaagtatggtgctgtggcatgctgagtactttgagctaaaggagactggaaggtctcagaagcagcctcagaagcagtatctctctctctctctgacctgtccccacttttctcccccaaggcagccatagaaatgagaattcctcttccgtaaggtaggtcatagaaagtagaaatattgggagccggatgtggtggctcatgcctgtaatcccggtactttgggaagccgaggcgggtggatgacgtgaggtcaggagtttgagaccagcctggccacagtgaaatctgtgtctactaaaaatacaaaacttagccagatgtggtggcgtgtgcctgtagtcccagctactcaggaggctgaagcaggagaatctcttgaacccaggaggcagaggttgcagtgagctgagatccagcctgacgtgaggtcaggagtttgagaccag

SEQ ID NO: 357397 - DNA, 402 bp, Homo sapiens
tgaacactcatgggattgccgtgctctctctactagaccagtgctgttgtcaattatattaggtttttcccctgtcattatttttatttttttatctcaacaaatttttgactcagtacctgactatcccatggaaataacaaagcccagccccaatatcacttcttgtatctgtcacgatgatgcagactctcatctctatctctcagmgtaattgcatgaatcccagtgactgtgatttctacatggctcaaattgtaacctatttttgtagttctctgcagacccaccacggtttccattcttccttcatgttctccttgatctagagtaaaatacagctttcccatcagaagttattcttgcaaggattctgtgtgctttgcctatatttagtcacct

SEQ ID NO: 357398 - DNA, 402 bp, Homo sapiens
tgaacactcatgggattgccgtgctctctctactagaccagtgctgttgtcaattatattaggtttttcccctgtcattatttttatttttttatctcaacaaatttttgactcagtacctgactatcccatggaaataacaaagcccagccccaatatcacttcttgtatctgtcacgatgatgcagactctcatctctatctctcagcgtaattgcatgaatcccagtgactgtgatttctacatggctcaaattgtaacctatttttrtagttctctgcagacccaccacggtttccattcttccttcatgttctccttgatctagagtaaaatacagctttcccatcagaagttattcttgcaaggattctgtgtgctttgcctatatttagtcacct

SEQ ID NO: 357399 - DNA, 402 bp, Homo sapiens
tgaacactcatgggattgccgtgctctctctactagaccagtgctgttgtcaattatattaggtttttcccctgtcattatttttatttttttatctcaacaaatttttgactcagtacctgactatcccatggaaataacaaagcccagccccaatatcacttcttgtatctgtcacgatgatgcagactctcatctctatctctcagcgtaattgcatgaatcccagtgactgtgatttctacatggctcaaattgtaacctatttttgtagttctctgcagacccaccacggtttccattcttccttcatgttctccttgatctagagtaaaatacagctttcccatcagargttattcttgcaaggattctgtgtgctttgcctatatttagtcacct

SEQ ID NO: 357400 - DNA, 402 bp, Homo sapiens
tgaacactcatgggattgccgtgctctctctactagaccagtgctgttgtcaattatattaggtttttcccctgtcattatttttatttttttatctcaacaaatttttgactcagtacctgactatcccatggaaataacaaagcccagccccaatatcacttcttgtatctgtcacgatgatgcagactctcatctctatctctcagcgtaattgcatgaatcccagtgactgtgatttctacatggctcaaattgtaacctatttttgtagttctctgcagacccaccacggtttccattcttccttcatgttctccttgatctagagtaaaatacagctttcccatcagaagttatkcttgcaaggattctgtgtgctttgcctatatttagtcacct

SEQ ID NO: 357401 - DNA, 658 bp, Homo sapiens
atggtgagggactgaacattagtgctttgagcaagaattggttaactacctgagatctctaaaacagtaatttgaattactaatacataaaccacaagtctcttcgaattgttaattgcctaaatttaccctaaaacttagttaacgctgcagtgyctttattaaagcttttttttgggggggggtgtgggcacagctactccataactttaaattttaaagcatgaaggtgatctagctagtgttagtgcttgagttggtagttacataggctgctcttgaatcgtcctgttttctttgcctagtattagcaccacaggtacatatttgtaaaataagcattaaaagtactttgtccagctaactcatgttggagtgacctttgtcttactaacctttgttactaaacttgttaattagaataagcccttgagaatttggaagtgagctatactactaatgtagtatatatctcttgagtgtgttggagtagatgaaaaaccaggggtccccaagggtatatttttgaaattgaacagaaacaattcatcttaatatttagttttcattatgtttagcttaatatgtgtgctagtttatttggcgtcacacttatgtcaatctcaagtcatgcagaaatagcacagtctcagaaaag

SEQ ID NO: 357402 - DNA, 463 bp, Homo sapiens
agatctactatatgtagatatacaatctttgttttcatagtttagtgttttccagtaaatgaaatttgttttcatataactaatatttaaaggtgtaaataatatctaggacacataaatttaaggaaccatcataattgtatttaactctgattcattaarggattagttatctagtttgtgaacatgtaaaccccctgtagctctcttcccatttctgaacgaagacaaaatttcaaattccagtttgtggcttattcataaccttcaaaattataaccaaaggctaaaatgagtttctggcactgtttggaagtttctattttgggggctatcctcaccacttaacttgaactggggattatcagtagtactgtacatagtccattaatttcaagtcaaatcatttcacaagtgttaatatttcacgtatacatgactgcaaggtatggtagaatgcttc

SEQ ID NO: 357403 - DNA, 639 bp, Homo sapiens
tctcttttaacctcatttcccttcctgctgtctgaagctcctgtgattttgttatgtctgatactgctttggtacagtttgcttctatctctatgggccttgtacagaaaggagggaatttcaatacttacattttattggcttagtcttcacaagttagagatagctgcccaatgatataaaagatggagtggtgcttattaatttcctccacagtgtaggaagaaggatggaatcaaagtctmtctttgttttttgttttttttcaataggcgattgctacattcctagtttttctttatcataatcacctttacacttcaaagctcgcaaagtagagtccagcctcccttgtctgacctaaaatgccatgaacaacctggttcaatccatctttctagccccattttttcctacatcctaatgtagaccctcaactctgatcaaagtggtctgaccttcaaatggcagactgcaacacagtgcctggcacatatcagcccttagagttgttgaatttttgaaagaaaatttagaggaaatcaagtgcctcttgtttcctctttttgaaaggatagtttttttcccccttctggttaaataaggttttcatggtaaaaattaaaacacaccccaaaa

SEQ ID NO: 357404 - DNA, 591 bp, Homo sapiens
atctgccctcagcctcctgtcatctgtccttgatttatttggaggtaaatgctggtgatgacccttgtgggctgcccatctcttttgcctcgatgagcgccatgttctgttaggtatttcagtgcatctccacaggttaggccctcttggctgccactgaggccatgctttcattgtgataattgtgtctacttaacttctggcggtcaagctccaccaccagaccttcactgctttggggaccgcatcataccaattgctttgtaagtctatttatgaaataacctctcttactagtacctccttctgaggagggctctggaacattttgttgatgctcagaagaatggaaagagttttaagcaggggtcaaacttttgattcacagaggttactgtggcagctttctgccattctcaccagcagattccttctggtcttggtaaatggtcttggccttctcatgaaacacaatyatttagtgaatcttctggttttatttactatgtccactccagcatgcctacttctctgagccttttaatcacttttgcaaccatctggcacagcaattatggcattttgacttca

SEQ ID NO: 357405 - DNA, 620 bp, Homo sapiens
gattgggtggggaagaagggttgcttctgctggtgagcaaggcacagtggatattgggggctccaaggactcatattcatctgaatttgcgcaactgttctcatttcagttctcaaagttccactctttcttaaccaaagtctaacttgcacatagaagacccagtgaggctgtgaattcaatttaatttgtgatttaaaactcgcatgatcagcyttggcatcttacttttggacatcatcccattcagtttaagagattagagattgtttgatggcagttacagaaactctccaatcttctaattttgccttgagcttagaatttaaagaaacgtaaaggcctgagcctttctttaagctcttcggggactcagaagtattcagcctgccccgtagtccttggttgccccattcttgccatactgatacaccaaaaggcatgcttcaagaggcacttaatgtaagcccaccagcagtgtgacagtgtaaataactctttgcaactgtgccacaggctgccagtttcccatttttcagtggcaattgaatcagccctgccttcaaacccaaccaaatcagataaccattcccaaatccttgttggtgactctgctgtct

SEQ ID NO: 357406 - DNA, 620 bp, Homo sapiens
gattgggtggggaagaagggttgcttctgctggtgagcaaggcacagtggatattgggggctccaaggactcatattcatctgaatttgcgcaactgttctcatttcagttctcaaagttccactctttcttaaccaaagtctaacttgcacatagaagacccagtgaggctgtgaattcaatttaatttgtgatttaaaactcgcatgatcagctttggcatcttacttttggacatcatcccattcagtttaagagattagagattgtttgatggcagttacagaaactctccaatcttctaattttgccttgagcttagaatttaaagaaaygtaaaggcctgagcctttctttaagctcttcggggactcagaagtattcagcctgccccgtagtccttggttgccccattcttgccatactgatacaccaaaaggcatgcttcaagaggcacttaatgtaagcccaccagcagtgtgacagtgtaaataactctttgcaactgtgccacaggctgccagtttcccatttttcagtggcaattgaatcagccctgccttcaaacccaaccaaatcagataaccattcccaaatccttgttggtgactctgctgtct

SEQ ID NO: 357407 - DNA, 620 bp, Homo sapiens
gattgggtggggaagaagggttgcttctgctggtgagcaaggcacagtggatattgggggctccaaggactcatattcatctgaatttgcgcaactgttctcatttcagttctcaaagttccactctttcttaaccaaagtctaacttgcacatagaagacccagtgaggctgtgaattcaatttaatttgtgatttaaaactcgcatgatcagctttggcatcttacttttggacatcatcccattcagtttaagagattagagattgtttgatggcagttacagaaactctccaatcttctaattttgccttgagcttagaatttaaagaaacgtaaaggcctgagcctttctttaagctcttcggggactcagaagtattcagcctgccccgtagtccttggttgccccattcttgccatactgatacaccaaaaggcatgcttcaagaggcacttaatgtaagcccaccagcagtgtgacagtktaaataactctttgcaactgtgccacaggctgccagtttcccatttttcagtggcaattgaatcagccctgccttcaaacccaaccaaatcagataaccattcccaaatccttgttggtgactctgctgtct

SEQ ID NO: 357408 - DNA, 563 bp, Homo sapiens
tttaatataaactttaaaatcttactctcagctctacggacatggttataggtgtctggcaattgaactaggagagcctgaaagtaaacacattgtctcttggaaattgatgaaaaaaccaagcatgtttctttattcattcaaaagattttactgagcatctttagcctgagaagtaggaggtaaattagacgtgttccctgcctgggcaaagagtatattctattaggggagaaagaggcataccaagatgtgcgtaacacagttatgcagtacgtagtatgttacatagatctagcaagacagcgacatttaacagatgacagggagggggtggaaattcggtgcatgggcacggctatgaaagatttcaaagaggctgtatttgagacaagccttgaaagaccaacaagagtttactaagcagagaagaggatgggggagaaattcccagaggaagaaacagcacaagcaarggcacgagggtcctgaagagcactgggtatttggggctaaagggtaaaaagagcagggtatctgattccagattaaaatgtcatccc

SEQ ID NO: 357409 - DNA, 625 bp, Homo sapiens
gctgacaaataatttgcacatgttgtcatgtaggctgtaagggaggtagccctggaccacagtgtcttgggaaggaaacttgtagagtcagagattcacttggtagagaagacattggaaggtctcctcatttccccccttgccactagagagaagaaaaaaaagaagcaattttcagtatgccagttttaaaagacttgtgaagaaggtgatggtgcttcttcctggaaatcagtgacagtgctgaaccaccttcataatcagggctgaatacaatctcttctcctagggttggagtccattcttcttgtgctatctgcaggtctgtttgctcctacctggagggccctgtgcccgcctgtcttaccaggccaataggtttcatgagaatttcttctacagccatggggagaaagtgcctaatctttcgcaccaggtgaaccttttctgtacttattgagtgatcttgggaaagttacttcacttctctgagyctgaattttcttttccatgaaatggaaataataacatactatctatctcacagtgttgtgaggtgaaaatacctggtacactgaaggccttcaataaatgttcctcacagccattaaaaagaacaaaatca

SEQ ID NO: 357410 - DNA, 625 bp, Homo sapiens
gctgacaaataatttgcacatgttgtcatgtaggctgtaagggaggtagccctggaccacagtgtcttgggaaggaaacttgtagagtcagagattcacttggtagagaagacattggaaggtctcctcatttccccccttgccactagagagaagaaaaaaaagaagcaattttcagtatgccagttttaaaagacttgtgaagaaggtgatggtgcttcttcctggaaatcagtgacagtgctgaaccaccttcataatcagggctgaatacaatctcttctcctagggttggagtccattcttcttgtgctatctgcaggtctgtttgctcctacctggagggccctgtgcccgcctgtcttaccaggccaataggtttcatgagaatttcttctacagccatggggagaaagtgcctaatctttcgcaccaggtgaaccttttctgtacttattgagtgatcttgggaaagttacttcacttctctgagcctgaattttcttttccatgaaatggaaataataacatrctatctatctcacagtgttgtgaggtgaaaatacctggtacactgaaggccttcaataaatgttcctcacagccattaaaaagaacaaaatca

SEQ ID NO: 357411 - DNA, 582 bp, Homo sapiens
agtccacagtgatggaatttctgcttgagacacattcattcctgctgagagaacggctctgtcacaggtagaagaaacactcagtggcttccatctccctggtgttctggtcaccatcgtcattgggcaggtgtccctatgccagcttcccaggcaggcccctccactgacatgcagcatggccccaacgtgttgcttggcctctgtgtgcattctcatccttttcttcagcaacyggtaaataattgccttgatcaatttggcattaggtgttttgagagacctaaatgctatcaattcatccatcgttgtttttataaagtacataccacactgtgcagggtgtggtattgagcactaaggggtttggggtggagggaatttcaggaggataatacaatgatgaacagaaaagcagtttgtcttcaaagagctcagggttgagtgggagagagaatacatggcctgtagagcaactaattctcaggtgtgtgagacctccaaggctttacagttcagcccaaggcccagctgctgacttgggggacacagaaattattgtaaaatactatattagaaagg

SEQ ID NO: 357412 - DNA, 582 bp, Homo sapiens
agtccacagtgatggaatttctgcttgagacacattcattcctgctgagagaacggctctgtcacaggtagaagaaacactcagtggcttccatctccctggtgttctggtcaccatcgtcattgggcaggtgtccctatgccagcttcccaggcaggcccctccactgacatgcagcatggccccaacgtgttgcttggcctctgtgtgcattctcatccttttcttcagcaaccggtaaataattgccttgatcaatttggcattaggtgttttgagagacctaaatgctatcaattcatccatcgttgtttttataaagtacataccacactgtgcagggtgtggtattgagcactaaggggtttggrgtggagggaatttcaggaggataatacaatgatgaacagaaaagcagtttgtcttcaaagagctcagggttgagtgggagagagaatacatggcctgtagagcaactaattctcaggtgtgtgagacctccaaggctttacagttcagcccaaggcccagctgctgacttgggggacacagaaattattgtaaaatactatattagaaagg

SEQ ID NO: 357413 - DNA, 557 bp, Homo sapiens
gtttctgttccttataaattacccacaaattgatattctgytacagcagcacaaaatgaactgagacaccattctttctttcttcccttatgtcagatgtgtcctcaggctagttcccctcgtggtcggaagatggctgccatatctcccaaatacagcacaataatggccagcagagggagagacatttatgtgattgatgaacccttttccagggctggctccatgggcagagacatgtgcagtcacataggaccctgtgctcagaagacccctttacttggcttagtacactgctctcaccatcttgaaattattcctaatcttatctttgaacttttgtttgataagtggaatctgatgggaaaacggagcaggtccacgaacagagagaatatgtgtctctgcccttctgttaccctatttacatataacatctacaatgtcccatgagcacagaatgtgtgggaagttcagcaagactcaaagcaagtacatgttgtgggggggaaatgtttttctctctatccttcatagtttttagataagaaagactc

SEQ ID NO: 357414 - DNA, 557 bp, Homo sapiens
gtttctgttccttataaattacccacaaattgatattctgttacagcagcacaaaatgaactgagacaccattctttctttcttcccttatgtcagatgtgtcctcaggctagttcccctcgtggtcggaagatggctgccatatctcccaaatacagcacaataatggccagcagagggagagacatttatgtgattgatgaacccttttccagggctggctccatgggcagagacatgtgcagtcacataggaccctgtgctcagaagacccctttacttggcttagtacactgctctcaccatcttgaaattattcctaatcttatctttgaacttttgtttgataagtggaatctgatgggaaaacggagcaggtccacgaacagagagaatatgtrtctctgcccttctgttaccctatttacatataacatctacaatgtcccatgagcacagaatgtgtgggaagttcagcaagactcaaagcaagtacatgttgtgggggggaaatgtttttctctctatccttcatagtttttagataagaaagactc

SEQ ID NO: 357415 - DNA, 540 bp, Homo sapiens
gttgtctatctatgagaactgctggctagtggctgttctagaaactagaaaagaggcactttccacctggttaccaaccagagtggtaagtggccattgaacrctttggataacttattaatggatgtatatgtgttattctgcctcttcaaaaccagaggagggctatgctgtaatgggcttagatctagaagaccagggctcacatcctagctctgccctcactagctaagcccccatcttggagactcatttcacctcccagcctgtctttttgtctggtaatggggattgataatgccaagttcactggttctcagacatccatctggggatctgtcagttctagctcaagatgaaggtttccacaacctgtgaccaaaatgtgacaatgataaagttaacaatgtagtaaatgtttcaccaagttaagtgtgttcaatttaaaggcttgtcttttattctgaagttatgtcctctctagttttgtggtgttaaaatccccttttatgaaatgatgatgaaaatagactgtagttg

SEQ ID NO: 357416 - DNA, 540 bp, Homo sapiens
gttgtctatctatgagaactgctggctagtggctgttctagaaactagaaaagaggcactttccacctggttaccaaccagagtggtaagtggccattgaacactttggataacttattaatggatgtatatgtgttattctgcctcttcaaaaccagaggagggctatgctgtaatgggcttagatctagaagaccagggctcacakcctagctctgccctcactagctaagcccccatcttggagactcatttcacctcccagcctgtctttttgtctggtaatggggattgataatgccaagttcactggttctcagacatccatctggggatctgtcagttctagctcaagatgaaggtttccacaacctgtgaccaaaatgtgacaatgataaagttaacaatgtagtaaatgtttcaccaagttaagtgtgttcaatttaaaggcttgtcttttattctgaagttatgtcctctctagttttgtggtgttaaaatccccttttatgaaatgatgatgaaaatagactgtagttg

SEQ ID NO: 357417 - DNA, 554 bp, Homo sapiens
agctagtttttaaagttttttgtagagatggggtctcactgtgttgcccaggctagtctctatctcctgggctcaagtgattctcttgccctggcctcccaaagttctaggattacaggcatgagccactgtgcctggccttcagttttcttatttgttggaatcaacttagttaacaaatacttatcaagttmtcactgtgtgctgggctgtatgtcaggcattgagtatatagctgtaaataagacaggcatggctcctaccgtcatggaaattacagtctagcaggatcaagttaaatgaaataatataatgtcaaagttctttcacaaagttggtattcaataaatgctaatccccttccacttcccttcaaatatacgatcattatatattctgacactcaaacataagatggccacagacaatttcatacatacaagaattgtgttgggagcccagacacccatagtataagggaactcttcagcattatgtctcacgaaacttagatcagtgtgtggtcttgatttaaatccatgtaaccaagggtt

SEQ ID NO: 357418 - DNA, 541 bp, Homo sapiens
atgccatctgcaagctggagaaccaggaaagcttgtgatgcgattcakttcaagtctgaaggcctgagaaccaggggaatcgatggtgtaactcctggttcaaagctgagagctggtgggatggggagttggtggggaaggcactggagtaaatcctgaagtctgtaggcctgcgaactaggagctccaatttctgagagcaggagaagatgggtatcccagctcaagaagagagagagaatttaccctttctcctgctttttgttctatttgggcctttaatagattagaagatgctcacccatactgggggaaatgaatcttctttactcagcatattgatttaaattataatcttttgctacaacatcctaatagacacacctgaaaataatgttttatcagttaaatgggcatcccttagcacaatcaagttgacatataaaattaaccattacagagatcaatcttggataggcttctcctctgggtcctctctagctgccttgtaaaatgctaagcttccaactgtatgattttt

SEQ ID NO: 357419 - DNA, 567 bp, Homo sapiens
  misc_feature (1)...(567): n = A,T,C or G
aatcctagaagattttttaaatgtaaattgacattttgattctaaaatatatgtggacatgcaaaggactttaatagtcaaaacaattttgaaaaaggacaaatttggagaattttcattatctattaaagaaatactttaggccaggcatggtggctcatgcctgtaatcccagcactttgggaggccgaggtgggaagatcacgaggtcaagagattgagaccatcctggccaacatggtgaaaccccatctytactaaaaatacaaaaattagttaggcgtggtggcatgcgcctgtagtctcagctactcgggaggctgaggcaggagaatcgcttgaactcgggaggcggaggttgcagtgagccgagatcatgccactgcactcaagcctggcatcagactccgtctcaaaaaaaaaaaanagagagaaatatttaaaactatagtaattaagacaatgtagtattgatgtaaacacagaaaaaaatagatgaatggaacagaatatagagtccagaaagagatatacatatatgatcaatcgatttttgacaaatcaaca

SEQ ID NO: 357420 - DNA, 629 bp, Homo sapiens
  misc_feature (1)...(629): n = A,T,C or G
aatcctagaagattttttaaatgtaaattgacattttgattctaaaatatatgtggacatgcaaaggactttaatagtcaaaacaattttgaaaaaggacaaatttggagaattttcattatctattaaagaaatactttaggccaggcatggtggctcatgcctgtaatcccagcactttgggaggccgaggtgggaagatcacgaggtcaagagattgagaccatcctggccaacatggtgaaaccccatctctactaaaaatacaaaaattagttaggcgtggtggcatgcgcctgtagtctcagctactcgggaggctgaggcaggagaatcgcttgaactcgggaggcggaggttgcagtgagccgagatcrtgccactgcactcaagcctggcatcagactccgtctcaaaaaaaaaaaanagagagaaatatttaaaactatagtaattaagacaatgtagtattgatgtaaacacagaaaaaaatagatgaatggaacagaatatagagtccagaaagagatatacatatatgatcaatcgatttttgacaaatcaacaactcaaatcagtagaggaaacgaaaacctttccccatatggtgctgaaacacctgaataaat

SEQ ID NO: 357421 - DNA, 549 bp, Homo sapiens
tgcagcataatcaaaatgtaatggcttaaaacagtacacatttactctctaacagtttttgtgtgacaggaatctggktatggcttgactgggtcctccagcttagggttctcaaaagactgcaatcagggtgttagttagggccacagtcaatgcaaggtttgaccgggatgggatctgtttccaagctcagccagaggttactggcaggattcagctccctgtgggtcattggatggagggccctggttcctcactggcttttgtttggagggtgccctcagtttcttgccaattgggcacctccatagggtagatcataacacggcagctggctccatcaaagttaatgacaggagagggagagaccaagatggaagtcagtccagtcttttagaacttaattggattgggaggcgagtatggtaacagggtgtgagtatcaggaggcaatcagtgggagacatttcagaagctgcctactgtattaggcttcttgtctgctactccattgtttataccctaggttctggccaaagttttgtgctg

SEQ ID NO: 357422 - DNA, 593 bp, Homo sapiens
ccctcatctctccaataaagggtacatctgctcacrgaagccttttgaaatttgattctaatgtcccacggaggaagaggcctcactagtaaccaggacaaacaaaaaagtgtggttcaggatctgtgatcagcaattgtcttatgtactggcatgagctataaagagtttgacaaaactcagttctgagatgcacaaccatcaaatttggtaaaatatacaagagaaaagttccaggctttaagaaagaacttttttaaaagctggattcacttctgaatctttaaaataatcccccttaatcaaatctcattttcaccaaataactactaccaacattagtggtaagtttcaactacacttagtccagtggtttttcaaaaaccaatgtgccaaacccaagagttccaatgactgagaagccagagacggctagtgatgactgcctcaggaggagaagaaatgttcgtaggaaaattcatagcaaagggacagaggaaaagaacaagggggcgagaaggtagcctagagatgaacggtctatgaaagaaatgggaggaagcctgagaagaaatatggtggaaaagtgtata

SEQ ID NO: 357423 - DNA, 593 bp, Homo sapiens
ccctcatctctccaataaagggtacatctgctcacagaagccttttgaaatttgattctaatgtcccacggaggaagaggcctcactagtaaccaggacaaacaaaaaagtgtggttcaggatctgtgatcagcaattgtcttatgtactggcatgagctataaagagtttgacaaaactcagttctgagatgcacaaccatcaaatttggtaaaatatacaagagaaaagttccaggctttaagaaagaacttttttaaaagctggattcacttctgaatctttaaaataatcccccttaatcaaatctcattttcaccaaataactactaccaacattagtggtaagtttcaactacacttagtccagtggtttttcaaaaaccaatgtgccaaacccaagagttccaatgactgagaagccagagacggctagtgatgactgcctcaggaggagaagaaatgttcgtaggaaaattcatagcaaagggacagaggaaaagaacaagggggcgagaaggtagcctagagatgaayggtctatgaaagaaatgggaggaagcctgagaagaaatatggtggaaaagtgtata

SEQ ID NO: 357424 - DNA, 559 bp, Homo sapiens
agccaaaccattggctatagcccatgaatcagtatataatttcacatctagccatttctccttccatgtgaagtgcacaagcaggtgcactgctcgaagttctgcccactgggaagattttccttcactgtcgttcttcacggatgtcctagaaaggggctatagtgctgcaggtccactttcgggtggtgcctgcatattgtgcagaaccatctgtgaaccaggtcctagtcytctcttcgtctgtcaactgatcatagagaactccccatgaggccatcagtgcaggctgggggagaaaaggcagggtggcaggagtggagatcatggacatttgagccacttcctcatgtaacttacttgtgccttcaggaactgcttgagccttatcacgtgtataccacttccatttcatgatggaatgctgctgtgtgtgacccactttatggctagatgggtcagaaagcacccagttcatgataggcagttcaggtcacatggtgacctgatgacccatagtcaaacgttcagtttcggccaaagcccattaattacctga

SEQ ID NO: 357425 - DNA, 648 bp, Homo sapiens
ggaagacagaatttgcaggaccaagtcttggaagaaaaagaaaacctagatatgtgagcctggtatttggactctctttccccttagaggaacccgacaaagtggctggtggctgaggagctccacgaggtgtcctgtgagctgtagggacaaaaaaaagtggaggaaaaaaaagacaaagctagaaaaggctagaaaaggttccctggtagacacttcaggcattcagcggggatcctgaagggcatcatctcaggaataaatgtgaatgagaacagacttcacaagaactgaggcctagctttggattattttaatcccagattgcattaagatgacctacttctggccaaacttgctgccagaagcaaatgttaatcctctgtggargaagagaacattttccaaagcctcaaattgctcttataatttttcacatacaaatgtttagaggtgagttaagaaataattcggcctacaaaaataatatataattgacccctaactggaaagagccatgggagatataaatattggaatttttaaatgtgtattttaatgagcattttagttctcataaaactaaacaaattaaattaagaagttaatgtttaagaaattaaataacaaaatggaaaagtttggcag

SEQ ID NO: 357426 - DNA, 648 bp, Homo sapiens
ggaagacagaatttgcaggaccaagtcttggaagaaaaagaaaacctagatatgtgagcctggtatttggactctctttccccttagaggaacccgacaaagtggctggtggctgaggagctccacgaggtgtcctgtgagctgtagggacaaaaaaaagtggaggaaaaaaaagacaaagctagaaaaggctagaaaaggttccctggtagacacttcaggcattcagcggggatcctgaagggcatcatctcaggaataaatgtgaatgagaacagacttcacaagaactgaggcctagctttggattattttaatcccagattgcattaagatgacctacttctggccaaacttgctgccagaagcaaatgttaatcctctgtggaggaagagaacattttccaaagcctcaaattgctcttataatttttcacatacaaatgtttagaggtgagttaagaaataattcggcctacaaaaataatatataattgacccctaactggaaagagccatgggagatataaatattggaatttttraatgtgtattttaatgagcattttagttctcataaaactaaacaaattaaattaagaagttaatgtttaagaaattaaataacaaaatggaaaagtttggcag

SEQ ID NO: 357427 - DNA, 529 bp, Homo sapiens
gtgactcaaattcacatgaagaaataaagaccaccaataaggtaattacatactaaaaagtatatttttctttcaactgatttaaaagcatacataatacattttcttgaaaagatcacatgctaggcaataaacaagttttaataacttaaaaaggctgagggactggcgtggtggctcatgcctgtaatcccagcactttgggaggctgaggtgggtggatcatgaggtcaggagatcaagaccatcctggctaacaccgtgaaacccccatctctactaaamatacaaaaaactagccaggcatggtggcgggcccctatagtcccagctactcaggaggctgaggcaggagaatggcatgaacctgggaggcggagcttgcagtgagctgagatcacaccagtgcactccagcctcagcaacagagtgaggctgtgtcttaaattaaaacaaaaggctggagtcagaccaagtatgttctctaactacaacagaattaaattagaaggaaaaactgaaagaaatt

SEQ ID NO: 357428 - DNA, 529 bp, Homo sapiens
gtgactcaaattcacatgaagaaataaagaccaccaataaggtaattacatactaaaaagtatatttttctttcaactgatttaaaagcatacataatacattttcttgaaaagatcacatgctaggcaataaacaagttttaataacttaaaaaggctgagggactggcgtggtggctcatgcctgtaatcccagcactttgggaggctgaggtgggtggatcatgaggtcaggagatcaagaccatcctggctaacaccgtgaaacccccatctctactaaacatacaaaaaactagccaggcatggtggcgggcccctatagtcccagctactcaggaggctgaggcaggagaatggcatgaacctgggaggcggagcttgcagtgagctgagatcacaccagtgcactccagcctcrgcaacagagtgaggctgtgtcttaaattaaaacaaaaggctggagtcagaccaagtatgttctctaactacaacagaattaaattagaaggaaaaactgaaagaaatt

SEQ ID NO: 357429 - DNA, 529 bp, Homo sapiens
gtgactcaaattcacatgaagaaataaagaccaccaataaggtaattacatactaaaaagtatatttttctttcaactgatttaaaagcatacataatacattttcttgaaaagatcacatgctaggcaataaacaagttttaataacttaaaaaggctgagggactggcgtggtggctcatgcctgtaatcccagcactttgggaggctgaggtgggtggatcatgaggtcaggagatcaagaccatcctggctaacaccgtgaaacccccatctctactaaacatacaaaaaactagccaggcatggtggcgggcccctatagtcccagctactcaggaggctgaggcaggagaatggcatgaacctgggaggcggagcttgcagtgagctgagatcacaccagtgcactccagcctcagcaacagagtgaggctstgtcttaaattaaaacaaaaggctggagtcagaccaagtatgttctctaactacaacagaattaaattagaaggaaaaactgaaagaaatt

SEQ ID NO: 357430 - DNA, 610 bp, Homo sapiens
tttgtagtatgcaaattatacctcaataaatcttctgttttggccattctgcagacgtaaaacagcaccatccaaacttgaggtttcaatattgagacagatgatgccacggacacaccaagagggtatgaaaaagtttataatgcacacaatgagactttctggggatggcagaacagrctttccaaattggtctggtaatgacttgaatagcgagaaaggggagaccagcttggggtttttattgcggttaggtggcaggactcgggtgagggttctccttatgggcaggacttgcatgatttgaaactcccacaattaccaaagaaggggatatctggaatttattataggcttctccaaatgtgagctgaaggggatgaaagataggtgtgacttcaaagccgtcagcagtcaaatgtcaaaattggagtcaagttctttattaaaactgtttaaaaaattattttctactagaaggtcttgacttattcctgaagttattttacatattccccatgcacaccacagtaaacttttcctatggcccttgccaatctttgttgtccattcattattcccctcagtagacgatgagctgctgtgatct

SEQ ID NO: 357431 - DNA, 494 bp, Homo sapiens
gcattttccaggaatacccctgagggtaagcaccacaaaatggcatggattccccatcctgccagtagtactactagctctgtagcataaatgagggtcaggtgataggagccaagaggattttgacaaaagcagcatttctcacagctgcagaagggctgccacaaaagaaaatttaggaattcaaaactttctctgactcttattgcaaatttagatggctactgttgtataacaatagaaatgtaaatcgagacctaaaaatgtttcttgggtggaaaaatgtttactacacgatatttagtgaaataagaaaaatgcaaaactaaatggtatgaactmacatttggaaaagaacagaaatgaagctaaaacaaaacatcagagagagagagagagtttagaaagagaatggaggtaattagacaaaaatgttaataatagatggtaagatgatctatggttattaaatttttaatacatttttgtgtttt

SEQ ID NO: 357432 - DNA, 542 bp, Homo sapiens
aaaccacctaaaatagtacattggggaatggaaagaaagcattagagtctacggccataccaccctgaatgcccccgatcttctctgatctcagaagctaagcagggttgggcctggttagtacttggtatgggagaaagcattagacatcaatcttgtaagaatttaaagttcaatagattattatagtatatatttttttgaattgacaataataygtgaacatgtgtatgtacatctaaaaacatttttagaggtgggagatgaatgcttgtaaaacactgtactgtagtgaaagaattggcagaaagctgaaaaggcctttttgctcattagttgtgttatggttgatctagaatcaacctgtgtttggatatatccttgtatatgagtaaaaaggccactaagtgaccaactgcttggctccagttaagataggctctataatgccagctctaatgttcttgtccagcacactcacgctggaggccctgaggtcctagtggctgctcagcatccactcctgccacctacactcatga

SEQ ID NO: 357433 - DNA, 542 bp, Homo sapiens
aaaccacctaaaatagtacattggggaatggaaagaaagcattagagtctacggccataccaccctgaatgcccccgatcttctctgatctcagaagctaagcagggttgggcctggttagtacttggtatgggagaaagcattagacatcaatcttgtaagaatttaaagttcaatagattattatagtatatatttttttgaattgacaataatacgtgaacatgtgtaygtacatctaaaaacatttttagaggtgggagatgaatgcttgtaaaacactgtactgtagtgaaagaattggcagaaagctgaaaaggcctttttgctcattagttgtgttatggttgatctagaatcaacctgtgtttggatatatccttgtatatgagtaaaaaggccactaagtgaccaactgcttggctccagttaagataggctctataatgccagctctaatgttcttgtccagcacactcacgctggaggccctgaggtcctagtggctgctcagcatccactcctgccacctacactcatga

SEQ ID NO: 357434 - DNA, 557 bp, Homo sapiens
cctgtctcagttgggttttatacctccctccaatggtgagaggagaatttctgtctcaaattgaaggacttaataccatcaaaccagtagtggtggggagcagaggggattatcttctttggcaaagatccatatctatggatgctgagaaggttggccctgatgggatttgtaaggctctttcccccttcaaccccagcatggcaggagtctgtggcttagcagtgcgctacaaggttcccactcatatgtggccctagattaccaactaaggatgccagtcctctttatattaatcattcatttgaatagcaacattttgctatgtatctaccaagtgcaatgctcttttcataggcaaatttcagatcaaatagtagaaatctttattaagtattaaaaaagcaaacaagccactgatattgatgtaaatccaaggcacttgctgtgttagatagaggatatcatggggggctaaaggtaaagtraaatgtaggtaagttaaaattcaaaaatacaactatggccttttgttatctatacatacagactcaatt

SEQ ID NO: 357435 - DNA, 527 bp, Homo sapiens
cctacatctttctcccatatttcttccaataaagttaaaactttatatatatatatatatatataatatataatatataatatgtaatatatactatatataatataaatatatattatatatatacctcctattagttctgtccttctaagagaaccctgactagtacagattttggtaccaggagtggttctagaggaacagaatattaaggatggagttctttcattggttttggggtttctggaktttgctgtttaatatgattggaccccaaaatgctaagggctctacttctaatagtatggagaccactgatagtccttggtgtaaactagagagttatatagaataaatgcatttgacattcctgattcactgctcgtgagaggcaaggagtttagtggctctatagataatacctttgaccatacgtggagaaccaaggaatatagtgaggctggttggttactcctaagttcagtggacaaaatgatgagagaaattggtgaactcagggattctgt

SEQ ID NO: 357436 - DNA, 627 bp, Homo sapiens
agactaattgactactgtaccccaaatgtgttgaacaggatcccacatctgatactcaatatatgtttgtggaattaattaaatacctgtgaaaacaagctgaaccatatggagctggcagcagtatactgacatgctactttctgatgtcatttgttctcacctaattctgcctgaagaaaaccttttcagggaggcaatcttcagtccaagtttcttccacttctttcttctgttctctgtgtagtcagcccaaaggatatttgagttcaatttgcagagaaatgccatagatagaaatgataatgtcycttcaacttaaaagggccgagcatgttttgaaagtgttttatgaactggaaacctttctatgagatattccactgtagccccataaaaccttacaccctgctggaatttcatcctgttaaatttggcagtgtttccttcctcaagtaatgagttcaattcatgttttcatttaagttcatacccagatacaaatcagtgtcactgccacaggcaacgattcgcagaattcccaggcgccaaggctgagggatggcgggttcagaagaatgaatgccaaattctctttttcactgagggcagtgtagcatttactgt

SEQ ID NO: 357437 - DNA, 627 bp, Homo sapiens
agactaattgactactgtaccccaaatgtgttgaacaggatcccacatctgatactcaatatatgtttgtggaattaattaaatacctgtgaaaacaagctgaaccatatggagctggcagcagtatactgacatgctactttctgatgtcatttgttctcacctaattctgcctgaagaaaaccttttcagggaggcaatcttcagtccaagtttcttccacttctttcttctgttctctgtgtagtcagcccaaaggatatttgagttcaatttgcagagaaatgccatagatagaaatgataatgtcccttcaacttaaaagggccgagcatgttttgaaagtgttttatgaactggaaacctttctatgagatattccactgtagccccataaaaccttacaccctgctggaatttcatcctgttaaatttggcagtgtttccttcctcaagtaatgagttcaattcatgttttcatttaagttcatacccagatacaaatcagtgtcactgccacaggcaacgattcgcagaattcccaggcgccarggctgagggatggcgggttcagaagaatgaatgccaaattctctttttcactgagggcagtgtagcatttactgt

SEQ ID NO: 357438 - DNA, 602 bp, Homo sapiens
aatgtgattatggagctgctaataaaaggaaagttctttaaagtgctacacactcttgtattcaatgtcactcccatcatcgggcttagaaaaccagtcccttttcatgtgaatgtggtaaattgaatttaaatttgtatatgtatggaattccccaggtgggaactgagctgggactggtcaatgccctcctttctgggactgtaaaggatttgtcttgtatttaaaattggagaccaggatatatatatatatatatatatatrtgtgtgtgtgtgtgtgtgtgtgtgtgtgtgtgtgtgtgtgtgtgtgtgtgttttgaatatgatgaaaaaagaaatcctcaagaatttcctaacctttaggaagtctggaaaagaaagaaggatagaggtgatggaactgctttcttttttgttttatcttggatttatcaggacttggcattccactatgtccctgtgaaagcatgtcaaaaaaaaaaaaaaaaaacagaacaaatataagttgttaagacagtatgcatgttctagaggagagatggagcgcatcctgccacacaatttctgggaacctagtttatccccctgaagcagcagtgt

SEQ ID NO: 357439 - DNA, 602 bp, Homo sapiens
aatgtgattatggagctgctaataaaaggaaagttctttaaagtgctacacactcttgtattcaatgtcactcccatcatcgggcttagaaaaccagtcccttttcatgtgaatgtggtaaattgaatttaaatttgtatatgtatggaattccccaggtgggaactgagctgggactggtcaatgccctcctttctgggactgtaaaggatttgtcttgtatttaaaattggagaccaggatatatatatatatatatatatatgtgtgtgtgtgtgtgtgtgtgtgtgtgtgtgtgtgtgtgtgtgtgtgtgtgttttgaatatgatgaaaaaagaaatcctcaagaatttcctaacctttaggaagtctggaaaagaaagaaggatagaggtgatggaactgctttcttttttgttttatcttggmtttatcaggacttggcattccactatgtccctgtgaaagcatgtcaaaaaaaaaaaaaaaaaacagaacaaatataagttgttaagacagtatgcatgttctagaggagagatggagcgcatcctgccacacaatttctgggaacctagtttatccccctgaagcagcagtgt

SEQ ID NO: 357440 - DNA, 399 bp, Homo sapiens
aggctccagtagttcctgtccagataagcagatctcagctgagatttctgggttgtggtttgccctgctacctcatgggtacaagaaaagtcattgatttgtcagttggttcaactttatctwgttgagaaaatgagagtaatgacttccaagctctttatctgccagagctaaaactggaagtctgagcttatttgttaataatgtaaaattgctgtaccttaatatcttctgattagttggcaagaataattagcagaggtcagataagaaggaaatttttaacagaattttaagagaaaacattgcataattactagatgaacttgaaaataatttccacaatttaatcagtatgatcaacaatgtacttcttctatttatatttatatgttaatg

SEQ ID NO: 357441 - DNA, 620 bp, Homo sapiens
tatctagttgagaaaatgagagtaatgacttccaagctctttatctgccagagctaaaactggaagtctgagcttatttgttaataatgtaaaattgctgtaccttaatatcttctgattagttggcaagaataattagcagaggtcagataagaaggaaatttttaacagaattttaagagaaaacattgcataattactagatgaacttgaaaataatttccacaatttaatcagtatgatcaacaatgtacttcttctatttatatttatatgttaatgttgagtggcttttccatttatctggccataaaatcaagtatcaaaakaaactgaatttagaaccagaatttcatattgctaaatcacaggtattaaataaaattcttcaaaaaaatagagcatattgagtcatactttttgtactaaaaatgtcatgaatactactttttgtgtgtgaaaaaacttttatttcattgataaagaatatgtaacaaaaaataatggttattttatgtttatctcaccctttaaaattcccattttgatagtatgttttataacatattcaacatattaataatgttaattaataatattaatgtatgtacaatttataa

SEQ ID NO: 357442 - DNA, 499 bp, Homo sapiens
tggtagtttgagacgagcctgggcaacatagtgagatcccacctctaaaattttaaaaattagctgagcgcagtggcatacatctgcagtcccagctacttgggagcgtgaggtgggaggattgcttgagcctaggaggtcaagactgcagtgaaccgggttcytgtagctgcactccaacctgggcaacagagtgaaaccctgtctcaaaacaaaaacaaaaaacagagaaagtatatgaaaaggatttttcaataactgttgagtgctaagcagcagctattgatgctttaatttttctgagttttcatcctgtgactccttattgctgcaaaggggaataatagttttttttttcttcagctaaatagctcacaaactgggaatggattaaaaactataataatttttttctacaaaaaaacactgtggaattactctgaatatgtgacaaaaaaagggagtctcacttttctctgagaaacaacagtatcacaca

SEQ ID NO: 357443 - DNA, 466 bp, Homo sapiens
gtagtagaaccattttttttttccctgtagcccagcatctcattagatttgcttcaattaatatgctggctctttcttttttcttttttcttcctaatatttctgcctttttaatcctctaaaccgctaaacctaacaaatcaaaaagcccttggggttctgaaatgcagggtttcaattttttttttttttctcctttttcctttgactggcagggcaagctggaacgtgtcttaatgttattttaagggcttgatactatttagacgctgaaatggayggatggagggatacaagggggagtgtacatactcccaaccacccacatacatgtactcatggtgggaggggcccacactcacgggaggtaggcccttccaggacagggaatctctaagccaggtcctggctagacttgctggagccagcctttagccagacttgagtgacacctgcaagctgctgt

SEQ ID NO: 357444 - DNA, 491 bp, Homo sapiens
ctaacctctaatcttgtgaaaatcagaccctatcagtacccctcaaagctcaaatccgtcagcacagagccatacaattaatacccctacttataggtttaggaatggctactgctacaggaacyggaatagtcagtttatctacttcattatcctactaccacacacactcaaaggatttctcagacagtttgcaagaaataatgaaatctatccttactctacaatcccaaatagactctttggcagcagtaccgctgggacctagacctcctcactgatgagaaaggagtactctgcaccttcttaggggaagagtgttggttttacactaaccagtcaggtatagtatgagatgccacctggcgtttataggacaaggcttctgaaatcagacaacgcctttcaaactcataccaacctctggagttgggcaacaaggtttctcccctttctaggtccaatggcagccatcttgctggtactcacct

SEQ ID NO: 357445 - DNA, 648 bp, Homo sapiens
ggttattgtgactctcctgattttctggaaatctggcccatttcagagttcagttaagtggcaactagcactaagaattctattctggtttggtctggtgtgctggggcctcatacaggagcttaatccaaaataatggcctctcttgaatttatttgaaatgtattttggctttaaaaggttttattatatattgttgaccattgcttttccagtttttaaaaaatcattttataragaaagaattataaactgaatatttaaattttgcccagtatcattcttgtattcattttctgccacagtaattctactctgaactgcttctaacaagaattttaagcctagcatagttttggttcgagtacatttatttctcctctgtttgacatttctcatcttatatttcactgttcatctcatgtaatcctaatttatcatattttgcttaaaacatgaaaaatttattctaaaaacttctattttgcagagcaaaacctccgtaggtagactccctgcttaattattagaactatagttttctttgttttagaattgatatacaggccctatgcttgctgtcatttttattttcattctgctttaaacaaaagtagcttcattcagatcaacagaatgccaacaagc

SEQ ID NO: 357446 - DNA, 614 bp, Homo sapiens
tagaatcaacctaagtgcccatcaactgatgagtggataaagacaatttcacaccacaagatactactcagccataaaaaaagaagaaaataatgtcttttggagcatcttggaaggaacttgaggccattatcctaataagtaaccaaataccacatgttctcacttacaggtggaagctaagctatggttacataggaacrtatagaccggtataatgaacattggagactcaaaagagagagtgggagggtggtgagtaatgaaaaattacctattgggtacaatatacactatttaggtaagaagtacactaaaaacccagacttcatcatgtaaccaaaacccacttgtacccctaaatctattgaaatttttttaaaaaatgaagatacctgagctgacatcctggttgtgtgactggtaacagtgtgatagatgaactcccaaataactagagaaaatgatttttcattcaaaatgccctttcttcccgccagtttggcactatacctatatgtaaggttgcccctgtcgagagctataaagacagtgaaatggtgtgagtgaccaaaaaccaaaaatgttatttttatctcttagtttcaaggtaa

SEQ ID NO: 357447 - DNA, 557 bp, Homo sapiens
aattttgcgcatgttcataattgagggttagctgtatagtcaccagctaaatgaagacgttagaacagactctctgagctacaccatctaatttaattctagggatgctccaagaaaggtcgctgtgtaaagagataaaccaaggtctccacattctccttttttcttcactctcctctaataaaagagtagctattccttataaatttttttaaagcaaattggaatgttctgcctctactaataagcacccagaatgataaaatacagacattactcacataatatgagcactgctgaaactacaaacacatcattttctattgcaagcagagcaagaaatagctatttttgtggatctgcagagtgatttgattgtgtacaaaagaagcaagtgaaaatcacaccagagtgaaaattgtattacacacatgaggaagataacttaccagtctgtgcacaactaatggttagatatggaatgaagttcgtttgagcccttaactggaaaaatatactctataacktttcactggaaatgtatttttaaggaataa

SEQ ID NO: 357448 - DNA, 622 bp, Homo sapiens
gtcgtatgtttttcattttcttgggtaaatacctaggagtgcaattaccgggttaagggtaagtacgtgtctaactttataagaaactgccaaactttttttcagcatgattggcccactcccgtgagcaatgtactacagttccatgtgttccacatccttgcaaaaatttggtattamcgggcttcttctcttttagccagtctaatcagtgttccatagtgcctcatgatagatttaatagtctttttccttgtgattaatgatgttgagtacatattatgtttgttggcctcttttgagaggtgtatattcaagtcttttgactattttatagtgggttgtttgctttttattgttttgtaggagttacttatatactttgggttagattattttatgagacatatgagctacaagtatgtctgaggctcgcatgtccatgtttaatgaaatatgtgacaagaagaatattttaatttggataaattctagtttatcaatttgttttcctttcatcttgtctgagaaatatttgcctatctctaagtcacaaaagtagtctcatatgttttctgctaatagctagattactaaaaattagttttctgtatatgtgtga

SEQ ID NO: 357449 - DNA, 622 bp, Homo sapiens
gtcgtatgtttttcattttcttgggtaaatacctaggagtgcaattaccgggttaagggtaagtacgtgtctaactttataagaaactgccaaactttttttcagcatgattggcccactcccgtgagcaatgtactacagttccatgtgttccacatccttgcaaaaatttggtattaacgggcttcttctcttttagccagtctaatcagtgttccatagtgcctcatgatagatttaatagtstttttccttgtgattaatgatgttgagtacatattatgtttgttggcctcttttgagaggtgtatattcaagtcttttgactattttatagtgggttgtttgctttttattgttttgtaggagttacttatatactttgggttagattattttatgagacatatgagctacaagtatgtctgaggctcgcatgtccatgtttaatgaaatatgtgacaagaagaatattttaatttggataaattctagtttatcaatttgttttcctttcatcttgtctgagaaatatttgcctatctctaagtcacaaaagtagtctcatatgttttctgctaatagctagattactaaaaattagttttctgtatatgtgtga

SEQ ID NO: 357450 - DNA, 601 bp, Homo sapiens
aaggcataagttagttgcaaggatagatagcacagactctcacttcaatcactactattgctcctccccctactcacacctatgtctgtatgggagtcctcataggatgaggtgtaagaaaagggaaaagcctcagtttgttttatgaatggatcagcctggtatatttgtgtaagctggaaatagatggtggctgcataatagcagcttccagatgtggccgtccaagcagtggaaagggaagctctttccagctaacagagctgcaagtggtgaacctgcccattcattttgtaaagaagtggcccaaagcaaaaaacacatacagacttcagggcrgtgatcaatagcctggccatttggtcaggaccctggcagaaaaagtctgcaagattagagaccaggaggtccagggtaggggcatgtgaatgggtacatgggagtgggcataaagtgtgaagatgatttgttgcatgttactttccaccagaaagcacccaccacaaaagaggcactgaggaaccaagtaggcaaaatgactcagttcacactagccagcctctggtagtggaaactttggaagcagcacaacgggcacgtg

SEQ ID NO: 357451 - DNA, 444 bp, Homo sapiens
ctgcattaccatttgaagctcaccctctacctcctgatccctccactctttaaccttcacagacatttctttcaaaaatcttttcagattctgcytttgcatccttttcccaaaggacccaaagagacataagaagtatgtaaaaaaggagtcagagactagcttgtgagaaagagctgtactcttgtatttcaataagggctataggcttatatttcaagaagaaccaaggaaccaattcacagtttctgttttgagatttctgaaacctttatcactgtctcagtgcttgtttcttgtttgctgctgcttggttttgttgtatttacttacagtaaaaattccccaaaatagaaaggagtagcagtgccagttttaaagagagaagaagttagaaactgtgttctgtttttctgctaccctgggcagacaagaatccagcag

SEQ ID NO: 357452 - DNA, 508 bp, Homo sapiens
atagaaacaacacaattattatcagtcacaggcaacataatcttatatgtaggaaaccctaaagattacaaacagacacacagaacagctagaactaaaaaatgaattcagcaatttcaaaatccaaaattaacactcawaagtcaatggcatttccgtaacaatatacagtccaaaaaggaaattaagaaaacaattttgcttacaataacatcaaaaataatactttggaataaacttaaccaaatagatgaaagacttgtagagtgaaaattacaaaatggtgccaaaggaaattaaagaaacaagtaagtagaaagatattccatgttcataaatttgaaacattagtatttttaagatatcaataatacccaaggcaataaagaaaatgtggtacatatacatggtagaatactgtgcagtcataaaaaagaatgaaatcacattctttgcagcaacatgggtggagctggaggccattatcctaagcaaattaacacagaaa

SEQ ID NO: 357453 - DNA, 514 bp, Homo sapiens
atgatgttaactactttttctaggggaaataactttggggtgaaaaggggcaaaggaagtcatcatcattaactaaaggtagtacagcttcaagacatgatgggactaataatttgggctggaagcagaaaccraattagtaaaattcactgagctgtgtgagtctggctctttagaggcaaacctgttttcatagggctgtggaccccaaggaatagattcagcagatggatcattgtagcaagagttgtaacaaaatggcagtcgttggagttaagtgggagagcagttggtctagtttggagcagaagtccagatatataggaaatgtcatgggggctggaaaacccaagtgcatgtcatggatgcaacctaatctactcagcttcagaaaatggaaaggagctcctgggctgtcgagggaagtgacatggctatccagttgtgtgcactgaacaaacactgattaggagaaatgtgtgtctagttgacatgaaaatgtccaagacttact

SEQ ID NO: 357454 - DNA, 537 bp, Homo sapiens
tgaacaattcactttgtgttcttgggttctgctttctcgggctgttctctgtctataaagctgacctctttggctcagctccgtgaaacactgattctattttgtggaatgaagtgttttctgattctagaatagcaaataaagccaactgagatctttaaactaaatttgttgcgattttgtcttttgacactactcactcataatttagattcttctaaaagatagccagctgttcttttcataattagtaagatatgggaaataaatcaaaagtcttgataattgtagcaagcagatttgtcctttaggagacscttaccaaaaacgggagttggggtacactgaaataactctataaatagctgccagttttatcgagcttatcatatgtgcttggcattgcatttagtctcttacagactgtgtttaatcttcatagcaactccaggaaattattggcatactcataaggaaaccaatgaaactaacttggagagcttaaataatgtattcaaagttacatagcaagaaagt

SEQ ID NO: 357455 - DNA, 537 bp, Homo sapiens
tgaacaattcactttgtgttcttgggttctgctttctcgggctgttctctgtctataaagctgacctctttggctcagctccgtgaaacactgattctattttgtggaatgaagtgttttctgattctagaatagcaaataaagccaactgagatctttaaactaaatttgttgcgattttgtcttttgacactactcactcataatttagattcttctaaaagatagccagctgttcttttcataattagtaagatatgggaaataaatcaaaagtcttgataattgtagcaagcagatttgtcctttaggagacccttaccaaaaacgggagttggggtacactgaaataactctataaatagctgccagttttatcgagcttatcatatgtgcttggcattgcatttrgtctcttacagactgtgtttaatcttcatagcaactccaggaaattattggcatactcataaggaaaccaatgaaactaacttggagagcttaaataatgtattcaaagttacatagcaagaaagt

SEQ ID NO: 357456 - DNA, 529 bp, Homo sapiens
gagcaaaacttgcttttatttataaactagaaatattctgtctctgtatgcctaactttatcaattttgagtttgcagatgcccaatatctgggacctaggaaacaaaatgggctgagcaaaattctaagcttcaattttaaaagctaagatttgcttaaaaagaatttctgcaatgcttcaaaacaataatagtgtgtccttcgtcaccaaatgctgtacagaatgttaaattttacctggcttctgccaagcgttcttagaacaagcatttattatagattagttttattttacattaatgggtgtctaggagagggaggtaatagcacttgaggcaattttgttttactatgaaaattatttaagcctttagaagacgaaattcagggaaatgtactgtcttctcaaaaaatatgtgtttataaccccaaatacaggaaaagctttttraggaaagtcattttgctttgcaaaacagattttcaaactattaagcaagataaaaggtcacattgaccgtttgtttt

SEQ ID NO: 357457 - DNA, 549 bp, Homo sapiens
ccattaaaaaatggacaaaggacttagagatttctccaaagaagaaatacaagtggtcartaagcacataaaaaatgctcaacatcactaatcattagggaaatgccaattaaaaccatctttcacccattagaatggctaccataaaaaagataaaataataagtgttggcaaggatatggagaaattggaacgcttgtacactgttggtgggaatgtaaaacagtgtagctgccatgaaaaacagtacagcagttcctcaaaaaattgaaaatagaattaccacatgatacaccaattctacttcaggtacatactgaaaagaattgaaaggaagaatttgaagagatatttgtacactcatgttcatagcagcattattcacaatagctaaaaagtgaaaacatcccaagtgttggatgaatagataagcaaaatgcagtatatacatacaatggaaaattattcagtggtaaaacagaagaaaattcttacacatgctacaacatggatgacacttacagaaaatattatgctgtgaaatgagcc

SEQ ID NO: 357458 - DNA, 593 bp, Homo sapiens
aactaagacaacatctatcggcctacaaatctcagattctttttgtgattctgtggaaatggagagagggaaagtaaatttacatggagataagtaggcttcagtgaggaataagataaagcccatgaccctttctctttagatgattaaaattattaggaactctgaggttttaggataatgtcagtcaaagttctcttgtaggaaaggaccttaaaaacccaagaaaacaaggaaagtaagaacctgtactagtgatccttgttccacacagaatatatagatcgtgatraggaaggcctttaagacgacttcagacccagccaccccataaatgttagctcgtgagtaaaaaccataatcacttgtaccttggagatctgtgtggcgatcagaaccagagaggcaaccggtctttacgtgcaacactgtgtcacagcaatagaagccacagcagttgaaaaccaagtctagttggtgggcaacatggcctggcatttgtcaagagcaaccatgcaaataaggccaagtaagcttctcaggatcttggaccatttaggatgatggagttcataaaagcttggtgctggatt

SEQ ID NO: 357459 - DNA, 593 bp, Homo sapiens
aactaagacaacatctatcggcctacaaatctcagattctttttgtgattctgtggaaatggagagagggaaagtaaatttacatggagataagtaggcttcagtgaggaataagataaagcccatgaccctttctctttagatgattaaaattattaggaactctgaggttttaggataatgtcagtcaaagttctcttgtaggaaaggaccttaaaaacccaagaaaacaaggaaagtaagaacctgtactagtgatccttgttccacacagaatatatagatcgtgataaggaaggcctttaagacgacttcagacccagccaccccataaatgttagctcgtgagtaaaaaccataatcacttgtaccttggagatctgtgtggcgatcagaaccagagaggcaaccggtctttasgtgcaacactgtgtcacagcaatagaagccacagcagttgaaaaccaagtctagttggtgggcaacatggcctggcatttgtcaagagcaaccatgcaaataaggccaagtaagcttctcaggatcttggaccatttaggatgatggagttcataaaagcttggtgctggatt

SEQ ID NO: 357460 - DNA, 582 bp, Homo sapiens
tagtaaggacagcctcaaattttaattggaacaaattatttaacaaatatagaagacttactgtgttagatgcagaaaggtgcagaatctatttatgatagagccctgctgttttaaaagcttacagttgtatgtagataagaagtcttccttgacatatacatatcccatatccccaataggtgaagttgcttttatatgctctcatagctgccctgcaccttttgtttataagccacaatttgtgtgattacttgattaaagtttatcttccactaggcttcagttgtgtgatgggatcatatttgttttacacatcagtgcatttttgtatytagcacaattcctggcatgtggctgcagtgcaataaaaacatttgttgaaaaaaacgaagcccaggcatttaaaatacctaatgggagggtttagaattaagcagcaaaaataagcagattccctaaaataaacctgcagaaaatccttattggaaatatatttgactgtaatatttctgttttgcttggtataaatagccttcaggtgttctctgaaatatttggaaagggaaacttaagaaggta

SEQ ID NO: 357461 - DNA, 557 bp, Homo sapiens
gtgctcatatcttccccagtaaattgtaactttcttgagcctgcagcctattaatctttataagcacctcccacccaaagtctaacacaatgttttacacttagatgctcagtatgtctttaytgaaggaatagctatcccacttagctgtaattctcttcaaatccaggtggacattttccagtttcaagacctatattctgtgtacgttttaatccatggcccttgccaaattctctccttttaaaatagtgataaatcaatgtttcccctgccaatatttcactggaaaacatgatctaggtagcaacggggtagcaggctgtgtgggtgtgagacgctgcagcatttctcagctactctctagaaaaccggcttcagagctctcccaggatatgccattattacttccctgccaaaacctgcttttgcttcttcactctagaaattagaatcattttggatagatctttaggctcacgatctggattcattaccatccgtcccacaatttcatctaattgtgattttaattttttatcaaagtaacacagaaa

SEQ ID NO: 357462 - DNA, 557 bp, Homo sapiens
gtgctcatatcttccccagtaaattgtaactttcttgagcctgcagcctattaatctttataagcacctcccacccaaagtctaacacaatgttttacacttagatgctcagtatgtctttactgaaggaatagctatcccacttagctgtaattctcttcaaatccaggtggacattttccagtttcaagacctatattctgtgtacgttttaatccatggcccttgccaaattctctccttwtaaaatagtgataaatcaatgtttcccctgccaatatttcactggaaaacatgatctaggtagcaacggggtagcaggctgtgtgggtgtgagacgctgcagcatttctcagctactctctagaaaaccggcttcagagctctcccaggatatgccattattacttccctgccaaaacctgcttttgcttcttcactctagaaattagaatcattttggatagatctttaggctcacgatctggattcattaccatccgtcccacaatttcatctaattgtgattttaattttttatcaaagtaacacagaaa

SEQ ID NO: 357463 - DNA, 636 bp, Homo sapiens
tgctggtcttagttagcgtatcaggtgtgacccagaatttgatgcctgaagggtctgagcttctagagacttttccctgttgtcaggcctggttggtacaattgttctttcattgtcatcagcagacatggaaacaactagaagtacccccagagaatccatctcttgagttccaagtacagtcatccctgtgcctttatgcatcagcctctctggattttcataaccaacatcagttactcatgccagtagagtaaatgctttctttgctgctggtctatcatcatggaggctcaaattaaccaggctacagtgtaactttaggttcagtggaacccttactgtttctcctagtggaagcattccatccctgaagsccgcatcttctaatacaatagaccttaaaattttagaaatggatgcacaaaaaccccaagtaagttctggaagtgaaaatgatgagatcacttctactccttgatttctggattgtatattcttgctactggggacacagcaccctataattgctcttggttcaatgtataccacatcttgccccaaccacacgggatggcacaccactggcatctttactgagcctctcaggggccattccaatattctctcaggctg

SEQ ID NO: 357464 - DNA, 556 bp, Homo sapiens
ggactgcaatttaagatgagatttgggtggggacacgaagccaaaccatatcacctgcccaaagagaaagggaggaaccaggatgatttccaggcaatcacccaagctatctctatcacattgcctcttttaattttattaaagcccttatcattcactgtcattttcttgtttactaattaactgtcttttcttttattcgagtttaagatctgtgagagcaaaatccctgactttcttattttccactatatattcccattatctagartcaggcttcaaatataacaggcactgggtaaacattgctgaatgaatgaatgaatgaatgaatggtcaattaattaatgaatcaaattacccattctgggctgtctttagatgtctgcacaacattaataattttaaaactgggctgggaatggtggctcactcctgtaattgcagcactttgggaggctgaaggtgagaggatcacttgaggccaggagttcaagaacagcctgagcagcatagtgagactccatctctacgaaacaacaacaacaaaatagtc

SEQ ID NO: 357465 - DNA, 556 bp, Homo sapiens
ggactgcaatttaagatgagatttgggtggggacacgaagccaaaccatatcacctgcccaaagagaaagggaggaaccaggatgatttccaggcaatcacccaagctatctctatcacattgcctcttttaattttattaaagcccttatcattcactgtcattttcttgtttactaattaactgtcttttcttttattcgagtttaagatctgtgagagcaaaatccctgactttcttattttccactatatattcccattatctagaawcaggcttcaaatataacaggcactgggtaaacattgctgaatgaatgaatgaatgaatgaatggtcaattaattaatgaatcaaattacccattctgggctgtctttagatgtctgcacaacattaataattttaaaactgggctgggaatggtggctcactcctgtaattgcagcactttgggaggctgaaggtgagaggatcacttgaggccaggagttcaagaacagcctgagcagcatagtgagactccatctctacgaaacaacaacaacaaaatagtc

SEQ ID NO: 357466 - DNA, 556 bp, Homo sapiens
ggactgcaatttaagatgagatttgggtggggacacgaagccaaaccatatcacctgcccaaagagaaagggaggaaccaggatgatttccaggcaatcacccaagctatctctatcacattgcctcttttaattttattaaagcccttatcattcactgtcattttcttgtttactaattaactgtcttttcttttattcgagtttaagatctgtgagagcaaaatccctgactttcttattttccactatatattcccattatctagaatcaggcttcaaatataacaggcactgggtaaacattgctgaatgaatgaatgaatgaatgaatggtcaattaattaaygaatcaaattacccattctgggctgtctttagatgtctgcacaacattaataattttaaaactgggctgggaatggtggctcactcctgtaattgcagcactttgggaggctgaaggtgagaggatcacttgaggccaggagttcaagaacagcctgagcagcatagtgagactccatctctacgaaacaacaacaacaaaatagtc

SEQ ID NO: 357467 - DNA, 587 bp, Homo sapiens
ttgctttagaaaacttgtcactgtaaattcttyctctatccctttgagatgtaaatctcccaacctcttgtctgaatttctggctccaggactgggactgggagccacctctttgaaatgtaatcatcaagaaagatactgcctctgtctcccagtcgctgtgggagaataggagcctgtgttagtctgttctgtgttgctataagggaatatccaaggctgggtcatttataaataaaagtttgttttggcttacggttctgcagacagtacaagaaacatggaaccatcatctacttctggtgagacctcaggaaacttccactcattgcagaaggtgaagagggagcaggcatgtcacagggtgaaagagagagagcaagagagaggaggaagtgccaggctcctttaaacaacaagctcttgcatgaactaatagagaatctcactcattattgcaaggagggcaccaagtcattcatgagggatgcacccccatgacacaaacacctcccactaggccccacctcccacattggggatcacatttcaacatgagatttggaggggacaacacatccaacctg

SEQ ID NO: 357468 - DNA, 587 bp, Homo sapiens
ttgctttagaaaacttgtcactgtaaattcttcctctatccctttgagatgtaaatctcccaacctcttgtctgaatttctggctccaggactgggactgggagccacctctttgaaatgtaatcatcaagaaagatactgcctctgtctcccagtcgctgtgggagaataggagcctgtgttagtctgttctgtgttgctataagggaatatccaaggctgggtcatttataaataaaagtttgttttggcttacggttctgcagacagtacaagaaacatggaaccatcatctacttctggtgagacctcaggaaacttccaytcattgcagaaggtgaagagggagcaggcatgtcacagggtgaaagagagagagcaagagagaggaggaagtgccaggctcctttaaacaacaagctcttgcatgaactaatagagaatctcactcattattgcaaggagggcaccaagtcattcatgagggatgcacccccatgacacaaacacctcccactaggccccacctcccacattggggatcacatttcaacatgagatttggaggggacaacacatccaacctg

SEQ ID NO: 357469 - DNA, 617 bp, Homo sapiens
acctcacagcaaactgttgaaacagaagagttccctgattctccttgcagagtatgcgacaagggtgtccccagcttggtcgcccaacagctcaaactcctagggggagcatgcagacaggcaggtgcagaggccggcaagagcgcttttgggctctggtcccaggacagcatctaggagaggttgtctgcgactcttgaagcctaagtgggtgtgtgttatcaagctcttttagatttgccatctgcaaacggctcatgtgttaatcagctcaatgaaccctctgccttatcgcaaaggcaggggccartgtgacagccttctgcatcccaagtccttgtccagtgtacgggaagaatcagatcacatgtgggcttgaaagatgagtgcaaggttttactgagtggtgggtgtggctctcagggagatggatggggagccggaagtgggggatggagtgctgagtggtgggggtggctctcagggagatggatggggagccagaagtgggggatggagtgctgagtggtgggggtggctctcagtgaggtggatggggagctggaagtgggggatggagtgggaaggtggtcttcccctggaatggggccactcgg

SEQ ID NO: 357470 - DNA, 395 bp, Homo sapiens
atgaaccctctgccttatcgcaaaggcaggggccagtgtgacagccttctgcatcccaagtccttgtccagtgtacgggaagaatcagatcacatgtgggcttgaaagatgagtgcaaggttttactgagtggtgggtgtggctctcagggagatggatggggagccggaagtgggggatggagtgctgagtggtgggggtggctctcagggagatggatggggagccagaagtgggggatggagtgctgagtggtgggggtggctctcagtgaggtggatggggagctggaagtgggggatggagtgggaaggtggtcttcccctggaatggggccactcggcagctggactctttcctgacmacccctggctgaactccgcttggcgtccaga

SEQ ID NO: 357471 - DNA, 527 bp, Homo sapiens
gacggggaatcacagattaccagagcagaagcycaggagcagaaactgctactggagctgacaccagggagaatacaacagaaagaagcgcatgtttcagaccttatttaagaagtctgtagggaacccaagtatgacacaggagacagaaacaaggacagaagaggaaattttttcctatgacagacagctacagaaaacagcaaacactgcctaattcacagccatttaaacacaaaaccccaagctaaagcctggtttacttgagttgcttaatgcagccatcatcatgtctgactatcaacaaataactacaagggcatatttaaagattaaagaacaataactggaagagacagaataggcaccaccaccagacaaacatggcagagttttggaatgatcagaccaggagttttagacaactgtgatttatctgctaagggctctaatggaaaagtgaacaacgtgaaaaacaacagatgggaaatgtaagcagaaagataaaaactataataaagaatcaa

SEQ ID NO: 357472 - DNA, 527 bp, Homo sapiens
gacggggaatcacagattaccagagcagaagcccaggagcagaaactgctacyggagctgacaccagggagaatacaacagaaagaagcgcatgtttcagaccttatttaagaagtctgtagggaacccaagtatgacacaggagacagaaacaaggacagaagaggaaattttttcctatgacagacagctacagaaaacagcaaacactgcctaattcacagccatttaaacacaaaaccccaagctaaagcctggtttacttgagttgcttaatgcagccatcatcatgtctgactatcaacaaataactacaagggcatatttaaagattaaagaacaataactggaagagacagaataggcaccaccaccagacaaacatggcagagttttggaatgatcagaccaggagttttagacaactgtgatttatctgctaagggctctaatggaaaagtgaacaacgtgaaaaacaacagatgggaaatgtaagcagaaagataaaaactataataaagaatcaa

SEQ ID NO: 357473 - DNA, 542 bp, Homo sapiens
tctgtccccacccaaatctcatgtcaaattgtaattcccagtgtcggaaaaagggcctgatgggaggttattgaatcatgggggtgaacttcccccttgttcctgtgatagtgagtgagttctcatgagatttggttgtttaaaagcgtgtagcacctccccattctcyccctccttctctgccatgtgaagacatgcctgcttccccttcaccttccaccatgattgtaaatttcctaaagcctccccagtcatgtttcctgcacagcctgagaaactattgagtcaactacacatcttttcttcataaactaccaggtagttccctacagcaatgtgagaacagactaatacaccccctcaggaaccaatgctgggctagagaaaactaaactgtaactgacaaactcctggaggtccatggtggacaaattgaagaaattagaatttcagggagaccgcgtccccgggagaccctgacagttttgtgaatttgaccttgtggagctttttcaggttctcacaatgaatattggaaaaaa

SEQ ID NO: 357474 - DNA, 542 bp, Homo sapiens
tctgtccccacccaaatctcatgtcaaattgtaattcccagtgtcggaaaaagggcctgatgggaggttattgaatcatgggggtgaacttcccccttgttcctgtgatagtgagtgagttctcatgagatttggttgtttaaaagcgtgtagcacctccccattctctccctcctkctctgccatgtgaagacatgcctgcttccccttcaccttccaccatgattgtaaatttcctaaagcctccccagtcatgtttcctgcacagcctgagaaactattgagtcaactacacatcttttcttcataaactaccaggtagttccctacagcaatgtgagaacagactaatacaccccctcaggaaccaatgctgggctagagaaaactaaactgtaactgacaaactcctggaggtccatggtggacaaattgaagaaattagaatttcagggagaccgcgtccccgggagaccctgacagttttgtgaatttgaccttgtggagctttttcaggttctcacaatgaatattggaaaaaa

SEQ ID NO: 357475 - DNA, 585 bp, Homo sapiens
gcctccccagtcatgtttcctgcacagcctgagaaactattgagtcaactacacatcttttcttcataaactaccaggtagttccctacagcaatgtgagaacagactaatacaccccctcaggaaccaatgctgggctagagaaaactaaactgtaactgacaaactcctggaggtccatggtggacaaattgaagaaattagaatttcagggagaccgmgtccccgggagaccctgacagttttgtgaatttgaccttgtggagctttttcaggttctcacaatgaatattggaaaaaagtcccctcaagttatctgatagagagaggggaaaagaaatcattttaaaaatacaccagagtctttcgttcatctcacaaaggcctaccctcaggagaaagtatttattgagagcctaacctgctggggtttgtcagagcctaacagacctgggagaagtgtgccagccaactccagcccatgccaaccatcctgttccacctaagggtgggaagagatgcacttgtaaacttcacagttcagtgaagcaggctttctgaaagactgagtcctgattatagtgc

SEQ ID NO: 357476 - DNA, 588 bp, Homo sapiens
ctgacaatatgcaacttgtaaattttacttttgtaactttttattcctaagaaagctgtcagcttttcataccctacccagcaatcatctccttgtgccagagtccttttgaaaatgtaataatcactgaaacacaaggataccagcaacataaagacgttttcacagcttttaattaactcctgggatttttgtttcaaaaagtgcattgttttaggagtagcaattataagctattttggctccctcatttactcctgggtttctgactgtttcttttgggtttagaagagagaacaattaggaaaagagcaatgatagggttgttgcttgacattcctaacccagcccctgatcctgagtcaccctggtcatagaaacaaaggcagggaagttaggktcatgatttctaccatactcttttcttgcaacttcaggacatatatttttgaccctcatctgctcctttccaagttcaaaatatcatctcaaaagcagagctatgaaaagtttcttcccgattgctgaaggttttgataaaaagaaatctgaaaacgtttcagagaaagtgatagcatagtggccctt

SEQ ID NO: 357477 - DNA, 588 bp, Homo sapiens
ctgacaatatgcaacttgtaaattttacttttgtaactttttattcctaagaaagctgtcagcttttcataccctacccagcaatcatctccttgtgccagagtccttttgaaaatgtaataatcactgaaacacaaggataccagcaacataaagacgttttcacagcttttaattaactcctgggatttttgtttcaaaaagtgcattgttttaggagtagcaattataagctattttggctccctcatttactcctgggtttctgactgtttcttttgggtttagaagagagaacaattaggaaaagagcaatgatagggttgttgcttgacattcctaacccagcccctgatcctgagtcaccctggtcatagaaacaaaggcagggaagttaggttcatgatttctaccatactcttttcttgcaacttcaggacatatatttttgaccctcatctgctcctttccaagttcaaaatatcatctcaaaagcagagctatgaaaagtttcttcccgattgctgaaggttttgrtaaaaagaaatctgaaaacgtttcagagaaagtgatagcatagtggccctt

SEQ ID NO: 357478 - DNA, 593 bp, Homo sapiens
cttttgcatgaacatagaactgtgtggccctgagcaatcaggttttttatcacaactgtgtcctggaattctcccctgaaaaaatctgctgaaacaagtaacctcatatttagtttacctcacaaatatttattactgtgtcaaggcatgaaacacaatatcttgaaatcattgaacctagtctccatttttatattacaaattgaattcccagactaatttaacrtgcatgtggcttttttacaaacactgttagaaatgagcatttttggaagctttgcacactacaaggcatctgctaaaggctctggatgcgtcatctcatttaattctaactacactatgaaatgggcagatttgttttccccactttatacattagacaagatgcagaaagattatacaaccagtcagaggtttgtaataagtaaagggttaggtaagatgtagagccagttagctgccataacattgtccctcttctatgttttactatttccttaggcttgaaaatatcagattgaaaattattcaagacattaaattaaccaagacagaaaattaaccaagacagaggctcttcgagtataacc

SEQ ID NO: 357479 - DNA, 593 bp, Homo sapiens
cttttgcatgaacatagaactgtgtggccctgagcaatcaggttttttatcacaactgtgtcctggaattctcccctgaaaaaatctgctgaaacaagtaacctcatatttagtttacctcacaaatatttattactgtgtcaaggcatgaaacacaatatcttgaaatcattgaacctagtctccatttttatattacaaattgaattcccagactaatttaacgtgcatgtggcttttttacaaacactgttagaaatgagcatttttggaagctttgcacactacaaggcatctgctaaaggctctggatgcrtcatctcatttaattctaactacactatgaaatgggcagatttgttttccccactttatacattagacaagatgcagaaagattatacaaccagtcagaggtttgtaataagtaaagggttaggtaagatgtagagccagttagctgccataacattgtccctcttctatgttttactatttccttaggcttgaaaatatcagattgaaaattattcaagacattaaattaaccaagacagaaaattaaccaagacagaggctcttcgagtataacc

SEQ ID NO: 357480 - DNA, 575 bp, Homo sapiens
cactgttagaaatgagcatttttggaagctttgcacactacaaggcatctgctaaaggctctggatgcgtcatctcatttaattctaactacactatgaaatgggcagatttgttttccccactttatacattagacaagatgcagaaagattatacaaccagtcagaggtttgtaataagtaaagggttaggtaagatgtagagccagttagctgccataacattgtccctcttctatgttttactatttccttaggcttgaaaatatcagattgaaaattattcaagacattaaattaaccaagacagaaaattaaccaagacagaggctcttcgagtataaccctcaaagcttagctcaaatgctacytgctttatgaaagtgcccttcctttcagtcttgatgtagtacctcattctcttcgctcacaaaatgttttatttgtctccctttcgtaccactattcactgttggactatagagactaatcagaacagtattccctaagtgtagagactgtcttattgactttgttccttttttttttttttttttttttttgagacggagtct

SEQ ID NO: 357481 - DNA, 599 bp, Homo sapiens
ttttttaccatttctttacctggtatgacagcttccctgaagtcttaaaattcatttaagttttggtgtcttgttcaactcctggtgcttccagttatctcactcagtttctggtatgaaccactattcttctccagcataaacatttccagtgccttcctttgtccatttagttccattctggcttcaccactctcctaatcaatgtaaataccaagatcaagcagtaaaattattcttatgactacttttatttctggtgggcaccttgtcatgtgttccctttgtctatcaaaatcctagacctgaagctataataattcatcttttttacccctataacaagattgctgaacaatgaaaaatcacagaatgcaaccactgtcaactcacagtattcagcctctggtgattgttaaaactgaagtcgtcttcttttatatattcctggtcagcttaattctacctctcctaaaaytctcaggaggtaatgtcccccacctcagacagaagagaggccagaggtggaggaactgaaaaaattacacacaattttttctcccatatcactttaaaaagccagccttcacccagatcct

SEQ ID NO: 357482 - DNA, 594 bp, Homo sapiens
tgtccattaggctggacatatgagaatatgtctgctaaagtgggaggtaagttgctacccttacactgaccaccacaaaagaagacatgcagtcactggtggggcctcttcatattagtgttagattagtacatggatatttctaagaagttactggagtaagtaaagctgttatcattgcctaattctacgttttataatggggtcctttgttcataacaatgaaatcctgtaagcaactattgaaatcctttgaaacagtgttctgagagaaggctgtgtgggaaactacactgtaattaagactatcagcattataaagagaatgcaacatatcttgcactttttaaaaaataaaagctaaacaagggatatcatctaagctataaagccgtgaaacataataaaagaggagcttttcagtagtctgtgaatgaacatcagtcaacagggtccaattgccctctacagaccactctaccaacaacagtgagaaacacattttttttattatccatggaacggtcaaaagatagatcatattctggtttataaagcaaatctcaacacmtttaaaataagtctcacagagta

SEQ ID NO: 357483 - DNA, 394 bp, Homo sapiens
gtctggcttccttgctttcatcaaattgctacctctcggcaggaacccagacaaccagggtgcctgcatcactctgtgtggttttctgtaggaagctcccataaagggttgcataattgtgaataagccttttggaagaaatgtgaaagctcccattgtgctgaaacaaggaaggaggccaatgtttgagaggaggttgctgtagttttgccaaattrtggaaggaaaatgcatgaggccaattttgaagcccagctgcatctttctaagttaaatatatatatgggtttcattttttaattctagttttgagtaaaattacaactctattaaggtggtgatttaaaagattcttttacaattgtataaaataatgtatcatgatctatgtaac

SEQ ID NO: 357484 - DNA, 558 bp, Homo sapiens
cagagaaaaggtgatgttgtggttcaagttcaaaggccttcagactggtagaattccactttttttttccagaggaagtcaggctttttaaaatktatttatttatttgttttttattcaagccttcacttgagtggatgaggtccacaaacatactgcaagacaatctgctctcctcagtctgtcgattcaaatgtttatctcatctagaaacagcctcacagaaatattcagattaacatttgaccacatatctggacactgtagcccagccaaattgacacataacattaactatcacagaaacaatgtatttaataggcaagaaaagaaaaaggagataaaggagaatcataaaaaagataaaatgaaactaaaaacaagcaaacatcatttattaactcagatatcaataagagaaatcaagcaaaagataatcttttttgcacctgtattagtggccttgaggatcacatgacttaatatttcatgcccacagagcaaaaatacaaagtgaatgaaatcatgagattgctgggagatgcagatgattgtaag

SEQ ID NO: 357485 - DNA, 568 bp, Homo sapiens
tgtgattctatttatactgtaatctagaaaaggcaaaactatagggacagatgtgtcagaaaacaaattaatgatgactttggacttaggatggggcaggtgttgactccaaaagggctcaatgaactcttcaggaagtggaaatttctatatctgattgtgtaagtggttacatgactgtacgtttttgaaaactcatagaactgtgcactaaaagggatacataaattacaacataaaatttttgtctcaaaacccccaagtttttaaaaaagtaaatatcttatgttttcctagagatgttgaaagagaagctcagagtccagagaatggtgcttcagrcctaaggggtaaggacaagctacccaaggcctttgaaggggcccttgcagggtgtgtatggtttgggcagctggcaagaaaagaggaaagctgagcagctaaatcttgtcaaaaaattctaccatgtgcttacaaaatatttgatattttaacatgcagcaattctcatacatttatggtgtattaagtaagatcaggaagacctgtgttaaaattcatgactcga

SEQ ID NO: 357486 - DNA, 599 bp, Homo sapiens
ccaaaatatacatatgtatagtaaaaaattactcctatatgttttgttaagcttgtataacagtaatggcaatttcttttgactgacaatttggaggaaaacttggaaatttctactttcacatctttgagagtatctacatttcttatggaggtagtttatataatatatagcagcggttttgctcaaggtaacatcttctgcatccaaagtgctgygagaaacaaagatagtccatgaaattcatcacatattagcacattgacaaggaaatgagagcattcatctgaaacaacccaccagacgctgccatgatatcttgtcaatatggttcacttaattctctcaaagcctttatgacaatatggttgttttgtcttgtaattgtcaaaaatactcttgtattggcaggcccagcaggtatcatttttgagcttttcttttctttttttcttcaaaactcacatgatctcacagattcagtgaaagacggataagactgatcaataaatcacacattcatgggtgagctaacccatgttgttgtttaaaaattatgctagagagacaatgtatataaaagaaacagatagttggtc

SEQ ID NO: 357487 - DNA, 551 bp, Homo sapiens
actttaatatttaatgactcccttgctagattttggacttgcatgcatgtggcctgtaacccctttggtttggccaatttctcccattggaacgggtgcatttatccaatacccttacccaattgtatcttgggagtaactaacttgcttttgattttacaagctcatattgtcttgtctcagatgaaattatggacttggacttttgggttaatgctgaaattgtagaactgttggtgaggcatagctgtgttttgaaatgtgagaaagatgagatttgggaggggccatggtggaatgatgtggtctggctctgtgtccccacctaaatctcatcttgaattgtaatccaaattgtaatmcccacgtgttgggggagggaccttgtgggaggtgattggatcatggggccagttcccccatgttgttcttatgatagtgagttctcatgaggtatggggattttataaggagcttttcccccattcactctgcacttctctctcctgctaccatgtgaagaagaaccatgtgtttgcctctccttctgc

SEQ ID NO: 357488 - DNA, 559 bp, Homo sapiens
ctttcagttaccccaatcagttgtaggtttggtgtccctacataatcccatatatctcagagtttttgttcattcctttttgttcttttttctctattcttatctgcctatcttatttcagaaagatagacttcaagctctgaaattctaccctccacttgatctattctgctattgatacttgtgattgcgttgtgaagttctaaagttgtgtttttcagctccatcaggttgtttatgttcctctctaaactggatattctggttatcatcttctgtattgttttatcatgattctcagcttctttgcrttggtttacaacctgttcctttagctcagtgaagtttgttataacccaccttctgaagcctacttctgtcaattcaaccatctcagcctcagcccagttctgtacccttgctggaaaggtgttgcagtcatttggaggagaatagacatgctggctttttgagttttcagcatttttgtattgactttttctcatctttatgggctcatctacctttaatctttcaggttgctgacctttgaatgagg

SEQ ID NO: 357489 - DNA, 559 bp, Homo sapiens
ctttcagttaccccaatcagttgtaggtttggtgtccctacataatcccatatatctcagagtttttgttcattcctttttgttcttttttctctattcttatctgcctatcttatttcagaaagatagacttcaagctctgaaattctaccctccacttgatctattctgctattgatacttgtgattgcgttgtgaagttctaaagttgtgtttttcagctccatcaggttgtttatgttcctctctaaactggatattctggttatcatcttctgtattgttttatcatgattctcagcttctttgcattggtttacaacctgttcctttagctcagtgaagtttgttataacccaccttctgaagcctacttctgtcaattcaaccatctcagcctcagcccagttctgtacccttgctggaaaggtgttgcagtcatttggaggagaatagacatgctggctttttgagttttcagcatttttgtattgactttttctcatctttatgggctcatctacctttaatctttsaggttgctgacctttgaatgagg

SEQ ID NO: 357490 - DNA, 532 bp, Homo sapiens
caccacccacacacacatcacacacataccacaaacacacacacatatacataccacacaccacaccatatacatacacaccacagatacagcacacwtgcacacaccacacataccatacacacacaagacgcactcatacacacaccacacatgcacacataccacacacatatatacaccacccacataccacacacataccccccaacacacacatcacacacaccacacatgcacacagcacatatgtatgcatacacacatatacacacacatacacacacacacacacacacgaccagcacggccagtggcatgtcctatgtttcctacaggccccctccctgtagggagttttctacatcagcagccccagacaagagcttctctgggaaaataggtcacctgcttctccctgtgtgcaggaaggtgtgagctgcacttgcccatggcctgggggctgctgcagagcagagggaggcctggccaccaaccattttcactgcctttcatctcggaaccaaaaatg

SEQ ID NO: 357491 - DNA, 532 bp, Homo sapiens
caccacccacacacacatcacacacataccacaaacacacacacatatacataccacacaccacaccatatacatacacaccacagatacagcacacttgcacacaccacacataccatacacacacaagacgcactcatacacacaccacacatgcacacataccacacacatatatacaccacccacataccacacacataccccccaacacacacatcacacacaccacacatgcacacagcacatatgtatgcatacacacatatacacacacatacacacacacacacacacacgaccagcacggccagtggcatgtcctatgtttcctayaggccccctccctgtagggagttttctacatcagcagccccagacaagagcttctctgggaaaataggtcacctgcttctccctgtgtgcaggaaggtgtgagctgcacttgcccatggcctgggggctgctgcagagcagagggaggcctggccaccaaccattttcactgcctttcatctcggaaccaaaaatg

SEQ ID NO: 357492 - DNA, 550 bp, Homo sapiens
agccctcatcttcatgcatttcccagggttcaaaactttcacgtggattctgcttatttgcccccaaagtactgattctattgtgttaacattttctttaatgattcaatttaatcaaagtgtggattttatggggagggggactagctgagaccttaagcaagtcacaatccattgattcctagagtaggtcactatgtagatgttgagaggcactgtctgcctgagaccagaagatgaggagtcattgttcacaaaataatgactttttaaatccttgtgataattctgcatgctggggttccattagtataactattttacaaaaaaggaaacyaaggcacatataagtaactttccttgagttacagagctaggaaagtggcagagctgggatttgaagccagcctggctgcctccaaaggccacgttctcaattgttaatctctcctccagaatcaacctcagccgactttaccttgaaaggcataagaagcgtagctactcccacctgtcaccaaagtacagaaatttctgatgtagaaactgt

SEQ ID NO: 357493 - DNA, 543 bp, Homo sapiens
ggtaaagtaatttggcgacaaggagaaaatcaggattagaatcctagtctgtctgaatccaaaatcatcccaataagcaacagtgtgttccaggggcagaacatttgcctttggaacaattcatttcattgcctttcatttttatttactgagactctgctgtgggggaagccttgtgccagctttgcgggctcatgcaaagatgtatacaaggcagtgtttgccaggagcttcccctctaaaaagaaacatgggtgagtatagtggcccagctggatccagcttcacagagagtgagcctttggctggagggcagatggagtggagcatgaagagacaggtcagctgaccacctccttttttatgggtctcgtggactgaccatagacataaggtcatatttccttttgcttcctccaaggtgtttttgttttttgttttkttgtttgttttatcagagtgctacgtctttggaagaaggaactctccacctagcactgcttctggcctcagtgtcgaacctgagaaaggaatgaaggcaca

SEQ ID NO: 357494 - DNA, 496 bp, Homo sapiens
gccattgcactctagcctgagtgacagagcaagacttcttccaaaaaaaaaaaaaggacctatcccaaaagtacytcctggagtgataatgggactcaacagaggggtggaccacgcaatggccagctggagaaggcaatgcaatctcagggaggcagtgcttgtctttagaaaggatgcctccagcaggtaatctccaagggacccaccaaactgtcttacagaggaaagagccggcaatggtgcctctgccacattgggaaagcccaaagccagagcacaactatatgagccaagtaagacagttcttaacccttacttattcttccttccttcttatgatacaggcagggcccagagcagcaaccaactagagggggaggaagtagagcaaggaaagaggaaagacacagtcatgcacccttctcttgtcatcataaaggtctagggcaggggagaagattcgcagtggctgagtttgaagtttgattacata

SEQ ID NO: 357495 - DNA, 496 bp, Homo sapiens
gccattgcactctagcctgagtgacagagcaagacttcttccaaaaaaaaaaaaaggacctatcccaaaagtacctcctggagtgataatgggactcaacagaggggtggaccaygcaatggccagctggagaaggcaatgcaatctcagggaggcagtgcttgtctttagaaaggatgcctccagcaggtaatctccaagggacccaccaaactgtcttacagaggaaagagccggcaatggtgcctctgccacattgggaaagcccaaagccagagcacaactatatgagccaagtaagacagttcttaacccttacttattcttccttccttcttatgatacaggcagggcccagagcagcaaccaactagagggggaggaagtagagcaaggaaagaggaaagacacagtcatgcacccttctcttgtcatcataaaggtctagggcaggggagaagattcgcagtggctgagtttgaagtttgattacata

SEQ ID NO: 357496 - DNA, 597 bp, Homo sapiens
tcttgactaggtaagactacaggtgcgcaccaccacgcccgactaatttttttttttttttttgtatttttagtagaaatggggtttcaccatgtttgccaagtttgtcttgaacttctgacctcaagccatccgcccacctcggcctcccaaagggccaaactgctggaattacagacgtgagccactgcacccggactctgaaacgtttttctgatgaatgggaaatcattaaaggatttcaagtaggagaggatcagtttccattttgaagaggtccctctggctgcaacatggagagtgaattggaggaggacaggaacaatggtgggggctgcttaggagctactagtagcacctccagggcagagatggcattggtttgggccagggcaagggtaacagggatgaagacaggtggaaggatagaaaagatattttgtagggaaagcaaagacccttatacatagttataaraagcagctgtagccaggcacagtggctcacacatgtaattccagcactttaggagatcgaggcaggaggatcacctgagctcaggagtttaacaccagcctgggcaacgtagtgagccct

SEQ ID NO: 357497 - DNA, 527 bp, Homo sapiens
agacttttaggtgcaagtaagaggacatctaattcaaaccaatgtaacattaagtggtgtttgtaggcacaataaatcaaaagtcctgaagtgggaaaaactttaggtatagttagtccaggaattcagttttatttccctgccattctctccatactggcctcctctgtgaggctgcctcatcctaactggcttccctcaagatatgaagatggctgccagcgtctcttggagcaacacgtttccctgtccagtcagggggagagagatactctcacaaacattcagagaaaaaccccaracatctctctgtttgggccaagtaaggttacatgtccactcctgaaccacagtggcaaagggcaatgagacgaccctgaggcttggagccctggagccaatggggtcaagtcaatccaaacagcatgacagtaacaccacggtatgtgtgtggaatggatactgtggagacacccacttgtctagcatagtaggggactgaattaaactgttctgcaaagtgggtc

SEQ ID NO: 357498 - DNA, 557 bp, Homo sapiens
tcaggcattcatcaccttgaccccaggaagttccactttcctctgtttcgatcagtgcctagtagagagtctggcacaaaacaggcactcaataaatgaattaatgttttagacatttcagttccttgtaagttttcatttgattaaaggattccaccactaaaaatgtatgaaagctactgcattagaacatttttagaagacatccatccatacgagaagaactagagcaaacactcatctgaagtctcctcacttggcttcaaaaaccatcttggtctcttgattaagaaaaagatcatcagaggagtttacacattttaatcccctcccatgcctgcaccagaccttgatgacagagaagtgaatttatcagagtgacattctkgaggattttttttttttcatttttggagaaacatattcctttgattcttatatggtaatatactttatttccatgaagaacaagaataaaataacaacattcatgatactgtgagccaggtgtttgcacacattatgtcatataatttttactagaatcttctcagatg

SEQ ID NO: 357499 - DNA, 589 bp, Homo sapiens
gtgtgtagacaccagcccatatggggccgtgtgacggtgggtagacagaatggagttgttctgagccagggtactgggttatggcatcagggagacccgagttcaaatcttgctggctgtgtggttayggggtcagaatgtaaccctttaagcctcatacttatctcatagagtgattgtgagaatacatgtgatgtgatagtcaatcataaccacatcaatgttattgtcatgacagatcaatttccatcacaggctgaggcatggacactgacttaggagatcacggagtcctttttgtgcatgtgtacgtaactagaaagctagcatatgatagtgtctcagagattgctaagcccaattttctcattttacagaggaggaaattgaggtccagagagacgataaggcttattaggtcagggctggagctggaatccaacgtccctaagctttctctctcatccaggctgtcattctcaatcagtagtaaggctttagctgggacagcatctataggcttttgaaagcattcataggctggttctctggtggggggtctggtgaccaggacattcccagacatgga

SEQ ID NO: 357500 - DNA, 571 bp, Homo sapiens
cagggtactgggttatggcatcagggagacccgagttcaaatcttgctggctgtgtggttacggggtcagaatgtaaccctttaagcctcatacttatctcatagastgattgtgagaatacatgtgatgtgatagtcaatcataaccacatcaatgttattgtcatgacagatcaatttccatcacaggctgaggcatggacactgacttaggagatcacggagtcctttttgtgcatgtgtacgtaactagaaagctagcatatgatagtgtctcagagattgctaagcccaattttctcattttacagaggaggaaattgaggtccagagagacgataaggcttattaggtcagggctggagctggaatccaacgtccctaagctttctctctcatccaggctgtcattctcaatcagtagtaaggctttagctgggacagcatctataggcttttgaaagcattcataggctggttctctggtggggggtctggtgaccaggacattcccagacatggagcttccaattcctccacattcctggtgtggagcagcagcctgataaat

SEQ ID NO: 357501 - DNA, 612 bp, Homo sapiens
acccactgtcctttctttctgggctctctcactctcttggcaagttcctaatgagtcagcctttccttcagctgatccctgaatgcacttctttcctaactgaccaggtctctcaactggcattctctttcataactccctttacagtgtcttcaacctggatcaaattagcattctttccaggccccaatttcctgttctcttctttgctcttcctattcctggtaacttaagcagtcatgaaacgatytgttgatcttaattgccaccccggtgtccctcccagacaccacagaggatgggcagatgtgtctgtctcctgcacttgacaaagaccttatcttctttttgtgtcagcccagtgcctaactttcagaagatgctctatacctaacttttggaagatgctctatatttgctgaatgaataaatgaatgaagaaataatttctgccttcaacaggcttaccatctagttggacagataggtacagcatgtctttctcattggacatcactgggggattaaaaaaattctagacaagtgaatttcccagataaatgaaatttattcctttaaatatctaattatatttcttagacattttagatg

SEQ ID NO: 357502 - DNA, 612 bp, Homo sapiens
acccactgtcctttctttctgggctctctcactctcttggcaagttcctaatgagtcagcctttccttcagctgatccctgaatgcacttctttcctaactgaccaggtctctcaactggcattctctttcataactccctttacagtgtcttcaacctggatcaaattagcattctttccaggccccaatttcctgttctcttctttgctcttcctattcctggtaacttaagcagtcatgaaacgatctgttgatcttaattgccaccccggtgtccctcccagacaccacagaggatgggcagatgtgtctgtctcctgcacttgacaaagaccttatcttctttttgtgtcagcccagtgcctaactttcagaagatgctctatacctaacttttggaagatgctctatatttgctgaatgaataaatgaatgaagaaataatttctgccttcaacaggcttaccatctagttggrcagataggtacagcatgtctttctcattggacatcactgggggattaaaaaaattctagacaagtgaatttcccagataaatgaaatttattcctttaaatatctaattatatttcttagacattttagatg

SEQ ID NO: 357503 - DNA, 612 bp, Homo sapiens
acccactgtcctttctttctgggctctctcactctcttggcaagttcctaatgagtcagcctttccttcagctgatccctgaatgcacttctttcctaactgaccaggtctctcaactggcattctctttcataactccctttacagtgtcttcaacctggatcaaattagcattctttccaggccccaatttcctgttctcttctttgctcttcctattcctggtaacttaagcagtcatgaaacgatctgttgatcttaattgccaccccggtgtccctcccagacaccacagaggatgggcagatgtgtctgtctcctgcacttgacaaagaccttatcttctttttgtgtcagcccagtgcctaactttcagaagatgctctatacctaacttttggaagatgctctatatttgctgaatgaataaatgaatgaagaaataatttctgccttcaacaggcttaccatctagttggacagataggtacagcrtgtctttctcattggacatcactgggggattaaaaaaattctagacaagtgaatttcccagataaatgaaatttattcctttaaatatctaattatatttcttagacattttagatg

SEQ ID NO: 357504 - DNA, 601 bp, Homo sapiens
gccaggcttgactaggctgacaagagccactttcatgatgacctacccacatggctgtgggcaagaggcctcagttccccaccacgtggatctctccactgagcatcctcatggcatggtaacttgcatccccccacccccccgcgcccagattgagtaatccaggaaatagcaagatggatgtggcaatgtcagaagtcacacacagtcattttagcaatatccaactagtaacacaagtcagacctctctggtgttgggggaagggacctatataagagtatgaataccaggaagtgagaatcactgggggccttggaggccagccrtcacagagatccttaaatgtttgaggaagacctgaagaaagaattaaaacttttcattataggccacattcattaaatgctttgctgcacggaaactgaacaattttgacttctgtctttatgcgctcattttggtgcctttaaaacctattttacagatggaaaatattagtctatgtcaataaccattaaggagtggctgaccttggtccacccaaatccgaaacccacatagcttccacagggtgagactaaagataggaaaatatgtt

SEQ ID NO: 357505 - DNA, 545 bp, Homo sapiens
tattagtcttgtctttaataacattaactattaacagtaattattattcatagtgacaacaacagcataagtcaatcagtatgatcatgagttttagaattctagaaacctaggtgtgaatgtctgatctgtgactttggggaagttgtttagcctcctgaccaggataaagatttctcactgggatggagataatagaatmttccttgtaggcttgtggtgagaattaaattaagtaaaacctataaaatacccaggagatacttaagaggtgggggctctttttattcaataccaatcacaaaatacttcaacatacatgatgacatgtgactagcccaattgggaggggaaacatgaggaggaagagaagagtaagagacatgaattcaaggaagggtctagaaggttagagagaaaggccgagatgcaggaccccaggtgaagggctacagtgggggtggcctggcaggccccaggagaacactaggcttggagttggcataaccatcatcttgtcaacagcctccttcctgctgtctctg

SEQ ID NO: 357506 - DNA, 545 bp, Homo sapiens
tattagtcttgtctttaataacattaactattaacagtaattattattcatagtgacaacaacagcataagtcaatcagtatgatcatgagttttagaattctagaaacctaggtgtgaatgtctgatctgtgactttggggaagttgtttagcctcctgaccaggataaagatttctcactgggatggagataatagaatcttccttgtaggcttgtggtgagaattaaattaagtaaaacctataaaatacccaggagatacttaagaggtgggggctctttttattcaataccaatcacaaaatacttcaacatacatgatgacatgtgactagcccaattgggaggggaaacatgaggaggaagagaagagtaagagacatgaattcaaggaagggtctagaaggttagagagaaaggccgagatgcaggaccccrggtgaagggctacagtgggggtggcctggcaggccccaggagaacactaggcttggagttggcataaccatcatcttgtcaacagcctccttcctgctgtctctg

SEQ ID NO: 357507 - DNA, 528 bp, Homo sapiens
cagagtgagaactcattcatcacccagggatggcacaaagtcattcatgaggaatctgcccccataatctgaacacttcccaccagaccccacctccaacactggggattacaattcaacatgagatttggaggggacaaatatccaaaccatatcgattgtgataatgactttgaaatgtactccactccattgtcattcagaattmctcccagttgtttctcaccaccacatccacctatttcccttcttcccaggcatccggctagaccacctgtccccaccttccatgtgcttgagtggccatgtgactgagtgctggcaggtggcctctccaaattgttctctctgaggcagagagaatgctgtgtgccacatcgggcccagtgcttcgctttctctcttccctgtctgctggctggatatctgcccccaggaggacctcagaagccacatgttgacaatggcagagcctccatcagtctgggtccctgaaagattccatgaggcagaacacccatcgtcatg

SEQ ID NO: 357508 - DNA, 528 bp, Homo sapiens
cagagtgagaactcattcatcacccagggatggcacaaagtcattcatgaggaatctgcccccataatctgaacacttcccaccagaccccacctccaacactggggattacaattcaacatgagatttggaggggacaaatatccaaaccatatcgattgtgataatgactttgaaatgtactccactccattgtcattcagaattcctcccagttgtttctcaccaccacatccacctatttcccttcttcccaggcatccggctagaccacctgtccccaccttccatgtgcttgagtggccatgtgactgagtgctggcaggtggcctctccraattgttctctctgaggcagagagaatgctgtgtgccacatcgggcccagtgcttcgctttctctcttccctgtctgctggctggatatctgcccccaggaggacctcagaagccacatgttgacaatggcagagcctccatcagtctgggtccctgaaagattccatgaggcagaacacccatcgtcatg

SEQ ID NO: 357509 - DNA, 591 bp, Homo sapiens
gtgatcatggctcactgcagcctcaacctcctgagctcagggaatcctcttgcctcggcctccagagtagcagggccacagttgtgtactaccacactcagctcatttttaaaatttttgtagagattgggtctctccacgttgcctagcctggtctccaactactgggctcaagcaatcttcccaccttggcctcccaaagtgcttagattacaggcatgagccactgcaaccagccctagaagcttcttgatacttcttgataatgtaatatttttaaaagtcatatttatttaaatgtatcattctaaatctatcatttactatgtgggtagtataggcacatgattaaaaaatcgaaagtataaatggcatagcaatcatgggtctcctttctacctgtgtagaagtcrcccactctcccttcttacgggaaatcacttctgttagttttttttacccattctttcagagatatttcatgcacacacaagtaaacaggctatattacagttaaatacatcctcttgcccacctgtctagactctgggtccttgtgcttctgaggactctgaaatgtaaatgtcttcc

SEQ ID NO: 357510 - DNA, 591 bp, Homo sapiens
gtgatcatggctcactgcagcctcaacctcctgagctcagggaatcctcttgcctcggcctccagagtagcagggccacagttgtgtactaccacactcagctcatttttaaaatttttgtagagattgggtctctccacgttgcctagcctggtctccaactactgggctcaagcaatcttcccaccttggcctcccaaagtgcttagattacaggcatgagccactgcaaccagccctagaagcttcttgatacttcttgataatgtaatatttttaaaagtcatatttatttaaatgtatcattctaaatctatcatttactatgtgggtagtataggcacatgattaaaaaatcgaaagtataaatggcatagcaatcatgggtctcctttctacctgtgtagaagtcgcccactctcccttcttmcgggaaatcacttctgttagttttttttacccattctttcagagatatttcatgcacacacaagtaaacaggctatattacagttaaatacatcctcttgcccacctgtctagactctgggtccttgtgcttctgaggactctgaaatgtaaatgtcttcc

SEQ ID NO: 357511 - DNA, 619 bp, Homo sapiens
ccctccctcccttcttctcttctcttctcttctttctctttttctttttccttttcttgacaaaatctcactttttactcaggcctgagttcagtggcgtgatctcagctcactgcaacttccacctcccaggttcaagtgagtctcctgcctcagcctcccgagtagctggcattacaggtgcccaccacgatgtccagctaatttttgtatttttagtagagatggagtttcaccatgttggccagactgatctcgaactcctgacctcaagtgtgatccaccagcctcggcctcccaaggtgctgggattgcaggcgtgacgactgcacccagctgctacctactatttcttctagtyctcagcttctgacaagaaaatgttgactagaggtaggaatagaaaacatccttgtctcatttctaatctcagaggaaaagttttaaatactgtagaggatgaggtttttgttttcatttttgttttatgaataccatatcaaactaaggaaatcccctctatttcttaatatatttaatcttgaatgagtattgaattttgccaaatgctttttctgtatttatatgtatgatatgatttttttcctttattctgtta

SEQ ID NO: 357512 - DNA, 568 bp, Homo sapiens
ttcttcctgcttcaatcttgggagtttgtgtgtttccagaaacctatccatgtcctagtttgtgcacatagagatgttcatagtagtctctgaggatcatttgtatatctgtagtatcagttgtaatgtcacctttgtcatttctgatcgtgcttatttggatcttccctgtttttttcttgattaatttagctaccagtttttcaatcttgtttgtgctttcaaataaccractttctttttcaaagattctatgtttttttgtttgtttgtttttgtttttgtttttttggtctcaatttcatttcatattgctctggtcttagttcttttcttctgctaggtttgcatttagtttgttcttgtttttctagctcctttaggtgcaacattaggttgttaattttttctttcttttttatgtaggcatctagcaccataaactttcctcttaaccctgctgttgttatatcccaaaggttttggtatgttgtgtctctactttcatttgtttcaaggaattgtttgatttctgccttaatttcattgtttccccaaaaatcattca

SEQ ID NO: 357513 - DNA, 574 bp, Homo sapiens
ttgatctttcattcagtgaataattttacggaaggatggtcatattactctacacaaaagtcatgcaactgaaatttctctctacttttawgaggaaaaaaatggcaagatagcaaccagatggtaagaaaaacaggtttaacaaacctcagattagcacttaaataactcagaatatagattcaactgctttgacagacctaaaataacatgctttcgattacatagatcaggagtcagcaaaccatggttttgggaacaaatctggcccaccacctgtttttgtaaataaatttttattggaatatagccacacccgttcttttatgaatcgtctgtagctgttgtagaggtggtagctgtgatagagattgtgtgggctgcaaagcctaaaatatttaccatctgatcttttacagaaaatagttgccaacccctggtatagccatttctcttttgtgtaaacctaggagcagttataggggctcttctttgtgaagtcctcagggccccaggatctttctatctcttaaccttctgtaagatgttgcttttgtcttcatagtccaggctc

SEQ ID NO: 357514 - DNA, 552 bp, Homo sapiens
tcaattaggatagaagcagggcctctgtggaaagcaaagtctaagtgaaatttgaggcatactgtcaaaggacaggttctcaagagagatgacttgaccaacacaggagagatccatgaaggcacctaaggtctcgcgatgctagagggcagtgctagtgtcagctgaggaggctttaagctcaaaggctaactaagcayggccttgttacagcctgagccagcaatcttgaagaagcgactgatagagtgtatactgccacaggctgagcattcaatgtctgccaagctcttgagtttatatgtattttggagtcagtaattcatggatgagttaaggtcagtaactaatggatgaggtctgataatgtgtgacataacattgtcaaggggaaggagattacacttcaaattcttatcatagcaaaacttgtcactcatgtagcaaactatgtaagtgtttggaacaatttcaaagcttatctagttgtatttttctttataactcttattaccacctgatctgttatatacacagtatatatttgttatt

SEQ ID NO: 357515 - DNA, 552 bp, Homo sapiens
tcaattaggatagaagcagggcctctgtggaaagcaaagtctaagtgaaatttgaggcatactgtcaaaggacaggttctcaagagagatgacttgaccaacacaggagagatccatgaaggcacctaaggtctcgcgatgctagagggcagtgctagtgtcagctgaggaggctttaagctcaaaggctaactaagcatggccttgttacagcctgagccagcaatcttgaagaagygactgatagagtgtatactgccacaggctgagcattcaatgtctgccaagctcttgagtttatatgtattttggagtcagtaattcatggatgagttaaggtcagtaactaatggatgaggtctgataatgtgtgacataacattgtcaaggggaaggagattacacttcaaattcttatcatagcaaaacttgtcactcatgtagcaaactatgtaagtgtttggaacaatttcaaagcttatctagttgtatttttctttataactcttattaccacctgatctgttatatacacagtatatatttgttatt

SEQ ID NO: 357516 - DNA, 589 bp, Homo sapiens
cagaacttcaggtagagagggggactaagttcaagaaatctatcgtacatcatggtgactatagttactgacatattttgtctacttgaaaattgccaagtgattagattttaagtgttctcaccacacaaaaaaaatgataaatatgtgaggaaatgcatatgttaattagcttgatttagccattccacaatgtatacatataccaaaatgccattccatatgcaataaatatatataattttatttgtcatttttagaaaaataaaagtatgcatttctgtgctctmtgtgagaccagctgtgaatcggtaactctggaggtgggtggaactagataaatctagtgttttataagttcctgaggtgattcttttaatcaggtaaggctggcaagtaccagtctaattcaatacatctgaacctcccgggaagcttttcaaaccaggcaaacccatttttatctccatctgccttcagagattctgagtaagtctagaatatgtattgaaaaaacttcttaggtgattcttatgcttccctttcccatcccttcctcagttaaaaacccatttctacttgtttcacg

SEQ ID NO: 357517 - DNA, 589 bp, Homo sapiens
cagaacttcaggtagagagggggactaagttcaagaaatctatcgtacatcatggtgactatagttactgacatattttgtctacttgaaaattgccaagtgattagattttaagtgttctcaccacacaaaaaaaatgataaatatgtgaggaaatgcatatgttaattagcttgatttagccattccacaatgtatacatataccaaaatgccattccatatgcaataaatatatataattttatttgtcatttttagaaaaataaaagtatgcatttctgtgctctatgtgagaccagctgtgaatcggtaactctggaggtgggtggaactagataaatctagtgttttataagttcctgagrtgattcttttaatcaggtaaggctggcaagtaccagtctaattcaatacatctgaacctcccgggaagcttttcaaaccaggcaaacccatttttatctccatctgccttcagagattctgagtaagtctagaatatgtattgaaaaaacttcttaggtgattcttatgcttccctttcccatcccttcctcagttaaaaacccatttctacttgtttcacg

SEQ ID NO: 357518 - DNA, 561 bp, Homo sapiens
accatgttgttttagctgaatacataggtgcccctacagtttttcctatcctctcctttagcaagatgtggccttrtgactaagtttttgttgtgggacataaggataagtgtgcaatttctgagtctttttttaaaggaagctggctttccttcttttcttcccccttcccccagactggaaatggtgacaaacagtaaatgccttagtcccagaaatggaatcttcacattgaggatgggcacaacctccctccagcgttgtcctgttatgttaagttggaaagatgtacaggagcttggcatatgccctaacacagttaagtaatttagtgtttgaaaaaataatagagttaaataagaaaaataaaactgtagaatgactagaagaaacttaaaatgactatttgattttcttttgggaaaggatcatctaagatgaaagacaactgcaaaagcctcaaaggacaagattaatagatcttaaatataaatttattttaaatcataaaaatctctaaatcccagatgtgaaaaaacagcataaacaaagttgaaaatt

SEQ ID NO: 357519 - DNA, 580 bp, Homo sapiens
cagtgattacgttttagtcctcttcttacttgcactctcattagctgtgctctccttgatttacatgataccatacatccatggcttttcatctcccttcctaagcacactgctgcctcttcccttggcaatatcttcttcattcagtcctctctacttactctctctgaaagacctcttccactaccatggttttcatttgcttacagtccagcgattcctaaagctgcatctctagccagatccctcttctgaattttccatgcatatttataactgtgcaggggacatctcacytatgtgtattataggcatctcatattcaagatatctcaaagtgaattcatcatcttgcccccaaatctatctttcttcctttattccctctcttggttagtggtagatcactaattttacattttcttaccaaagccagaatcttagatgtttcctacatctctttatctctctcattaagccttgttgatttttatctgctgcaacattatgaatgcttccactctactacacccccatgaccattgccttaatttgaagtctctttatatttcatctcatc

SEQ ID NO: 357520 - DNA, 524 bp, Homo sapiens
tggccattttatcttttgatagttcagctggatgagatccaacactatctttttttaatggcctaatttcctggcaataataaagatgaagcttttagattatagaatgcttcttcaacaactcagaaataaaagagaaacttctaataacttcattttctacagttacattcttagcattagaaagattattaaactcttgtgcatatttttaagagctttatcttttatgagtagtggtaagtagttaaattttgatttggggtattaactcttttccctatcttgtgccacaaatctatacatagtcgttggcatcatcataatagtaagtttattcttgtataatgcagtttatgaagtatgctcctatatatttttagccatcycaatctatcattcttttattcaattattcaaccaacattattaagcacctaatatatgtcgtgcacggtggtatatcaaccctacgtgccaggcattattattattattactttgtttgaagatgagaaaactaa

SEQ ID NO: 357521 - DNA, 594 bp, Homo sapiens
gtgaaatgctctattaattattactgagtttctttgatgctatagtgttatatgactgctgctaagatctcaacttactctcactttttaaaatatgtatttgcccttgtgccaatgagaatgaagaaaaggaatagaagaaagtgatcctccaaactggtactgtgctttgggtaatgaagacccagaaatctggtccactgcttctctatgaaccatagcattttaatttactgcagaaactggagataaattcttttgtgaagtagagctcttccttttcttgtccaaaatggagaaaataaatgcttatctcctttgtatcacacctttttataggccattacagacaaaattctgatttaaaaaatgactttcggtgggaggcagtggctcacgcctgtaatcccagcactttgggaggccaaggcgggccgatcacgaggtcaggagatcaagaccatcctggctaatatggtgaaaccccgtctctactaaaaatacaaaaaattagccaggcrtggtggtgggcacctgtagtcccagctactcaggaggctgaggcatgaacccgggaggtggagcttgcagtga

SEQ ID NO: 357522 - DNA, 550 bp, Homo sapiens
actgtaaacatttttaactgtagtggttaacagaattaagtacattcacagtgttgtgtaaccatcaccaccatccatctttagaacttcatcttcccaaacagaagctctatacccattaaaaatcttcattcttctctctagtaagcccttkgcaaccatcattctaccttttgtctctatgaatttgactactccaggtaccatatttaagtggaaacttacaatatttgtcctttagtgactgacttgtctttaagattcatctatgttatagtatgtgtcagaatttcccttccttccttccttccttccttccttccttccttccttccttccttctttccttccttcctctctttcatctttctttgttctcaccctgtcgcccaggctggagtgaagtggcacgatcacggctcactgcagcctcaacttcctgggctcaagcaatccctcctcttcagcctcccaagtagctaggactgcaggcataagctaccatgcccagctaattttattttatttttttagagacagggtctcgcta

SEQ ID NO: 357523 - DNA, 550 bp, Homo sapiens
actgtaaacatttttaactgtagtggttaacagaattaagtacattcacagtgttgtgtaaccatcaccaccatccatctttagaacttcatcttcccaaacagaagctctatacccattaaaaatcttcattcttctctctagtaagcccttggcaaccatcattctaccttttgtctctatgaatttgactactccaggtaccayatttaagtggaaacttacaatatttgtcctttagtgactgacttgtctttaagattcatctatgttatagtatgtgtcagaatttcccttccttccttccttccttccttccttccttccttccttccttccttctttccttccttcctctctttcatctttctttgttctcaccctgtcgcccaggctggagtgaagtggcacgatcacggctcactgcagcctcaacttcctgggctcaagcaatccctcctcttcagcctcccaagtagctaggactgcaggcataagctaccatgcccagctaattttattttatttttttagagacagggtctcgcta

SEQ ID NO: 357524 - DNA, 550 bp, Homo sapiens
actgtaaacatttttaactgtagtggttaacagaattaagtacattcacagtgttgtgtaaccatcaccaccatccatctttagaacttcatcttcccaaacagaagctctatacccattaaaaatcttcattcttctctctagtaagcccttggcaaccatcattctaccttttgtctctatgaatttgactactccaggtaccatatttaagtggaaacttacaatatttgtcctttagtgactgacttgtctttaagattcatctatgttatagtatgtgtcagaatttcccttccttccttccttccttccttccttccttccttccttccttccttcyttccttccttcctctctttcatctttctttgttctcaccctgtcgcccaggctggagtgaagtggcacgatcacggctcactgcagcctcaacttcctgggctcaagcaatccctcctcttcagcctcccaagtagctaggactgcaggcataagctaccatgcccagctaattttattttatttttttagagacagggtctcgcta

SEQ ID NO: 357525 - DNA, 585 bp, Homo sapiens
acttaccagctgttctcgaaatattacatatagaatacctggctcaagtcttccattctaaaaatttaacaagtgttagttccccactggtcccttcatccctgtccttggattatttgaattcagttgtatgttgcatctcaaggtatagaagagtggagatgtattctgtttattcgttatatgtgataaaaagtggaagaaaatcaaatatactttcctgagcacggtcataataatygcagtatgctgagaggttgaaacactgaatgtatggatatggttctatttaggataacattttaagctccctaactgctatttagctagagaaacattatccaaatcaattagtgctaaaaaataaatgatagtaaggtagcaaatgagtagtgcaacacacatttctactcattcattcctttgaaacaatatttaattactacccactatatggcaggtactgttccaggcactgttgtggatgcagcaatgaacaaatcacacaaaaccactgccctcatgaagcatacattttaatgagaaaaacagtaagcaaaataaataaatttgtgtagtgataat

SEQ ID NO: 357526 - DNA, 421 bp, Homo sapiens
tggcacagatttgaggggtggagagcacatataccccaaatcccattatcaatgaacacaagagaacttttttcctgaatcttttccagcctggatccctctgtaaaactttttgtaagtattgttcatttgacaggtaaaaaaacaggccattcattgttactttttatattttcatgagtgcaggggaagatgaacgtctttctaggttatctgccaccagaatcaccttttctatgaagtgcttgttcatattttgcttattttgagttgtatatcattttyttgataattagtaggagcttcttttttttccttttaaaataccttcattgagatattaattcacatataataccattcaaccacttaaagtgtacaattcaatggcttttagtatacttacagagttactatagat

SEQ ID NO: 357527 - DNA, 604 bp, Homo sapiens
tgagtacttgtctagtaaacacttgactataccaagttcttttcattcttgaactcccagagcttttgtcttcaatttttttcctgacccatctgctttccaagcattcataaaacttaatgtctaaataacatcataattaaactctttgcaacatctcaaagagaattctgtacccgatacaaggtattacataaacctaacacagtgttayggaatgaattgtatccttgcaaaattcatatatagaagccctaagccccagttcctctactatactaggagacaggcctttaaagaagtgattaagttaaaatgatgcccttaggctgagccctaatccaatttgattggttcttataagaagaagaaatgtggatacacagataccagggttgtactctgcacagaaacccatgtgggcatacaatgagaatgcagctgtctgcaagccaaggagagaggcatcagaagaaatcaaacccactgacaccttgatcttggacttctaacctcccgaattgtttaagcctcccagtctgtggtattttgtggtggctgtcctaacaaactaataaaataagtaatgacagaacataaattg

SEQ ID NO: 357528 - DNA, 489 bp, Homo sapiens
cagcagcagttactctcgaagaacaggtaaaactcaggggcaaactttcagggccaagctatttactcaccttccacacaaggtggctcttttactagtgcaaccctggaggtactaattcttatgttttcccagccactgtataactacctataagttgaagctataaatgcttgtatattgaggaagaagaggtggtaagttcatgaggttcaggatacttcatagcaggtaccagatcggatgatamggtgagttcagaatgctcaagaagtcctaatacttttgacaccacagcttcatgcacaaaataccagtcttgacagggaggtcctcagaagatctatgagtttttttccaatgtttcattgacattttatgtttttcaatagcatattttatgctaattcttataacaaaactatatactaatgtagggagataaactaatgtgttagtttttcaaatgcaaaaaaactttacagtcta

SEQ ID NO: 357529 - DNA, 506 bp, Homo sapiens
tatgggagaggttaacttaaatttttaagaatacttgagcttatataaaaattttttagtagaaatcctaaggaagatcaaaagcatgcacctagaaaattcagaaggaaattttctgctggtaaattttttggcagcaatgtatgtatagatggtgaatgaaagcataaatatgttaaataaacgttcctaattgattaaaatatgtatttaacgtttaatgtattcagagatgaatttgttacttttatcttataaatcactgaagttattactctttgtttagccatatatatttagtttttgaaatgaacttaaaaggttgagcttattatagtggtgcattgcattctatrcttttgtgctaaattttttttatggttttgttttagtttcttagaattttgccatagaattagaatgaaggaacattaggttattcgcaagtatagtagtagctcatctgtatagtgttttacattttatgacaagtttatatctcacct

SEQ ID NO: 357530 - DNA, 506 bp, Homo sapiens
tatgggagaggttaacttaaatttttaagaatacttgagcttatataaaaattttttagtagaaatcctaaggaagatcaaaagcatgcacctagaaaattcagaaggaaattttctgctggtaaattttttggcagcaatgtatgtatagatggtgaatgaaagcataaatatgttaaataaacgttcctaattgattaaaatatgtatttaacgtttaatgtattcagagatgaatttgttacttttatcttataaatcactgaagttattactctttgtttagccatatatatttagtttttgaaatgaacttaaaaggttgagcttattatagtggtgcattgcattctatacttttgtgctaaattttttttatggttttgttttagtttcttagaattttgccatagaattagaatgaaggaacattaggttattygcaagtatagtagtagctcatctgtatagtgttttacattttatgacaagtttatatctcacct

SEQ ID NO: 357531 - DNA, 464 bp, Homo sapiens
attttcaaagaaataaaatttacttttgcattttcctttttttcccacatgggaatgattcctttgaattaaatcgtttaaacaataaatcaytggtcttacaaaaaccaaacaatgaaaaggagcaaaaccttacaaagtaactttttttatataataattatacaaatattcctgtcattatattttagctgaaaagtttgatcccgtggttctttctcaatgtgcaataaaatcctagaatattaaaaagaaaaacaggctgggtgtggtgcctcacgcctgtaatcccagtactttgggaggctgaggcaggggatcacttgagtccaggtgtttgacaccaacctgggcaacatgacaaaactccatctgtacaaaaaatacaaaaaaccagctgggtatggtggcatgtgcctatggtcccagctactcagagggttgaggtgggaggatcacctgag

SEQ ID NO: 357532 - DNA, 542 bp, Homo sapiens
tattttttctgtccaatttttattattgagtggttaaaatgtttaaatgatagaggcagagaaataaaacaatgagtaagaagttaaaatcattgaaaaagtacatgaagactatgtgattaatagtatatttacaaagaattcaactaggataatgacggaaaggtggttctggtagcactcagagagattcagtagattggtagaggcaaaagccagagtgtactaggttcaaggtagagagggtagtaagwaagagaaataatttgcatttattaaaaggaccaggctttgcactattttactttaatctgcttgagtctcttctactggtagataaataatttctgggaagaatgtctgtgtaatgaataatgcactcacaccaaagataaaacggatagattttttttatattacaatcattttaaaaatacagagttttagaaaattatatgtttacaaaaattgaaggtcatgtagtctaagctggtggctctcatttgcatatgattttgttccctaggggacatttggagatg

SEQ ID NO: 357533 - DNA, 522 bp, Homo sapiens
gcccctagggggaggggtggccrcagtctctgctgaccagcagacttagcctctcctcctggtagttctgaggaatcttggcagcctaggtgagtgggtttccccccagtgaagcacaccctctccaccaagggacaaagtctttcattaaacgggtccttttccctgtgccacccaactgggtgagaccctccaacaggggttgtcagacaccctattcaggagtgatgctactggcatccggttggtgtcccttgaggtaagaagtcccagaaggaggagcaggcacccatctttgctcttctctagcctccttgagtggcatctccaggcatgggagtgaatcagatgaatacgcctgaagtgaacccccagcaaactgaggcagccctacagaagagggacctgactacttaaagaaaaacaagcaagcagaaactgacaacagtgtcaacaacaacaacaaaaaaggccctcagaaaaaccccatccaagagccagcagcctcaaaactgaagctag

SEQ ID NO: 357534 - DNA, 522 bp, Homo sapiens
gcccctagggggaggggtggccgcagtctctgctgaccagcagacttagcctctcctcctggtagttctgaggaatcttggcagccyaggtgagtgggtttccccccagtgaagcacaccctctccaccaagggacaaagtctttcattaaacgggtccttttccctgtgccacccaactgggtgagaccctccaacaggggttgtcagacaccctattcaggagtgatgctactggcatccggttggtgtcccttgaggtaagaagtcccagaaggaggagcaggcacccatctttgctcttctctagcctccttgagtggcatctccaggcatgggagtgaatcagatgaatacgcctgaagtgaacccccagcaaactgaggcagccctacagaagagggacctgactacttaaagaaaaacaagcaagcagaaactgacaacagtgtcaacaacaacaacaaaaaaggccctcagaaaaaccccatccaagagccagcagcctcaaaactgaagctag

SEQ ID NO: 357535 - DNA, 589 bp, Homo sapiens
aacaagggctgttaaggacctcttcaaggagaactacaaaccactgctcaaggaagtaagagaggacacaaacaaatggaaaaaattccatcttcatggataggaataatcagtatcacaaaaatggccacactgcccaaagtaatttacagattcagtgctattcccatcaaactaccattgacattcttcacagaattagcaaaaactatttaaaatttcatgtgaaattggccaggcacagtggctcatgcttgtaatcccagcactttaggaggccaaggcgggtatatcacttgaggtcaggagcttgagaccagcttggccaacatggtgaaattccatctctactaaaaatacaaaaattagccaggcgtggtggtgtgcacctataatccttgctgctggggaggctgaggcaagagaatcacttgatcccaggagktggaagttgcagtaagccaagatcatgccaccgcactctagcctgggcaacagagtcagacccatctcaaaaaaaaaaaaaaattatatggagtcaaagaagacccaatatacccaagacaatcctaagcaaaaagaacaaagc

SEQ ID NO: 357536 - DNA, 620 bp, Homo sapiens
gtggtcatgtgtaccgggagcagcaggcaagttgaaagcagtgattggtcagaagcagattcatcagggcttctaaagatcatcttgccctgcttctgacccaggtaggtcagtgcccagtccattctttgtaggtgtcaattcaaagactccccagaggagcagatggcccactgtccccaagaagctcatgcctgtgtcttattcccttagctgtcaggcatagtaggatgccagatccaggcatctggcagggatgagaaagcaggcagagagagcagggagagaaaatcaggtaatgccagggagctttcatgagggattgagtaaggaaagtaatccttctgaggtctttgccagtaaagcacagcragagtagtagaggctactaggggatggtgtaagggctttggtggagattatctgggactggggaggggtgctgtccccagtcctctgtggtttattgcctggtcccataagtgggggcagttgatgcttgcataatacacctacttgtcatgtccacctagcaaaatcttggtgtagtcaagaaacaagaagatatgatcgaggggttggaaatcaagtaagagttttctccactggttgcctagttc

SEQ ID NO: 357537 - DNA, 588 bp, Homo sapiens
agtttaacaagtgttagtgtattcttttgctttaatagtatcaaatgattgtttatggcttattcctgagtatccaagattaaatctttgcctttctgtcttacctgttgattcagaccctgaatgatcaggaagatcctgactgcttaagactaggctttggtgaaaccccatctctactaaaaacacaaaaaattagtcgggtgtggyggtgggctcctgtagtcccagctactcgggaggctgaggcaggagaatggtgtgaacctgggaggcagagcttgcagggaactgagatggtgccactgcactctagcctggacgacagagtgagactctgcctcaaaaaaaaaaaaaaaaaaaaaaaaggactatgccttatttgtgcttttatgtgcttttatctccagatttcaatggactgaaatcaaggttgaatggtctattgtttttcagactatacacagctgtatcagcacttccatagctgccatgtttacaactataacctgatccttgcaccattactatcactctgtatatgattagacccaaattcaccttgggtttgacttgtctggcttctga

SEQ ID NO: 357538 - DNA, 574 bp, Homo sapiens
aagatggggtgggaatgggggtaattatatgagaaagctgaagctaagggatgcattgctattgagcaaaaaccttattctgaatttcctgattatcgaggaacatacaagggaactaaattttggggaaaaacattcatactgatactttacacctacaaacaatttctcagcactccccaaagggagaagacttctgggaattggaattggcatgtgaaggtcatcttagttctgattagttaatatccccagagtaccagctatttctcaacactrtgccaggaactggagtgtttagagttgagtaagttatatcttcctgctctggagctcatgggccagtctcatgaagaactgggtatattcaaggctggattggaaagaaacacttatgggagacataataactgtcttcaaatacttgaaggatttttatgggtgtggaagagaaaagaattaatgtttattgaaaacttatgacatgtcaggagctttacatgggctatcttaatcctcacagcccttttaggtagttattatcctcttttaacagataaggaagttaaggctg

SEQ ID NO: 357539 - DNA, 629 bp, Homo sapiens
ccactttcaagtaataagaaacttggaaagataaaatgggaaaaaaggaaatacatttatcaaagaattggtgaatatttcttagagacttccacaaagtgttcactagatttatccttggacattttagaacaccaagaatgaggaaaagaatggtcaattatcttgctcaaggctataaatttattaagtggtaaacccagtttttgctctcaggcagtcttacttctatgcctatatgctcaatatcacaatatagatatttattggttacctagtgtattagtccgttttcatactgctatgaagaaatacccaagactgggtaatttatgaaaaaaaaaaaaaaagagatttaatggactcacagttccacatggctagggagacctcacaatcatggyggaaggcaaaggaggagcaaaggcacattttacatggaggcaggtaagagcacatgtgcaaggcagctgccctttataaaaccatcagatctcatgagacttattcactatcacaagaacagcatatgaaaacccacccccatgattcaattgcttctcaccaggtccctcccactatacatggggattatgggagctacaattcaagatgagatttgggtgggg

SEQ ID NO: 357540 - DNA, 576 bp, Homo sapiens
aaaaattaaggattattaatgatcataataaytagctcttttatatctaagaatcacaaaatgctgtacaagccacaattatcacagctcccctctgaggaagagatttgtatcttacagttcctcatttaacagtgggatgaagcaatgggcatcagggaaggcagagggaggtggagtactgcctcctctgtcatctgtcctgtaagtggtgaaactagaaagaggccccagaagggctgactcttatcaaggtgagtaccttcatcccaagccatcacgcaaacagatagtccatcccagaacaagtgattcatctcattctggcctgttggcatttaaactgccacaatgcaataaaattatatatcagcaagcattttttaaaacatgtagtagaaataaaagatatagcaccaccttcaaggaacttaaaacctaattgagaagacaaaacaagctcccattaaactagagaagaatatgaaaattacacattaactagtactagatggtatgatgctgactatgtatgctgtgagggaaaaattttaattgaaagatcattgcatgtaa

SEQ ID NO: 357541 - DNA, 642 bp, Homo sapiens
ggaggagacaaaagtgcagagaagccattgaatcatttaatagtcttcataaattatgaaccaaagtttcatatagtctgaaatgtaaggaaggaagtcactgacaaccatggataaaatccaattccttacaataaaacagcactgaaatttgcaaatgatcaaccagattgagaaagccctgatggatataatgggctagaatgaccaattacctcaatgtacttccaggagaagcagactcaagtgtttaggtgtcataaycattagtaacttaggctgagcaggatgattatatctacaataatacattacaccagctctttttccccaggggcatcaatatgctaatgagaaaactaatgaacaaacttcatttaggtttaatgtctctaagaatgaaatttcacagatttcaagttttcttatgaacggtttaataaaaatatatttccaaggtacccttccaaactttactgaggaggcagtccccaatctgtaggaaaaccatcataagacccgggagacaaatgtaaaaatttttcccacctgcatttttagagaagaaactaaccaattctttacagctctctcattgccctagaattgaagcaactgcttctggcagggcttatgagcagc

SEQ ID NO: 357542 - DNA, 579 bp, Homo sapiens
tgatggatataatgggctagaatgaccaattacctcaatgtacttccaggagaagcagactcaagtgtttaggtgtcataatcattagtaacttaggctgagcaggatgattatatctacartaatacattacaccagctctttttccccaggggcatcaatatgctaatgagaaaactaatgaacaaacttcatttaggtttaatgtctctaagaatgaaatttcacagatttcaagttttcttatgaacggtttaataaaaatatatttccaaggtacccttccaaactttactgaggaggcagtccccaatctgtaggaaaaccatcataagacccgggagacaaatgtaaaaatttttcccacctgcatttttagagaagaaactaaccaattctttacagctctctcattgccctagaattgaagcaactgcttctggcagggcttatgagcagctcaccatggactgtcacatcccatggagaaattaattggttttcatcactttatttcaaagtttctgcttaatcccaaactagagattgtatcttttataaagcaaatggcttagagtt

SEQ ID NO: 357543 - DNA, 579 bp, Homo sapiens
tgatggatataatgggctagaatgaccaattacctcaatgtacttccaggagaagcagactcaagtgtttaggtgtcataatcattagtaacttaggctgagcaggatgattatatctacaataatacattacaccagctctttttccccaggggcatcaatatgctaatgagaaaactaatgaacaaacttcatttaggtttaatgtctctaagaatgaaatttcacagatttcaagttttcttatgaacrgtttaataaaaatatatttccaaggtacccttccaaactttactgaggaggcagtccccaatctgtaggaaaaccatcataagacccgggagacaaatgtaaaaatttttcccacctgcatttttagagaagaaactaaccaattctttacagctctctcattgccctagaattgaagcaactgcttctggcagggcttatgagcagctcaccatggactgtcacatcccatggagaaattaattggttttcatcactttatttcaaagtttctgcttaatcccaaactagagattgtatcttttataaagcaaatggcttagagtt

SEQ ID NO: 357544 - DNA, 543 bp, Homo sapiens
aaattctccagcagactgccttaggattgtgtataatcagctctcccaagtttctagcctgctgtcctacactgcagattttagactctccagcttccatattcacatcagccaattccttgtaataaatctctttctataaatacacatgctgttggttctgtttctgagaaatcctactaatatggtgggtgatcttaaatagtcttccctctctgacactgagtggagcttcaaggaggacagcaraagaaagagggcttgactccagtatccaaagtgctgagggctcaccctaggacctattcactgggcatattgctgtagctttacttcttcactcccccttcccaccaggtcccttggatgccaggttctaaagcactcccactgctcactcttcctggaaaagggcattgtggtggaatgttgaaggagcttggcagccaaatcagcatatccagtgtcgtgactcaaccccttcacagctcgcaaccttagtttatcaaagtcccttcccttctctggaattccattgtatct

SEQ ID NO: 357545 - DNA, 586 bp, Homo sapiens
attcacatcagccaattccttgtaataaatctctttctataaatacacatgctgttggttctgtttctgagaaatcctactaatatggtgggtgatcttaaatagtcttccctctctgacactgagtggagcttcaaggaggacagcagaagaaagagggcttgactccagtatccaaagtgctgagggctcaccctaggacctattcactgggcatattgctgtagctttacttcttcactcccccttcccaccaggtcccttggatgccaggttctaaagcactcccactgctcactcttcctggaaaagggcattgtggtggaatgttgaaggagcttggcagccaaatcagcatatccagtgtcgtgactcaaccccttcacagctcgcaaccttagtttatcaaagtcccttcccttctctggaattccattgtatcygtatgatgagaaggcttgattaggtgatgtctaaggtctctactagaggtgagcgccttttccccactcctggcctcttttcactcctttcttctccttgcccctgagatggtagaaggacttaactggttggtaaattttgt

SEQ ID NO: 357546 - DNA, 595 bp, Homo sapiens
aggatttcactgctgcaaactccatctctagaagagtgtctgatacatagtcggttatcaataaacatttgttaaatgaagaaaccatagaatgcatgaacctttctaacccaaggtctatggtagtcctctaaacttttcaaatgtaaacacttctgccagggtttcttccctgtgtctcccacttgtgaagacccaggggaaataccaatcccttattctccactcggtctctttccaaccctccatccctcctctttgytcttaacaacctctgttctttgccctctcacttctctctctcattatgttggttcatagaaacatccaaaatggccaatttgacaccagccccatgtgtcttcagacaagagcctgcctctaactgaggccccaggagcagaatgcaagaaagctaacgaaacccccaaggctaaatggctagaaaggtacccagatgttccagaaatctatgaacagattcttactttccacaaggcaccacttcttggatcgaggaattccctaaactatgccctgttgtgtaaaataaaacttccttccctttgtcttaatcttacctttttcaagcctt

SEQ ID NO: 357547 - DNA, 595 bp, Homo sapiens
aggatttcactgctgcaaactccatctctagaagagtgtctgatacatagtcggttatcaataaacatttgttaaatgaagaaaccatagaatgcatgaacctttctaacccaaggtctatggtagtcctctaaacttttcaaatgtaaacacttctgccagggtttcttccctgtgtctcccacttgtgaagacccaggggaaataccaatcccttattctccactcggtctctttccaaccctccatccctcctctttgctcttaacaacctctrttctttgccctctcacttctctctctcattatgttggttcatagaaacatccaaaatggccaatttgacaccagccccatgtgtcttcagacaagagcctgcctctaactgaggccccaggagcagaatgcaagaaagctaacgaaacccccaaggctaaatggctagaaaggtacccagatgttccagaaatctatgaacagattcttactttccacaaggcaccacttcttggatcgaggaattccctaaactatgccctgttgtgtaaaataaaacttccttccctttgtcttaatcttacctttttcaagcctt

SEQ ID NO: 357548 - DNA, 602 bp, Homo sapiens
agttattccatggaaatacaatgctttccacctactactgtagttcaataacgtttccacctraaaaaatatcatccatgcccagatgaaaaggaagagtatctgtcactgctacatagttccttaatttgactgtaacacatttgtttcaagtctttggattcaaacaaccggattgtattaaaattgacaataaataaatgttgattaaatactaagacttttctcatctgtgcttcatttcacttcttacatacagatggtcatcctagaaaccaaaccaaacagcgatttcccaatattctatttttcacaatgaagaatagataaagcattcttaaaactcaataagacaaactacttcattttaaaatgatcaaaattccatcacactggtattggcaatgatttttttgatatgacaccaaaatcacacacaataatgtggagctgtcagctccatacattttattgtccctgaagcccttagagggagacaacatatggaggtagaaggcgatatttgtcttggtttaacaaaaactttttagtgttagttttaatttttaacaaaaaaagttttttaaaaaaatttaaaacag

SEQ ID NO: 357549 - DNA, 602 bp, Homo sapiens
agttattccatggaaatacaatgctttccacctactactgtagttcaataacgtttccacctgaaaaaatatcatccatgcccagatgaaaaggaagagtatctgtcactgctacatagttccttaatttgactgtaacacatttgtttcaagtctttggattcaaacaaccggattgtattaaaattgacaataaataaatgttgattaaatactaagacttttctcatctstgcttcatttcacttcttacatacagatggtcatcctagaaaccaaaccaaacagcgatttcccaatattctatttttcacaatgaagaatagataaagcattcttaaaactcaataagacaaactacttcattttaaaatgatcaaaattccatcacactggtattggcaatgatttttttgatatgacaccaaaatcacacacaataatgtggagctgtcagctccatacattttattgtccctgaagcccttagagggagacaacatatggaggtagaaggcgatatttgtcttggtttaacaaaaactttttagtgttagttttaatttttaacaaaaaaagttttttaaaaaaatttaaaacag

SEQ ID NO: 357550 - DNA, 602 bp, Homo sapiens
agttattccatggaaatacaatgctttccacctactactgtagttcaataacgtttccacctgaaaaaatatcatccatgcccagatgaaaaggaagagtatctgtcactgctacatagttccttaatttgactgtaacacatttgtttcaagtctttggattcaaacaaccggattgtattaaaattgacaataaataaatgttgattaaatactaagacttttctcatctgtgcttcatttcacttcttacatacagatggtcatcctagaaaccaamccaaacagcgatttcccaatattctatttttcacaatgaagaatagataaagcattcttaaaactcaataagacaaactacttcattttaaaatgatcaaaattccatcacactggtattggcaatgatttttttgatatgacaccaaaatcacacacaataatgtggagctgtcagctccatacattttattgtccctgaagcccttagagggagacaacatatggaggtagaaggcgatatttgtcttggtttaacaaaaactttttagtgttagttttaatttttaacaaaaaaagttttttaaaaaaatttaaaacag

SEQ ID NO: 357551 - DNA, 565 bp, Homo sapiens
aacttgcttaagacaaccagcttttgggtgaagagtgagggaggacattgggctcaacatcaatagtcaattaaaaaataaggcacatgattttgagtgattttccttggttcctgatgaatttacaggatgtttttgacactgtttagttgttttttttaggaattaatgctgagtttgagatgactaaataattagcttccataaaacgttcatgtggaacaattatgtgcagagatgttttcaaagtacagaaaatactaatttcctgaagtgaaatctaagaaatgttacaactgatgctaacatacatgtggagaagaaaaaggcttttggaaaatgttcaragcttgtgaacatgcagtgtttaaagcctgtgattgttcattgtactatccttcagcaggtactttgcagaaaatagttgaatctttcatatgcattgaaccagtggtgtcaatggagaacttcattcactcttgtgacttaactatggccagttttgtgattttgttaatcagatctagaagctgaatatccttacttgttgtacagtgcagcagtt

SEQ ID NO: 357552 - DNA, 458 bp, Homo sapiens
gagttccaggtattttcagatctggtggattataccagagtcattctctcacctgtggtctctctgtctcacctccttttcttcttatctgttgggaaagacacagggagagacaggccaaagttgcacaagaagtcttgggaaaggttttggaagagttttgagccatggctccctaggttcagccagttctggggaatgctatgtttcggaaagcctttgtttttgtagacwtcaagtgctgattctcagcagaggcagggctacatcccctctaatgtctttcctttgccaggatgggcaaaggctggctcagtcatcccaggctggccttctggctatgcctccaagctctggatgtcccctctggctgggtgaatggcaaaggtcagtgtggctcttcctgctggccctggtgcagcaactgtcctgggtacaggctggatggcacatgccac

SEQ ID NO: 357553 - DNA, 566 bp, Homo sapiens
gggcgcgggctgcctccttgttctggtgtgatccgaatgtaacggagcggactttgggatccagaacccyggactgaggttgtgcttggcttgaggggcgggctggtaggtcacgccttggggcgtcgttggtcctctccaggcgtgtcacattctgccacgacatggtgccttggtactccccaaaagtcatgccttgatttttcttactaataatagtttacactgttttaccgcttcactgcttcacgtaagtaaagtaattatttcaaaaggaaatgttggtcatttataaaatggtggtaaagatggtacagcggattaatgtgaggattaaatgagatgatacatgaaagtgcttaaaacagtacagggtacttaccgttattattgttaagtagaaagtgagttctgggaaacagtgggtgtatggtccttcacagcaggttttggaaacgtctgatttccagcctaccctccttcctcctgttgccgtctgttgcctgattgttctcactggctgaaaggagataatccctgccactccattcatcactgaaaattct

SEQ ID NO: 357554 - DNA, 548 bp, Homo sapiens
tcataagaggtttctaacaaaactggtctggtttcatgtcctcatttccagtcgtgttcattcaccagatcacattaccacttggtgtttttagggtgatggagacttcacaatacataacttgcttaaatcatgactaaggttatcttggcatacttcccatcattgggtaataccaaattctctgtgatctttctttttttacataatcagtaaatatttattttgctaactggtgtggaggatagaaatgaggcataaagcctgtctcctgcccgtaagggacaaataatctatacataaccattttggccttcatctctttttcatctactttccccatttcccccaagacaagcccactgataatctgtacctacagcttagaattaggtcaggtcctyaaacttggtcacccattcttggtttgtaggttccagaatttcactggattccttttgctgacagttgttgtgcctctggttatcccccaagtctctactccctttatcctgtgttgaacttgtctatgagactgagcttatgct

SEQ ID NO: 357555 - DNA, 640 bp, Homo sapiens
tcttgggaagctggcatgaaggcacaatgacaatgtgtcattaagatctgtatatctacctgcctatctttgatcatctcaaatttgctttgtccctgaatgccccatatgaaagaggttcccttggttattttttcacagcattgtgttccttacttatttactttttcagttttttctagtgtgccctagaatgaatgttgccaggaggcaaggacttgttctgcctccttgttgaatgcccagaatgtacaacagtttcagatacacattcaatgctttaaaaatatttgttgaatgaatgaatgccctgagctaagtttatttctttaaacctgatctattctaccttctgaattcttgaattctgttagtgctaacaccatccatttggtctgctaagttggatacttggagtcaattttgatgaagacatgagtacaggtcttgaccattcttaaactttacatgaggattgtattcccactgaagccttgttttttactccattatgccaagttaacacaatgtaacgtgttgcattttcaatatgaaracagaaaacatcaaacatgaacagtgaggctaaaggaatgagaagttattgggagccagggccatgggcaaattgtaaactgtg

SEQ ID NO: 357556 - DNA, 612 bp, Homo sapiens
tatagatacatctgtactccttgtgactgtccatgcttcatgcccaagacaaggaatactggattaatttaggaatccatcatatttttaaagccgtgacaactagctgtatcataaatatagccgatcacccagcagcataaataatggaaacactgccttggggccaataaaagtgactgatgctatgaattgctgttaagcctggttatccttgttccatgtggatctctgtagcctgtctttgtgcttcagattggcactgcagaagcagcatctgtgaaaacatcagacatcgaacagccactgcatttatccagtctgaatttgcaaatgagggggaaggtatctgatccagtgtaaactaggcccacacagagagatgtgtccttatcatattcatattaattattgaggagygcttaaaatgtgtggaataataagaattaagtctttctgtttttacttttattttaaataatagaaatttttaaaataacttgccctttacttggatgtcatagataaggatgtctttttttttctaatgttctataaacattagaaaatgtctttagatagttaatttggctccttacatactaaaaaggg

SEQ ID NO: 357557 - DNA, 566 bp, Homo sapiens
aacattttttcaagatccatatatatttagatgtacaaacaaacaaaaagaaaatataattaatatcttcattgttttagctttctgaaactcaacctctgtatggaacttctacttgatgtcataacatgtgaatttgatgtcagaatgtataatttttgtcacttctgggtaaatccaggtgcttcactgtcttctcagttatttcaactttagtttgrtgaaatcagcatttttcccatctcccttcttttccttacgttcacgactacattttgtgtcgtttgtccacaatcttggtttttttgaaaggcgggggaaaagacatgtatttcatcctctgttaaaggtaggcatttgctgagaattaactgctttggtcactgaatgggtatgtccaataaaatgtttgtatctccattggatgctctgttttatgatccacagagctttacagctcttgtatacacccctcaggatacatcatctctctcttagctagcctttggctggaactttcttagagacacaggaaagtctagctgtctgtgaaattatttcaacac

SEQ ID NO: 357558 - DNA, 566 bp, Homo sapiens
aacattttttcaagatccatatatatttagatgtacaaacaaacaaaaagaaaatataattaatatcttcattgttttagctttctgaaactcaacctctgtatggaacttctacttgatgtcataacatgtgaatttgatgtcagaatgtataatttttgtcacttctgggtaaatccaggtgcttcactgtcttctcagttatttcaactttagtttgatgaaatcagcatttttcccatctcccttcttttccttacgttcacgactacattttgtgtsgtttgtccacaatcttggtttttttgaaaggcgggggaaaagacatgtatttcatcctctgttaaaggtaggcatttgctgagaattaactgctttggtcactgaatgggtatgtccaataaaatgtttgtatctccattggatgctctgttttatgatccacagagctttacagctcttgtatacacccctcaggatacatcatctctctcttagctagcctttggctggaactttcttagagacacaggaaagtctagctgtctgtgaaattatttcaacac

SEQ ID NO: 357559 - DNA, 526 bp, Homo sapiens
tagaattagacgtggagcctgaagacctgactaaattgctgcaatctcatgataaaactttaatggatgacgagttgctttttatgaatgaccaaagaaagtggtttcttgakatggaatctactcctggtaaagattatgtaaacattgtcaaagtgacaacaaaggatttagcatattacaacaacttagttcgtaaagtagcagcaggttttgtgagaattgactccaattttgaaaaaagtcctactgtggataaaatgtcaacaaacagcatcacatgctacagagaaatctcttatgaaaagaccaatgaatagaggcagcaaacttcattgtcttattttaagaaattgccacagtcaccccagctttcatcaatcaccacccagatcagtcagcagctatcaacatcgaggcaactctctccataaggaaaaattacaattcattgaaagttcagatgatcattaacaataaagcattttttagttaaaatatgtatattgtttttctagacataatg

SEQ ID NO: 357560 - DNA, 526 bp, Homo sapiens
tagaattagacgtggagcctgaagacctgactaaattgctgcaatctcatgataaaactttaatggatgacgagttgctttttatgaatgaccaaagaaagtggtttcttgatatggaatctactcctggtaaagattatgtaaacattgtcaaagtgacaacaaaggatttagcatrttacaacaacttagttcgtaaagtagcagcaggttttgtgagaattgactccaattttgaaaaaagtcctactgtggataaaatgtcaacaaacagcatcacatgctacagagaaatctcttatgaaaagaccaatgaatagaggcagcaaacttcattgtcttattttaagaaattgccacagtcaccccagctttcatcaatcaccacccagatcagtcagcagctatcaacatcgaggcaactctctccataaggaaaaattacaattcattgaaagttcagatgatcattaacaataaagcattttttagttaaaatatgtatattgtttttctagacataatg

SEQ ID NO: 357561 - DNA, 619 bp, Homo sapiens
aaatgtcaacaaacagcatcacatgctacagagaaatctcttatgaaaagaccaatgaatagaggcagcaaacttcattgtcttattttaagaaattgccacagtcaccccagctttcatcaatcaccacccagatcagtcagcagctatcaacatcgaggcaactctctccataaggaaaaattacaattcattgaaagttcagatgatcattaacaataaagcattttttagttaaaatatgtatattgtttttstagacataatgctaatgcacacttaatagattacagtattatgaaaacaacttttatattcactgagaaaccaaaaaaaaaaatagtgtgactagctttatttcaatatttgctttattgtgggtggtatggaaccaaatccacaatatctccaaggtatgcccgtaatagtatattgtattcagaatttttgattaatgaatagattgcagctgctcttgccatgggatagggaaatgggtaattatgggagatgatgtatatgtgaatttgttttactatagtaactattttattatatattacatatttattatgtgtatattataagatcatgttgtataccttaaatatacactaaa

SEQ ID NO: 357562 - DNA, 630 bp, Homo sapiens
gcattttttagttaaaatatgtatattgtttttctagacataatgctaatgcacacttaatagattacartattatgaaaacaacttttatattcactgagaaaccaaaaaaaaaaatagtgtgactagctttatttcaatatttgctttattgtgggtggtatggaaccaaatccacaatatctccaaggtatgcccgtaatagtatattgtattcagaatttttgattaatgaatagattgcagctgctcttgccatgggatagggaaatgggtaattatgggagatgatgtatatgtgaatttgttttactatagtaactattttattatatattacatatttattatgtgtatattataagatcatgttgtataccttaaatatacactaaatatacacaataaaatgtattttttaaagttgtatcattaactcttttatgagtagcacataagggacttaataataaatgtgatatcagtgcctggcgtaaaataagtgttcaatgcatctttaccagataatactgtaggaaagcatatggagactaagaaagttcaattccttcattaaaagaatgtgttgaccatctactatgagccattgtttagataatatacaaaata

SEQ ID NO: 357563 - DNA, 566 bp, Homo sapiens
agaccagtctgggcaacatggcgaaactctgtctctacaaatacaaaagattagcatggcatggtagcacaagcctgtagtcccagttacccaggaggctgaggtgggaggatcacttgatcccagtggtcgaggctgcagtgagccatgatcacaccactgcactccagattcggcaacagagcaagaccctgtctcaagcaaacaaatttagatcctaacccattaagagttctcaataaagtaaagaaatttagaatagagttatatgtttattttatcacaccacacatttaatttctgaaaatatctaggaatgactagaactatgatttatttaagaaaataatatcccatttgactgtgtcctgctatatatgggacttagtcttctcctaaaggtggaaatgatagaaaaagcagtttatttgctgtgccttttactagccttgagggctttgtcttcattcataagcacccatgktttaaggaacagagccagatagaattggaaattgcacacacataggtagactttcagtgtattaaggaatgattttcacttg

SEQ ID NO: 357564 - DNA, 566 bp, Homo sapiens
agaccagtctgggcaacatggcgaaactctgtctctacaaatacaaaagattagcatggcatggtagcacaagcctgtagtcccagttacccaggaggctgaggtgggaggatcacttgatcccagtggtcgaggctgcagtgagccatgatcacaccactgcactccagattcggcaacagagcaagaccctgtctcaagcaaacaaatttagatcctaacccattaagagttctcaataaagtaaagaaatttagaatagagttatatgtttattttatcacaccacacatttaatttctgaaaatatctaggaatgactagaactatgatttatttaagaaaataatatcccatttgactgtgtcctgctatatatgggacttagtcttctcctaaaggtggaaatgatagaaaaagcagtttatttgctgtgccttttactagccttgagggctttgtcttcattcataagcacccatggtttaaggaacagagccagatagaattggaaattgcacacacataggtmgactttcagtgtattaaggaatgattttcacttg

SEQ ID NO: 357565 - DNA, 571 bp, Homo sapiens
gtcagtattagacagatcaaagagacagaaaattgacaagatattcaggcttgaactcagttctggaccaagtggacctaacagacatctacagaactcttcaccccaaatcaacagaatatatgttcttctcagcaccacatcacatttattctaaaatcaaccacataatttcaagtaaaaaacactcctcagcaaatgcaaaagaatggraatgataacaaacagtctctcagaccacagtgcaatcaaattagaagtcaggattaagaaactcactgaaaaccgcacaactacatggaaactgaacaacctgctcctgaatgactattgggtgaataacgaaatgagggcagaaataaagaagttctttgaaaccaatgagaatgaagacacaatataccagagtctcttggacacaattaaatcagtgtttagagggaaatttatagcactaaatgcccacagcaggcaatgggaaagatctgaaatcaacaccctaacatcacaattaaaagaactagagaagcaacagcaaacaaattcaaaggctagcagaagacaagaaata

SEQ ID NO: 357566 - DNA, 571 bp, Homo sapiens
gtcagtattagacagatcaaagagacagaaaattgacaagatattcaggcttgaactcagttctggaccaagtggacctaacagacatctacagaactcttcaccccaaatcaacagaatatatgttcttctcagcaccacatcacatttattctaaaatcaaccacataatttcaagtaaaaaacactcctcagcaaatgcaaaagaatgggaatgataacaaacagtctctcagaccacagtgcaatcaaattagaagtcaggattaagaaactcactgaaaaccgcacaactacatggaaactgaacaacctgctcctgaatgactattgggtgaataacgaaatgagggcagaaataaagaagttctttgaaaccaatgagaatgaagacacaatataccagagtctcttggacacaattaaakcagtgtttagagggaaatttatagcactaaatgcccacagcaggcaatgggaaagatctgaaatcaacaccctaacatcacaattaaaagaactagagaagcaacagcaaacaaattcaaaggctagcagaagacaagaaata

SEQ ID NO: 357567 - DNA, 620 bp, Homo sapiens
attttgtttttaaatgatgcttaataattgtacctgtttatgcagtacacttaagtttcaacacatatatacattgcataatgatcaaatcagggaaatgaatgtatctatcaactcaaatacttgccatttctgatgaaaatactcaccactaaagtatataaaattaaagatatcatttggataaaattctctcttctagcaattttgaaatacacaatagattattaaccattatcttattttagaagttatcttwtatttatccaatgaccatttttttcaatttgtttctttttaattggttattttgtatctttcttcctcactcaaatatctgctgtgatttggtgtctatccataggttacagcaagtcactgaaaagctgattggaagatccatatttgttgatagtaggtctgattgttggttgatcagggagccattttattggagaaacctgaatgatattgggtggaatatttttgaggggactaatcagttactccagaggagaattctgtaatcgtcttacgcttcagaaccagtattctgtagattgaacaaaaggagaatggaggtcatacttatttatatgcagagtgttagttaatcccta

SEQ ID NO: 357568 - DNA, 539 bp, Homo sapiens
tctagcaattttgaaatacacaatagattattaaccattatcttattttagaagttatcttatatttatccaatgaccatttttttcaatttgtttctttttaattggttattttgtatctttcttcctcactcaaatatctgctgtgatttggtgtctatccataggttacagcaagtcactgaaaagctgattggaagatccatatttgttgatagtaggtctgattgttggttgatcagggagccattttattggagaaacctgaatgatattgggtgraatatttttgaggggactaatcagttactccagaggagaattctgtaatcgtcttacgcttcagaaccagtattctgtagattgaacaaaaggagaatggaggtcatacttatttatatgcagagtgttagttaatccctaattgtcagtgaactctgtcactctgtcctccaatgctgggcttccatatatcttcgaagactttccagttatttttctccagggaattctcaccagcctggaaagagtaggtatgt

SEQ ID NO: 357569 - DNA, 588 bp, Homo sapiens
  misc_feature (1)...(588): n = A,T,C or G
taccactggcttggctttgaaattggagaaaggaaccacagacaaggatgcagggtgtctctaggaagctcagaaaggcaagaaaacagatgctccctgaacctgcagagagaatgtagttctgacaatatcttgattntagcctgtaagaaccatttcagacttctgacctccgtaactgtaacataataaatttatgttgttttaagccaccaagtttgtgataatttgttacttatgaaataagaaactaatcagtaatattaactttttaaaaggctgtcataaaatataatgtatatccacacaattctgtatttgcttaaaaatctatactcaaccaaatacamacatatatctacaaacacctgcatacacgtaaaataagaaagtcagaattttattcatcgaaataataatgtactgaactctgagtttatgcagggttacatggaattttaatttcattcttttttctttgtaattttagatagccgataatgaacaattagtttttcaattgaaatctaatgaaaaaaatttaatcacggttcttaccttaaaacataaaggtgttcctcgctaata

SEQ ID NO: 357570 - DNA, 588 bp, Homo sapiens
  misc_feature (1)...(588): n = A,T,C or G
taccactggcttggctttgaaattggagaaaggaaccacagacaaggatgcagggtgtctctaggaagctcagaaaggcaagaaaacagatgctccctgaacctgcagagagaatgtagttctgacaatatcttgattntagcctgtaagaaccatttcagacttctgacctccgtaactgtaacataataaatttatgttgttttaagccaccaagtttgtgataatttgttacttatgaaataagaaactaatcagtaatattaactttttaaaaggctgtcataaaatataatgtatatccacacaattctgtatttgcttaaaaatctatactcaaccaaatacacacatatatctacaaacacctgcatacacgtaaaataagaaagtcagaattttattcatcgaaataataatgtactgaactctgagtttatgcagggttacatggaattttaatttcattcttttttctttgtaattttagatagccgataatgaacaattagtttttcaattgaaatctaatgaaaaaaatttmatcacggttcttaccttaaaacataaaggtgttcctcgctaata

SEQ ID NO: 357571 - DNA, 567 bp, Homo sapiens
cccctttactttccctgttgtgtgtgtattgtggggtgtgtgtgygtgtgtgcgttttccaaaaaaacttcagatagaacagtgccactgactgtctccaaccttaatagtgcttttttttctgccattggatgagatgggcttttactcttaggattattattttggaaagtaggtaatattcctttagaaggaaagaacaaaagaaagacaaatcaaatcaaacacaaacctctgggctctattatggcattaggctttatgtcccagagcaggtcggagcatacctttgatatatgaaaatttgtctttcctgggtacatttcatttagtgaaatgctgtttgagagcaactttattaaagatgcaagacactggtacaatgccgctttattttgtgtcactgctttcatgtaaaatcctctctccaaacacgttggagaattaaataatacaagacaggagagagtgttctttataaattatacaacactatggcataaagaaaaatttaaagaatcacttagccaatagctaaggcttagagaaatggaaagaaataggagg

SEQ ID NO: 357572 - DNA, 567 bp, Homo sapiens
cccctttactttccctgttgtgtgtgtattgtggggtgtgtgtgcgtgtgtgcgttttccaaaaaaacttcagatagaacagtgccactgactgtctccaaccttaatagtgcttttttttctgccattggatgagatgggcttttactcttaggattattattttggaaagtaggtaatattcctttagaaggaaakaacaaaagaaagacaaatcaaatcaaacacaaacctctgggctctattatggcattaggctttatgtcccagagcaggtcggagcatacctttgatatatgaaaatttgtctttcctgggtacatttcatttagtgaaatgctgtttgagagcaactttattaaagatgcaagacactggtacaatgccgctttattttgtgtcactgctttcatgtaaaatcctctctccaaacacgttggagaattaaataatacaagacaggagagagtgttctttataaattatacaacactatggcataaagaaaaatttaaagaatcacttagccaatagctaaggcttagagaaatggaaagaaataggagg

SEQ ID NO: 357573 - DNA, 574 bp, Homo sapiens
attctatttctatgctcttacattaacaattgtggagcattgggcaatacacttcttcwtcagatatactgaggtgatatcatctttcatctcaggacctggaataaacctgaacaggtggcatgacaaatactgtactcattttcctctttttccttgcaggtaacaaccccagtgttgttctggacaagaatatgctcactttcaaatcatggattactctatgacaataaaaaaaattctggtttgcagtttgccagcctctcttgccccagggaacatgcataagtcacagtcttgccccataagactaaactgaactctgtgagcactgccctcctttatgtttttgttagtcctgctctaaatgtggctgtgatggctagagctgcaacattcattttacaaccatgttcctgcaagcagaagagtgaaggcaatatgctaaagactgaaaataaagaaaggatctggacttcaaagatgtcatcaacagctgccaacctctaaatatttgatatgaaaaaaattcttatttaaggcactgttagtttggtttttgtggtaacttaca

SEQ ID NO: 357574 - DNA, 631 bp, Homo sapiens
  misc_feature (1)...(631): n = A,T,C or G
ctttactcctcagttaaacataagggatgcttccaaatgtgagtgacaaagctgccaaaatggtgatgaatattgctttcagagctgataaaacaatctcttgatatcatcagccaacaaatcactgaacaccttgaatgcaatttgtattatgtagggttttatttgtttcaatttacaatgaattgagtttttcagagggagaatgaaagtaagaattggtttattatgaaagaaccatgctgggaacagaaaagaaaagagagagtcttacccaatctttggtctttactgtacgctcattggagaatgacagtttgttctttatatagtatttagcagaacaggattagagatgaggggtccctggtctgtggcctgttaggaagtgggctgcacagcaggaggtgagccgccgagntgtagcacagcttcatctgtatttatagccactccctattgcttgcattactgcctaagcacagcctcctgtcagatcagtggtgacattagattctcataagagtacgaaccctactgtgaactgcacrtgcgaggaatgtgcactaggtctcataaggagctaggttgtgagctccttatgagaatctaatgtctggtgatatgtcac

SEQ ID NO: 357575 - DNA, 548 bp, Homo sapiens
gctcttcctcacacacccttagataagctaacttcatcaaacaacacayaaccctccattctgaagagatggaaacacttcctagaagtgttttttgtttgcttatttctttgcattttgtttggattttctccaacactctaccctttcctacatgaaaatcagcaaagcagcctaaatactctataaccttatttttgaaaacgcatgcgcttgaaatctagggtatcattctcaaaagcgtgttgaacaccctacaaggataaagtttttgtctgttttctgcagtaatatcccaacatccatctgtgaccatgtagtttttcttcatggttcttgagaagcatttgggaaatctgacttcatttctgaataaagcagcccccaaggaagtcacttgcatgtgacatggcagaaaggcaccagccttgcaaacacactagagctgctgcgtcctctggaagtttcccctgtggcatttggttaactttttgtgagcttctcccatttgtcagcttttaagaaatatgtttctggctatcaagccc

SEQ ID NO: 357576 - DNA, 548 bp, Homo sapiens
gctcttcctcacacacccttagataagctaacttcatcaaacaacacataaccctccattctgaagagatggaaacacttcctagaagtgttttttgtttgcttatttctttgcattttgtttggattttctccaacactctaccctttcctacatgaaaatcagcaaagcagcctaaatactctataaccttatttttgaaaacgcatgcgcttgaaatctagggtatcattctcaaaagygtgttgaacaccctacaaggataaagtttttgtctgttttctgcagtaatatcccaacatccatctgtgaccatgtagtttttcttcatggttcttgagaagcatttgggaaatctgacttcatttctgaataaagcagcccccaaggaagtcacttgcatgtgacatggcagaaaggcaccagccttgcaaacacactagagctgctgcgtcctctggaagtttcccctgtggcatttggttaactttttgtgagcttctcccatttgtcagcttttaagaaatatgtttctggctatcaagccc

SEQ ID NO: 357577 - DNA, 548 bp, Homo sapiens
gctcttcctcacacacccttagataagctaacttcatcaaacaacacataaccctccattctgaagagatggaaacacttcctagaagtgttttttgtttgcttatttctttgcattttgtttggattttctccaacactctaccctttcctacatgaaaatcagcaaagcagcctaaatactctataaccttatttttgaaaacgcatgcgcttgaaatctagggtatcattctcaaaagcgtgttgaacacsctacaaggataaagtttttgtctgttttctgcagtaatatcccaacatccatctgtgaccatgtagtttttcttcatggttcttgagaagcatttgggaaatctgacttcatttctgaataaagcagcccccaaggaagtcacttgcatgtgacatggcagaaaggcaccagccttgcaaacacactagagctgctgcgtcctctggaagtttcccctgtggcatttggttaactttttgtgagcttctcccatttgtcagcttttaagaaatatgtttctggctatcaagccc

SEQ ID NO: 357578 - DNA, 584 bp, Homo sapiens
ttcattcggtggcattacagtgctactycatatatatgccgtgggcatggagagtaagaaaaatggcatttagatagggcgggagtgcggggaggtgagggtagggctaacctgctctcttataggagggttttcttttcctttcagataacatgcaagtcttaacctgaatttctcttttttgaaatacaccctttttaattgatggactccatagatgagcttcagcatgtgaaaattcattctactcttcctagaacctagactaatgcctactctttccccagagacctgttttatgtactccaaaggactgcagatttgtagaccatctgccacaagagaaacgtagcttccaccaagatccactttcttcattttcccatcctggagcccctcctccttgcggcagccaccccagcgagccagaattgtcacactgacttctcagtgaaagagaaagggctttgagttaggctgtgaggagaagcacgccataaagttaccagcttaattaagccattacagtttttaggggtttttaaatacaggcaatttgaatgtataattgagcctgtgcacag

SEQ ID NO: 357579 - DNA, 561 bp, Homo sapiens
taaatatgtggaagggaaataacatttagtgtgcaccagctatatgttttgccctgtgyaagagatttttatccacatcaatcatttactcagcacaaaaaacctggaaggccattgtaaaggaactttagtttggtcactcaggaatggtctttatttgcttatcaccattttctatgtcctgcaggtagaagattggatagcttctctatattaatgtgctataagattttatcacttttgctttgaatgtgttctagcagggtaaagtatctgcagaatgccaatcctgaccttaagctctcagtcctagactgcttataaaatgtcttccaatatctactttggtcttatagctcttgagaaaagaaaatcctctgccttcaatttcagtatctaaaacacatattcttagaaaatcttattatgtctaatccaggggttctcaaatatgagtctgccatggaatcaactgtgggattttttttaattggcaagagactccgatgcaacagatctaggatacggcccagacctccacacttctaagacatttcatca

SEQ ID NO: 357580 - DNA, 561 bp, Homo sapiens
taaatatgtggaagggaaataacatttagtgtgcaccagctatatgttttgccctgtgcaagagatttttatccacatcaatcatttactcagcacaaaaaacctggaaggccattgtaaaggaactttagtttggtcactcaggaatggtctttatttgcttatcaccattttctatgtcctgcaggtagaagattggatagcttctstatattaatgtgctataagattttatcacttttgctttgaatgtgttctagcagggtaaagtatctgcagaatgccaatcctgaccttaagctctcagtcctagactgcttataaaatgtcttccaatatctactttggtcttatagctcttgagaaaagaaaatcctctgccttcaatttcagtatctaaaacacatattcttagaaaatcttattatgtctaatccaggggttctcaaatatgagtctgccatggaatcaactgtgggattttttttaattggcaagagactccgatgcaacagatctaggatacggcccagacctccacacttctaagacatttcatca

SEQ ID NO: 357581 - DNA, 515 bp, Homo sapiens
atgcaaatatgaagccacaaggtatttgcacttatcaaaatgtgtcttagagaaaataagaagggtgggaaagaagcataaggatcctttattccacgtggtctcttggattgagtttgcatatgaaggacaggagttgattggatggcttcaagagaggttttgttagctctaggcatcaamccatctgccctctgcagaatacagcagaacaccattcttctcatgtttacctggactctgcttctgctcgaatatggaagattagtagcaacaatgaacaattgacttttctcatgtattatatagaattatttatattacatagcagtgctagtggcatctttacttatttgtacctggctgtcatattatactgtcttatctgttcctacaaaatctaatatgtatatactcaaaataatcatttcgctgtttatcactgcattagtcagctcaggctgttgtcacaaaatagcatagacttggtggcttaaaccacagaaatttgtttt

SEQ ID NO: 357582 - DNA, 515 bp, Homo sapiens
atgcaaatatgaagccacaaggtatttgcacttatcaaaatgtgtcttagagaaaataagaagggtgggaaagaagcataaggatcctttattccacgtggtctcttggattgagtttgcatatgaaggacaggagttgattggatggcttcaagagaggttttgttagctctaggcatcaacccatctgccctctgcagaatacagcagaacaccattcttctcatgtttacctggactctgcttctgctcgaatatggaagattagtagcaacaatgaacaattgacttttctcatgtattatatagaattatttatattacatagcagtgctagtggcatctttacttatttgtacctggctgtcatattatactgtcttatctgttcctacaaaatctaataygtatatactcaaaataatcatttcgctgtttatcactgcattagtcagctcaggctgttgtcacaaaatagcatagacttggtggcttaaaccacagaaatttgtttt

SEQ ID NO: 357583 - DNA, 522 bp, Homo sapiens
ggctctttcttggcttgcagacagataactttttgctgtgtcttcatgtggcctttgatcagtgcatgtaggtggctggagagatagatattgctctcttcttcttacaaggccaccaattctatcagattaagaccctatccttatgacctcattaaccttaattacctcctaaaagcttaaatacagtcatatttgaggttagggtttcagcataaaaatttggggaacactatttgatccatagtggtcacctacctcatatttaacccctgactgcatcttacctttctttgctacaaaatacattttcactacttattaaagaaaatgacaatggaattgccaggtcctaagggaaggatractttgagtacagagatactagaggtagagtgacagctatgaagctacatcagtgataggttaggtactgatttagactaagatcatgatttagactaggatagatgcaggccaaagaaaaaaaaattacaagtcagagagattttacacaaaaaa

SEQ ID NO: 357584 - DNA, 525 bp, Homo sapiens
tcttacaggaatttatatctttgtgctttatttccacttgtaaaagcagctttataaatgctatttaatttgctactcacagcctggaaattaatagccaaagtctttgagcatttatgcataaccacgtactatgctgaacactttgaatrtatcaccacattgaatccttccaatgacccaataaatagatacaatcaatgtctcgctattagaccagtaggttcaacccctgaggtttacagaaaccaacaaattgtccaagttgacaaaattgataagtagtgaagtcaagtctcaagcacacagaattgggccatcaactgaggcttttaccattatatcagttatatatcccactttaattaaagacacagtcaacatgtgtcacttatgttgcagtttgaggacaatgggagcaataagctaaagccattgacatatatttatagaaaaccagtgtacttttcacacttccatattttaaaatatgtagttctttctccccaaaatatctattttggt

SEQ ID NO: 357585 - DNA, 525 bp, Homo sapiens
tcttacaggaatttatatctttgtgctttatttccacttgtaaaagcagctttataaatgctatttaatttgctactcacagcctggaaattaatagccaaagtctttgagcatttatgcataaccacgtactatgctgaacactttgaatgtatcaccacattgaatccttccaaygacccaataaatagatacaatcaatgtctcgctattagaccagtaggttcaacccctgaggtttacagaaaccaacaaattgtccaagttgacaaaattgataagtagtgaagtcaagtctcaagcacacagaattgggccatcaactgaggcttttaccattatatcagttatatatcccactttaattaaagacacagtcaacatgtgtcacttatgttgcagtttgaggacaatgggagcaataagctaaagccattgacatatatttatagaaaaccagtgtacttttcacacttccatattttaaaatatgtagttctttctccccaaaatatctattttggt

SEQ ID NO: 357586 - DNA, 525 bp, Homo sapiens
tcttacaggaatttatatctttgtgctttatttccacttgtaaaagcagctttataaatgctatttaatttgctactcacagcctggaaattaatagccaaagtctttgagcatttatgcataaccacgtactatgctgaacactttgaatgtatcaccacattgaatccttccaatgacccaataaatagatacaatcaatgtctcgctattagaccagtaggttcaacccctgaggyttacagaaaccaacaaattgtccaagttgacaaaattgataagtagtgaagtcaagtctcaagcacacagaattgggccatcaactgaggcttttaccattatatcagttatatatcccactttaattaaagacacagtcaacatgtgtcacttatgttgcagtttgaggacaatgggagcaataagctaaagccattgacatatatttatagaaaaccagtgtacttttcacacttccatattttaaaatatgtagttctttctccccaaaatatctattttggt

SEQ ID NO: 357587 - DNA, 595 bp, Homo sapiens
aatggtttagcaccatctccttggtgctgttcttgtgctagtaagttcttgaaagatctggttgtttaaaggtgtgcagcccttccccsatcactctctcttgcttctgctcccactacataagatgcctcactccccctttgccttccaccatgattggaagctttctgaggcttccccagaaacagaagccactatgcttcctgtacagcctgaataatcatgagccaattaaaccttttctataaattatccagtctcaggtgtttctttatagcaatgcaataatggactaatacagaaaattggtacctaggagtgggcactgctatgaagataactgaacacgtagaagcaactttggaactgggtaataggcagagtgtggagggtttcagaggaagacataaagatgagggaaagtttggaactttctagagactggttgaatgattatgaccaaaatgctcatagtgatatggacagtgaagcccaggctgcagcggtctcagatggaaatgaggaacttattgtgaactggagtaaaggtcacttttattatgccttaacaaataacctggctgcattgtgcccg

SEQ ID NO: 357588 - DNA, 573 bp, Homo sapiens
cctttatcgggtgtatagattgcaaagattttctcccactctgtggattgtctgtttactctgctgactgttccttttgctgtgcggaaactttagggtttaattatgtcccctctatttatctttgtttttgttgcatttgcctttgggttcttggtcaygtagtatttgcctaagccaatatctagaagggtttttttgacattatcttctagaatttttatggtttcaggtcttagatttaagtccttgacccatcttgagttgatttttgtgtaaggtgggagatgaggatccagtgtcattcttctacatgtggcttgccaattatcccagcaccatttgttgaatagggtgtccattccccacatttgctttgtcaaagatcaattggctgtaagtatttggttttatttctgggttctctattctgttccattggtctatgtgcctatttttataccagtagcatgctgttttggtgactatggccttatagtataatttgaagttgggtaatgtgatgcttccaaaaatttgttctttttgcttagtcttgctttggctatatgg

SEQ ID NO: 357589 - DNA, 566 bp, Homo sapiens
ctcacattctgaaaaaaatgtggcttttcttcccaacatgactgcaaagaatcattaagctctaaaaagagcagatattttagaaccctttcctgacttcctcttctacattatcttccactactctaagatcaaatttccaatttcatgaaaagagacccgaggaaaacattatcaattactcatttccacccaatattccatgatccraaaagtccatcaactctcccatggattctcaattccttcaacaaatacttactgaagacctgctacatgtcaggcattctacctcgctaaaaattcaacattaaacttttgttttctcccttccagcctcatggagcttattctctagtagaattcttctgggaaataaaattgatgctggttgaacagttattgaataaatactttaatacgtgattgaacaaataaactgctactattcaaggataacaaaaacaggagtattcttgtttcttctcctggatttctatagaactgcataatgccatgcttaagaatttgggcctaagacaaacctgggtttcagttctagttcc

SEQ ID NO: 357590 - DNA, 566 bp, Homo sapiens
ctcacattctgaaaaaaatgtggcttttcttcccaacatgactgcaaagaatcattaagctctaaaaagagcagatattttagaaccctttcctgacttcctcttctacattatcttccactactctaagatcaaatttccaatttcatgaaaagagacccgaggaaaacattatcaattactcatttccacccaatattccatgatccaaaaagtccatcaactctcccatggattctcaattccttcaacaaatacttactgaagacctgctacatgycaggcattctacctcgctaaaaattcaacattaaacttttgttttctcccttccagcctcatggagcttattctctagtagaattcttctgggaaataaaattgatgctggttgaacagttattgaataaatactttaatacgtgattgaacaaataaactgctactattcaaggataacaaaaacaggagtattcttgtttcttctcctggatttctatagaactgcataatgccatgcttaagaatttgggcctaagacaaacctgggtttcagttctagttcc

SEQ ID NO: 357591 - DNA, 566 bp, Homo sapiens
ctcacattctgaaaaaaatgtggcttttcttcccaacatgactgcaaagaatcattaagctctaaaaagagcagatattttagaaccctttcctgacttcctcttctacattatcttccactactctaagatcaaatttccaatttcatgaaaagagacccgaggaaaacattatcaattactcatttccacccaatattccatgatccaaaaagtccatcaactctcccatggattctcaattccttcaacaaatacttactgaagacctgctacatgtcaggcattctacctcgctaaaaattcaacattaaacttttgttttctcccttccagcctcatggagcttattctctagtagaattcttctgggaaataaaattgatrctggttgaacagttattgaataaatactttaatacgtgattgaacaaataaactgctactattcaaggataacaaaaacaggagtattcttgtttcttctcctggatttctatagaactgcataatgccatgcttaagaatttgggcctaagacaaacctgggtttcagttctagttcc

SEQ ID NO: 357592 - DNA, 566 bp, Homo sapiens
ctcacattctgaaaaaaatgtggcttttcttcccaacatgactgcaaagaatcattaagctctaaaaagagcagatattttagaaccctttcctgacttcctcttctacattatcttccactactctaagatcaaatttccaatttcatgaaaagagacccgaggaaaacattatcaattactcatttccacccaatattccatgatccaaaaagtccatcaactctcccatggattctcaattccttcaacaaatacttactgaagacctgctacatgtcaggcattctacctcgctaaaaattcaacattaaacttttgttttctcccttccagcctcatggagcttattctctagtagaattcttctgggaaataaaattgatgctggttgaacagttattgaataaatactttaatacgtgattgaacaaataaactgctactattcaaggataacaaaaacaggagtattcttgtttcttctcctggatttctatagaacwgcataatgccatgcttaagaatttgggcctaagacaaacctgggtttcagttctagttcc

SEQ ID NO: 357593 - DNA, 573 bp, Homo sapiens
cctttatcgggtgtatagattgcaaagattttctcccactctgtggattgtctgtttactctgctgactgttccttttgctgtgcggaaactttagggtttaattatgtcccctctatttatctttgtttttgttgcatttgcctttgggttcttggtcacgtagtatttgcctaagccaatatctagaagggtttttttgacattatcttctagaatttttatggtttcaggtcttagatttaagtccttgacccatcttgagttgatttttgtgtaaggtgggagatgaggatccagtgtcattcttctacatgtggcttgccaattatcccagcaccatttgttgaatagggtgtccattccccacatttgctttgtcaaagatcaattggctgtaagtatttggttttatttctgggttctctattctgttccattggtctatgtgcctatttttataccagtakcatgctgttttggtgactatggccttatagtataatttgaagttgggtaatgtgatgcttccaaaaatttgttctttttgcttagtcttgctttggctatatgg

SEQ ID NO: 357594 - DNA, 603 bp, Homo sapiens
ggaaaaaaagtttactttaaaatatgattgacttatatttccctgagaaccattagattcatttacatagtttcttatttttatgtctayttagtatttattttctactatatatattgcatagagagcattttttactaaatctaagaacctaaagttatttcctcccttcatccaatatccaaggatcttcctagaaaagttatctaaaactctgtagttaaaataatttaatctgttaagagaggcacaaagtcaacttttgttttacagatgagatagaagctatacctaaatttctctaatgtgtttataaaacaaatgagcaatgagttcatagttttctgcctctagtcctgcatcttgaaatgttggtattttatggaatttaacttgtggtaaaattgtaaacgtcttttaaaaattattttactttttaatacttgtcttaatatttatgaaatcttatttcagcctcagtgctacaactttttagcagcattttttgttgtcaaagtgtcctttttaaaaattaacacaaatgctctattcaggaagacttattgagactcctctgtgttgccctaccaggcaagccaaccc

SEQ ID NO: 357595 - DNA, 603 bp, Homo sapiens
ggaaaaaaagtttactttaaaatatgattgacttatatttccctgagaaccattagattcatttacatagtttcttatttttatgtctacttagtatttattttctactatatatattgcatagagagcattttttactaaatctaagaacctaaagttatttcctcccttcatccaatatccaaggatcttcctagaaaagttatctaaaactctgtagttaaaataatttaatctgttaagagaggcacaaagtcaacttttgttttacagatgagatagaagytatacctaaatttctctaatgtgtttataaaacaaatgagcaatgagttcatagttttctgcctctagtcctgcatcttgaaatgttggtattttatggaatttaacttgtggtaaaattgtaaacgtcttttaaaaattattttactttttaatacttgtcttaatatttatgaaatcttatttcagcctcagtgctacaactttttagcagcattttttgttgtcaaagtgtcctttttaaaaattaacacaaatgctctattcaggaagacttattgagactcctctgtgttgccctaccaggcaagccaaccc

SEQ ID NO: 357596 - DNA, 603 bp, Homo sapiens
ggaaaaaaagtttactttaaaatatgattgacttatatttccctgagaaccattagattcatttacatagtttcttatttttatgtctacttagtatttattttctactatatatattgcatagagagcattttttactaaatctaagaacctaaagttatttcctcccttcatccaatatccaaggatcttcctagaaaagttatctaaaactctgtagttaaaataatttaatctgttaagagaggcacaaagtcaacttttgttttacagatgagatagaagctayacctaaatttctctaatgtgtttataaaacaaatgagcaatgagttcatagttttctgcctctagtcctgcatcttgaaatgttggtattttatggaatttaacttgtggtaaaattgtaaacgtcttttaaaaattattttactttttaatacttgtcttaatatttatgaaatcttatttcagcctcagtgctacaactttttagcagcattttttgttgtcaaagtgtcctttttaaaaattaacacaaatgctctattcaggaagacttattgagactcctctgtgttgccctaccaggcaagccaaccc

SEQ ID NO: 357597 - DNA, 571 bp, Homo sapiens
aagaactgctaaaaggagctctaaatcttgaaacaaatcctcaaaaaacaccaaaatagaacctcccttaaatctcacaagacctataaaacaaagatgaaataaatataaaaaagcaaggtattcatcccacaaatagcacaatgactagaatagtacttcacatctcaatactaacattgaatgtaaatagtctaaatgctccacttagaaacagaatggcagaatggataataattcactaaccaagtatctgctgtcttcaagagactcacctaacacataagggctcacataaacttaaggtaaaggactggagaaagatatttcatgcaaatggacaccaaaagtgagcaggggtagctattcctatatcagaaaaaaacttaaaacaacagcagttaaaaaagacaaagacaggcattatatgatgataaaagaacttgtccaataagaaaatatcacaatcctaaatatatatatgcasctaacactggggttatcaaatttataaaataattactattagacctaggaaattaaatagacaccaacagaataataatgaggg

SEQ ID NO: 357598 - DNA, 501 bp, Homo sapiens
cctattaagagacatgtaaggccaggtgtagctgctcacacctgtaatcccagcactttgggaggctgagatgggtggatcacttgaggtcaggagttcaagactagcctggccaacatggtgaaaccccgtctctactaaattacaaaaaattagccaggtgtggtggcatgcacatataatcccagttactcagaggctgcagyaggagaatagcttgaacccaggagacagaggttgcagtgaggctgagatcatgtcactgtactccagcctgggcaacagagtaaatctccatcttggggaaaaaaaaaaaaaaaaagacatgcaaaggagagacatagacatacagagacaagagaaggccctgtgaaggtggaggcagagattgaaatggtgcaatcacaagcaatgcaattctcagagccacaagaatctacaagaggcaaggaccaatttgcccccagagcttcagtgggagtgggaccctgtcaacagcat

SEQ ID NO: 357599 - DNA, 588 bp, Homo sapiens
aacacctacaatataccaagtactgtatgccttttgtctattctccctgtaaccagtccctgtcattttataaaactcagctaaagcattacctcctccaaatttcacctcctaacctccaacctgatttagcrgtttctttgctattctcccatagcacaaatgcaggtctttatcagcacacataatcacactgaaacgtaacttttgaattacttgcctgctgcccctcacacaccccactaaactctagccatgaaaacagggatcatgtttgtatttactataaaatcctttttatatgataagctaatgaatttaaatttcatcctgaaagcattggaaagacaaacaatacttttatgtagggaagtgatagaaacagatttgtgtttccaagtgttcacatatgctgtggtgtagactatagcttttatccatattctatagtgatgaatggcagtaagacaactggacaattattttagtaatccaagtaataaagcatggaatttgaataaaggcaaggtatttatagaaagtagggtggagagagaaagaaaagatttttagtattaaagcttttag

SEQ ID NO: 357600 - DNA, 590 bp, Homo sapiens
aaattttctcttaacatgaaaatatgcttttcacagtttcttcaggacttctttaagaactggaagcagtggatactctttttcacagatgaataacacaatctatgtgcagtaattcaaacaataatgattaagttacccctcataataarcatcccacttataaccaatgaactgcccacaactgtctgaaaatgcctttaattccaaagtacaatttgagttaattatcacacttcatagccaaggatgattacattcatttaaaaaatgaaagatactgtcaaattggaggtcaaaaaaatctagcgttaaattattcctttatgatatatgggatattcaaaatctggatagtggtatgaaattaaaaatgctgaaagagaggttgatcaatttaatctttttatacaatttaggaatccaaagtaataagtattattagagctcaccagttattgacataactgtgtacaccatgaatttagaatgtaccttccaactatgaagttgggtatgcttttcattacttttctctttttaattgtcttcacacctaacagataaagtatatgtctggagctctttct

SEQ ID NO: 357601 - DNA, 626 bp, Homo sapiens
ctccttttatttttttttttctctttctaataatggcatttgtattttattagtaggtgctctttgcatcatatatgacactgcccagacaacattcacagatcctagagtgacttgaacttgttcagacacatctatttttgcctcatataaaccctctccaccagtctgatgtacttactgattcaagaaaaaaaaaaaacaacttttacttgtaggaatagagccttctaggggtagagaggaacccattgggttttcttttaagaacactggagtcattcactacagatcataactctcccctttccccaagtttaccagagtctgagcttttattttgaccataaatttgttctcacagtagtcagggcacattaacccctctttattggacacattattaccttaaattgttgcataaagacctagttttcttgcatttttccccacgatgtttggattgcatctgcttttttctatgctataaaactttaagagtaaatatttatctgtccataatgaggcccagagatttctggaatctgcatgttccagaagaaagtcaatcatttcaatttagttttaacaagaacyacctaaactgcctattgatttttgtcttc

SEQ ID NO: 357602 - DNA, 556 bp, Homo sapiens
gtcaaaaaaatctagcgttaaattattcctttatgatatatgggatattcaaaatctggatagtggtatgaaattaaaaatgctgaaagagaggttgatcaatttaatctttttatacaatttaggaatccaaagtaataagtattattagagctcaccagttattgacataactgtgtacaccatgaatttagaatgtaccttccaactatgaagttgggtatgcttttcattacttttctctttttaattgtcttcacacctaacagataaagtatatgtctggagctctttctgccattttatagattgaaaatgtaagttccataaagaagatttaaagagcaaattgaaaattaggaagtagcrtcaaaaaaataacaaatgtcaaacatcatttgtggacaaataattcatacacttttatgatgcatgaataagcaaaacacaaatattgtaattttaaaagggaaaaggaaattaatagatgacacaaaaaatacagctgaatagctattagaaaatgttcaaattaactagtagtcaaaaaataagt

SEQ ID NO: 357603 - DNA, 574 bp, Homo sapiens
gtaaatagtgcatagcttcctggtaagcctcttcatgttttggaggtaaaatatttcatacttgaaaatactattctggcaaaagaataccagctttgacttggatccaaaataaaaagtctctgctataggtttaggctgtgttgcaagtagttcttccacttgggccataaatccagaaaaccctrtagtgttagaaatatctatggtaggaaaagatgtcttagtctctttggactgctataacaaaacatactggataatttataaacaaaaaaaatttagttctcacagttctggaggctaggaagtccaagatcaaggtaccagtagattccatgtctggtacaggcctgatactgatagatgacacttcctttgtgttctcacatgttggaaggagcaaggcagctcccttcaacctctttttataagggtatcaaattccattcatgaaggtagagtctttatggcttcatcacttcccagaaggcttcgctcttaatacaatcacattgagtattaggttccaacgtatggattttggtggggcactgacattcagaacctagca

SEQ ID NO: 357604 - DNA, 586 bp, Homo sapiens
gtttaggctgtgttgcaagtagttcttccacttgggccataaatccagaaaaccctgtagtgttagaaatatctatrgtaggaaaagatgtcttagtctctttggactgctataacaaaacatactggataatttataaacaaaaaaaatttagttctcacagttctggaggctaggaagtccaagatcaaggtaccagtagattccatgtctggtacaggcctgatactgatagatgacacttcctttgtgttctcacatgttggaaggagcaaggcagctcccttcaacctctttttataagggtatcaaattccattcatgaaggtagagtctttatggcttcatcacttcccagaaggcttcgctcttaatacaatcacattgagtattaggttccaacgtatggattttggtggggcactgacattcagaacctagcatatgtcatatagaattttgaggaagctctaaaaattgacaacatagggttgtagggcaccacaaggtttctggagcaaggctatgccatctgcagtagaaaattatacattggaaaagtaactcctgttgtgttactgggtcc

SEQ ID NO: 357605 - DNA, 600 bp, Homo sapiens
attttactcatcaaggatgacttagctactataaatgacaactgtttattcgtttatcaacagaaaccaatactgagtgcccagcatgggactatctctcaagaagaccagtcagccactttttgacaagttaattacattggacatttttcactctggaaacagtaagaatttgtcttgactagaataaagacataaactgaatatggatttgcatttgctgctcacagggcctcaactggwaccacaatcttaagaattacagagaatttcatccactgacacagggccctgcataccgtcacatcagcccaagaatccctctttacaataaagaagatatggcaattggactatgaccatggacccattggtcttatctcatgcaatacctttgagaagcagttgggatacctatacaaggcacagctgatgtgcctatgtggagacaaagcactatcatcgaagatacagagtaccttcagtaggagatggttgacattaacaactattttatagctgtcttcaacacatagagtgcattagtcttaaaattaaggagtgagtgaaattggagtggtgctctttactatcattcca

SEQ ID NO: 357606 - DNA, 616 bp, Homo sapiens
gctgtgggactctttcttgcgcctgcatcctgtgaattcaactcctctttcagcctcactgtactccttcactcctctacagattttaagagcacaccccaataactcagtgcaatcatgtttgtatcagagtctgattcccaggaaatccatttaaaatagcagcagaggcacaactgtggcccaggcaatctgaatccagagcctcctgagaagccaggctaatctcttctctctatttgctgttcacttttgactaccaaatcccttttatgacattctttttgatggctagtggtgcactatttgtgtttattttcctctggtcatgtccctaggttgcactgactttcaaagcctgctgtgcaaaatatttaaccagggacaagtagggatattatacatccaagctgaggccccctgagctaattgcagagcccttctgcgtatcatggcagtagacggcaccccactctctgtctggctaatctactgccaagatctttgatcaaacagttatggrcagctttatgcagctatggtatcaccactagacagtgtctcgaagggtacttttatatgccagtgattggtgttgggatctttggatgtgagg

SEQ ID NO: 357607 - DNA, 459 bp, Homo sapiens
gtaactgtgtaaattgtgtagcatttctagagaattgtactatatcttaaaatatgcaggcatattaatctagaaatgtattcaagcaaagagaaaaaacgtgtgaaaatatgttcattgcattaatgtctgtaatactaaaaagaactgaaaacaaattgtgtccatcaataaaagaactggacaaattatttataagccatacataataaaacattatgcagctgcttaaaattacagttttttkgggatacctaagacatgagtgaactaacacaaatataatactgaaaccattggctaaatgcatttattgatgtatgactggaatggagaaatggaatagagaaaattcaccagaatgttgacagtggttttctatgaatggagggtcttagcaggtgttgtcaatgctctttccatacccactagcttttgtttttcctatgcaagcttttc

SEQ ID NO: 357608 - DNA, 555 bp, Homo sapiens
ggaagtgaggaaaaacgaaggttgggaggacagccctctgggaatgataaatggtatttagagaataaacaatccagcttcttcccccttgggtacagggggttacagctgtgaggaatggtccctgttgtctcccagaggtctccaggagactgaactcctgttgttttcagcagtcaactattcattaaggcaccctcattggattctttccattgtctttattccatactctgctaagagtrcttcctgatttcaccttccacataggttagttgcactcaaatctttgccatagctgctgcttaggaaagcataaaaatgagttgtttgaatttttttctttcttcgtactcttttctactgcttacatatttttctctatgtatgtttctatatacacatgtaaataacttatggtcctcaaaatgaaatactcactttcataggtctgcaacactcttgactcacaaacaccctatctgtgaacaaactgctcatgtcatactgccctaagcttcttctggacactcaactatagtttcctaggaacag

SEQ ID NO: 357609 - DNA, 555 bp, Homo sapiens
ggaagtgaggaaaaacgaaggttgggaggacagccctctgggaatgataaatggtatttagagaataaacaatccagcttcttcccccttgggtacagggggttacagctgtgaggaatggtccctgttgtctcccagaggtctccaggagactgaactcctgttgttttcagcagtcaactattcattaaggcaccctcattggattctttccattgtctttattccatactctgctaagagtacttcctgatttcaccttccacataggttagttgcactcaaatctttgccatagctgctgcttaggaaagcataaaaatgagttgtttgaatttttttctttcttcgtactcttttctactgcttacatatttttctctatgtatgtttctatatacacatgtaaataacttatggtcctcaaaatgaaatactcactttcataggtctgcaacactcttgactcacaaacaccctatctgtgaacmaactgctcatgtcatactgccctaagcttcttctggacactcaactatagtttcctaggaacag

SEQ ID NO: 357610 - DNA, 601 bp, Homo sapiens
agaagcatatggatgtatcaggatgtgttcaacctatgaagactggccagttctacactgcactatgtgatagagtcctttgttaggaacgtctgctggcaaggcagtaggctggaaatcagaatcactaataatttaggaactgcctttatattcttacacctaacttagacatctaaaagagttttgttctttgaatattctaaaagtgaattgccaaatttataggttccatactatttattcaatttatatgggcatcttattgtcctgacattccatttttaaaagcagattttcccctttgccttggacaatacgtcaaagttttaattaccatatatcataaactcctcttaaagcaatataaaatatatatgtcctataatttcaacaagcttctacaaccatgtttattcacaattataaaggccagaagcatctttactatatacaacttccattaaataacwgttattaagtgctgccctgctccgtgcagtatatgtaaactgctagatacgtcttccataatattaaagatgtccctaactagcttgtctagagatttacattacttaagaagtcccattgctggaaa

SEQ ID NO: 357611 - DNA, 454 bp, Homo sapiens
tttgtgtgatttgcttttgtgagtgtctgtctgtctgtctctctctctctctctctctctctctctcatatttatctgccctatttgcttatctttctattgcctcctattctgacctccatttggagatgaaaatgtcacccgtcattgcagatgtgtacacatgtgatctttagatctggtagacaaggcttttcttttttttctttttttttgcacttgactctaactgcatytgtcaatgttcttttccattgtcttagtttctgttgaatacgcagtacgtatacatacctgaaaatgctatattcattttaggaaacattgatttaagcatagactagatgactttttaggggaagatttaaaaaatgtgcaaaaggaaaagctagcagccttataaagtacaattatatcagctctatacattgataaaggaatttttgttttaggc

SEQ ID NO: 357612 - DNA, 587 bp, Homo sapiens
gagcaggggtcacctcgtctccagcttacacttctgagaaaacagaaatattttcaagaaaggagaaagaaaacaatattctgatcatggtaattctaagttttcaaattccttgtgcatgtgtatgtttcggattttgaagttctttttcccccctcagaagttggtatatttagacttgctgaaaaacagaggaacagatatttaataccctagcaaatttctcagttctttctatctgtaagctggtttgttaaagccttgagaaaaccttaacattgctattaactggtgacaaatatatagaaaagttacagagtctccgatatgttatcatttgccttattggtaagtaagtacatttcttttcttctttacctactgagkccatgaggagccctatgtgttttggtacaagttagaataagcaatcccattagtaaatatagtggtattttatggttttataatgcaaatggaatgtctgtaccaatggcaccaagccaaagatagaaccatttggtctgaaagtgttatgcaaactaggtttgtgctggttttgtctctgtctgtgactgagacaaatt

SEQ ID NO: 357613 - DNA, 582 bp, Homo sapiens
gaccatataaagattggaacatacaaagacacaaagatttacagtacagaagggaaacgaatatacctgtgaaaccactggattcaggtataaaacrcctagagaatagtttacagcattaaaagcatatattaaaaataagaaaggctcagaatcagaaatatagaagttcatctaaaaacatttgaaaaataacagaaaattaaaaccaaataatgtggaaataagaaaatatgtaagtaaatattgcccatgaccttgaagtttatataaaatgaacaaatacaaaggctcaacttcctaaaaccaaaacaagaagaaatagaaggtctgaaaaaggccacatcaaagaatatccaaaaatatgctacgtcaaaaaaaatcctaccaaaaaaagtgaactcagtttggaaagtctttctatagagaaacctaaggcccaaagcgtccattggtaaattattctagacttttagttaacaattaacactaatttggcaaacattcatccaaataataaaaaagaggctcacttcacattaataacatcttttatgaaagtggaaaaaacttcatagtaaa

SEQ ID NO: 357614 - DNA, 580 bp, Homo sapiens
aagggttaataattagaaggtatcaagaacatttaccaaaaaaaaaaaaaacacaaaacaaataggaaaattttaaatgtacaaaatttgatcaagcactctaaaagaaagatattcatatggccaataaacatatcagaaggtgttcaatcacataaatcatcagaaaaaaagtagtaataacaatggaatactgcagcaaatcaacaaatatgacaaaattaaaaggctaaaacagcagttatcaccaaagacctagaaaaaaatagacctcttatattcctggtgagaaggtaatttggtactattactttgagaaacttttagggtctgtcaaagttgaaaacacccataacccatttatctagtaaatcccctcctattcaaaacaaaacaaaggtaccatttgtattcatacaaaaatgaatataatagcactatatataacattactattctggaagccgcacaaagcccaccagctataggtaaaatacatatattgtagaatgatcacacaacggaatrccaaacagaagttaaaataaatgaactatttttccattcattaacatgaata

SEQ ID NO: 357615 - DNA, 397 bp, Homo sapiens
aaaacaaagcagacatttctaggttacttgtggtttatttctatataaaatatttttcaaaacccagtctccctgggatatttgaaacataccatgccctttggcaattttttttcctgtagaccagtttttctaatcatctgtgttccaatgttttcaccacattttgaacgctgacatttgttgaggctgtgtaatgattcttcacttagaaagtcttggtattttttttttttttttagataaaacgtgctacaaacactttcaactctttttatagtcacaataagtagttatgtactcatttgtgttcaggctaacttccatyttctattctaagcaatatcgtttattctagttactacttttctacttaccttaaccaattttttttagc

SEQ ID NO: 357616 - DNA, 540 bp, Homo sapiens
ttccatggttttagaggtctgttctcaaaaatgatatcaaattgtacaacaaagcagccatgtcctaagttttatgtactaatttaggtttctttgaaaagtgtggcctttacctatagtstctaatttttaataggatttccttcgatctttcttatctagaatagctagctcagggtttaatcctcattcttaaaagcatgaataggcagaagattatcgtggtcatcataaactaaatacatttggttcatttacttttgttatttttatatatttagggggtacaaatgcaggtttcctacatgcttatattggatagtggtagagcctgggcttttagtgtacccatcacttaaagagagtacattgtatccagtaggtaatttttcaaccctcacccccattccgacttcccactttatgtagtctccaatgtaggaataatagccatttgtatcatttaaattaaaattttgtaacactcagcctcttaaaaggcagtttatttggagatatattggtaaattaaacaaaatg

SEQ ID NO: 357617 - DNA, 560 bp, Homo sapiens
aatttctgtggtgaaaggtagaatcattgaagtgctcccttcatgttttctatgccatcccatagttcaaggatataaatcaagagttcccagatcatggaattggttgttgggtatgaaggtggatgagaaccacaataggattcctggccaattgccttgatgatttaggctttggtatcacattgaatgtcactaaatggacatagaaattctcacctacccataccaatttcaacttatcaaaaagatcataaatttaggaaataatatatgtaaatggaycttgaagatcattttttctttccatttgtcctaatctggtctgctataacaaaatgctgtagattgggtagcttgtaaacaacagaaatttatatctcacagttctggaggctgaaaaatccaagatcaaggaatatttgatttctggtgagagcctatttgttggttcatggatggtgccttccagctatgtctataaatgatagatagaaggaacaaataagctcccttggacctgtaagagtgttaatctgattcatgaggggtcctccctc

SEQ ID NO: 357618 - DNA, 567 bp, Homo sapiens
tttttgttgcattccaaaagttcatttggaatttaataattaattcattcagcaaatatttactggttgaacactgtgtcccaaacactgtgctaagagctgggataaatcactgaacagtacagacattgttcataacctcattgtgctgacagtrtatttggagaaacgtatatagaaaaatgtaacaattaaaagtaaagcactttgggacgccaaggcagatgggtcatttgaggtcaggagttcaagaccagcctgaccaacatggtgaaacctgtctctactaaaaatacaaaataattagccaggcatggtggtgcatgcctgtaatcccggctacctgggaggctgagtgaggcaggagaatctctcgaacccaggaggcggaggttgcagtgagctgagatcgtgccagagtgagacaactccatctcaaaaataaataaacaaataaataaatgtaaacagtgtggcgaaagaaaatacatactactttggaagtgggtataggaaaaacaaatggcttataaagtaaaacaaaaataaaaaatgccacacacacac

SEQ ID NO: 357619 - DNA, 612 bp, Homo sapiens
aaataaataaattcctatttccagttagagacttcaccacttccctctcagcaaatggtttctcacaagtaaacagatattagtaaggatttagaagatctgaacaataccattaaccgatgcgacttagttggcatttagagaacccttcactcaaaaatagcaggaatataatgtaccagtgcacatggagctttcaccaagatatrccatattctgagcactacacatttttaacacattttaacacatttaaaagtttatcatatgaaatatgttttatggaccatgacaaaattaaaccaaaaattattaacagaaagatatctggaaggactcaaatattaagtcaaagaagtcagttgaaagagaaggcccaaagaaaattaaaaccattgactgaatggaattttaaatatatcagaattggacagatagagttaaacagtagtaagtaggacatttatataattaattgattatattagaaataaagatatttaataagaagcctgatcttctcctttagaaaactggaaaaatcagagcaaattgaacccatatcaatcagaaacatggaaataagagcaatttaattcttctgaacgtgaa

SEQ ID NO: 357620 - DNA, 612 bp, Homo sapiens
aaataaataaattcctatttccagttagagacttcaccacttccctctcagcaaatggtttctcacaagtaaacagatattagtaaggatttagaagatctgaacaataccattaaccgatgcgacttagttggcatttagagaacccttcactcaaaaatagcaggaatataatgtaccagtgcacatggagctttcaccaagatatgccatattctgagcactacacatttttaacacattttaacacatttaaaagtttatcatatgaaatatgttttatggaccatgacaaaattaaaccaaaaattattaacagaaagatatctggaaggactcaaatattaagtcaaagaagtcagttgaaagagaaggcccaaagaaaattaaaaccattgactgaatggaattttaaatatatcagaattggacagatagagttaaacagtagtaagtaggacatttatataattaattgattmtattagaaataaagatatttaataagaagcctgatcttctcctttagaaaactggaaaaatcagagcaaattgaacccatatcaatcagaaacatggaaataagagcaatttaattcttctgaacgtgaa

SEQ ID NO: 357621 - DNA, 448 bp, Homo sapiens
gaaaataattctcttctacctcttcattctgatattcccttagtacccacttcctcagatgtccccgcatctttggatccctttgttccccagaacacaaccattattgtaacaataactcccactttgtccactccattasctcaagaattcctactcatcttcttctctataggcagtggcaccaatgccaccaccaccctgagcagaacaagctccctataatatcctatcatatatgcgccataccaattgtgcactccgttttatggctctccattgctgatgctctagaacttactgcacttactggaatatagatgctcagtcatactgatcttgccatccacatgttcacctggcagctgcttgcttattttcatgtttatcatttgttcatttttagaatgatactctagttgtaagagctttgcagatctcagctctc

SEQ ID NO: 357622 - DNA, 448 bp, Homo sapiens
gaaaataattctcttctacctcttcattctgatattcccttagtacccacttcctcagatgtccccgcatctttggatccctttgttccccagaacacaaccattattgtaacaataactcccactttgtccactccattagctcaagaattcctactcatcttcttctctataggcagtggcaccaatgccaccaccaccctgagcagaacaagctccctataatatcctatcatatatgcgccataccaattgtgcactccgttttatggctctccattgctgatgctstagaacttactgcacttactggaatatagatgctcagtcatactgatcttgccatccacatgttcacctggcagctgcttgcttattttcatgtttatcatttgttcatttttagaatgatactctagttgtaagagctttgcagatctcagctctc

SEQ ID NO: 357623 - DNA, 247 bp, Homo sapiens
ttgtatcaggttatttttctatcaaatggaaaatgccaatacagggttgtatttaataaaagaaagagaaacaagtttaaamagctaaaaaaatgagaatttcagaggactatcaacaattacataggtgaggaattggtgtttacattactccacattcctttcacaggtatttatttaaggatttgcctgatagaaggttatttttaaattgtgtttctcaatttcatatttgatggaatttatg

SEQ ID NO: 357624 - DNA, 465 bp, Homo sapiens
aatgcacattcacttactgattttgagagatgctaataaaaataaatgcatgtggaagagttaattgctaattatagttatatgtaaattagatcctatattgatcccatttttgctatggtaataagtgtaaataaattaaaaatataaaatgctataacattagttatatcaaaaaccatgtgtgatatacatatatacacatacagttaattatatcaaaaattacactcctgtatatacacakacatatatagcttgaaaattatttatactatagatatgagtatagacattaaatatagataaataacagctagctaactagtcatataaatacagataatatagacagatatagttgatataaatatatataaacgtggagggaacatcatggagacattctgtcttatcaagtgctttttcttttttatttaaatagaagttcattttaatcacaaa

SEQ ID NO: 357625 - DNA, 465 bp, Homo sapiens
aatgcacattcacttactgattttgagagatgctaataaaaataaatgcatgtggaagagttaattgctaattatagttatatgtaaattagatcctatattgatcccatttttgctatggtaataagtgtaaataaattaaaaatataaaatgctataacattagttatatcaaaaaccatgtgtgatatacatatatacacatacagttaattatatcaaaaattacactcctgtatatacacagacatatatagcttgaaaattatttatactatagatatgagtatagacattaaatatagataaataacagctagctaactagtcatataaatacagataatatagacagatatagttgatataaatatakataaacgtggagggaacatcatggagacattctgtcttatcaagtgctttttcttttttatttaaatagaagttcattttaatcacaaa

SEQ ID NO: 357626 - DNA, 475 bp, Homo sapiens
aaaaattatcctttttatttctaagatgctaattaattgaaactaaactttaataagaagtgcaaaatttacagcacactttaattactatattaagtttcgttcagtattttggccttacctctttatgcattaccttcargtgaaagaatgaattcaattttagtaacattgccaccactgtgggttttagcaacatcaacagattaaaatataacaattccagggatgtagcaccttgaaatcattcatatttatgtaagatattatgtataatactttatttaaaatatgtaaactacggtaccaaatgaagtaaaatatatcagtagtccaaaaaacaattaagaattcaagcaatagggattatcttgtattcgtttgatggcaaagttccattcgtttcctatcattaggctaagcaaagacaaaactaataggatggccagtgattttattcatttggtagaaccac

SEQ ID NO: 357627 - DNA, 475 bp, Homo sapiens
aaaaattatcctttttatttctaagatgctaattaattgaaactaaactttaataagaagtgcaaaatttacagcacactttaattactatattaagtttcgttcagtattttggccttacctctttatgcattaccttcaggtgaaagaatgaattcaattttagtaacattgccaccactgtgggttttagcaacatcaacagattaaaatataacaattccagggatgtagcaccttgaaatcattcatatttatgtaagatattatgtataatactttatttaaaatatgtaaactacggtaccaaatgaagtaaaatatatcrgtagtccaaaaaacaattaagaattcaagcaatagggattatcttgtattcgtttgatggcaaagttccattcgtttcctatcattaggctaagcaaagacaaaactaataggatggccagtgattttattcatttggtagaaccac

SEQ ID NO: 357628 - DNA, 587 bp, Homo sapiens
caataaatccagaatgtacaaatgactcctaccaatttagaaaaagtcatacaagtcaatgcaaagttgtcaaaaaccttctataggacttttataacaaagaaaactaaaatgacaaataaatataagaaaaatggctcaaggtccaggcacggtggctcaagcctgtaatcccagcactttgggaggcagaggcgggcagatcacctgagatcagaagttcaagaccagcctggccaacatggtgaaaccctgtctctactaaacatacaaaattagccagatgtggtggcgggcacctgtagtcccasgtacttgggaggctaaggcaggagaatctcctgaacctgggaggcagaggttgcagtgagctgagaagccaagattgctccactgccctccagcatgggtgacagagcaagactgtatctcaaaaaaaaaaaagaaaaaaaagaaaagaaaaaaagaaagaaagggggcccaacttcctaactcattatgaaaataaatagtaagacggcacatgataccactgcacacatatcagcttggataaaattttaaataaaatgacacataatcccaat

SEQ ID NO: 357629 - DNA, 548 bp, Homo sapiens
tacatactcccttcactctgctgctgctaccctgatctaaagcacctcctctctcatgtggattactgtagtcttccaactcatcttctgcctctgcccttggtcctttgtaaatctactaccaacctaaggcccacagacattctactaaaaagcaagtgaactgatctcatacttttgctcatatttttccagtggmtccccaacttgctgaaagaaaaaagttcttgcactgaccctcaagaccatatcaaaatatgacctttcactcctttgcagtatttcttgaccaggcaaaaattcatgtattctaagttccatttaaatgttactttctgttctttgtggttttgtacatcatctaaaatagtaacttcttttctattctgataagtcatctcttaattttggagcttacctgtgtaacagctagtagattatatttagtgaattcatcaagtttaaagataattttctcataaatgatgctatatcatatagaagagtcatatatacatacaaagcttaacagataaaatttaatgcac

SEQ ID NO: 357630 - DNA, 548 bp, Homo sapiens
tacatactcccttcactctgctgctgctaccctgatctaaagcacctcctctctcatgtggattactgtagtcttccaactcatcttctgcctctgcccttggtcctttgtaaatctactaccaacctaaggcccacagacattctactaaaaagcaagtgaactgatctcatacttttgctcatatttttccagtggatccccaacttgctgaaagaaaaaakttcttgcactgaccctcaagaccatatcaaaatatgacctttcactcctttgcagtatttcttgaccaggcaaaaattcatgtattctaagttccatttaaatgttactttctgttctttgtggttttgtacatcatctaaaatagtaacttcttttctattctgataagtcatctcttaattttggagcttacctgtgtaacagctagtagattatatttagtgaattcatcaagtttaaagataattttctcataaatgatgctatatcatatagaagagtcatatatacatacaaagcttaacagataaaatttaatgcac

SEQ ID NO: 357631 - DNA, 596 bp, Homo sapiens
ctcatccaaacttcaaatgttggtattgtcagacattctaaaacaatccatcttatcctgtttaaagaaatagatggcaagactgaaattatctacaggtaacggaaacgctaaaacaaatgacaactgtctttaaaaaaaaggacttctagaaataaaagaacaaccaatattaaaaacatgttggacatagatggcagcaaactgaaaatatagagaagtagtgaactaggaactagttcagaagaaattaatcacwatatagtatagcaaaaaaaaaaagatggaactataaaacagagtaagagacatggaaaatatagtaaaaagtcctaatgcatacataactgaatttttaaaaaaggaaaaaatgggtctgaagcagtatttcaagggatgatggctaagaagtctagaaataattaaatataccaacccacagattcatagaatcagtcagaccaaccacttccttttattagttctgtcgtcttctgcatgttgcttgtttgtgtgaatgtgtgtgtgattattgctatcatttcttttttaaaaatcagatttattgaggtataattgtatacaaaaaattgtat

SEQ ID NO: 357632 - DNA, 523 bp, Homo sapiens
gggcttgggggttcaatgggtggtagcaacacaaagtatggaagaggaagggaaggaaatgtatggtgaataaagattgtctttttgagcagataaaaaatatcttcgataataaaaattgtcttggagaagccctcagaagaatagggatagtctgtttgagcgtgttgtcaaccytcagtcctctcttgtgatcctagttaaccttccctggttgataagattcctgggaaagagattcatgacaattgagttctttttggaagagtcatctttagggagaaaaggggagctcagggaaagcctctgcctacatctgctgttgcccaagtgttctcggttcaaagtaatcagcatatcaaagcatcatattttggggtggtatttttttaactctttcagtgttttactgcaattttgaaagaaaatataaataacaacaatgtagcacattatagttacaaagtactttcacatacattagctcatgatttcacaaaacaacccatgaggcccagccagt

SEQ ID NO: 357633 - DNA, 523 bp, Homo sapiens
gggcttgggggttcaatgggtggtagcaacacaaagtatggaagaggaagggaaggaaatgtatggtgaataaagattgtctttttgagcagataaaaaatatcttcgataataaaaattgtcttggagaagccctcagaagaatagggatagtctgtttgagcgtgttgtcaaccttcagtcctctcttgtgatcctagttaaccttccctggttgataagattcctgggaaagagattcatgacaattgagttctttttggaagagtcatctttagggagaaaaggggagctcagggaaagcctctgcctacatctgctgttgcccaagtgttctcggttcaaagtaatcagcatatcaaagcatcatattttggggtggtattttttkaactctttcagtgttttactgcaattttgaaagaaaatataaataacaacaatgtagcacattatagttacaaagtactttcacatacattagctcatgatttcacaaaacaacccatgaggcccagccagt

SEQ ID NO: 357634 - DNA, 531 bp, Homo sapiens
attataccttcttttaaaaaaatcttgtaaagttaaagtgcaataatattgctgaaagtactttgaaactaattagttctatacttatataagatgttattataacagtttcataatataaagagatatttttgttcccttgaaatgaaaagtacattagaaccaaatcaaacttaaaatactcaagagaagcattttccaaagtgcgtttcacagaacaccaatctatgaaatactccaggacaaaaacaatgtcgtggtccaaaagttggaaaaagatgtatattatttctccctcctgaagattcataagactcaygaagctactaaagacccttataatattgcctaaagagaactcttttttgtagtatttaacccagaatttcctaaattcattaagccaccctccccactttaataacatctttaatatcttgtgaaactattttgagaaacacgtcttaggacattttcacaaaagaattagtatttagaaagctaaaattctcattattgctagttgaattt

SEQ ID NO: 357635 - DNA, 502 bp, Homo sapiens
attagagtttcatgccagttatgaggacagagggtatcaaggcagatcagtggtgggggagggtgtggtgggggggtgccatatttgagcctggagatatcttcaaatcataggtggttggaaattgcttactttcttttatgtccctaagacaaaaagatacacaatrtatatatcaagatgaggtttaggaacattttcgtaacatacagaatcttctaagatgtaaaaagatcttgacaattaacatagtccaacctcttccccatataaaagaatcataattaaaagaaggaagattttaaaatttctaattgtatttttgtaaataagactatgtaattctaaatagatttatgggatacagttttaggtgtgaataaaatgtgaacaaaagcattatccaaagaacagctgttatggaaatttccaagatgggagaacaaaagaaaacaaatctccagaaatgaaatatgtattcaaaacttgcaaatagatttta

SEQ ID NO: 357636 - DNA, 587 bp, Homo sapiens
tatggaaaaaagtgcctcataaattttgttctgagttagtcatttaggacttctctgtaaacaatgaatgagtaacatttactcscatagtgaattatttgtacttttaatttctatgaactgatgtattaatatctagaaaatggccacaaactgttcccatataaacactggctccttccaaaacctctggagacgttagatatcaccaaaccatgtactgtaacagtaacagtgcttaggcatttcacaggatcatgctctcaaatataactagccgatcctaagcctgtttatcctgcttcaccccattcctcccacaattttgcactttcctttgcctcatgacaaactcaggtgcttcccctgggtaagcctgtgctttatgatgttttctccccagggaaccataagtaacaaaactgtaaaactccactttctttttcttgatctgcctctgtcctcaccatatctcacccaggataatatgattaaaacatagaacaatagttagtgaggtttgagaagatagcaactattcagacataaatcctttatactacagaaactctttcagattcatgaaa

SEQ ID NO: 357637 - DNA, 587 bp, Homo sapiens
tatggaaaaaagtgcctcataaattttgttctgagttagtcatttaggacttctctgtaaacaatgaatgagtaacatttactcccatagtgaattatttgtacttttaatttctatgaactgatgtattaatatctagaaaatggccacraactgttcccatataaacactggctccttccaaaacctctggagacgttagatatcaccaaaccatgtactgtaacagtaacagtgcttaggcatttcacaggatcatgctctcaaatataactagccgatcctaagcctgtttatcctgcttcaccccattcctcccacaattttgcactttcctttgcctcatgacaaactcaggtgcttcccctgggtaagcctgtgctttatgatgttttctccccagggaaccataagtaacaaaactgtaaaactccactttctttttcttgatctgcctctgtcctcaccatatctcacccaggataatatgattaaaacatagaacaatagttagtgaggtttgagaagatagcaactattcagacataaatcctttatactacagaaactctttcagattcatgaaa

SEQ ID NO: 357638 - DNA, 587 bp, Homo sapiens
tatggaaaaaagtgcctcataaattttgttctgagttagtcatttaggacttctctgtaaacaatgaatgagtaacatttactcccatagtgaattatttgtacttttaatttctatgaactgatgtattaatatctagaaaatggccacaaactgttcccatataaacactggctccttccaaaacctctggagacgttagatatcaccaaaccatgtrctgtaacagtaacagtgcttaggcatttcacaggatcatgctctcaaatataactagccgatcctaagcctgtttatcctgcttcaccccattcctcccacaattttgcactttcctttgcctcatgacaaactcaggtgcttcccctgggtaagcctgtgctttatgatgttttctccccagggaaccataagtaacaaaactgtaaaactccactttctttttcttgatctgcctctgtcctcaccatatctcacccaggataatatgattaaaacatagaacaatagttagtgaggtttgagaagatagcaactattcagacataaatcctttatactacagaaactctttcagattcatgaaa

SEQ ID NO: 357639 - DNA, 527 bp, Homo sapiens
atctcttgacctcgtgatcctcccaccacagcctcccaaagtgctgcgattacaggtgtgagtcactatgcccaggaatacaattattagtaatagcagcaagaaggatgaggatgttgaaaccataaattcctgttgacaaagcaattatcaaataaaartatttctatactattgaatcctatgcaacaggtaatatgagatagatctgtatgctttggcatggtaatatccttaagacatcactgaacaaaaataagataatataaattcattgtttgttactgtttttcataaaacacatgcaggaggaaaagtattgtgtttttgtctataaatatatttagagacaagaaaaaaaagaattttacagaatccccatcacctgataacagtacttaccctgagggtgacacgacaattggagttgtggtgagaggcgcagtggtttgactttttcaataaggatgtatttactcattatttgtacaactaaatataatttaaagaaaagaaaaacactggga

SEQ ID NO: 357640 - DNA, 540 bp, Homo sapiens
atcttaaattccatctgctgggccactgccattcacttttttcctatgtacttttattaactgattgtataagctcgtttttgcttttggaaatggatcattattattaatcccataataaatttctttatcacaaaattatagttaagggattatacaatgttaaaaaatacatatggtattaaatagctcaaataggttgcagaccatttgaaaagatcagccaattcattgtgtaaataaaagtttacaattcagtcacttccctttggcaatatctgtcagaattacaaggtccatgtcctttggcccagcgagtctacttcttggattttgtcttactgatatatcctcccacatgaagaatgatataagattactcataatagctgtattgayaataatgtatagtatattgccacttgtgttaaaaaataaataaaaagagaaacatatagtgtgcagagtgtgtcaacatttgtgttaaaaagaaattaaaagaatatgtatatatgtgtgtaaaatatttccagaagagta

SEQ ID NO: 357641 - DNA, 550 bp, Homo sapiens
tggctggtatgaggttacaactattgattcagggctgatgacttgggaaagctaataagcaaatctttgtggcagattcttcagattgactcactaagtactatttccagtccccttctacatgcttttctcttccacaggggctagacaactaatgagcatgttttctggattcctttgcagctagatttatgcacgtactccaggatattttcagcagacaaacccacataagacttggaagccaaagataaacaatgtgagatggcagctacacytagagtgctagttttccagagaaacaaaacaatatggtgttgtatatatgtacagttgactgacccttgacaacatgggtttgaaactcacacgtctgcttatatgtggagtttttttcaataaatgcagtcagccgtctttatcagcaggttccacatccacaactcaaagcaaatggaaaatacaggattagtgggatacaaaacctccatacatggagtgctgacttttcgtgtccttgagttccacagggcacaccgcaggacttgca

SEQ ID NO: 357642 - DNA, 553 bp, Homo sapiens
gaactcataggttaaatttgaataattatctgtatccaaggtcacctacaacagatttcaactctatttacacactttaggcagaaaaatgtgaaattcagaaatgaaatttaaataaattaaatatgtacacacacatacacacatatacatgtgtgtgcatataagtatgtatgtgtgtttactagaatatgataggactattcataaactttaacttatgatcttccatatttaaaaacaattctgcagtcaacatttattacmtttagaatttgaaaaaaataataatgattataaaaaagtataaatcctggtaacaaattttatttctacagtatatagagactttaaatgtgtaaacctttagtttacccattacccaaatagttagagatcaatgaatttatttataatacgggattttaataaacaatcttttcagcaatttgtgaatatgcttcattgattgtggaatcaataggctatttctaatgaatctggcatgttaatgaataatggtttgatccaaatattacattcaaagcagtga

SEQ ID NO: 357643 - DNA, 553 bp, Homo sapiens
gaactcataggttaaatttgaataattatctgtatccaaggtcacctacaacagatttcaactctatttacacactttaggcagaaaaatgtgaaattcagaaatgaaatttaaataaattaaatatgtacacacacatacacacatatacatgtgtgtgcatataagtatgtatgtgtgtttactagaatatgataggactattcataaactttaacttatgatcttccatatttaaaaacaattctgcagtcaacatttattacctttagaatttgaaaaaaataataatgattataaaaaagtataaatcctggtaacaaattttatttctacagtatatagagactttaaatgtgtaaacctttagtttacccattacccaaatagttagagatcaatgaatttatttataatacgggattttaataaacaatcttttcagcaatttgtgaatatgcttcattgattgtggaatcaataggctatttytaatgaatctggcatgttaatgaataatggtttgatccaaatattacattcaaagcagtga

SEQ ID NO: 357644 - DNA, 613 bp, Homo sapiens
actgcatgatactataatggtgaatatatggtgtacatttgtcaaaattcatagaactgtacaacacaaaaaggaaaccctgatgtgaactatggactttagttaatgtttagaaactgcttgtaattacattcccacatgaacaaacaatatgtagtaatttatgtaaaagcacatatgtatgtacatgtgcgttaaaaaagtatgaaaacatagtgactattatctccacctgaagagatttggaatcatttttatccatttccttatgcttttctgtattgcttatttttctgttattatttcatttttattaatatgaaaataatctgggctgggcttggtggctcatgcccgtaatcccagcactttgggaggctgaggcaggtggatcacctgaggtcaggagttcgagaccagttgggccaacrtggtgaaaccctgtctctactaaaaatacaaaaatcagccaggcgtggaggtgggcacttgtaatcccagctactcaggaggcggaggcaggagaatcgtttgaatcaggaaggcagaggttgcagtgagctgagatcgtgccactgcactccagcctgggcgacaagagcaaaactctgtc

SEQ ID NO: 357645 - DNA, 631 bp, Homo sapiens
tattacataacaattgtaattattaataacatatactaagtcatataasaattataagtgtttctcataagtttgaaacacataacaataacatattcatacaaaaagccaaagaccatttgatatttgacaatggttcctgtatgattcttatactaaaaaagccaaatttcacctttacattagtgtactattaatgttaaactcaattcttaataaaatcttatagacaaatgtatcaaattttaatgtctgaccaaaaggtaagattctcacaaaccttctataaccctttacaagtttttgttgaagagcagatcagtgctcacaaaaaacctgttgcacttttattccaatgtttaatttacagaaaaactgaatacccttttaactttagccaatatgttcacacacagaatctcttttacaattaatatttttataaaccttctacaacttgtttaaacctttagaatattccctatttcacttaaaacaatccttttactctttagtataggtaaaaaatccacattcccatgccttcttgtaattttttacaaaaacacatttcactttccttacatactttgcatgtaacactgtttctatttcccaaagattacttaag

SEQ ID NO: 357646 - DNA, 613 bp, Homo sapiens
tctgataatgttattattgatatgttatgatgtctgtctccctacctttgtctctgggacattatagttcctaactcactaaataatttgcatctttgctgaaatttaacactcttggtttgtcctatttatgcactaagaaataacagcttgcatcaattgcccattamtactactagactaaacttcatgtttctattaaatcattctttcttgatgggagggaccatttctgattcatttttagatctacagagtttatcatagtactgttcatagtagaccctatatgagtactgaattgaagcatacctgtctttagccaactgtttttatatctaccccctctggtttttctaattgaattcagatcacttgcagtgagatttcaactgctggagatggtggcatttccattcttaattaccagtgacctactcttacttattgatgttaactgtgggcttttaatgtcatgcctatcattgatctagaagccaaatacaatctcttcagtttgggtaaaattctgaacctacattgctttggatgacattattacacataaaccttaaacatattcctcataatgacaccaactcatagtctagaa

SEQ ID NO: 357647 - DNA, 475 bp, Homo sapiens
aacatgcatttggtcttcagctttccaaatgctgaatctgagaccaaagcaccagagcatctatttgataagccctaaatccaaagccaaacttctgtgtaaatgtagccggcagataaaatactggtattcgtaaatatctgaactagtattttattaagtatattttagcttcctttttctctttctccccccccccttctttttaatcctctctttccctcctttcctaagcaattccattctacagctatcacgtggtatacaaaaagcaggtgtctgtagtggtgattggggrgaaatagctgcagcatctatactcaggtggtcagagtccagtcaagatgagtaggacatccttctggagaatgatctagcagggagtcagagtccaagagaccaaagagaatgtcctactaaaagaacagcctgcatgggcctcagataaagacatccatgcaggggaagacttagc

SEQ ID NO: 357648 - DNA, 488 bp, Homo sapiens
acagctgtcatgtagatgaattgcaaggtactttgggagctatatgaacgtatcgcatggcttwtatcacacatacatttcctgcatcacctctggattaaaatgtcacctattttaagaattctagaaaagtacaaagaaaagcatgactaccaataccatggccaactgaaaattccgagtaaaaattaagcttgacagaatgtcattatcacacaaattagattggacatggaaattaatctttggaatttataaaataataaaattatcatatctttgtatttttattcatttgcttttaaaaagaaaatgtagaaagaaaactagttatcagcattttatggttaattaattcaggggttattcaatggcataaaatgacttgttataattgagaaatagctaatttaaatcttgcctctactacagcatactaaataaattatttttattataaaatatctcctatataatgtaacctcaat

SEQ ID NO: 357649 - DNA, 588 bp, Homo sapiens
ctacatagaacctgtgcagagttcctagcctgtggtacataaagaatgttgctttcagacaggcccaggggtcccaagttatcttgggacctcaagaggagaggaatttacccaactcataagtatttgatggcacaaagccattgttgggcttggctttttaaaaaagtcttatctgagattacttatagagttccatcaaagccaattttaaacacctatgtaaaaaataattattcttgcactttatacaaataawcaggccaagcataataaagcaaatcaatcttaccacgatttgtctgcgtaaatctgacacttgggagactggagagggaaaaattatgtttcaagaattatgttacacctgtttttaaattctagtctcctcagttatttttaaggtgtttttcctgttatttaggctgaccctgcttattcctctgaaccaaccactgttaggtaatgtaaaaatctggatcagtattctaattttgggcacacattggaatcagctagcaaccacattatcagcttggttccaacagttgttcagttcatgaaaaaccttcttatttagtttactta

SEQ ID NO: 357650 - DNA, 599 bp, Homo sapiens
gaatgttcatggaaacactttcataatagctaaatggtagaaacaacccacatgtgttaccagataaatggataaacaaagtatgatatatacatacaatggcatattattcasctacacaaaacagtgaagtactgatacatgctacaacatggacgaaccttgaaagcattatgctaagtgaaggaagacaaactcaacaggttacatgtttcatatttccatttatttgaaatatccaaactagttaaattcatacagagagaaagcaggttcccatttaccggaaactgaaacaggaagaaatgggagatgggggagtgattgctcaatggatgcaaggtttccttttgggatgatgaaaatattttggaacttgatagatgtggcgattgcctaactttatgaatgtattaaattccattcaattatatattttgaaatgattaattttatgttacatagatttcacctcaataaaatgaaatcattctacctgttatttcttttttgcactggtaaaatgaaaagtttaaaatacataatgtccaatgaaatttcctttctgtgtatatcaattctagttttggatttcagtt

SEQ ID NO: 357651 - DNA, 584 bp, Homo sapiens
aatatgttaggccacaaaacaagtctcaatgaaatttttaaaactaaaaattatatcatctatcttcttagaccacagtggaataaaactagaaatcactaaccacaggagcttcaaaaactgtgcaaatacaaggaaattaaaaatctttctctgtgaatcaccgctgggccaattaataaattaagaagaaaatcaaaaagtttattgaaataaataaaaatggaaacacaacaaattaaaacctatggaatacaggaaaagcagtgytaagataaatacctacataaaaaaaaatctaaaaatgtctctcaaggagctagatagccaaaaacaaattaaacctaaaatcactggaagaaaaataatgactatcagcaaataaataatactaaagatcaataaaataaaaaaattatatttttgacaagataaaattgataaattactaggtagtctaaccaagaataatataaaaaatattcaaataaacaaaattagaaatgaaaaaggagatattaaactgatactacagaaatacaaagatcatcagagactattataaacaactatttgctaacaaa

SEQ ID NO: 357652 - DNA, 570 bp, Homo sapiens
accactatgttaaaagatggaaaaaagagtccaaggagaaaaatgagctaggaaaatgaatgcatattttgtaaaggcctctgcctttggaaagatggaaacatgttgaaggacaaactagctcactaactagaagagtgttcacgagaggagtgagataaggctgaaaaagtaagatgaggtgagaaaagtggygaagtacagaggacttgaaatccaagccaaagatttcaggttttgttctcatgtagaggagagccattgaagatttttggacaggggagtaacagtgtcagagttacgtactaggaagattaatccatcagtgataaattgcaggaagtaggaattagacctgggcaagagactagtggtgtattataatactgactgaacaagagtgatgtttgttatttcaaaaataaaacataactatatgaaaaatactttatacatttgtaaacactaacataggataaagcatcattgctattatcccaaatagagatttgttttcttataaagaaattaaagtttaaaaaaccttcccctttaattgtgttctttcaa

SEQ ID NO: 357653 - DNA, 470 bp, Homo sapiens
ctgtgaaggctggctcctcataggtgctgccttcttgctgtgtcccttgcatggcagaaatgaagatgggccaagtaggctcccttaagccttttatgagccactaaggtatttgtaaggtgcttataaaggtgtgcagagccctcatgacctaatcacctcctaaatgtcccatcttttaatactatggcattgagtattaggttacaacataygaatttccagggaacaccaacttttagaccatagcattctgtccctggacccccaaaatttatgtccttctcacatgcaaaatacattcattttatccgattagcccaaaaagtcttaacctgttccagcaccaaccacaggtttaaagttcaaaatctcatttaaatcagatatgggtgaaattcatgatgtaattcattctgaggcaaatcctcctccagctgtgcgtctgtgaaagcaagtacattatgtgc

SEQ ID NO: 357654 - DNA, 557 bp, Homo sapiens
atttggagaccatcaagagattggtatgtcaaaaacagttcttataaatatatcctcagcaccaactatgaattaggtcttgtgccaaggaccacagtcacaaaacggaagtgtaaaacattttctctgaacaagttacttacagactagcaaagccaataaacactacattctgaaaatgattagaacacatttaagtgctctgcttccacatataaagaatggcttttcagttgcagaggcaaatctgtagtactacccacctggaaacagggacaaaagtattttaaatgcagcagagtaccagttacatgagctgacttcagaatatatttcttgaaagtcttaaaatgtaatttcttttcttaaggttacctacacctttctcttaatttagctttctttttgccacgtctggtaatttgctcacatgctgaatttctgctagaaatatcagtctatyctgtaattttctattacacaagctggagttgggggctcttttacacattccctgcaagctacagatgcaaattacatcctcctctccaccaagg

SEQ ID NO: 357655 - DNA, 545 bp, Homo sapiens
atcatggttgtagcaattacagtagatgattgatgggctggaagggagagatttggaaaacagaaagccaccttgatggatatgtaagcaaaaaattttaatccttgaaaatacaaaagaaaaacaaattgcttcatggaaaatatttttctaaacatattcatatcagcaactgaactacccaggtaacttttatcgtctggaatgtactcttcctgtgataagcagagtggaataaatgaatgactacatgtgtgggtcacatccaggtatatttcattgtctaaaatttgcctgttaccatgttaagcacagtagaataaatagacaacggattagtaaaatgtttgwagttttttgagagtatcaaaagaggcatctaaatataattatgggtgcatagtaggtagatggacaccaaactactcattttattcattggctatttgcttacattttaaaagcaaaactttaaatgcaaaccaaacaaaaacaagaagtctcaaatatgcacctcatgataatccaaatggaagtttaaagag

SEQ ID NO: 357656 - DNA, 520 bp, Homo sapiens
acccaaccatatatcattttaagcatttaactcattatttctcacagcaatcctataataagagctatagctatcttctccattgtacagctgagtarattgagtcactgaaagaaaaggaaatttgtctgaagtcacagttgagaagtatcaagaggtcggagttctacctggtcattgatgctagtctgtgttctaggtctctgttgcctcctgatgctagcaaaaatgatgggagatcctcaaattatacttgggctgaagttaggacacaacctcacataacagtttacttcttgagagtattgctcacattttctttgtgagtccatggcttccccaatgtataagtagaagtacacttcttattctgctatatcctaaacccatccttgtttttgagtcacttctgaccaatttggtgttatatcatgaggataaacccacctttggtggagtagtgtgaactcgtctttcatttgagaaacaaacttgatgtgcctgagtaattctgggaact

SEQ ID NO: 357657 - DNA, 562 bp, Homo sapiens
tttgagcagctactctccggccgtttctttcacagtacgctctctgagattggcctgggaagattcttcctcagaataagttttcattagctttctacttctttcttgctgctgccctggaaattgtgatggctgtaggcttttgtatgactgtcttcatggcccattttttattcacttacactgatatttcctcctttatcctcacagaaacagatttgacttcagtaaacaaatactgttaccagaaaggggtcctgatccagaccacgagagagtgttcttggatctcacgcaagaaagaattaaaggcaaatccatagagtaaagtgaaagcaagtttattaaaaaagtaaaggagtgaaagaatggctactccataggcagagcagcagcacgggctgctctttggctattttatggttatttcttgattatatgctaaacgagggstggattattcatgagttttctgggaaaggggtgggggcaattcccggaattgagggttcctccccattgtagagcatgtagggtaactttctgatgttgccttggcatt

SEQ ID NO: 357658 - DNA, 538 bp, Homo sapiens
gataaatttagtgagtagaatcaacatacctgaaagcaggtagactgcatggacatggagtaaaagggtaaagaaggcatttaagactcttctgggccctggtttaagcagctggagtgatgtgccattcaaagaaactagaactatgctcacatagttctygtgaaattctacaggactatgatgttttgggtgcaaaccaattcagcataaagtgcttagaggcctccaggttttctcatccttttaggaatgtggagctagatagagtgaactctatccagagatctctaaatccagagattggagctggagacagaggttggagaacattcagtatgggaggcatttaaaactcatcacagcaagattccttggagagtgcgtggagagaggccggagtgctggaattacatatggtgcagctacaggtttcacatgaccctggagacttaacatatttcacctgtagctctgcatcctaaaataattatctagtagcactgactgcttacagctggaaatactatggtaccca

SEQ ID NO: 357659 - DNA, 591 bp, Homo sapiens
atgggattactgtggaaagagtggaggaaattgacttgaaactttttctgaaattctctcttccatttagatgtggacttggcagtctatggagctaatgacattatttaaagttcactagagaaagctctatacttgccccagattacagaaagtttctatggcttgatgcagagaggggagcccagtcagagcccaggcagagcccagtaaacttcctacatcaaggagagggaaccaagatccagaaagacctagaaggctagmgttttcagaacaagaatacaggaaagaaaagtgttgtacagagaaggaatcagcatacgtgtgggataaaactgctcaaggcccagtaaaaatctgtaaaaggattagagagaatagtaattggtgctcacacaaggctgggaatagtgcctttttccacctgccatggaaaattcatcatttacatggcttgagtaaagtactaaggtcttgtgttagaagagggatgtggctagccctagactaaacttcgctctgatcttactaaacaaatcttaaaggcaagatccaaaagaagaaaacaattcttggagttatatttca

SEQ ID NO: 357660 - DNA, 591 bp, Homo sapiens
atgggattactgtggaaagagtggaggaaattgacttgaaactttttctgaaattctctcttccatttagatgtggacttggcagtctatggagctaatgacattatttaaagttcactagagaaagctctatacttgccccagattacagaaagtttctatggcttgatgcagagaggggagcccagtcagagcccaggcagagcccagtaaacttcctacatcaaggagagggaaccaagatccagaaagacctagaaggctagagttttcagaacaagaatacaggaaagaaaagtgttgtacagagaaggaatcagcatacgtgtgggataaaactgctcaaggcccagtaaaaatctgtaaaaggattagagagaatagtaattggtgctcacacaaggctgggaatagtgcctttttccayctgccatggaaaattcatcatttacatggcttgagtaaagtactaaggtcttgtgttagaagagggatgtggctagccctagactaaacttcgctctgatcttactaaacaaatcttaaaggcaagatccaaaagaagaaaacaattcttggagttatatttca

SEQ ID NO: 357661 - DNA, 547 bp, Homo sapiens
cactatactaggtgctgagatacaaatattaacagcggaagagctcatagcctaggcaagaagactcaaaaacagagcacagacttaaaagcctctcttgtagctcattgcagcctcaaatttctggataaagtaatgctctcacctcagcctcccaggtagctaagatgacaagcatgaaccaccatgcctggctgattttatttatttatttttttgagacagattctcgctctgttgcccaggctggtgtgtagtagcataatctcagctcactgccacctccgcctcccgggttcaagtgattctcccacctcagcctcccgagtagctacgattacaggcatgtgccactaggcccagataatttttgtttttagtagagatggggtttcaccatgttggccaggctgatctcgaactcctgacctcaagtgatctgcccgcctctgtctcccaaagtgcagggattrcaggttttggactccttgtctcaagggagcctcctgccttggcttcctaaagttctgggattatagttgtgggt

SEQ ID NO: 357662 - DNA, 577 bp, Homo sapiens
ttggtttcagttacactgtactatattcattccaggacaataagcattttaaatataactgtatgcatcttctacccttgagtagtcaagatgcatggggaatrtgaaattccttttctaagtttaggaaggcctaagctctgcttatgtctacaaagatggagacttttctgatacacaaaataggaaagatgtcacctattttatcttgaattgtcactttgatcatttattgtcaattaacttttcccatgtttaagactcatcccagtattagatttcatgctccctgaaagcagggactgtgtcttgaacttcttagtatcccccatagcatttggtgcaatggcttgacgatgccagatacaagaagtatcttttggttcaatttggtaaactacatgcattaaaacatccactgtatgctttttttttttttgagacagagtctcactcttatcacccaggctggagtgcagtgcagtggcacaatctcggctcactgcaagctccgcctcccaggttcaggccattctcctgcctcagcctcccaagtagcttggactacaggcacccg

SEQ ID NO: 357663 - DNA, 534 bp, Homo sapiens
ttgactctgtgtccccacccaaatctctggattgtaatctgaattataatccccaggtgcagagggagggacctggtgggaggtgattggatcatggggcagtttcccccatgctgttgttgtgatagcgagtgaattctcatgaaatctgatggttctataaatggcagtttcccattctttcctccttcctgccgcctggtgaagaaggtgcctgcctctycttcaccttctgccatgattgtaagtttgctgaggtcttcccagccatgtggaactgtgagtcaattaaacctcctttctttataaattacccaggctcaggtggtattctttatagcagtgtgaaaatggactaatatagttagtttattattattttttattccacctcagcatatttcattattcatttataaggcgatatttctaaatacttgtgttaagacttttttgtcctaagcatggacttaaaaaaatgaactttttttcatcttatggtgctatgaatgagctaatagaagatattatgta

SEQ ID NO: 357664 - DNA, 534 bp, Homo sapiens
ttgactctgtgtccccacccaaatctctggattgtaatctgaattataatccccaggtgcagagggagggacctggtgggaggtgattggatcatggggcagtttcccccatgctgttgttgtgatagcgagtgaattctcatgaaatctgatggttctataaatggcagtttcccattctttcctccttcctgccgcctggtgaagaaggtgcctgcctctccttcaccttctgccatgattgtaagtttgctgaggtcttcccagccatgtggaactgtgagtcaattaaacctcctttctttataaattacccaggctcaggtggtattctttatagcagtgtgaaaatggactaatatagttagtttattattattttttattccacctcagcatatttcattattcatttataaggcgatatttctaaatacttgtgttaagacttttttgtcctaagcatggacttaaaaaaatgaactttttttcatcttatggtgctatkaatgagctaatagaagatattatgta

SEQ ID NO: 357665 - DNA, 588 bp, Homo sapiens
ggtcatttattcatctactctttgagattttagtctgcagttgggaatttccaattttttttttttttacatacaataccaggctttctggatttggtggtttttttggagacagtcctaatttaaaacattctgccttgtctccataagtatattcatgattagtagtcagtatattctggtggttgtttcaggttgttcagttayattgagtttctacatccgaatcctgtttaaagagggcctagtagacatcttctgcattatggactttgttcacttgctgtgacaaagtgcatactgactggtctttacactgtaaggtagaacctcagctaagctctcttattctgttttggtttggttctttacttagcttctcttttcccaaactctgcagatggacattagactcattcttatttcaaggactggctcaaatgtcacattctgcacggtctttttcaattcctagagccagaggactcttgcatccatgctatattctactttgcttagaatgatcatattagctatatgtgttcactatcacaaatcccttaatagagagtaaaccagagggtaagg

SEQ ID NO: 357666 - DNA, 600 bp, Homo sapiens
taaaagcacttatctttggacttctctcccaaagacctttcctcagagaaaactctggatgactctggagtcaatggctgctatggatttctaagagtagaaggaaatcttgcgttccttggtctggtctcctctggtgtctgataatgcctgctgcccccaccaaccccaaggaaccacacacgctctgtggaagcacaagtgggctttgcttttatctwcttgttggtcctggttctatctgtggagacatggagagtgagccttacgcatcttaccatgacatggcccttcctgtatttgaaaacaggtgtgagcgtcccccgaagacttcttttcttccagcagaacattctgagttccttataggacatgatatagaaatctctctttctctccagctactatactgaatgcacttcagtttgtctgtggtccttttaaacagaagcattcaaaattgattgcgtggctccacaaggagtaggtgaactatcacctcccttgctttagtccacacttctctgggtgcagcctgagagtgcatttgatttttccagcacctcatcacataagtataaactcctcctccccctactt

SEQ ID NO: 357667 - DNA, 531 bp, Homo sapiens
ttgtttgtgtgaaaaattcctcagggcttatttaaaagaaagaaaattgatactgaaccttgtcttattctagcaatatgtgagattcattcagagttttatggatattttatggggttcattaagcatttgatttcaaataaaatttcactttttaagttcatgaattataaaaatatatagcatatctattttgttatgatcaattgtatataaatcataattgtaatgataactcaatcctgaaaacatttcttcacacttgaaagcttaagaaacaaamcaaatttaattgattcaaaagaaatacagtaagtgagcgatacgcataaaaatacattaggataaaattacataagtaaaataatatacatatgtgttcatgaataaaaagaggaataatacaaaaatgtttaaatggataatggtggatatcaaaccaacatggcatttagatcccgttacacacttttaaaagcataatgtaatcattttattttaaatgtcagtgtttagaattcaatggaaatg

SEQ ID NO: 357668 - DNA, 531 bp, Homo sapiens
ttgtttgtgtgaaaaattcctcagggcttatttaaaagaaagaaaattgatactgaaccttgtcttattctagcaatatgtgagattcattcagagttttatggatattttatggggttcattaagcatttgatttcaaataaaatttcactttttaagttcatgaattataaaaatatatagcatatctattttgttatgatcaattgtatataaatcataattgtaatgataactcaatcctgaaaacatttcttcacacttgaaagcttaagaaacaaaacaaatttaattgattcaaaagaaatacagtaagtgagcgatasgcataaaaatacattaggataaaattacataagtaaaataatatacatatgtgttcatgaataaaaagaggaataatacaaaaatgtttaaatggataatggtggatatcaaaccaacatggcatttagatcccgttacacacttttaaaagcataatgtaatcattttattttaaatgtcagtgtttagaattcaatggaaatg

SEQ ID NO: 357669 - DNA, 531 bp, Homo sapiens
ttgtttgtgtgaaaaattcctcagggcttatttaaaagaaagaaaattgatactgaaccttgtcttattctagcaatatgtgagattcattcagagttttatggatattttatggggttcattaagcatttgatttcaaataaaatttcactttttaagttcatgaattataaaaatatatagcatatctattttgttatgatcaattgtatataaatcataattgtaatgataactcaatcctgaaaacatttcttcacacttgaaagcttaagaaacaaaacaaatttaattgattcaaaagaaatacagtaagtgagcgatacscataaaaatacattaggataaaattacataagtaaaataatatacatatgtgttcatgaataaaaagaggaataatacaaaaatgtttaaatggataatggtggatatcaaaccaacatggcatttagatcccgttacacacttttaaaagcataatgtaatcattttattttaaatgtcagtgtttagaattcaatggaaatg

SEQ ID NO: 357670 - DNA, 587 bp, Homo sapiens
gtcaaccatgtcgaggccccagcacagctaactgaatgaagttcaagaccaggcttaagagtagctgcactgcaggaaaccaaggcagatactcacttatatgaagtaaatcaacccaggccccaaataccaggaatgaggaggcaagacctcaggagactctggtctctgatattggtgcagggactcgagccagctgaacctcttgcaggttaaatgcctatagctggcaaggttggagattgcaggtattgtgaaatcaatcccttggaaataggctgagtcaagaaatattcataaatgaaggaagaggatacatgaagagagacgaaaagctgctgcagagactawtatcttgtgattttctcaacagacgtgctcttaacatacttttactatttttggaactccctctgactgatccgggtctgggtgaaatgctttcatcagctatagtcttacaggaaaagggaacatgttttgcagctatctcttaaggcagtgtttctcaaagtaggaaatttgcaccccaagaaatggtgtgtcctgcatcatttcctcacatcccaatagctggaaaaaatgtc

SEQ ID NO: 357671 - DNA, 573 bp, Homo sapiens
agaaggagttaatataaaatgcccattaaagctagctagaaagttaaaaatgcagtaggaaaatatgtaacgttgtagagttagagggagtaagtatccaaataatgcaaaacttgaatatgtattttaccaaagatatttagataagttttgattttgggttttgaagtgggaattacaaaaaaaaaaaaaaagagagagagagtccaagaaatatacttgacaatgtgtcatggtraaagctgttactttgacttcacaccggtcatgcctataactccccttttatttgtgaaaagtctgagaattctgtgcaaaataaatgagaaataaaaccaaagccctctttctttccaaaatattcaccaacccagcctggtgcctttttattttattttgtttttgctctgagagattgtttgaaggagtatttgtatccctaggtcagtatttctccatctaggcatgctgacacttggactagataattccttgtcttgagggctgtcctgagcattgccagatgcttggcctctacctgctagatgccagtagcaacaactcccacacagt

SEQ ID NO: 357672 - DNA, 559 bp, Homo sapiens
ggcttgctggctttcaaataatatgtataaatctgtgtgttttcttccagggtctttcttccctgatttcaagccctctgaaacagtttttaaaatagtattttggctcggatatctaaacagctgcatcaaccccatcatatacccatgctccagccaagagttcaaaaaggcctttcagaatgtcttgagaatccagtgtctcygcagaaagcagtcttccaaacatgccctgggctacaccctgcacccgcccagccaggccgtggaagggcaacacaaggacatggtgcgcatccccgtgggatcaagagagaccttctacaggatctccaagacggatggcgtttgtgaatggaaatttttctcttccatgccccgtggatctgccaggattacagtgtccaaagaccaatcctcctgtaccacagcccgggtgagaagtaaaagctttttgcaggtctgctgctgtgtagggccctcaacccccagccttgacaagaaccatcaagttccaaccattaaggtccacaccatctccctcagtgagaacggggag

SEQ ID NO: 357673 - DNA, 393 bp, Homo sapiens
tccagtgtctctgcagaaagcagtcttccaaacatgccctgggctacaccctgcacccgcccagccaggccgtggaagggcaacacaaggacatggtgsgcatccccgtgggatcaagagagaccttctacaggatctccaagacggatggcgtttgtgaatggaaatttttctcttccatgccccgtggatctgccaggattacagtgtccaaagaccaatcctcctgtaccacagcccgggtgagaagtaaaagctttttgcaggtctgctgctgtgtagggccctcaacccccagccttgacaagaaccatcaagttccaaccattaaggtccacaccatctccctcagtgagaacggggaggaagtctaggacaggaaagatgcagagg

SEQ ID NO: 357674 - DNA, 528 bp, Homo sapiens
ccacctcttaataccatcacctcggaatttaggctacaacatatgaattttggggagaacacaagcattcagacaatagcatatacatagaatagaatcactgtggagctcttataaaccatgttttggtataaatgtaataatagaatgagttcatgatataatataagtgaaaaagtaagatatataattataggtacagtatgattacactcttttatataatgtatacaatgtataatatgtgaaatatatatgtatgcataataaatacatgtacataaaatatttcctggtatgtacatgtgtatatatatttttccatgtatataatttatacacattaacaaaaaatgagaaaatatgacaaatatttaacaatagctayttctccagtggcaggattacagataatttttattttcatacatttctgtctgacttttccaaatgtgctattatgagcataaattttataattaaatacaagtcaataagcattttaatgtgcctataacagcccatcag

SEQ ID NO: 357675 - DNA, 581 bp, Homo sapiens
agaatctaatggtgtatcactgaatacaaaaagagccacctcaggtaacaacttcaatccttgaaatgaaagtgttcccttcctgttaattattccattattccctaatgtttttaataataaaacttaaaaagtttgccacttcctgycctacttgatcatggtttgtttttacttaatagactggtagatataatcgacaactttcattgtatttcaacttcatttctaaatgatacaagtctgtgggattgtttgttttgtggtgacagtgggttgttcatatttactttttatttgttttcttttgatttggctctatttctcagttttgagatcaagattatgctagctttgaaagtgaattaggaagcatttttacatacttaaagactctgaaaatacttatatagcatgaatataaattatttggatccaacagtttctaaggataaattttgtcaatttttgtgtcttctataatcattatagttttcatatattatttctccttgaataaaattagacaaatatcttcaaatttatcaaaattcttcatgttatctgcatacggtttttta

SEQ ID NO: 357676 - DNA, 606 bp, Homo sapiens
  misc_feature (1)...(606): n = A,T,C or G
taaaatcagccagtcagcccacatttgcttctctggcaacatggaaatgctgtgtttgtattttaaacaaatgtaacaaggagacaagcagaaacgctgcagcaagccaggaaatgtcaccgggttcatggttaaatggcgtcctnttatttactaaagtataattttaatttcacaggcaaaatgaacctccagatttgttttccttagccccagcaagtcaagtccttcctaactgttagttgattgcaaaagtgcagcttcaagtctgtcccttttgctttcatttcccccctgccccacctctgctccatcaggtttgtaacacaagcagacactctttcatacgcttcaatgtagcgtgasgtgtgacccttggatggtgtgaaagccagcctttggggatattatagtgattcagttattttctgttttttctttttgttgttgttgttgttgttggaaaaacttgttttttaaaaacatgctgcataacatcttcttgctaaaaacaatttctcaattagtaggaacactgaattgctttgtatatgatttgcttgttaagaagtccaaagcatttggttattcttaagaattaagcac

SEQ ID NO: 357677 - DNA, 479 bp, Homo sapiens
gttcagggccacttaaataggtacagagatgggaactgcaatgaagcccaggcccgtggytcccagtccatcatcggtcttctctcaacaccattttccaggtccttccagtgcccttcctagcatgggcattggggtggagttgggaaggtcacgtttagcaagctaagaggtgagcacaggagaacaccaggagaacacacaagagagcgcagctctttccagtatttctctttttcaaaactccctgcagacttgacttacttgcctcttctcatacccataatgttgtatttattctctgggaaaatttttttttgtaatgtgactatgaaatctcataccttaccatatcatgtgcaaaaacttggcatgtagtggatactctgaaaatacaatttttactatttaaactttatctttgtaaatcatcatggatgcattataggcagcaaaatgatttcgttgtcaggaatatt

SEQ ID NO: 357678 - DNA, 511 bp, Homo sapiens
atctacctggaattcatgtttgtattttggtagattatgcctcacagtatttattttgaaatggttagccagatagtctcaaaaggcttatcaaataatccatcatttcctttcttatttggaaaaccacatttgttatattaaaaagaattttggatctattttggaatacactcgcttcttttccatttatctgtctctctgctctagtattgctgtcacattactttaatggctgtggttgcataatacattttaatattctctagkttaaggcctggatgaatattctttttcaaaattattttgtctattgtacattcattctgccaagaaaactctggattcattttgtcactccatttacttcccaaactacttttgaactgttgtttagactttagttttaagcacatctgctaacatctcctggaaaattgattaaacaatgatgttgggaaatgctgctttgatattttgacagatatgacactgtccattggttttagat

SEQ ID NO: 357679 - DNA, 511 bp, Homo sapiens
atctacctggaattcatgtttgtattttggtagattatgcctcacagtatttattttgaaatggttagccagatagtctcaaaaggcttatcaaataatccatcatttcctttcttatttggaaaaccacatttgttatattaaaaagaattttggatctattttggaatacactcgcttcttttccatttatctgtctctctgctctagtattgctgtcacattactttaatggctgtggttgcataatacattttaatattctctaggttaaggcctggatgaatattctttttcaaaattattttgtctattgtacattcattctgccaagaaaactctggattcattttgtcactccatttacttcccaaactacttttgaactgttgtttagactttagttttaagcacatctgctaacatctcctggaaaattgattaaacaatgawgttgggaaatgctgctttgatattttgacagatatgacactgtccattggttttagat

SEQ ID NO: 357680 - DNA, 624 bp, Homo sapiens
tgcttatcccactgagttttgtgcttttgtatgttttatgttgtttattagcagacttttgttttagcttaaagaactccatttagcgataccagtaaggcaagcctagtggtcatgaactcccttagatttgtctgggaaagcttttttttttcccttatttctgaagtacagatttttcaggtaaaactgttcttggttgtcaggttttgttttgttttgtttctgttttttgtttgtttgtttttaacttcagccttctgcatatatcatagcactctcttctggcctgtagggtttctgtggagaaatctactgatagccattttaggactcccttatatgtgttatgtttcttatctcttgccactcttagaatttttctttgtctttgatttttgataatttggttgttatgtgtcttagtgaactcctctttgggttgaattttactgaagactaagcttactaaacttggatttttgcatttttctaatatttgggaagttttcagccattatttcttcagttatgtttactggttttttatctgtctcttatcmttttgaactcctgttatgaaaatgttagttctaatgagaatacatggacacagggagggga

SEQ ID NO: 357681 - DNA, 552 bp, Homo sapiens
tgagatttgggtggggatatactcaaactatgtcaggtaggaaatgcaattcctcatagagatattcagtgacatggtcaaaggggttactgacaaagctggaatgcaccctggaatgccctccctgattcattattttttgttatttccacttcttyccccctgcttttccaaagcatttttattcatagttaagtcatgattcagggccccagggtgaggatcaccatgtacccaggtttccctttgcctgggagaaggatgaaggacataggaggggtaagatgcagccagttcagatctttccaggaaatgtgcctttagcccagctgtcatcctagactgaaacccaggagcagggcagaagaacttgtacacacactggtatcattcacacatagagacatcacacccttcagcggttgttgccttctcacagaggtggaagtccaggaagttctgccagcagttcctagtctggttggggaagcgtctgtcaaaaggggcagtcttgtagttcttgattttggtcttcatgtcttttgccaaggt

SEQ ID NO: 357682 - DNA, 591 bp, Homo sapiens
tgtcttctggcaaagaattttagcttccttgtcttacttggggattagaaattaatttcagctgtgggatttttgctactcttagttctatttagtgcctatcccagacctgtgaggcccaacaggtagcagggaatataggaaagagtagatcactccagactgggagtccctccacggtgctcctgcatcctgctctgctctctgcagtggtgaatctcaacctcaccttcctgcactttcctgctccggctgcctcctgggacttcactcctcagctgtcagaactgcaacagcttccaaactccctcccatctcccagacttttcctagtcctaaaccttccaaacaactgttccattgcttcttgtattccaacataaaataacagtttatggttgaaaataactgccaccctckcccccccaaaattctagaactaaaaaaaaaaaatcaaaattgagatttaatttgtttaaaaggtgcacactgttttactatcggttttgtggttatcctagagatttactcatttatgttaacatatttaatagcagagtaaacacagctaaagagaaaattagtaaacta

SEQ ID NO: 357683 - DNA, 555 bp, Homo sapiens
tgaaataaatggcaataataacataaaatcaaagaaagaattaaaggaaggcaaaacgttctagggtccttttgttgtttcagaggagagtaaaaggatcaattatcagaaactttgataggtcaaatatatatgttgaatttttaaagtaactactaaaataatagtaaaacagtgcataaattccaaactaacagaggaaataggtggaataaaaaagtctcaataaattttagagaaagcaaaatcaaaaaacaaacacagtagcagtagcacatgctaagataagaaatttaaatctacactagtaagtacattaaacataagtgtacaaaatatttcatctcaaagctgaagattgtcagactggttcaaaacaagagcaacagagtcccttcaagaattcctctagatttccacaaagcagtgattctcacaaccacacacatggggacctcacatgatctgaactgtgsccatgtggccaaagcagctgtgccttttcttaatattcttccttatttcccactaaagatgagtatttcccatcatatg

SEQ ID NO: 357684 - DNA, 537 bp, Homo sapiens
atggcagaactttgcatagggtgctggaaaattcaggcaactgctctgacccagcacaaactaagaagctcagcaatgactcagtcactcctcttgagagcaattaagctgctgtaaaacatgtaggaacctgataagtagacatacaatcagtccctaaatcccaccttctcctagcaccatattgctaaggcaaagcagagacaattcattcggcttgcatattttcctcaagactgtctttcatacttctctgaatgagattttgtttctatcagcaagtgtttaagaaactatggagaggaagaggaagctggcatatggcttcaaaataacttatttctgttgayatgaaaagaaagccttttatatttcaataggatatcttcatgtatttagcattgttctggaaataatagttaatgcaatgagccaaggaaaaggtgagttatatgtattgagaaggaggaggagcagagttagtaaacattgataatttttgtatgtctggataactcaaaagttattagctggaaa

SEQ ID NO: 357685 - DNA, 556 bp, Homo sapiens
cattctctcagcacagacttcttaaataacagtttttcattttgatgaagcccaatttatcttctttcttttatgggtcatgcttttggagttgtagttaagaaatctttaaccccagaatccttgactaactccagatgacaaagatttttytactacattttcttctagatgttttacagtttggagttttacatttgagtctatgacatgtttgagttagtttgttgcaaagagtgagagggaggttcaaactcctgtaggatgggggctggcatgccaggggctttcatagggtcttctccatattccgctttaggtcttcccattgtgctacaagaagtgtgtgtggacaaggtactgagcagctggtgggcgctgaggtgccacatggaggtgtgagtgagccagtgtccactcgagtgtttgtgtgaccgcacaggtgctctggtctgggtgccatgcaggctgcctcagtgtgttaggcgtgtgcacatgagcgtgtgcacacaatgtggatgcacacacacacacacacacacacacacacacacac

SEQ ID NO: 357686 - DNA, 608 bp, Homo sapiens
taactcccactggagaaaattttaaaggggcggcagaattgttttaagccatgttttaatayggcatgagccgcgtttgctcaacacatttgttttatctgtggatgtcctctgacccacggggccacatgagctctaggacagggcctccattctgtcaccactatattcccaacgtccagtgcaatgcctggcacagagtcagagctgggcagatgctctcttcatcaatcatgctacccaaagaaatggtaaatgagccaagaagaccataatatttctatctgatgccatcaataattgacttgaatctcttccatcatgtgaagtaattgggggataacttatccgcttcctttatttacagattccggcagtgacctctgtaggtatccaaaatgacactggatgagattgcttcacgtcaatatatttttttcaaatagtattttgctgctgtttaaaataatttgggggctagcacagtggctcatacctgtaatcccagcattttgagggtctgaggtgggagaatcacttgaacccaagagtttgagaccagcctgggcaacatagtaagacctcatctctacaataataaataaata

SEQ ID NO: 357687 - DNA, 503 bp, Homo sapiens
caaattattgagcttcatctcagccaataaaatcagaaactctgagggcggggccctgcagtctatggyttaatgggccctccaggtgatcctgatgcaaccagaagtttagaaccagccaagtagcttagattaataaacttgcatttctggtgctatggtttggatgcatgtccctccaaatcttatgctggaattttatccccagttttggagatggggccttgtggaagatgtttggctcatagggatggagccctcatgaatgtcttggtctcatcctcatggttatgagtgaattctcaattctcactctgttagttccccccaagagctgattgtttaagagacctgacaccttcccattctcttttgtttcctctctcaccatgtgatcgttgcacaccttggctctccttcaccttccaacgtgagtgaaagcttcctgaagccctcaccagaagcagatgcaggagacatgcttcttgtacagcctgcagaac

SEQ ID NO: 357688 - DNA, 608 bp, Homo sapiens
taactcccactggagaaaattttaaaggggcggcagaattgttttaagccatgttttaatatggcatgagccgcgtttgctcaacacatttgttttatctgtggatgtcctctgacccacggggccacatgagctctaggacagggcctccattctgtcaccactatattcccaacgtccagtgcaatgcctggcacagagtcagagctgggcagatgctctctycatcaatcatgctacccaaagaaatggtaaatgagccaagaagaccataatatttctatctgatgccatcaataattgacttgaatctcttccatcatgtgaagtaattgggggataacttatccgcttcctttatttacagattccggcagtgacctctgtaggtatccaaaatgacactggatgagattgcttcacgtcaatatatttttttcaaatagtattttgctgctgtttaaaataatttgggggctagcacagtggctcatacctgtaatcccagcattttgagggtctgaggtgggagaatcacttgaacccaagagtttgagaccagcctgggcaacatagtaagacctcatctctacaataataaataaata

SEQ ID NO: 357689 - DNA, 608 bp, Homo sapiens
taactcccactggagaaaattttaaaggggcggcagaattgttttaagccatgttttaatatggcatgagccgcgtttgctcaacacatttgttttatctgtggatgtcctctgacccacggggccacatgagctctaggacagggcctccattctgtcaccactatattcccaacgtccagtgcaatgcctggcacagagtcagagctgggcagatgctctcttcatcaatcatgctrcccaaagaaatggtaaatgagccaagaagaccataatatttctatctgatgccatcaataattgacttgaatctcttccatcatgtgaagtaattgggggataacttatccgcttcctttatttacagattccggcagtgacctctgtaggtatccaaaatgacactggatgagattgcttcacgtcaatatatttttttcaaatagtattttgctgctgtttaaaataatttgggggctagcacagtggctcatacctgtaatcccagcattttgagggtctgaggtgggagaatcacttgaacccaagagtttgagaccagcctgggcaacatagtaagacctcatctctacaataataaataaata

SEQ ID NO: 357690 - DNA, 585 bp, Homo sapiens
agaggctgtctacatttcttgacttacagtccctttctccatcttcaaagccagcaatggtgggctgaatcctcctcagattgcgtcactctgaccttctgttctagagttaaatcttccctctgcctctttaagaaacccttgtgatggcatcaggcccacagataatccagggtaacctcctatttaagattggctgattaacaacctaaattccatctgcaaccctcaccatgtaacataacaaattcacagctaccagggagcattcctctattttcttagtcctctatgtttttacttatttattagwtctttattagcaaattttagtgaatttttaaaaatatttatatttgtactttaaatatgccatggtaaattggattattgtctaaaattcctcactccagagcaatatattatttctaccccattgatgttgggcctagacatgtgacttgcttcggccagtgaattttttgcagatgcagcatgagcagaggcatgaaatgtgctttactggttggcttggttgcttatgctcttgtggtgtgctatgagaagatttcctctgggtatctg

SEQ ID NO: 357691 - DNA, 588 bp, Homo sapiens
ttgcagatgcagcatgagcagaggcatgaaatgtgctttactggttggcttggttgcttatgctcttgtggtgtgctatgagaagatttcctctgggtatctgctgccctttcacctggatccagagctaatacaggtggatatctaaacccagtccatggcctggagccaagcccagatggcccacagcctcaggcagggctatctgacaatatcatttctaatcagcccaaacctcggtcagacaaaggacacatcaayaacaatgatgttgtgatgttctggtacaccactaacttcttgaggttggttgttatatagcaaaacctggctatatgatttgtattgcgactgcctttttttccagcttccaggggctggaagtttaaacgttatgtttttactctcagccattacatgaaatcttcaatataatttattccccatctattttttgtttttaccttttcttcccccagtttgggtaaggtctatcatttctgtaatgttttacaatatataacattcaccttctctcctgccaattgaataccctcattaatatctcttagttcttccatcaaatat

SEQ ID NO: 357692 - DNA, 588 bp, Homo sapiens
ttgcagatgcagcatgagcagaggcatgaaatgtgctttactggttggcttggttgcttatgctcttgtggtgtgctatgagaagatttcctctgggtatctgctgccctttcacctggatccagagctaatacaggtggatatctaaacccagtccatggcctggagccaagcccagatggcccacagcctcaggcagggctatctgacaatatcatttctaatcagcccaaacctcggtcagacaaaggacacatcaacaacaatgatgttgtgatgttctggtacaccactaacttcttgaggttggttgttatatagcaaaacctggctatatgatttgtattgcgactgcctttttttccagcttccaggggctggaagtttaaacgttatgtttttactctcagccattacatgaaatcttcaatataayttattccccatctattttttgtttttaccttttcttcccccagtttgggtaaggtctatcatttctgtaatgttttacaatatataacattcaccttctctcctgccaattgaataccctcattaatatctcttagttcttccatcaaatat

SEQ ID NO: 357693 - DNA, 529 bp, Homo sapiens
gaggtgcccatcccagctttgggagggtggatagagcaccaaaagagactttacggaggatgcaacactgaatctgatcttaaagaaagatctcataggacatgcttagacgaagaaggagggaaaagcatgttcgcagaaggaacaatgtatgcaaagactcaggtgggagtgtgtggggaggggagaaagagggtccttttaaaatcagagcacttttgaggtcaatgtacttttatccagagatttatagagtctcaaggatacccgagagaccttgttatgctcatgaagtagagaaactggaagaagtccacatattttagtagttttgttactggaaaggagactcaatctagacaccaagagagggttcttggatcttgtgcaagaaagaattcagggtgagtccatagagtaaagcgaaagaaatttattaggaaagtaaaggaataaataatggctactccrtagacagagcagccccgaggctgggggttgcccatttttatgactatttattgattat

SEQ ID NO: 357694 - DNA, 534 bp, Homo sapiens
ataatacttcacctctctgtgattcagtttccacatgtgtactatggaaacagcagtacaaagagggctcagcaacacagcttacacaagagagcccagcccagagctgggtatatgctgtgtgctcaataaaccctggtttcccatcttcatgccatcagttatggctctttagattccatataacagaacatctggcccaatttattcagaggtgagactaatggcagaagagcccagagmttgtactgactccagaaggtcagcatcgaggccaggcactggatttctctccctctctctgccatgcacttgggtatgtcagcataatcctctggccccatgtgctgcactccctcccagcagcacccacctctcctttgggcctccagagctctctgcctcccatgccatcctgaaggccctctctctgtccccagttggaacacatgccttttgtcttagccaagaactgcagctatgggcacgtaacatgctagtaggattaagcaaatcattctggagctgaaatct

SEQ ID NO: 357695 - DNA, 532 bp, Homo sapiens
tctgccttgatgcagcttatcattgagaaaattagcccagaacagctcagccatttgatgaggaaggagaggaatagcaaagggagttgggggttggatcagttaatcagctaaccagccaaaatctcgatatattatccctccacgaatgtttcggggttsttggtgagagttttcaaatccataacaaaataaccagaaaaagaatgtctactctgtgttgcaatttgcctatgacttggatgagtctgtttcaaatgaccctccgtgaggactgccacattcagttgtgcagcctgtgcactgcacaaaggtgctcctgcccaggggagcaggaggaagctggaattcaccagggactctgcttacgagctgggcctgcctgggcctctttcaatcatagcctggggctctttcaatcttagagaggagcctcaggaggtcagctgtaacttgtctgccagaaagggtaaccttgcgaaattcctacaatggtgctgtatgtacttgctggagccctgacttagtttac

SEQ ID NO: 357696 - DNA, 570 bp, Homo sapiens
cttacgagctgggcctgcctgggcctctttcaatcatagcctggggctctttcaatcttagagaggagcctcaggaggtcagctgtaacttgtctgccagaaagggtaaccttgcgaaattcctacaatggtgctgtatgtacttgctggagccctgacttagtttaccctcagcctccccatgtctcagtctggtcaacatccttatcagaaattcacactagcttcctttacaatctgcctttaggacagtcctgaggcaaatttcacttgttcttccctctgcctggaatgctcttccccagatagccacacggctcactctcttccttcactcaggcctctgctccaacatcccctctacagagaggycttccctccacatctcctctaaaataggcccccatcctgccttgctctcacctctcatcccacattcttcatcctgcttatcacccatggaatgtgtatgtattcatttatcgcaagcttctcaaaaggagggactcagtctcactcactaattggtgcctgtcctgcgctggcacagagtaggtgctcagcaaatac

SEQ ID NO: 357697 - DNA, 607 bp, Homo sapiens
gagttttgctcttgtcacctgcgctggagtgcagtggcgcaatctcggctcactacaacctccgcctcctgggttcaagcaattctcctgcctcagcttccccagtagctgggattacaggtgcccgccacctcacccagctaactttttgtgttttttgtacagacaggatttcaccatgttggccaggctgctctcgaactcctaacctgaggtgatctacccgtctcggcctcaaaaagtgctgggattacaggtgtgagtcactgcgcccggccctrtgattgtgttttaatcaagttctatttgtattgctaaccaccctttctttgtatattttgatggaacaccactggctcatgaatactgtctgttcggcattcactatatctttatcaatatcaaaatatttggatctatttgcccagaattgtaatttcctactttttatttgcaattacctttgtcctgctttttaatgttagccatttttattactttctttttggttcatatagcattgttcaaatagcattgtgggtatcccactagaactatatattggcagtcatacttaaaacatgatacctcttcaaccctaactagc

SEQ ID NO: 357698 - DNA, 583 bp, Homo sapiens
ctttccgttttgtgttcagctgtgactactgagtggcataagtcattaagatgctgggaaaaagtaagtataaaataacgagccttttgccgtatcctgatatcattccttttttttttttttttttaaccaatggcagaggtgctcaatggggaacatgtcttatggtagaacaggcatagctggtgagaggggcttccaagaggtcccttgcaggaatgcagtcccttcccagccatccactctgcagtgcccaaagagctctccacacctccatctgatcacgtcacttccacctctacctctaaacacctcccttcctttccacctgagaaagatttgatatcatcctgcctcaaataagtaatttttaaaaatctcaactgccttaraatcacctgggaagctttttaaaatcccaatacccaggctggctccaaaccaatgaattccctgctctgtgaaggactcaggcatcggtacttaaactccacaggtggttccaatgttcacctaagcctgagaaacacttcatgggtctttagaaacatggtgcctctttcctctccctgggctgggctag

SEQ ID NO: 357699 - DNA, 596 bp, Homo sapiens
gcttcaactttgaggaagaccatgtctgattccttctgtttcttccagcacaaagccaggaacgcagtgatgttcactaaagttttcagtaacagcctagatgcttggcctaatcctcatcagcctcattattctgggtcctggatgctgcttcctatgcccctggttcccagctcatgtgaccaaaagagccacatgctggtccccggagccccagctgcttcagctcctcctagtcttgcctcctcatgactttggatgctgctttctgtaacctaaaaaggctacactcgtgaattccttccrtgatggtcctgctttccatctcattctcaccctcttccttctctttttcctcttccccatgccccaagcccttggggacccagcaagactgacagataaatttgtttctttaatactatttaactgactataagaactgtgtccttccctcactttctctcacttcttctaccttgcaggaaatcattgtctgctgtatgtaaatgaatagattccaaagtagcatgcaaagtgtggtaagagaggtctgtataagaagcttcaggaagtaacagaaagcggcacctgcc

SEQ ID NO: 357700 - DNA, 309 bp, Homo sapiens
aaaacttgtaactcacaacccctccctcaacaaattaatcaaaacccaaaacccaaaaaccacagccttggaagagaaaggaaagtaacctctctgcaacgttccttgacttctccatctgctgttctcttaatcttcccacagaaagcacaggaaataagaargagaggaaaacatctcatctgtcatgaagtgacaaaaaaaaaaaaagcatactatgtcattctgtcccaaagtttagccaacagtagagcaaaatgtagcagaaacagagtaggcaaacatataaccctggcttacaagctgggt

SEQ ID NO: 357701 - DNA, 589 bp, Homo sapiens
gagtcttaatctggaataagacatctattgtcttcacggctcaattgaaattgagcaaagtcccatggtaatgtcctaatgtatatccatggaaaagttacgagaaaataaaactgaatatttattcgaccacttgggtggtggatagagcttttagcttcttaagcttaaaattttttagtttaatgtgggcaaatttgatgaaataaacagcattttaatttttctgtttatcaaaaacatgcttaactaaaactgaaacttaaaaatcacattggtttaaaaaaatctaagcatatttagccatagaaggattaatgtattgcttacaacatttcttatttcctaattttaaaatggatgcaggcccagtgtagaaaacttgggaaaaaatacagaaaagtatgttataatttccccacagagagaaaagagaatgacatatcacatttcctagattttctaaatcatattagctctgattgtaagttgtcactggccaacgagagtgtgawatccacaggaaatcatattaggagcccctccacctccactgagctgtgcaaccatctcagggattatggtctca

SEQ ID NO: 357702 - DNA, 576 bp, Homo sapiens
tccctgggtttctttttgcctcagatatcccaggctgtataccagaaaagttagtaatctggaaatgccagtgaccatggataaacgaaacaaaacaaatagaagaaacacctgctctttctagccaaagggctgggaaagccacgccaagcaagacagaaaacatttagacaatagctcttctgttccagtaaaacacacaagggtsggggggaacaacttctgccccactctcactctgccaacaaaggccaaatgcagagcctggattttcacacttatcatgatgtaacaagacatctcaatccctctgccatgtccaccacttcctaagcgccatggtatccatggtgacaagctccgcctggtggaaatgaaatgttctttcttctcctcactggggtagtatcaaaagaggccaaatgaagagtcataactttcatcactgctcagtggttaaaaatcattacccctgcagtctcagcggagtccacacagggaacagcaatgaggtgccctttctactcccagcaaaagtcttagtgaggagactaaattcccacctccatccagcac

SEQ ID NO: 357703 - DNA, 605 bp, Homo sapiens
cccactgggtcattatcgctccacaccaggggctgctcccctgtgctctgcgtcctgaggctttcaccagctgagctgtctgcttaccaggagtgagwtgtatttgttctcaagcctgctaaggcctcttgagccatttttttaaattatgtaattaaaatacacattatagaaaccaattacataagaataggataaataagagagttactgtttcaatgaaaactaaattaaaggctttggaaagactcaaaaaaagcaagtcactcatgcaaaattatggatgtggagttaggtgtgggcgagcaaatggatttgaagggggtaggaatcttaaacatccagagggatgctgcattcagatggtttcacaaggatctctaagtcattgctcccttttgcagaatcctagactggaaatttcagataatgcattgtggatcacgcatgtgcaggaaagaccacacacaactccaaacaggggacacacaccaagacattggccctgcatcaaaagatgagcagtatacagatttagatacagacataggtaaaataaaatgcttaaagtatgtttgtgtaattcttgattccctcattttaac

SEQ ID NO: 357704 - DNA, 550 bp, Homo sapiens
agggaggtttcccctccctgctctttcaaggcattttcagatctgcttgggagcctgccctgttccctctagaaaacctcattacatgtgcaataaaccttccatcccctctttgtgtaygtgtggcatcatgagtcttgacatctaaaccaaattttgtgtgggaggtccatctcaccaccgagggataccacaagaggttccaccccacaactcgccaccaaaacactcccatatcatacatttctgaccccatcttttctccctcatgatcctttctcctacctactgataccgtccaggcagaagggtgtgtctctttgtattcagtggagacttggcttctctgcaggacaagattgggtgaagctcaatttgccagagctctgctttgcccagcaaagtttctttcagagcacttcctcccaaagaccgcgttaacctttctccctattgtcaaatcttgattatcgcctcatgcccatgtgaaactcccttagttgataatttcatccacaattgcttgctgctgtcgttggtgtctgttctc

SEQ ID NO: 357705 - DNA, 550 bp, Homo sapiens
agggaggtttcccctccctgctctttcaaggcattttcagatctgcttgggagcctgccctgttccctctagaaaacctcattacatgtgcaataaaccttccatcccctctttgtgtacgtgtggcatcatgagtcttgacatctaaaccaaattttgtgtgggaggtccatctcaccaccgagggataccacaagaggttccaccccacaactcgccaccaaaacactcccatatcatacatttctgaccccatcytttctccctcatgatcctttctcctacctactgataccgtccaggcagaagggtgtgtctctttgtattcagtggagacttggcttctctgcaggacaagattgggtgaagctcaatttgccagagctctgctttgcccagcaaagtttctttcagagcacttcctcccaaagaccgcgttaacctttctccctattgtcaaatcttgattatcgcctcatgcccatgtgaaactcccttagttgataatttcatccacaattgcttgctgctgtcgttggtgtctgttctc

SEQ ID NO: 357706 - DNA, 550 bp, Homo sapiens
agggaggtttcccctccctgctctttcaaggcattttcagatctgcttgggagcctgccctgttccctctagaaaacctcattacatgtgcaataaaccttccatcccctctttgtgtacgtgtggcatcatgagtcttgacatctaaaccaaattttgtgtgggaggtccatctcaccaccgagggataccacaagaggttccaccccacaactcgccaccaaaacactcccatatcatacatttctgaccccatcttttctccctcatgatcctttctcctacctactgataccgtccaggcagaagggtgtgtctctttgtattcagtggagacttggcttctctgcaggacaagattgggtgaagctcaatttgccagagctctgctttgcccagcraagtttctttcagagcacttcctcccaaagaccgcgttaacctttctccctattgtcaaatcttgattatcgcctcatgcccatgtgaaactcccttagttgataatttcatccacaattgcttgctgctgtcgttggtgtctgttctc

SEQ ID NO: 357707 - DNA, 411 bp, Homo sapiens
gatgttaaatataaaactttagccgaattcaatttaaaagcgttaactgaacaaagaacaattcaatttgtgaatcaggcagcctccygagtgagagtaggctcagagactccagtgcagccacatggtggaagaagatttatggacagaaaaaggaaaatgacttacagaaaatgaaagtgaggaacagaaacagcttgattggctacaggttggcatctgccttatttgaacacagtttgaacagttggccacctttggccaaaactcagtgattggcacaagagtaggctacagtctgtttacagttccatttaggttatagttcacaatgacagagaaacctttagagtgaacttaaaatatgtaaggaggcagctttaggctaaccttgatttaacaattgttaca

SEQ ID NO: 357708 - DNA, 531 bp, Homo sapiens
tgacggcctctcagatattggggcaggggggattccttcttaaatctactttatttttaggctatgagaaaaaagggggagcttttttaaaaagttttttaaaaactatacaataatattctaactcagagtaatgtctgcctgacaacaaaattgcatgaagcaaataatgaaaagtcagccagaagaaaatctgaagaagcttatttcaaatccactgggtgccaggggcagagagagggggtggggcaaaaagacgtacccagcacaagagtgaagaagagatcaaatctcagraaaagataaatcagacataaactactcaaaaccagacacaatgaaagactgcaaggatcccacagaagagaaaccttataattctccagagatgatgtcatagaagtagacctaaaaaaactctaggactcaaatgtgtatatgtcacatgcacaccgtatccatactttgaagatttttagataaggattggtaaacactgtctcaggatcattgagacttactgatgagatg

SEQ ID NO: 357709 - DNA, 531 bp, Homo sapiens
tgacggcctctcagatattggggcaggggggattccttcttaaatctactttatttttaggctatgagaaaaaagggggagcttttttaaaaagttttttaaaaactatacaataatattctaactcagagtaatgtctgcctgacaacaaaattgcatgaagcaaataatgaaaagtcagccagaagaaaatctgaagaagcttatttcaaatccactgggtgccaggggcagagagagggggtggggcaaaaagacgtacccagcacaagagtgaagaagagatcaaatctcaggaaaagataaatcagacataaactactcaaaacyagacacaatgaaagactgcaaggatcccacagaagagaaaccttataattctccagagatgatgtcatagaagtagacctaaaaaaactctaggactcaaatgtgtatatgtcacatgcacaccgtatccatactttgaagatttttagataaggattggtaaacactgtctcaggatcattgagacttactgatgagatg

SEQ ID NO: 357710 - DNA, 531 bp, Homo sapiens
tgacggcctctcagatattggggcaggggggattccttcttaaatctactttatttttaggctatgagaaaaaagggggagcttttttaaaaagttttttaaaaactatacaataatattctaactcagagtaatgtctgcctgacaacaaaattgcatgaagcaaataatgaaaagtcagccagaagaaaatctgaagaagcttatttcaaatccactgggtgccaggggcagagagagggggtggggcaaaaagacgtacccagcacaagagtgaagaagagatcaaatctcaggaaaagataaatcagacataaactactcaaaaccagacacaatgaaagactgcaaggatcccacagaagagaaaccttataattctccagagatgatgtcatagaagtagacctaaaaaaactctaggrctcaaatgtgtatatgtcacatgcacaccgtatccatactttgaagatttttagataaggattggtaaacactgtctcaggatcattgagacttactgatgagatg

SEQ ID NO: 357711 - DNA, 562 bp, Homo sapiens
gacaatcctacccaccttctcggccctagtgagaagccagaattcctacccccattcagcagtaatgaggggctcctttccccatttcaggtatcagtggaaacagaggagaaatctggactctgacttggcagtattgaggcagtgcccaccccacccccawtaggacagtgtcagaaaaacagctaaaacatttaaataagatccagagttgtataatgtaatacccaaaacattcaggtttcaataagaaattacttaccagaaagctctcaaactgaatgaagaaagattatcagtagatgccaacattgagatgagaaagatgttagaattatataaaaaagattttaagcagccatcaaaaaatatttcaataagcaattatgaacactcttaaatgaaaaatacaaagctacttcaaagaaatagaaaatctcagcaaagaatcaagagatataaaaaagaactagatgaaaattttagaattgaaaaaaaaatacaaccaccaacataaaaagctcagtggatgggctcaacattagaatagaggacagaggaa

SEQ ID NO: 357712 - DNA, 579 bp, Homo sapiens
gaagttagtttagatcccagtttgtggtcctccgtaagagctaccaaacaaccttaggtataagctcaggtttatgctgggtcaggcattgagtatatgcctgttagtcaatggtgaacttctcctaccaaaaaagaaaaagcagttactcctctcaaaccctaccccatacaagaacttgctcctacttagccaaacttacttcctcttttagaggagctttttactggccatagacaaagagagagggccacagtagactttgttaagaggcttatctttactatctcacyattacaatcaacattttctccaactccaatcaacatctgaggggtatgacacactacctgttctttcctgttttggacttgagaatgagagatcacgatcagcaacgttgttaaacctcaaatcaaccctgagactgtccagctcagacatctagttaatgaatcagtaaatgtcctcatatgtcctgatgtcagctgttacttacagctctactcatactgatacagaccaccaggagattgtgacacgcacttcaccccttcaaggatgtgcctgaccctaccg

SEQ ID NO: 357713 - DNA, 546 bp, Homo sapiens
agctctaggtgttttatatattttaagcattttttcctgtcgttattaattattagtttagttgcatttattctattattagtgagagtaagcatttgattttatatatcttgacctacacttatttgcattaccttttcatgatctcttacccctcctatggtttctactattttttgacattttaatcagtaatttggatgacagttgacaggcttattggtttatttatttagagacrtggtctctctctgttacccaggctggagtgcagcagcatgatcatggctcactgcagccttgacctcccaggctcaagcaatcctcccatttcagccaccccagtagctggtgtgtgccatcacacccacctaatttttatatgttttgtaaagacagggtttcatcatattgcccaagctgcttttgaactcctgggcacaagcgatacacctgctttgacctcccaacacgttgggattacaggcatgagccaccatgcccgttaggtttatcagatttagagttcccatggagcgataaggg

SEQ ID NO: 357714 - DNA, 581 bp, Homo sapiens
tgtgcaagtttttgtgtggacatcaaattttaattgctttgggtaaatatcaagaagtacaactactggatcatatgtttcattttgtaagataccacaaaactgtcttccaaagtggctgttaaattttgcgttgctaccaagcaatgaatgacagttcctgttgctccacatccttgccagcatttggtggtgtaagtattctgggttttggccatagtaataggtgtgtaatsagatctcattttttccatttgcatttccttgatgacatatgaaatgaaacatcttttcatatgcttatttgccatttttatatcttctttggtaagatgtctgttaaggtctttggtccattttttaatctgattgttttcttattgttgagttttaagaattctttatatatttcagataacagtcccttgtcaaatattttctttcagtctgtggcttgtcttttcattctcttgacggtgtctttcgtagtacaggaattttaaattttcatcaagttcaacttatcagttcttccattaatgagtcgtgccttcagttttatatctaaaaagtcatcatca

SEQ ID NO: 357715 - DNA, 581 bp, Homo sapiens
tgtgcaagtttttgtgtggacatcaaattttaattgctttgggtaaatatcaagaagtacaactactggatcatatgtttcattttgtaagataccacaaaactgtcttccaaagtggctgttaaattttgcgttgctaccaagcaatgaatgacagttcctgttgctccacatccttgccagcatttggtggtgtaagtattctgggttttggccatagtaataggtgtgtaatcrgatctcattttttccatttgcatttccttgatgacatatgaaatgaaacatcttttcatatgcttatttgccatttttatatcttctttggtaagatgtctgttaaggtctttggtccattttttaatctgattgttttcttattgttgagttttaagaattctttatatatttcagataacagtcccttgtcaaatattttctttcagtctgtggcttgtcttttcattctcttgacggtgtctttcgtagtacaggaattttaaattttcatcaagttcaacttatcagttcttccattaatgagtcgtgccttcagttttatatctaaaaagtcatcatca

SEQ ID NO: 357716 - DNA, 574 bp, Homo sapiens
tgacaatattgagtcttcctatccatgaatatggaatatctctccatttatttagttcctttttagtttcagttttctggttttcctcataaagtttgtgtacaggttttgttatatttatttctcagcacagtcgtcccttggcatccatggatgttgatttcaggaccccccacagatactaaactccaaaaatgctcgtttctaatataaaatggtgtagcatttgcatataaccatgcacatcctcctgtaggttttgaatcatctctagattacatataatacttaatacaatgyaaatgctaggtaaatactgtattatactatatttctatttgtcttgtattttatcgttactttttatttttttaatgagtatatttaatctgcaggtgattggattcacagatgcaggactcgtagatacagagagccactttatttcatctttttggatgctaacataaatggtattgtgttttaaatttcaaatcccacttgttcattgctgatatataggaaagtgaacgatttttgtatgtttactttgttaactttgcatcctgaaact

SEQ ID NO: 357717 - DNA, 610 bp, Homo sapiens
cattggcattcaaagtgatcattgatatagttggattactatctaccaaatttgatagttttgtttttattgcccttgttcttcgtttctatttttctccttcactctttttttttgcctttgtggttttrattgagcatattatataatctattttctctccttttttagcatatcagttatgcatttttttagtttagaggttgccctagagtgtgcaatatacatttatgacaagtccaagctcactttcaaataacaatataacaatatactacttcgagggtagtgccagtaccttataataaccagataatccaaattccttcctcccatcctttgtattattgctgtcatgcattttacttatatataaataaaaatatacataatcaaatacattgttgcttgtattactttgaacaaattgttatacgttagatcacttaagattaagaaaaataatggtgtttatttttccttcacttatttattctcccatgctttctctttcctcatgtagatatgagttacagactgatatcattttccttctctctaaaggacttctttcaacatttcttgtaaggtaggcttactggcaataaaa

SEQ ID NO: 357718 - DNA, 610 bp, Homo sapiens
cattggcattcaaagtgatcattgatatagttggattactatctaccaaatttgatagttttgtttttattgcccttgttcttcgtttctatttttctccttcactctttttttttgcctttgtggttttgattgagcatattatataatctattttctctccttttttagcatatcagttatgcatttttttagtttagaggttgccctagagtgtgcaatatacatttatgacaagtccaagytcactttcaaataacaatataacaatatactacttcgagggtagtgccagtaccttataataaccagataatccaaattccttcctcccatcctttgtattattgctgtcatgcattttacttatatataaataaaaatatacataatcaaatacattgttgcttgtattactttgaacaaattgttatacgttagatcacttaagattaagaaaaataatggtgtttatttttccttcacttatttattctcccatgctttctctttcctcatgtagatatgagttacagactgatatcattttccttctctctaaaggacttctttcaacatttcttgtaaggtaggcttactggcaataaaa

SEQ ID NO: 357719 - DNA, 562 bp, Homo sapiens
tctcttttttccttaacaaagcctaccctcaaggaaaactaccaaggcctaacccactggagttttacccaagcctaacacctggggaaaggaaaatacccaaatgccagggctctccaggctttgaggtgaaaaaaggtaaacagtcaactcaagctcattaaaagattaagactaattatagaactacacaaaaccctcctctgccacacacacacatcttaccgtsacatcaatattgcccctttataataaaagggtataacagctaaaaataactgcaaacctcaggtcctacttaaagaatctccaggaaaactcaaagacaaatacaaagacactagagaaaatgttagcctaaaataccacagctactgcaaacagcctaactactcaccagataagtataaaatatcacactaaaggactgtctacctcagttctatttacttgataaatcatatcccgctttgaacaaaaaattggaaggtatgctaaaagaaaaaattacagtctaaagagacaaagcaagtaccaaattcaggctcaaatataaagattt

SEQ ID NO: 357720 - DNA, 581 bp, Homo sapiens
tatgcaatccatgtcccaaatgaatgcttcccataaatctgggtattttcaaagaggaagaaatttaaaatgcctttaataaacccaaatatgtatatttagtctaactattagtaggtgttaatagaccaatgtgtttattttatttttttgaaaatyatcctcaccaaatatacagtagcaagcaacagtagcaacctggtaatcttaagattctatgatgtaaggttttagtgtgcagatattcaattagtaatcacatgaaatcatgacattaaggggcaaagaaactagaacaaaacaaaaatatatgaacaagatcgaaagcattcacaaataagatttgtcagtcatttccacttaatttgttttcatggtaagcaaattaattaaagaaattgaggccagtgaccttctccttctctttcaccctctctttcatttttcatttcagtctctcaagagtcacgcttgactcaaagatcttaaaaagtaggggaggtgaaaagccctccagttacaatgatcttgtcttgcctggtatttattatttctcctgttcacagtaatcatatgagttg

SEQ ID NO: 357721 - DNA, 581 bp, Homo sapiens
tatgcaatccatgtcccaaatgaatgcttcccataaatctgggtattttcaaagaggaagaaatttaaaatgcctttaataaacccaaatatgtatatttagtctaactattagtaggtgttaatagaccaatgtgtttattttatttttttgaaaatcatcctcaccaaatatacagtagcaagcaacagtagcaacctggtaatcttaagattctatgatgtaaggttttagtgtgcagatattcaattagtaatcacatgaaatcatgacattaaggggcaaagaaactagaacaaaacaaaaatatatgaacaagatcgaaagcattcacaaataagatttgtcagtcatttccacttaatttgttttcatggtaagcaaattaattaaagaaattgaggccagtgaccttctccttctctttcaccctctctttcatttttcatttcagtctctcaagagtcacgcttgactcaaagatcttaaaaagtaggggaggtgaaaagccctccagttacwatgatcttgtcttgcctggtatttattatttctcctgttcacagtaatcatatgagttg

SEQ ID NO: 357722 - DNA, 581 bp, Homo sapiens
tatgcaatccatgtcccaaatgaatgcttcccataaatctgggtattttcaaagaggaagaaatttaaaatgcctttaataaacccaaatatgtatatttagtctaactattagtaggtgttaatagaccaatgtgtttattttatttttttgaaaatcatcctcaccaaatatacagtagcaagcaacagtagcaacctggtaatcttaagattctatgatgtaaggttttagtgtgcagatattcaattagtaatcacatgaaatcatgacattaaggggcaaagaaactagaacaaaacaaaaatatatgaacaagatcgaaagcattcacaaataagatttgtcagtcatttccacttaatttgttttcatggtaagcaaattaattaaagaaattgaggccagtgaccttctccttctctttcaccctctctttcatttttcatttcagtctctcaagagtcacgcttgactcaaagatcttaaaaagtaggggaggtgaaaagccctccagttacaatgatcttgtcttgcctgrtatttattatttctcctgttcacagtaatcatatgagttg

SEQ ID NO: 357723 - DNA, 574 bp, Homo sapiens
actaacttctttcagtaatttatagtaaatgcacataataaatctatatagacattgaagttaggaataatacagttaaggaaattgacaaaatggacatgtatagaactgcacacaagagcagaacaattattttgtaaatacatttaatatatatcataaactggtcatgtactgtgtcataaattgaatctaaccaaaaacttaaaaaattaaaagcaaatatttcgagttttctgattacaacataatcaagttataaattagtatgagaaagataaaatagcaatatacttgggaaaataagaaatatagttataagtcactcatcaatcaaagaagaaatataaataaaattttaaaaatatttttaactattaatggcaacaccacacatcaaaacacagaggaggcacgtaaatgtgtacttttactaaaaatactgattttttctacagttttagaaagatttcaaagatcatcaaagagtaagataaaattaagcatttatgwttaaaagtaaagtaaatctagttaacaatataaaaataacaaatatcttcaacttggtctt

SEQ ID NO: 357724 - DNA, 575 bp, Homo sapiens
tcactggtttgtctgtaggagagtataggctatcctgatagccttgtgttagaggaattataaacaaaaaggctggaggaaaccaatattttttagggattttgacaggcatcccatggaggagcacatgtacaatactttatacctgtcagatgccagccagtttagttgctttatcaggaaaaaaaaaagcaagctgataactgagaattgttttctgaaacatgataaacactatttttgtgaatgtattctcagtagtagacatagtgctgcaacttctttacttggaggataacaacagattatcatgaaggtttcaattaaagaaaagcctgggtatctctggactataactgaattgtttccatttttctgttgtatgggagcaatctaggagatgcaaagtgataaaatawctataacggtggttcacttagacgtaataatggctttaagaggagattggtaagtggtacatcctttctagatagtctccatggaacaaaccatatattcaatcccaagaaagaaatctagacatgtgaaaagtgttttttaattttagtactttt

SEQ ID NO: 357725 - DNA, 575 bp, Homo sapiens
tcactggtttgtctgtaggagagtataggctatcctgatagccttgtgttagaggaattataaacaaaaaggctggaggaaaccaatattttttagggattttgacaggcatcccatggaggagcacatgtacaatactttatacctgtcagatgccagccagtttagttgctttatcaggaaaaaaaaaagcaagctgataactgagaattgttttctgaaacatgataaacactatttttgtgaatgtattctcagtagtagacatagtgctgcaacttctttacttggaggataacaacagattatcatgaaggtttcaattaaagaaaagcctgggtatctctggactataactgaattgtttccatttttctgttgtatgggagcaatctaggagatgcaaagtgataaaataactataacggtggttcacttagacgtaataatggctttaagaggagattggtaagtggtacatcctttctagatagtctccatggaacaaaccatatattcaatcccaagaaagaaatctagacatrtgaaaagtgttttttaattttagtactttt

SEQ ID NO: 357726 - DNA, 626 bp, Homo sapiens
gctgttcgattccaagtatgcaattgaaaaacaaaaagatcttgcacttttctgtaggctggtttgtaggcaaaagaccagaagctaactttcataattacaattaaatttatctaaagtttgaccagtgacaaagcaaacccactgatatttcttgcgttaagaatacagtttgtaaggtacagcagcaagtacacatcacaaaatgggatwgtatatatacacacctatattcaaccaaatagttgtaacctgcatcactccatttcataattcaatgtattttgaatattatctctgataattttggactaagaaatgtgtccatggacattgatgtttttgactatacagcctagaggtgatttgccttattttcagggcttcaaacatgttcagccaagacttgtattgtgatgcagaaaaatatagcaactgaacctaagtctatttctgcactacttactcatcattcaaaaagcatttatttgaagtctggtataccatagattaagacagacactcacacattgatgaaactactggtacactatgttctcactaccagtgtaatctttggatagatttgagggtagaagatactgtgtactttcccgtgtgtggaa

SEQ ID NO: 357727 - DNA, 627 bp, Homo sapiens
catcaatgcaaaaagccccagcatttgcatcgcagtcaacctcattcaagcaaagttatctccagtaaggaatttcccctgtagaaagcatgcacattttgattttacctgtcctgagactgaatctttgcttattataatagcaaaaaacacatccctgggtggagatttgagatgctaatacgacatgcaatgtatgaacaaacatgtacagctattgtgcatgtgcccccagaggaccactcaaaacatgcttactagtaacaccctcttttcaccctcttatgtataatcgtgtaagactcatataaagggagtttccccagaaacagttaacgctgtcttatccttaggaacagtgcgctctgaatcatctctctcagagtgtactgtctattttgcacctaactttcagagtattctttttcctttgcaataaatatctcyatgctgcatctccttgctgtatgtctctaaaattcttttaaattgagaagacaagaactgaggtttcacaaccgtcatcaacacaacctggcaatatgtatgcaatcaacaaagtcattgaatgccctagaaataggtgggatttggtgcaaaaaatgtccaacactgttgcatacttgc

SEQ ID NO: 357728 - DNA, 486 bp, Homo sapiens
actcaccaatctaaacttgctagctccctagacccttactagtgccaataaacttyctcaaagggaaatatataacatttctcctttttgtaaaaattccaaacacctctttgtttttggaatatgcccaaaggcactagtctgcatgtgtgttcttaattgcgattctttattcccaaataaaatattaattttagagatttatctctacatttttacttttacttcaacttgtctatgtcaagaaactgaaggatctgaggtttttttactgataagctaacaggttcacataattactttgtgattatctctattcttgctttcatcaatagctcatttttcgttattagtgataatattccattgtatgactataccaaaatttattttgccatttacctttgcattgtttttcagttttagccactacaaataaagtgctatacacaattgtgtccaaggttttttttttttttttttttt

SEQ ID NO: 357729 - DNA, 486 bp, Homo sapiens
actcaccaatctaaacttgctagctccctagacccttactagtgccaataaactttctcaaagggaaatatataacatttctcctttttgtaaaaattccaaacacctctttgtttttggaatatgcccaaaggcactagtctgcatgtgtgttcttaattgcgattctttattcccaaataaaatattaattttagagatttatctctacatttttacttttacttcaacttgtctatgtcaagaaactgaaggatctgaggtttttttactgataagctaacaggttcacataattactttgtgattatctctattcttgctttcatcaatagctcatttttcgttattagtgataatattccattgtatgactataccaaaatttattttgccatttacctttgcattgtttttcagttttagccactacaaataaagtgctatacacaattgtgtccaagkttttttttttttttttttttt

SEQ ID NO: 357730 - DNA, 422 bp, Homo sapiens
ctccattttctgagctctactgcttatttcctattccacrttctttatctgatattaattctacttttataattcaaagccctcataaatgtgccaatgacaccatcataacacactgaatgtcacgagaaaacagacttctgctttgttgaagatggagacttgaggataagttaagatgcttaagacctcaagcaataacatcaaaagagttggttacctcacataacaagatgctggtaaatagagtagtcccgggttaactcagtaacttgtattgttgctaggagccttgtgcgtccaagtttacatgttgccattctaagcattttagtttcatcctaagatttatcttcttatgggcttaaaatgctacaacaactccagatattatattcaactgcacatggtagtaggaaaat

SEQ ID NO: 357731 - DNA, 422 bp, Homo sapiens
ctccattttctgagctctactgcttatttcctattccacgttctttatctgatattaattctacttttataattcaaagccctcataaatgtgccaatgacaccatcataacacactgaatgtcacgagaaaacagacttctgctttgttgaagatggagacttgaggataagttaagatgcttaagacctcaagcaataacatcaaaagagttggttacctcacataacaagatgctggtaaatagagtagtcccgggttaactcagtaacttgtattgttgctaggagccttgtgcgtccaagtttacatgttgccattctaagcattttagtttcatcctaagatttatcttcttawgggcttaaaatgctacaacaactccagatattatattcaactgcacatggtagtaggaaaat

SEQ ID NO: 357732 - DNA, 561 bp, Homo sapiens
ctttctgtttatttttatgtaaggataaaactatcctaaaaataacgttcatttcataaaaaagatgaagggaagattcagagaagactgcaaaaaaatagagctttatgtgttttcatcttgctcttggctcagtgcatgatgaatagatataagaactataaggcagtagtgttgctgatgaatatggtaaggaagataataagagaaaaaagagaaaatcttagattgatgtgataagtatcactttaccaaaaaagagcttaccaaacttagaagaataaatgagtacctccattagggttgagagactgagaacaactatgtagaaagtttttatagaaaaatgccatttaagctgrgatttttaaggacaagtaaatttgattagacagagcaggaagtaaagaagcttcccagagtagaaatggcatttgcaaagcaaaagtatcatgaaaactggcaaatttaggaaaatgactagtaaatatgtcagaagtactaaatgcatgacaagatacagagatgaatttgtaagccaggagtcctttaaagatatac

SEQ ID NO: 357733 - DNA, 561 bp, Homo sapiens
ctttctgtttatttttatgtaaggataaaactatcctaaaaataacgttcatttcataaaaaagatgaagggaagattcagagaagactgcaaaaaaatagagctttatgtgttttcatcttgctcttggctcagtgcatgatgaatagatataagaactataaggcagtagtgttgctgatgaatatggtaaggaagataataagagaaaaaagagaaaatcttagattgatgtgataagtatcactttaccaaaaaagagcttaccaaacttagaagaataaatgagtacctccattagggttgagagactgagaacaactatgtagaaagtttttatagaaaaatgccatttaagctgggatttttaaggayaagtaaatttgattagacagagcaggaagtaaagaagcttcccagagtagaaatggcatttgcaaagcaaaagtatcatgaaaactggcaaatttaggaaaatgactagtaaatatgtcagaagtactaaatgcatgacaagatacagagatgaatttgtaagccaggagtcctttaaagatatac

SEQ ID NO: 357734 - DNA, 586 bp, Homo sapiens
gagataaactaaagaacctacagatatttaggtattgaagtacttcagaaaatttttattgattacttcaacatgaaagacaatggtaaaatatgcatttctcattttctccttcaaaaaattttactgagtgagaatgaatgggtgaaattttattactgctgctttgctatgattgaaatgtccccttcaaaactcagttgaaatgtaattgtcattgtgatagtattaaaggtggactaattaagaggtgattaggccatgaaggtactctcttcatgagtggattaaatgttgtcatcatggaagtgtgtttttatcacaagaatgagttgctgtaaaaagcaagtttagttctctcttgttgctttcttaggctttcttggccttctgccttccaccattagatgatgcagcaagaagaycatcaccaggtactgacacaccttaattttggactttccagcctccagaagcatgagaaataaatttagtttctttataaattacccagtctgtgtattctattattgcaacacaaagtggactaagacagaaaattgggaccaagaaatgggactgttgc

SEQ ID NO: 357735 - DNA, 586 bp, Homo sapiens
gagataaactaaagaacctacagatatttaggtattgaagtacttcagaaaatttttattgattacttcaacatgaaagacaatggtaaaatatgcatttctcattttctccttcaaaaaattttactgagtgagaatgaatgggtgaaattttattactgctgctttgctatgattgaaatgtccccttcaaaactcagttgaaatgtaattgtcattgtgatagtattaaaggtggactaattaagaggtgattaggccatgaaggtactctcttcatgagtggattaaatgttgtcatcatggaagtgtgtttttatcacaagaatgagttgctgtaaaaagcaagtttagttctctcttgttgctttcttaggctttcttggccttctgccttccaccattagatgatgcagcaagaagatcatcaccaggtactgacacaccttaattttggactttccagcctccagaagcatgagaaataaatttaktttctttataaattacccagtctgtgtattctattattgcaacacaaagtggactaagacagaaaattgggaccaagaaatgggactgttgc

SEQ ID NO: 357736 - DNA, 573 bp, Homo sapiens
ctttaaaaactctaagtaagtattttctattctcagaaagatggatatgatacaactggggatttacataagtatagaagatggcttgcaaatgtgtttccactgtgttagctgtatcactttgttaattgtttcctttgctgttcagaagctttttagtttgacgtaatcccaatcatcaatttttgctttggttgcctgtgcttttgaggtccttctcaagaaatctttgtccatatcaatgctgtgaagcatttccccagtgttttcttataacacttttatagtttcagggtcttacatttaaggctttawtccatttcaatttaattttgtttattgtgagagacagaggtttagtttcatttctttttttgcacgtggatatccagttttactagctttttaattgaagagatattcctttgcccagtgtaagttcctggtgcctttcttgaaaatgagttggctttaaagcataaatttatttccaggttctctattttgttcgattggtctatgtgtctcttttcataccagtatcatgctggtttgattactataggttagtag

SEQ ID NO: 357737 - DNA, 592 bp, Homo sapiens
ttttttattctgtaaataattcaaaggagtttctttctttaaacaaagaaaattcatggtcttctgtttttaataaaattaaaattgtcttaaaatgagaaaaaatataaacttagctatattattattttcattaaaatgtttccttttagaattgtgtctatacctactcttcacttaacataatccaaaagatatgattaaaaggtgttacatctatgccaaaaaatatttatggtccaccattttatgccacttgcatcctaaaactttgcctaccacaatcttttgcatgmtgtttgtaagacacgagacttatgaatcaaggattaaaaatgttataagtcacagatcagtcagcttcatgagcattagcatctgtgttgccttccctagatcccaagtcccgaggaaacaacacaatatgggcccacatgtactgcacttgcagtaagttagcttaaaagaaaggaactccgaatgtcctgtactgggcaatgagcatgactgcccctcttttcaggaagaatatattatctttacaatactatatagtcagcatgactggacttggttctagagagagacacta

SEQ ID NO: 357738 - DNA, 552 bp, Homo sapiens
attatgatcagaatcatttggcagggtgatgcagacctaaaagtcaggttaaattaaggtttgttttctaattttttttttttgagatggagtcttgctctgttgcccaggctggagtgcaatggcatggtctcagctcactgcaacctccgtctcccaggtccaagtgattctcctgcctcagcctcctgagtagctgggactagaggtgtgtgccaccacacctggctaatttttgtatttttagtagagatggggtttcactatattggccaggttggtcttgaactcctgacctcgtgatccacacgcctcagcctcccaaagtgctgggattacaggcytgagccactgcgcccagccaaattaaggtgtttataatatttaaaggagcacatcggattcattctctttgagagaaaagattaaggggcaggtctggaagacaagatcattaatgtccctctttctcctgtgtttctcaaggtctgaagagtttccttcacaagtgcctaaggttgttgctgtttttccactatgacagaaatgatg

SEQ ID NO: 357739 - DNA, 533 bp, Homo sapiens
tgtggacttgaaccatgaacaatcttttccccgctcagttcagcatgatgaaagctccactctgaaggggtgagccaaaaagatagagattattctttcccagcttgcagccaagggcaacagtattacttcaggagaatcatgccattgttatttctcattctgcccagcagcatgtggcagggtctgtatttcaaatgcggatatattagaggtaaagggcattctccaccccatttagagggtgggatctcaaaccaggcatggaaagctgaggataataaagcccctcaaccaacttgctcaaaaggcagacgggttccgtactaagagtcaagctgagaaaagaagacgttgggactgcaaaaaagtgctctgttcatgaagctagtgtgtcactctaaaggaattgggccactctctctactccaagcaatagagaactcatgcagagatttttcccagggggtgaaacaagtggtaatacagagtagttcaaagckttcaccaggagaattgacttcatttagacc

SEQ ID NO: 357740 - DNA, 596 bp, Homo sapiens
taagtaaaagttggtctgaacggaatgtttgaattttaaatgcctaaactcaacattacatctctgagtgtgtgtgcatttgtatgtgtgtgagcacatgagtgggtgtatgtatcccacatctgggattccatccacaagcattctgattttaaatgtacatattaaattaatttttgcaaccccaccaaagattagaacactgctatgtgccaaatcaaattagcgttcacattttccaaaggccttctcccatcatttttaccaaagtgcagtttctctcgacagcatgtaatgcatacaaaatggcatcagactcactcctgaatacattagcttaatgtccaaagagccattgccatccagccaagatgacctttacaagtaaactatcccttttccaacagaggcaaaatattacatgcaatttatttacactgctgaatattactaatgataactcagtcaaacytaagagatatacggtcttttatttttttaagttttttcccacaatcatggagggttctggaagcaccttgtactaaccaccaagacatttacctgcaagaacagataaaattactaataaataa

SEQ ID NO: 357741 - DNA, 541 bp, Homo sapiens
cttttttttttatcacctttcttctattttcatcagtacacaatgcatgttcttttctactggaaatatgttatgatttaattgattaataaactctcaaatacaaaccgtagcttctatttcgacaattaccataaactttttattctcaaatggatctatcaggctggatctgttgactttatatagatatttccttagtgatctgtttatttatctatcaaccttttctgttgctcatgtttccatctccaattttaagtcaagggtcygttgcatcacctagaaatttctgttatccattttctttttcctgtattatgctattatactaacattgagtgtggacatggaaatttaaaactcagcagagtggctttctctatatttgcatttatattactgaatagagaggaatataaaaatcacagaattatgcagagagaagtgaccaccttatccgagtccccttctagcataacaactcttatctttagatttttccaaagaatagccaaagaaataccacattttatggtaa

SEQ ID NO: 357742 - DNA, 617 bp, Homo sapiens
aaacttctatatccaataatttaacacatatttaccttactaaatacctccaatggctttttagtttctcattcacttgtatggaaatgtccagttctttaacagaatcggcagtgtctttcatgatctgtctccaccctgttattccaaactcacttttgagggtttctctacgtgaatcatgaccrtcaaacattttgagccattcactcttccctgagagctcattcacacctctgtgccgtggcacagtttgcttagttttttcatcgactctcctctatcaattcctatttttcttttaagacacaattaaaagtttaaaactgttattaagatttctttgaagaaataatgggcttaggatgagaagaatgtggacatgtcatatataaaaaaaaagttagaagtaatatgtgaagacctcatctccagacatggctttaatacactttatatttaaatgcccccaaggtaatattatcagttgagttgccaaaatgtatttcacccttgtcaatccaactgtcccttgatagatttcacatagctctaagaaacatcaaacccaacaaatccaagagcaagtttctggatttctctcaatacattttctg

SEQ ID NO: 357743 - DNA, 462 bp, Homo sapiens
atatattctgttaatggtgtgatacctataatgcctgattacagtattagaaaatgtcgatgtgcattacttgcatctcaggagtgttatacatcatccctttttttttkttctactaaactatactgagaaatggccacaggagtgccctggaataatgtaaagaaaataaaaattttgacccgtggaattttaggagatttcatgaacatgcattccccttaataccaggagactcatgcaattatttatagagataagttatcagaatttacatgtgacaaagatttataaagattttacctatcatctaaatttcctcctttaaatactaattttaaagaaatggaagaaatccccagtagaatctcatcaggggccttgtctcctttgatattttaagatgaagaccaaagccaatagtttagacaatgttctttaaaccagcaaattacatgaatt

SEQ ID NO: 357744 - DNA, 462 bp, Homo sapiens
atatattctgttaatggtgtgatacctataatgcctgattacagtattagaaaatgtcgatgtgcattacttgcatctcaggagtgttatacatcatccctttttttttgttctactaaactatactgagaaatggccacaggagtgccctggaataatgtaaagaaaataaaaattttgacccgtggaattttaggagatttcatgaacatgcrttccccttaataccaggagactcatgcaattatttatagagataagttatcagaatttacatgtgacaaagatttataaagattttacctatcatctaaatttcctcctttaaatactaattttaaagaaatggaagaaatccccagtagaatctcatcaggggccttgtctcctttgatattttaagatgaagaccaaagccaatagtttagacaatgttctttaaaccagcaaattacatgaatt

SEQ ID NO: 357745 - DNA, 550 bp, Homo sapiens
caaaaaggaaaaggaaaagctattatgcaaatacatggctaggtattgctaatctactttgagtcgctttaatgtaggatatgggagaactgtggactgaaacattttctgcttgtgatccaatttcattattttgagagtagacatctgtataaaaacaaatatttcataacatggyaaaagattataaaagattatcagtggtaattctaggtgacgtaggtgagtacgtattatttctctgttgtgttaccaccatgctctagtcatttctaatgatttctcattgtggaagcattaaaagtgacatttatctctgaggaaattttggcatgcatatttctaaatcttaaattctatgatttgaagttaaggtaacaaataaataaaatttataaataatgaatatgaaattatatatattccagtgctaaatctacagtgtgaatgaaaagttaagtattgtataatataaagagggtaacaatctgtaaacaagtaacaatctagtaaaacaagaggtatcttaaataaaaacatttaatatgat

SEQ ID NO: 357746 - DNA, 686 bp, Homo sapiens
aacaatttcatcaaggtaaaatctcatgctggtgctatttatgtaaaagatttatggtggatgaagaatgagaagcaaggatccaactaaggatgctattacagaagtttagtttaaagataataagaggctwtactgcctcatagtgtaaaaaagagaaggaaagagaaacattaatgaggtccaattggctggacttgaagaataataagatgtggaaaatgagaaagagcccaaagtcaagaataagattcaaactttgacagcagctctatgttttggtatcaaccaatataaaatttaaagagaagaaatgcagtttagaaatgagggggaggcaaaaataatgatgaagaaataatttggttttgtaaatattgattttgagatgcctactggatatctaaatagagatataaggtaaaaaattgtgtatcaaattttgaagctcaggtggaggtgtaggcaagataaattgatttgatgctcatcaagataagcatgtgttgaagtttcaagaaaagatgagattatccagatataactagctttgtgatgcttttttctatagaagtcttattatttttgcaagccatggaagatgaaaaaaatatttctttgatctttaatctgtatattttattgaattttccttttgaattaaaataaatgcatgctttttacaa

SEQ ID NO: 357747 - DNA, 592 bp, Homo sapiens
tcagtgggactattattgtatcctgtagcaaaagtgtcccaccctctccctttgggaatgagcgcctctatacctacagagcctaagttacaggaatgaaaagtactgccagtgggtcactggaaggacagaaaacaactctacatctatttacccttcctggtttctactttgggaaaaaaggaccatctaaatgttggtgatttatcctggaggatgacaccctcmcgaaataccaattcctgacttgcatctcagctgttgtgttaagaggccattcccttcccctgctttgtcagatcaatagctttgaagttgcaatatttgatgagtagtgcattccatcattgtgtatccgtggccacatctctgttgtaaatgtttcctttgatcggaggcattgttatgaggcattgctatgagtagatcagatattctgttaggacttgaggtagtacatgtgaggctggtgagcaggaaggcaaagtaaaaaatgttcaccaatttcatgcaagatggattttaaccctttccaggttgttaggggtctaacgtaatcagcttaccaacaagtgactgatttgtctctaaa

SEQ ID NO: 357748 - DNA, 592 bp, Homo sapiens
tcagtgggactattattgtatcctgtagcaaaagtgtcccaccctctccctttgggaatgagcgcctctatacctacagagcctaagttacaggaatgaaaagtactgccagtgggtcactggaaggacagaaaacaactctacatctatttacccttcctggtttctactttgggaaaaaaggaccatctaaatgttggtgatttatcctggaggatgacaccctcccgaaataccaattcctgacttgcatctcagctgttgtgttaagaggccattcccttcccctgctttgtcagatcaatagctttgaagttgcaatatttgatgagtagtgcattccatcattgtgtatcygtggccacatctctgttgtaaatgtttcctttgatcggaggcattgttatgaggcattgctatgagtagatcagatattctgttaggacttgaggtagtacatgtgaggctggtgagcaggaaggcaaagtaaaaaatgttcaccaatttcatgcaagatggattttaaccctttccaggttgttaggggtctaacgtaatcagcttaccaacaagtgactgatttgtctctaaa

SEQ ID NO: 357749 - DNA, 592 bp, Homo sapiens
tcagtgggactattattgtatcctgtagcaaaagtgtcccaccctctccctttgggaatgagcgcctctatacctacagagcctaagttacaggaatgaaaagtactgccagtgggtcactggaaggacagaaaacaactctacatctatttacccttcctggtttctactttgggaaaaaaggaccatctaaatgttggtgatttatcctggaggatgacaccctcccgaaataccaattcctgacttgcatctcagctgttgtgttaagaggccattcccttcccctgctttgtcagatcaatagctttgaagttgcaatatttgatgagtagtgcattccatcattgtgtatccgtggccacatctctgttgtaaatgtttcctttgatcggaggcattgttatgaggcattgctatgagtagatcagatattctgttaggacttgaggtagtacatgtgaggctggtgagcaggaaggcaaagtwaaaaatgttcaccaatttcatgcaagatggattttaaccctttccaggttgttaggggtctaacgtaatcagcttaccaacaagtgactgatttgtctctaaa

SEQ ID NO: 357750 - DNA, 560 bp, Homo sapiens
ctgcatctgttttcctgcctttcttgaccrcaaagaaaggggcctgggctgctggattctagtggtcctttaccagcatgcccaccattgcctttgtgctcagaggtgagttctagagctgggctgggttcctgaatatttcataacaacccagctgccccatcaagatgtattcccataaacaacagttcttatgcaagttcattttagagagggtgtaggtaaccttttgagtcaggattgagagagtttgattctgtgagtattttaaggcttggctgagtgcaaacagctcgaacgtttaagcagattattaggcaattttcctaactctgcttctacaagactttccctatcaattactgaacacccattgtttgtttctcttttctcaatcacccgggaggaaccgtctatcatcctgtcctgaagggagttcctcctaggtctggtcggacttttgtgtggtaattaaggtttaaatcccgttaggaaacctgctaggttaagggaattttcagtggttaatgttaaatcacctttttctaacagaatagccc

SEQ ID NO: 357751 - DNA, 644 bp, Homo sapiens
attaaggaaatggttaatggattgatgggttgtcatgggagcggtactagtggctttataaggagaggaacaagcacacacaaacccttctccatgtgctgccctgtgccacctcaggactttkcagggagaccccaccagcaacaaggccctcaccagatgtggcccctcaaccttgtacttctcaacctccataactataagaaatgaattccttttctctatcaattacccagtttcaggtattgtgtcaaagctaacagatagcagactgagacaacttcccacatcatggactttgtcttcaccagtattctacctcctgaaagaaactacaaaacacccactcatcaggtgtcactggcctggcaacctcccttaagccagacaaagctgagaaaaaaagaccaaaaaaacccatatatgaataactgtaatggtgtcacagtgatccattattgccatcatgaccattaagaagttctcactcaaggtctataggctcttcatgcacacacagctctaccatgtttgcttgttctgtttggtttccctaagcagaagtcaattgaagccgttgttgcaaaagaccatgaagttcctgaccaaaagaccataagagcacactcagtatctgctgtgtg

SEQ ID NO: 357752 - DNA, 644 bp, Homo sapiens
attaaggaaatggttaatggattgatgggttgtcatgggagcggtactagtggctttataaggagaggaacaagcacacacaaacccttctccatgtgctgccctgtgccacctcaggactttgcagggagaccccaccagcaacaaggccctcaccagatgtggccyctcaaccttgtacttctcaacctccataactataagaaatgaattccttttctctatcaattacccagtttcaggtattgtgtcaaagctaacagatagcagactgagacaacttcccacatcatggactttgtcttcaccagtattctacctcctgaaagaaactacaaaacacccactcatcaggtgtcactggcctggcaacctcccttaagccagacaaagctgagaaaaaaagaccaaaaaaacccatatatgaataactgtaatggtgtcacagtgatccattattgccatcatgaccattaagaagttctcactcaaggtctataggctcttcatgcacacacagctctaccatgtttgcttgttctgtttggtttccctaagcagaagtcaattgaagccgttgttgcaaaagaccatgaagttcctgaccaaaagaccataagagcacactcagtatctgctgtgtg

SEQ ID NO: 357753 - DNA, 644 bp, Homo sapiens
attaaggaaatggttaatggattgatgggttgtcatgggagcggtactagtggctttataaggagaggaacaagcacacacaaacccttctccatgtgctgccctgtgccacctcaggactttgcagggagaccccaccagcaacaaggccctcaccagatgtggcccctcaaccttgtacttctcaacctccataactataagaaatgaattccttttctytatcaattacccagtttcaggtattgtgtcaaagctaacagatagcagactgagacaacttcccacatcatggactttgtcttcaccagtattctacctcctgaaagaaactacaaaacacccactcatcaggtgtcactggcctggcaacctcccttaagccagacaaagctgagaaaaaaagaccaaaaaaacccatatatgaataactgtaatggtgtcacagtgatccattattgccatcatgaccattaagaagttctcactcaaggtctataggctcttcatgcacacacagctctaccatgtttgcttgttctgtttggtttccctaagcagaagtcaattgaagccgttgttgcaaaagaccatgaagttcctgaccaaaagaccataagagcacactcagtatctgctgtgtg

SEQ ID NO: 357754 - DNA, 439 bp, Homo sapiens
ggcctcttaagaagacagaggaatgtgtaatgattttatttaatttactgtattaagctgatgtcatttggcacttcaaggaataagytcttgttttaataataatggccaccactcttaagaatttgcttcatgccaagcaatgcatcaggtattctagcataaaatagctttaaccctcctaggtagttcttactatccccattttacatgttcagaaactgtagtttagggagattattatctgcctaagaacaataagcgagtggtagagccaagactcaaatccagttgcataagacctcaaagccccactcttcataatctcagtcagagtctatttatataagaaatccccttatatgtaacttattattccctggcaatacccataaaagagtcatctctgtaatgagctttctggtaccatgggaagctt

SEQ ID NO: 357755 - DNA, 662 bp, Homo sapiens
cagcataaaattcacagcatgttcatagaatgtcagaattaaaagggaatttaggaatccctcgatcccataaaagttcatatatcagatgtggaaacagaggcccaaatgattttctcaaagccatacccttaggggtgagaattagaaccctaactcctgactcccagcactgtttctactaactcctrtctcatcccatctcaacccccatatccactggcaaaatagaacactccataaaatcaaccacaatttcagacaagatgaagtaatgcatgatgctaaatataggaagttaagtcatttggatttttgtttgtttgaactcaagtgttttaaaattttatcttatgaatattattataaatctgatttgggttttattctttagcaatttacttatcttaagtggtggcaccaatgtttattttcctgctgcaaaactgtcaatgttcccaaatattggtacaggaattgtaaatgatttatgcctgctgattgagtctctcactacaaatcacattagccctgaagcaggcagacatgcccatatcttcctctgagtcagtgcctggatccaggggaccagacctcttacctgacatggcagagagataagctatgtttcaggtcctcaaaaggagcctggaaaatataat

SEQ ID NO: 357756 - DNA, 509 bp, Homo sapiens
atcttggttattgtgaatctcgctgtctctttggcagccatttctgtactccctyccccagaagcagctttactgcagtctaaaagtgtcttaggaaaatgattcagaagcaactacttctcttggcatgttcttcagtaaacacgatgatggaaagctttgatttctgcccttctttaaacagtgcaatcgattttcagttgggattttttccagttaatttgatagctccacgtttctaccaggctgaagaaaatgtatgtgttgtgggctgttgtattactgttgctggtggtgctgttgctactgctgagattttgtggttgagtccatattataaaggaattgtagagcagtaataaatttaacttgagctctgaactcaagccttcaggtgtgacttttttaatcacgtggaaattcacgtaagaattttcaaccagacttcatgtttatttttatttcttaagcaaagggtacaggaatctggtctaaacgaatgggaacaa

SEQ ID NO: 357757 - DNA, 509 bp, Homo sapiens
atcttggttattgtgaatctcgctgtctctttggcagccatttctgtactcccttccccagaagcagctttactgcagtctaaaagtgtcttaggaaaatgattcagaagcaactacttctcttggcatgttcttcagtaaacacgatgatggaaagctttgatttctgcccttctttaaacagtgcaatcgattttcagttgggattttttccagttaatttgatagctccacgtttctaccaggctgaagaaaatgtatgtgttgtgggctgttgtattactgttgctggyggtgctgttgctactgctgagattttgtggttgagtccatattataaaggaattgtagagcagtaataaatttaacttgagctctgaactcaagccttcaggtgtgacttttttaatcacgtggaaattcacgtaagaattttcaaccagacttcatgtttatttttatttcttaagcaaagggtacaggaatctggtctaaacgaatgggaacaa

SEQ ID NO: 357758 - DNA, 509 bp, Homo sapiens
atcttggttattgtgaatctcgctgtctctttggcagccatttctgtactcccttccccagaagcagctttactgcagtctaaaagtgtcttaggaaaatgattcagaagcaactacttctcttggcatgttcttcagtaaacacgatgatggaaagctttgatttctgcccttctttaaacagtgcaatcgattttcagttgggattttttccagttaatttgatagctccacgtttctaccaggctgaagaaaatgtatgtgttgtgggctgttgtattactgttgctggtrgtgctgttgctactgctgagattttgtggttgagtccatattataaaggaattgtagagcagtaataaatttaacttgagctctgaactcaagccttcaggtgtgacttttttaatcacgtggaaattcacgtaagaattttcaaccagacttcatgtttatttttatttcttaagcaaagggtacaggaatctggtctaaacgaatgggaacaa

SEQ ID NO: 357759 - DNA, 509 bp, Homo sapiens
atcttggttattgtgaatctcgctgtctctttggcagccatttctgtactcccttccccagaagcagctttactgcagtctaaaagtgtcttaggaaaatgattcagaagcaactacttctcttggcatgttcttcagtaaacacgatgatggaaagctttgatttctgcccttctttaaacagtgcaatcgattttcagttgggattttttccagttaatttgatagctccacgtttctaccaggctgaagaaaatgtatgtgttgtgggctgttgtattactgttgctggtggtgctgttgctactgctgagattttgtggttgagtccatattataaaggaattgtagagcagtaataaatttaactkgagctctgaactcaagccttcaggtgtgacttttttaatcacgtggaaattcacgtaagaattttcaaccagacttcatgtttatttttatttcttaagcaaagggtacaggaatctggtctaaacgaatgggaacaa

SEQ ID NO: 357760 - DNA, 571 bp, Homo sapiens
attaatcagaagcttggaaagaaaaggctaagatggaaagaataactgtcacagggagaatctagggaatagagaagcatctaattattttttttwaaatgtattctcagaatttgaaaaatattgcatccataaagtaagaacaggaaactataataaaggaacatcagaaaacaagttaggctcttagaaactaaaaatattactgcaggaaattttaaaaattcaatataagcattggaagtagaagtccaggtagtctgtcccaggacatagaccaggaagataaaaagagaatatagggaaggagaagataagatataggggactaggtcaagatgtgactagtggaagttctaaaaagaagggagtctttggattgaaggggctcactaagtgccaggaaagttgaatagagaaaaaaattcaaacaccacacatagcacatcatggaaaaatttcagaacaccagagattttgtttaaaaaaaaaaagaattcccgagaagatgaaaacaatacatctataaaagaacaaaaattcaactgtcattgtattttagcaacaatag

SEQ ID NO: 357761 - DNA, 572 bp, Homo sapiens
aaaagtctatgcctgtctaaaaatgaatccagtgttgcctttctgagggatttctgctcaatgcaatacactgttcagtgctattctcccagctaggtttatccatgaaggactgagtgacctttgttgtatttaacaaaatccaggtgcatcaatttctgatgctttttactattgtgtattatctactatgtgtgttttatttctgctgagagtattcaggtttgccatggacatcagaagtttgaattccagtcttatcttatgttccatggctgaattttaaagctgtttaggtttaacaatgaagggatttattctttagtcaaaattgttgtttttactctagctcaggattcgtatttttaaagatttagttaatatraacacagcacagatttgttagaagaaaaaaaatttgctgtaataccaaaactaacctcatcaaagatacagaaaaaaagaaatatagtgagccctaaaggacacatacattgaataaataattggaacatgtggttatctttagatccacatcttagctgtcatttgttcactctaaaactgatgtt

SEQ ID NO: 357762 - DNA, 572 bp, Homo sapiens
aaaagtctatgcctgtctaaaaatgaatccagtgttgcctttctgagggatttctgctcaatgcaatacactgttcagtgctattctcccagctaggtttatccatgaaggactgagtgacctttgttgtatttaacaaaatccaggtgcatcaatttctgatgctttttactattgtgtattatctactatgtgtgttttatttctgctgagagtattcaggtttgccatggacatcagaagtttgaattccagtcttatcttatgttccatggctgaattttaaagctgtttaggtttaacaatgaagggatttattctttagtcaaaattgttgtttttactctagctcaggattcgtatttttaaagatttagttaatatgaacacagcacagatttgtyagaagaaaaaaaatttgctgtaataccaaaactaacctcatcaaagatacagaaaaaaagaaatatagtgagccctaaaggacacatacattgaataaataattggaacatgtggttatctttagatccacatcttagctgtcatttgttcactctaaaactgatgtt

SEQ ID NO: 357763 - DNA, 588 bp, Homo sapiens
ttcagttgttaacattctgaaaaaacacgtctataagtttgttataaattttactgacataaaaggtgtgtagcacacaatttacaatgacaaaatgtgctataatatttattgcaaattatgtagccagttggtccttacagaatgctttattgatttttgctgaactcttgtatcatagacaacctatgcttgtaactgatgacggagtatagctctggcctgagcgttggtcagtatttttgttttcatatgtaagacaaaaaggaaacaataaatacatatgttggaacttcactcattcatcagtaacatgactagcttctttgtgaaactggataatagtgataaaatactgaaaggctgtttcctcaattttctgttagtcacaatgtaccagctatagacatgacacacttktaagcttaattgccatttaaaaaattttctctattatttcttgagtctaagcaatcaagaaaacagtaaatcaagctctgattcgtagtatttgtaatttctgggatgtaagtattcctaccatgatcaaattcaagctaccacatatgcatcactgaatgaaagttg

SEQ ID NO: 357764 - DNA, 588 bp, Homo sapiens
ttcagttgttaacattctgaaaaaacacgtctataagtttgttataaattttactgacataaaaggtgtgtagcacacaatttacaatgacaaaatgtgctataatatttattgcaaattatgtagccagttggtccttacagaatgctttattgatttttgctgaactcttgtatcatagacaacctatgcttgtaactgatgacggagtatagctctggcctgagcgttggtcagtatttttgttttcatatgtaagacaaaaaggaaacaataaatacatatgttggaacttcactcattcatcagtaacatgactagcttctttgtgaaactggataatagtgataaaatactgaaaggctgtttcctcaattttctgttagtcacaatgtaccagctatagacatgacacacttgtaagcttaattgccatttaaaaaattttctctattatttcttgagtctaagcaatcaagaaaacagtaaatcaagctctgattsgtagtatttgtaatttctgggatgtaagtattcctaccatgatcaaattcaagctaccacatatgcatcactgaatgaaagttg

SEQ ID NO: 357765 - DNA, 575 bp, Homo sapiens
cagttctgcctagctgagggaagggctaagggtgacattgaaagaaccatagaagatgtgacatatacactggggaaggaaggatggataagasttttctgagaaaacgcagggagaagacaagtggatgggcagtccaggcagaggaaataacacaaataaaggcacaggagcatgaaaagtgtatctggggaatgataagttgtagtcatattggacaaatagatgaagatgaaattgaaaatataggctgggaccatattgtgaaaaatcttttgtgctatgtcaaaggctgtaagcaacaggaattcaagaagttctttgagtagaggagaagcaagattatatccctctcacttaaatgaagagggcagactaaatgagagaaagtcaaacaacatcaagaagtctggaggagtttattgcaataatctaggcatgaaatgaataagggttagtacaatgaaatggctgtggaatggatgttattttaagctgctattatttgtggtaattttttatgcagcaacagataactaacatagatttcagtacttggaagtggggtgatgctg

SEQ ID NO: 357766 - DNA, 575 bp, Homo sapiens
cagttctgcctagctgagggaagggctaagggtgacattgaaagaaccatagaagatgtgacatatacactggggaaggaaggatggataagagttttctgagaaaacgcagggagaagacaagtggatgggcagtccaggcagaggaaataacacaaataaaggcacaggagcatgaaaagtgtatctggggaatgataagttgtagtcatattggacaaatagatgaagatgaaattgaaaatataggctgggaccatattgtgaaaaatcttttgtgctatgtcaaaggctgtaagcaacaggaattcaagaagttctttgagtagaggagaagcaagattatatccctctcacttaaatgaagagggcagactaaatgagagaaagtcaaacaacatcaagaagtctggaggagtttattgcaataatctaggcatgaaatgaataagggttagtacaatgaaatggctgtggaatggatgttattttaagctgytattatttgtggtaattttttatgcagcaacagataactaacatagatttcagtacttggaagtggggtgatgctg

SEQ ID NO: 357767 - DNA, 606 bp, Homo sapiens
gaactgtgtgacatccaactgtgaccttacaagcttgtttcttatcaagttttaaagctccccatccatcataggactttcaataacttcctgtttctggatagagggaccagtagttctcatctgcagaggggagaaaatggacatgacttccattcaataactgatcagctcattcaggcccttgttacctcttacttccycagttgctttattcacctggcagaatcctgtgcatttttagatactcaataggatagtattttcccaggaaatcttttctatctgggtcaggttggaccacaacttcttgtgcctactgcaaggatagcatttatcacattgggttctaattgcctccttttttcatgccacaatacttcttgagcacttatacttgatactatattaagtgttttgatagagagcaacaggaatgcagtccttgtgtgaatgtctgagaatagatgttaatcaaataattgaactaataaatgcataaactaaaactgaaatggtaagctgaaagggaagcacttctgccatttgaaatcaaatatgaaagaaataaaacctagactgaggggttgtaatctgggaagactt

SEQ ID NO: 357768 - DNA, 606 bp, Homo sapiens
gaactgtgtgacatccaactgtgaccttacaagcttgtttcttatcaagttttaaagctccccatccatcataggactttcaataacttcctgtttctggatagagggaccagtagttctcatctgcagaggggagaaaatggacatgacttccattcaataactgatcagctcattcaggcccttgttacctcttacttcctcagttgctttattcacctggcagaatcctgtgcatttttagatactcaataggatagtattttcccaggaaatcttttctatctgggtcaggttggaccacaacttcttgtgcctactgcaaggatagcayttatcacattgggttctaattgcctccttttttcatgccacaatacttcttgagcacttatacttgatactatattaagtgttttgatagagagcaacaggaatgcagtccttgtgtgaatgtctgagaatagatgttaatcaaataattgaactaataaatgcataaactaaaactgaaatggtaagctgaaagggaagcacttctgccatttgaaatcaaatatgaaagaaataaaacctagactgaggggttgtaatctgggaagactt

SEQ ID NO: 357769 - DNA, 606 bp, Homo sapiens
gaactgtgtgacatccaactgtgaccttacaagcttgtttcttatcaagttttaaagctccccatccatcataggactttcaataacttcctgtttctggatagagggaccagtagttctcatctgcagaggggagaaaatggacatgacttccattcaataactgatcagctcattcaggcccttgttacctcttacttcctcagttgctttattcacctggcagaatcctgtgcatttttagatactcaataggatagtattttcccaggaaatcttttctatctgggtcaggttggaccacaacttcttgtgcctactgcaaggatagcatttatcacattgggttctaattgcctccttttttcatgccacaatacttcttgagcacttatacttgatactatattaagtgttttgatagasagcaacaggaatgcagtccttgtgtgaatgtctgagaatagatgttaatcaaataattgaactaataaatgcataaactaaaactgaaatggtaagctgaaagggaagcacttctgccatttgaaatcaaatatgaaagaaataaaacctagactgaggggttgtaatctgggaagactt

SEQ ID NO: 357770 - DNA, 495 bp, Homo sapiens
tggacgatcatcaaatttacttagagctcaacgggaggaaaagcaagctgtggcagcaaaaataattttattttataaagttataaaataattctagggtggcctctctttctggcttgtagatggctgccttctcactttgtcttcacctggccttccactctgtgtgcacatgcatgaagagagagagaaggctctcttgtgtctctttctcctcttataaggacactagtcctatcagattagggccctacccttatgacctttttaaccttaattacatcctcaaaggccctatctccaaatgccattaggtcttgagttaggtcttcaacatataaatttgggaggagattgggggttaggtcttcaacatataaatttgggaggacacaacttaatccataacatccscaaatactatgaatcactgaattattgccacaacactacataaaagcaaacttaatttcagtggcttataataacaaatac

SEQ ID NO: 357771 - DNA, 331 bp, Homo sapiens
ttgaaaagtaatgctcaaactcttttgaaagctgagataggtgatcatgcgtcagcttggagaaagatgacctgactcagtctctttcaaaatctctgctaatgtttgaaacatgtcaaaaatcccaatgttcacttgtcacccccataattccagtttggctttgaatgcagccactttatctgccaacttgaacacagttgtygttctctcctggcatgacagattgaatttattgagcaggttgaatataccacacaagtaagtaagttatgtgacccattctgtgtcaatgaaatgtgctgccagtgatgactggttttctaaacga

SEQ ID NO: 357772 - DNA, 331 bp, Homo sapiens
ttgaaaagtaatgctcaaactcttttgaaagctgagataggtgatcatgcgtcagcttggagaaagatgacctgactcagtctctttcaaaatctctgctaatgtttgaaacatgtcaaaaatcccaatgttcacttgtcacccccataattccagtttggctttgaatgcagccactttatctgccaacttgaacacagttgttgttctcycctggcatgacagattgaatttattgagcaggttgaatataccacacaagtaagtaagttatgtgacccattctgtgtcaatgaaatgtgctgccagtgatgactggttttctaaacga

SEQ ID NO: 357773 - DNA, 538 bp, Homo sapiens
gttttttactaattttggctagggttatcttgttggcttaccaaaactgactgagataagcgcacagtgcagaaaagaggtgcagatggaagtggtaaataaaataatgggtgggccacatgcagactaaataagtgtcggattctgacttaaagcctgccaccgaggcagctgtacaattgaagtaaatcaactcasttgccactatacagcctgccactaaatgcagcttaattgtcacttgccactcactgatagggttttgatatgtctgcaagcagttgatttattatggtctctgtgcagtcaaacctctctgctaatgtttatctgtatttgcagccactcaccagtgctagcattgctgccttggctccacctcagatcatcaggcattagattctcataaggagggtgcaacctagatccctcgcatgtgcagttcacagtagggtttgcactcctatgagaatctaatgccactgctgatctgacaggaggtggagctcaggccacaatgtgagctatgaggaggggc

SEQ ID NO: 357774 - DNA, 556 bp, Homo sapiens
gtacaattgaagtaaatcaactcacttgccactatacagcctgccactaaatgcagcttaattgtcacttgccactcactgatagggttttgatatgtctgcaagcagttgatttattatggtctctgtgcagtcaaacctctctgctaatgtttatctgtatttgcagccactcaccagtgctagcattgctgccttggctccacctcagatcatcaggcattagattctcataaggagggtgcaacctagatccctcgcatgtgcagttcacagtagggtttgcactcctatgagaatctaatgccactgctgatctgacaggaggtggagctcaggccacaatgtgagctatgaggaggggctgtaaatacagatgaagctttgttcgycccaccactcacctcctgctgtgaggcccagttcctaacaggccatggacttgtaccagtctgtggcccaggggttgggaacccgtgatctaaatgacaagggcgggatagacatgcatgaaaaatagacattcaaaggactctatcttttaatttttttcacc

SEQ ID NO: 357775 - DNA, 302 bp, Homo sapiens
acctttacttatgcaaatttctgcagcaggcttgaattcctcccatgaaatgttttttttttttctaccacatggccagggtgcaaatttctcaagcttttatgctctgcttcccttttaaatataagctccaatttcaggtcatttttttttttttttgcttatacaaatgagtgtaggcttttggaagcagccaggccaaatcttgaatgctttgctgcttaraaatttcttccaccagataccctaaatatatcatctttctcaagttcaaagtttaacagatccctagagcaggggca

SEQ ID NO: 357776 - DNA, 555 bp, Homo sapiens
tcttcagatgaggggaaaggggatgcccatggggtgagactaaagaccattcttttggccaaacccacctgctcccaatctggcattctaaagaggctatagtttgataatatgaatattaggattatacacaagtttaaacaagacattttgtttttccatgcacatatccttgaggccaatgagtagtggtaggaatagaagagatgagaaggtggaggctgaccaatatggcagcatatttaatcatcacttataaccatcttgctcctctcccttttttctttcatgagaaacattttatttatagttataactttatattttttaaatatgaaagacaatcatttaaggacagacttgcaaaattcagaggmcttcctccctaagtccaagtctttagtgttgaaagtgaaaaatcatgatacttcaagtgaatgacttacaggtattgtctgctatgaatagacataactctaatataaaggccgttagaggaaattgagtaactttaatgtagagagaatttggatttatattatattttataagtca

SEQ ID NO: 357777 - DNA, 555 bp, Homo sapiens
actagtctgaatcacatttcctgccccaagtgccagggatgggatcagcctcaaccaaagtacttgggctaggcaggattaatgcccaaacaaaaatcaagatacctcccaacagaagggggaaacaaatgtcagggagtcaccctgttgttgattcactccagagcttgtcttcmtaaggaaagtaggatttcctgcttctaaaccaggcactttccacaatgcaatcccaaagatcagttttgccaggagtccctatccggcaggatggctaaagagcacagtggggctgaagggcgtttcttctgtacagttgacccttgaacaacatgggtgtgaactgcacaggtccacttatatgtgggcttttttcaaccaaaccagacacagattgaaaatgaagtgttctcgggatgtgaaacctgtgtatacagagggcagactttttgtatactcgggttccgggcttcggaaactgagtatgcgtggatttcagtatacccggggattcctggaaccaatcctccatgtataccaagggaggactgaacttac

SEQ ID NO: 357778 - DNA, 489 bp, Homo sapiens
tcttgggcatgatgcctgccagttgcctcttttacacatatggacatgaccagaataagtaagccaaatgtttgtgaatctttattggttttcttgtgctactacccagctttcatgcaggataaatgccatggattgtttatgacaaaacttgccttccaaatagttttcgtgagtattttggatttccagaaataacgcaagcctgaaactttagtaactctcattattccttactgaagttgaggaagatagagcccacctagaaaagkgtaggatagagaatacaaataagctaaaaatatgacactgctttaagccaaaattctttgtaaaattgttcaatattatttagtagggatacaataaaactaattttccataaataaaaaatagtatgcctttttatgctataaaagctatgtttaatgtagcatttttgtttatttaaagttaaaatatttgaaattgtggtttttttctgaaatt

SEQ ID NO: 357779 - DNA, 671 bp, Homo sapiens
atatattaggttttggtcttctaacattctccagtggattttctctaaagtaggtatgcacagaaagagttgaatagcaaaaaagtaaatcatgkaataattctgagatttttgggtttgtcacaactgagaaatattgctgagggtgtatggtcctcaagtgtgaaaatgttccttgtgaattgcttgtatccgaaatatacacacaacattaagtcctggtttttatcttttattttttccaatccttttttcttctcaaggtgtccaagtcacacagagccacagaatctcacaggtgtctcagaattcctcctcctgggactctcagaggatccagaactgcagccactccttgctgggctgttcctatccatgtgcctggtcacgatgctggggaacctgctcatcatcctggccgtcagccctgactcccacctccacatccccatgtacttcttcctctccaacctgtccttgcctgacattggtttcaccttggccacggtccccaagatgattgtagacatgcaatcacatagcagagtcatctcccatgcaggctgtctgacacagatacctttctttgtcctttttgtatgtatagatgacatgctcctgactgtgatggcctatgactgatttgtggccatctgtcaccccctgcacta

SEQ ID NO: 357780 - DNA, 642 bp, Homo sapiens
gtgtggtggcatcagtgttgtacgctatggtcacccccatgctgaaccccttcatctgcagcctgagaaacaggggcattcaaagtgccctgtggaggctgtgcaggaggaaagtctaatctcatgatctgtttcatcctttttcttgtgtgggttagaaagggcaaccacattaaatctctacatctgcaaatcctgccccctttgtcacattacttttgttgcttgatggcttatattcctttccayatttcctatgtgaatattgctttctttgttatgcctttaactggaatgggtgagtattctgggatcctttgtatagcataaacctcatgactgaatcctctatacctaggcggcctcctttagtttctgaacaataaccctgtcgtccaggtggaatcacaaccatctttttatatacaggaagtcctcacttcattttgtaattccctgaaaattgactttatggaaacaatgtacagcaggtcctccaacaccattggtttgttcaaagttgtctagttataatgttgatgagaaataaattggtttcactatacataattttgcttaaaggtgcagttttcaagagactgtcaaagatgttaagtgaggaatcctgtacatcaaattcac

SEQ ID NO: 357781 - DNA, 527 bp, Homo sapiens
aactacattgtacagtgccatttactattttactgacattttaaataatcaacaattaaagggaatacgtcaacattatttaataccaataacgttatttttcttgagtaatcctgttgaaattaaggattttaaataaaacattaaaaacaaattatattgactgatttcagctttggatgaaatcatacttgtgtatttgtagtaatgcgaagcataactttctcctcacaattaatcttttataacatcggtgttatagttttctctgacaccaacattgtgatatcgcacaggtttactgcatgcatgcattacatgcctccagagagtaggcttcaaatatatggaaaaattatatttatgaaaaaattctaggaaagggaatggtgaaatggaagagaatttctcacttgctaactgttggacatggatttgtatatatttggatatagacacatactggcacactgtgagtttgcccatgtatatatayacctatatgagaaacccataatatatgggtt

SEQ ID NO: 357782 - DNA, 527 bp, Homo sapiens
aactacattgtacagtgccatttactattttactgacattttaaataatcaacaattaaagggaatacgtcaacattatttaataccaataacgttatttttcttgagtaatcctgttgaaattaaggattttaaataaaacattaaaaacaaattatattgactgatttcagctttggatgaaatcatacttgtgtatttgtagtaatgcgaagcataactttctcctcacaattaatcttttataacatcggtgttatagttttctctgacaccaacattgtgatatcgcacaggtttactgcatgcatgcattacatgcctccagagagtaggcttcaaatatatggaaaaattatatttatgaaaaaattctaggaaagggaatggtgaaatggaagagaatttctcacttgctaactgttggacatggatttgtatatatttggatatagacacatactggcacactgtgagtttgcccatgtatatatatacytatatgagaaacccataatatatgggtt

SEQ ID NO: 357783 - DNA, 624 bp, Homo sapiens
tctacctatcagcctgtaaagtaaaaagaaattatttgctttcaagatacaatggagtagaggcattggggttaacatttctgttccaaaagggagaagttggccaaaagaaaggggatacagacccccatgcaagtttgaaatgcagcatggcagtgactacatcttaatgcttaaaaataatctcctctgactccatgtcccacattcaggacacactgctgcaaggagagggctcccaaggccttgggcagctccactcctgtggctctgtagggctcaacacatgtggttgctctcataggttggasttgagtgccttcagcttctccctgctgagggtgcaaactgccagtggatctagcatcctggggtctggaggatggtgaccccttcccatagctccagtaggtggtaccccagtggggactctgtatggggcttccaacctcacatttcccctcagcattgtcctagtgaaagttctctgtgtgtgttctgtctctgaggcagcttccgcctggccatgcaggcttttacatacatcctctgaaatctaggcaaatgcagccaagctcccttcgctcttgcactctgtgttcccacaggcttaacaccacatga

SEQ ID NO: 357784 - DNA, 624 bp, Homo sapiens
tctacctatcagcctgtaaagtaaaaagaaattatttgctttcaagatacaatggagtagaggcattggggttaacatttctgttccaaaagggagaagttggccaaaagaaaggggatacagacccccatgcaagtttgaaatgcagcatggcagtgactacatcttaatgcttaaaaataatctcctctgactccatgtcccacattcaggacacactgctgcaaggagagggctcccaaggccttgggcagctccactcctgtggctctgtagggctcaacacatgtggttgctctcataggttggacttgagtgccttcagcttctccctgctgagggtgcaaactgccagtggatctagcatcctgggktctggaggatggtgaccccttcccatagctccagtaggtggtaccccagtggggactctgtatggggcttccaacctcacatttcccctcagcattgtcctagtgaaagttctctgtgtgtgttctgtctctgaggcagcttccgcctggccatgcaggcttttacatacatcctctgaaatctaggcaaatgcagccaagctcccttcgctcttgcactctgtgttcccacaggcttaacaccacatga

SEQ ID NO: 357785 - DNA, 605 bp, Homo sapiens
tctctcatagtctatgcagaaatctgtgttatccttctatagcctaagaagatactgagtttctcaaggagacatatgagcatctgccaattttagaaaaataactaggtcagcacacttactacacaaagtacttgaaaagcctcccttcccactgcagaaaatgttgacatatgcattttccatcattcgatccaaagatgatagtggcaaatatctggcagagctttaagttayagcagaataactaccatgaagaggccatggttaattgctcagttctcaagctctaccaggctactgttgtgtttttatgatgcttcctgcgcattgctactaagaaaaaagaatgctgctttagtacaaccatccccagagagcagattctcattcctctaacacagcatgtggtcaatagaaagtaaatgttaaattctctggctaacaattcaattaactagtgaggcctgaaatgctgtaattaacatttcacataaaagtactggagactatttactgagatctgaactgtcagccctgttaattattcaaagactagttaacagtgacgttggtctccttgccctttattgagacacaacata

SEQ ID NO: 357786 - DNA, 534 bp, Homo sapiens
acagtgcatgggtaatcaatagagaaagtgtagtcttttcaataaatactactgaacaattggacatccatatgtagaaaaacaaaaaacagaaaacttggatccataccttgcatgayattaatatataaaaatatacttaaaatgaattaaagatctaaatataaaacctaacaccagaaaccttctgttaaaaattagaggataaaatacttatgactttgactaggcaaagagttttaaatataacacctgaagcatgatgtatgagaggaaaaaaaagataaatcggactttagtataagttaaaatatttattatacaagagacccttttaagagaatggaaagacaagctatatattggaagaaagtatttgcaaatcacatttttgcggagaacttttaaccagaaaacatatcaagaattcttaggccaacatggtggctcatgcctgtcatctcagcacttttgggaggcccaggcaggaggattgtttgagcccacaaatttgagactagccagggcaacata

SEQ ID NO: 357787 - DNA, 605 bp, Homo sapiens
gcataacgttttcatatatgttaccctgattgtgttgctaaatgctttgcatttttcatcaggtgataaatattttttgggaaagaacttggaaaagataatgaagaccagtcaaagtacaaataacatgaactaggaaactcaggggattcttcccagctctgtcatatgagaagatgaccaaaaaacttggtctcactgaatcttggtttcttaacctataaaatagttatacaaaaagttctttctctattcattgtcagggcacatatacactgaatacacaataaatttcctagatcgcactcaaaattccactattttttaaatcactttcctcaggagatctaccacttggtatggaccacctttaagggaagggaaacacagcctgccaaagatccccttggataaggaaacacaggaggagggctgaccaytgaaagttagcactgatgcctggggacaaaggagagggtgtcttctccccctaccctaaaacactattgtggaatgttcccgatgtagccacagttcttcctaccaggggctgctacgtaatcaaagaaagtgcttttcatacttttcatggtggctccatccct

SEQ ID NO: 357788 - DNA, 565 bp, Homo sapiens
ctaggagggaaaaatggtttcctggaccaggtmcagggccaccctgctgtgtgcagccttgagacttgctgtcctgtgtcccagctgctccagctggggctaaatagggccaaagtgcaactcaggccattgcttcagagggggcaagccccaagccttggaggcttccatgtggtggtgggcctacaggtgcacagaagtcaagaattaaggttggggaacctccagctagatttcaaagaatgtatggaaatgcctggatatccaggaaaaagcttgctacagaggtggagccctcatggagaacatctgcgagggcagtgcacaaaagaaataggggattggagccccacatagagtccccactgaggaactgcctagtggagctatgagaagagggctgccatccttcagaccccagaatggtagatccactgacaacttgcactgtgtacttgtaaaagctgtagacactcaatgccaccccatgaaaaaagccaggagggggctgtaccttgcaaagccacaggggcagagctgctcaaggctgtgggatcccacctcc

SEQ ID NO: 357789 - DNA, 595 bp, Homo sapiens
cactgttggtgggatgtaaattagttcaacccctatggaaaacagtatgcagatttctcaaagacctaaaaacagaattaccatttgatctagaaatcccactaccagtaattgcccaaagaaaaagaaatccttctawcaaaaagacacctgctttttctcaacatgtttatctcagcactattcgcaatagcaaagtcatggaatcaacctaagtgcctatcaatggtgaattggatcaagaaaatgtggtacatataccccatcaaatattacacagccgtaataaagaatggaattctgtcctttgcagcaacatagatgcaactggaggccattatcctaagtgatctaatggagaaacagaaaagcaaataccccatgttctctgttatacctgggagctaaacaatgggtacacatggacataaacatgggaacaatagacactgggtactgctagagtggggagggagagagagggtcaatggttgaaaaactattgggtactacgctcactacctgagtgatgggttcaatagaagcccaaaccccagaattatgcaatgcacccttgtaacaaacctgcacatgt

SEQ ID NO: 357790 - DNA, 595 bp, Homo sapiens
cactgttggtgggatgtaaattagttcaacccctatggaaaacagtatgcagatttctcaaagacctaaaaacagaattaccatttgatctagaaatcccactaccagtaattgcccaaagaaaaagaaatccttctaacaaaaagacacctgctttttctcaacatgtttatctcagcactattcgcaatagcaaagtcatggaatcaacmtaagtgcctatcaatggtgaattggatcaagaaaatgtggtacatataccccatcaaatattacacagccgtaataaagaatggaattctgtcctttgcagcaacatagatgcaactggaggccattatcctaagtgatctaatggagaaacagaaaagcaaataccccatgttctctgttatacctgggagctaaacaatgggtacacatggacataaacatgggaacaatagacactgggtactgctagagtggggagggagagagagggtcaatggttgaaaaactattgggtactacgctcactacctgagtgatgggttcaatagaagcccaaaccccagaattatgcaatgcacccttgtaacaaacctgcacatgt

SEQ ID NO: 357791 - DNA, 557 bp, Homo sapiens
tttggacgggctacagcaaaaacaaaggatattccctaaggccccggacccacatatcagatctataggataattggacctgacagggaaagaaccacacatgcatgctcttgttactttatattccttaaactttttgcccaggaagatgccccaaagtgagatagaaatgaaggagaaggagaaagcagccagactatttctacagagagaggcataggcatttaatcctgagccttcactgtgaagcccaatagctttcacaacaacaaaattgagagaaacattactccaaagtggaaaacaataacatggggagaagataattgatgttttaaaaacataccattttgggtccaaatgcagcagctaattctcttttattccatgccatacagacttcttcagaaattccrtaagatctcccaatcaagattgggaaaatctaaatagaagctagctgtgattgttaatactgagtgtcaacttgattggattgaaggatacaaagtattgatcccgggtgtgtctgccaggatgttgccaaaggagattaa

SEQ ID NO: 357792 - DNA, 567 bp, Homo sapiens
gttattggaagctggggtaaaaaagattttttttaaagtrttacaaaatttagcaaaattgttccatgtgacaacataaaaatagaaaatatacacctgacaaacctgatgatctagacaaggagatctccaataaaagtgttgaaggtgcctcctgacctctttgagccacctgtaatagaatgagagacgaaagagtttttgagtaaaatttggaggaaggtacaggaaactatcctgtacactttacaggatagtttcagcagcaaactattctcaaagaaagagccttaagccaaaaatcatatcaaaggtggatatcctatacttgcaggtgattccagtttcttagtctttccttctgaggccccagacatcttggaacagaaaaaaaacaaaaagcagaagcaaaacaaaacaaaataacctatccctgtggcactctgtctagagtcctgacccagagaattggtgaacgtgaaaaaatgattgcttgaaacccctgagttttggggtggtttgttatgcagcaatggtagcaagaacagtaagaaaaacaaaaatgac

SEQ ID NO: 357793 - DNA, 596 bp, Homo sapiens
tttgttttcctgtctaaatccgtaacatctctctgttgcttaagactgacaatcatatttgtatgtcccattgctacttagtatagtgtcttacataaaacaggagctccataaatatttgttgtagtggaaattaaagacaggctgctactttaaagcaaacacaaatgaaacttgcttgttttctaatcttttagctgctgttgcttgtgtttgtctgttagcattggtgggcatatctgcacgtgatgtacctttaatataatttagtcaccacaaaccagtgatctgttatacataatgggatgaatttgcataatgtatattaccttatgttggcagcatcatagtgccaaacaagaattgtaaatccaaataatattaagtttctcatgtactaaggtgatatgattgatgtacatagagtgagacttcagagtgagccaacatatgtaggtttttagtaatttactgatcttacttgattagtttactacgtaccaaataggactaatttcagtggtactttatcacatatttttcagaggttttatgtgaaagtgccttaaaamagtaaaatacaaaggtaggtaaca

SEQ ID NO: 357794 - DNA, 604 bp, Homo sapiens
ctttgctcttccacatacgttttagaatcagtttactaagttgctacaaaaagaccttctgggacttttattgggattaaatttggtttatagatcaagttggaaataattacaatttaataatgttgcatcttttgactcacaaatactacatatttttttaactatttggttaggttttctttaattactctcaatgttttcttgttttcagcatacaggggtagcacaactttgtcagattttatcctcaggcgtttcatttttgatgctatttaaattagtattgtctatttaatttaattcctgattgttcattgctaggatataaaaatataattatttcatatactgatttcatatcctgcaagctgctaaaatacctatcagttctagyaggttttggtagattccattggattttctatttagatggttaggttgtctatgaataacaacagttttatttcttccttttgtttttttgagtcaggatcttgctctgttgcccaggttagagtacaagagcataatcatggctcactacagccttgacctccagggcacaggtgatcctctcaccttagtctcctgagtagctgag

SEQ ID NO: 357795 - DNA, 601 bp, Homo sapiens
gccaaatcagccctctactgaatactaaagaggaagcttctgtagatcttcagagttctatctgtgtgcaactctctcctctctgttactctgtcttaggaagtctaaaaacttggtctcctggattcctgattacctctacacagctaagaaagtctgcctgactcccagtgggtttctgcttctgtgctattgactggaaactcatggcaatgagttggccaatagtagtgtgtgactcatttgtttcccatttttcaacatcactgtcctccactgtctaatgttcagtgtcttagaaaacattactacttatattttagctattatttttcttcttttagttgattcagtgggrtactatatccagcctttgtaattccatcttgcccagacccaagacttttgattttggatattttttccttgttcattcaccttaaattaaacagttatgcctccagattacattaaatacaactgaaacatcattcagctcagttgtcagacattatgtcaaattatttcagaataaaacctgactcaccaaatatttgtcagtgaaattctatcacctatgttttccatttttctcaaattc

SEQ ID NO: 357796 - DNA, 540 bp, Homo sapiens
tggagatgtcaaagtctcttgtttgatcttctcgctgtcactaagtctctcagtccttgactccttaattacaaaggctgttgtcttgcagtctcatagtaacaagatctcacagtctcacagccttccggtcttgaaatcccacaccttgtaatatggaaatctcagcctgttaaacagatggtctcagaatctcaggatctcacaagttcaaggtctaacaggctcaaggtcaagcagttttgagatctagcaatatcatartgtctggttctaggactctcctgaaggaagagcctaaattcactatcataatgctttgggagctattgtgaccaaatcctgacacaatccaacttacgatatagtcaaaaccatcagccctctggcagcatagaaaatggagactgggctgacaaatacaatgtcttaggcagctactatgaaacatatttcacagaatagcaggaaaatcagtaaacttaaatataggttaatagaagtcaaaactgtagtatagaaagaaaaaaaaggaaaaat

SEQ ID NO: 357797 - DNA, 540 bp, Homo sapiens
tggagatgtcaaagtctcttgtttgatcttctcgctgtcactaagtctctcagtccttgactccttaattacaaaggctgttgtcttgcagtctcatagtaacaagatctcacagtctcacagccttccggtcttgaaatcccacaccttgtaatatggaaatctcagcctgttaaacagatggtctcagaatctcaggatctcacaagttcaaggtctaacaggctcaaggtcaagcagttttgagatctagcaatatcatagtgtctggttctaggactctcctgaaggaagagcctaaattcactatcataatgctttggragctattgtgaccaaatcctgacacaatccaacttacgatatagtcaaaaccatcagccctctggcagcatagaaaatggagactgggctgacaaatacaatgtcttaggcagctactatgaaacatatttcacagaatagcaggaaaatcagtaaacttaaatataggttaatagaagtcaaaactgtagtatagaaagaaaaaaaaggaaaaat

SEQ ID NO: 357798 - DNA, 597 bp, Homo sapiens
aaacataatatcctttggcttatcaattctatgaagatattgataaatgggatgaaaatctgttattgctttgtargtaatttgcattttatgctttaatgattttaaattattttctttatattggtgttacactttttatttattatgatgctttcagacatgtacatttctcgtgctttgtcggttgacatgagcatgtattttattagttatttaaaatctttaaacacctcttattttcagctattttgtctctcccacttatttaaattttttattaaaaattccataagacatagctcctttattttattttcaatttactttgtcctccattttaatttgccactcatttttctccctgttgtgacatttatgtatttattgtacctcattttttcactcatattttagttcatacttttcctttgcttatatttctctaatttttaaaaacatttttacaacaaaaatcacagaataccagtggaattcagagagaaaaatccaacacctgggaaattggtccattagatgcataaaaaatgaaaataaggaaaagcaaaatattaaattcctcggttattgttatct

SEQ ID NO: 357799 - DNA, 458 bp, Homo sapiens
cttaccaagaaggtagccaacatgagggaataacaaaaccaaataacttttgaaaccagaggaaggaatttttttcatttttagatcagtatcatcagcttcctgaggaatctgtactaaaatggattgcagaagtaaattatttgtaagtagtgtatttggttttaaatggcgcagagtggataaaataggtttggtttgatgcaggaaacacagctcactactaaamaaatcacaggctaatatgtaatccagacacaaagacgggcatttctaagaagacagccagcctagtgaactggatagaagccattataagatcaatttaccttgcagatgaggactgtccaactccacctataaatgccaagtggaacaccccagataaaacatctaatatgcttcatatgtaagccatgggggactgaaattatgatgacataaatattcacccactg

SEQ ID NO: 357800 - DNA, 458 bp, Homo sapiens
cttaccaagaaggtagccaacatgagggaataacaaaaccaaataacttttgaaaccagaggaaggaatttttttcatttttagatcagtatcatcagcttcctgaggaatctgtactaaaatggattgcagaagtaaattatttgtaagtagtgtatttggttttaaatggcgcagagtggataaaataggtttggtttgatgcaggaaacacagctcactactaaacaaatcacaggctaatatgtaatccagacacaaagacgggcatttctaagaagacagccagcctagtgaactggatagaagycattataagatcaatttaccttgcagatgaggactgtccaactccacctataaatgccaagtggaacaccccagataaaacatctaatatgcttcatatgtaagccatgggggactgaaattatgatgacataaatattcacccactg

SEQ ID NO: 357801 - DNA, 586 bp, Homo sapiens
gtcacagtgtactgggggtcaggtgatctactgagactccagctgygttggctaagtgaatgctggcatcgccctccccctaaccccaggatgcacagctcacagctccaaaagagacccctttctttcacttgaggagaggggaggaaagggaaaagtaggaagaattttatctcaagtcttgaataccagctcagccacagcaaaataggccattggttagagtcacgaggcccccattcaaggccctagctcctgtatgataacatcgctagacacaccctaccctgaaaggatacccactaccctgaagaaagggaccaagatctgacagtgtgtatcatctgctaactgaagaacccttgtgccatgaataaccagcagtaatacccaggtaatacaccaaaggccttgggtgagtttctggtacttgatggattcaggtgagattaataatatttccagccatgctgactgtgaggtgaaactacatctgctgggaaaaactgagggaaaagtaaacaggagtttgtcttgcactgtaggtacaggtggagccacaggaagatagatcaccaaaaaggct

SEQ ID NO: 357802 - DNA, 521 bp, Homo sapiens
agtcttctggatcaaagaagaaactgatcctcgtggaaaacaactattacaaagaaaatttatagctttgaatagttttattttttttaaccctcaaaataaatggactcagtatccacctctttagaaatttgtaaagcaaaaacagaaaaaatagaaagaaagtagaaacagggatttaaacataaagttaaatttaatatcagaagagagaagagtgaaaaaaaatatgtgaaactgaaaactaattatttaagatgagtaatacaataagtaaatcttaaaggtctgatttttaaaaagaaacaaaaratatgatatttgatatggaaaggaaataaaaaccacaacagtctattatgaacatctctatagtaattgatttgaaattttagaataaattgatggcaacataataaagcataaattataaaagcagatacaagaagaaatagaaaacaaagagtaccccataatatatccatctaatgtgtacctataaaaattttttaaaaaagaaa

SEQ ID NO: 357803 - DNA, 626 bp, Homo sapiens
aggaataatttcacatgtcttactgtttttattcttactagttttaataagaatcttttacatatttgtgattctaagacacatatatatgtatatcatgcattttgtaatcattgctaacatgttttcgtacacttttagaatttcaatacaggaataaatgttagaaatctaacattcattcttaaatggctgcagggaagtggggaatggatagagaatatatatatttccctagatgtcctgtycaaattatacatggcatcctctgaaatagattctggcatcatcctcctccccaccacccccatgcatcctggtgagagtaattcagagagtgtgttgaagagaaaactgaggctaaaaatgtaaaaatgtattacccagaggtccacacatacaatatggcagggttatcattcccaagtaagtgctctttcccatagcctacctggccacttcctttagtttttttatctgtattgtaaacatggttcatgaagtctttatttcctaatacaaataggtgatcttctggaaacttgtaactcttcaacgttatcttttttcattgatttaccatattctacatttattaaaattatttataagttgtatagtttatt

SEQ ID NO: 357804 - DNA, 546 bp, Homo sapiens
tatagtcgtataaataacatctctagagtacaaagttgtatttattaatgttttataatttaattgttaagggaggtatrttagtcattgttcaattaggaaagaaaactactctagattttttaaacagagagggctttgtgccagaaattgattacaaaatagttgaaatggatagaggaggaaaacgatgtgcttgagaaaccagtaagaggagatattacctagagattaagaagcaactacaacccataggctcatacccatcagcccacattgctgttgatcttctggtggtgctacaagtgccattgcttctactgaaactgcactattgctgagattgccctgctgcagatgctgctgaaattaccaccagtactgctagaaacccagcgttctaatatatatgcagtccttcagtcattaattgctaatgctaccacaaaatattaacagaagaacgggaaaattatgaaactgtttttctctagccttcaaattcactgccagtgctacccatttatggactctaactgaaaaacg

SEQ ID NO: 357805 - DNA, 550 bp, Homo sapiens
tgatatctgtttaaactctcaattaaactccacactatgtataatttcttaaaaagtgactacttcttataaaatattttatttattttaagaggatattttcttatttaatcagcatgctgccaaatatgttacatgaactttgaaaaaaataaagacatgtattttwgttaggcttgaggttatttattaattagaataagttaattcatactcataaagataacttgtcattcaagattttacattatctggtttgtctatttataaaagaccaataattttatcaataaattaattcctatagatatggcttataagttgcagcatcttcaggagagtagataaattgtctgtaataaaatacaatggacattaaaacacataataaattttaaaagtgataaaattaattataatagcattgtgacagaaacagtattatctagtagttattcaaaaactaccatttgtgacttggctaaaattcagtcatatataaaattgaagctgttggagtatattaataatatctaaagtaaattattag

SEQ ID NO: 357806 - DNA, 607 bp, Homo sapiens
tatttactgaccagattggcagaggttctacagtcttataactgcactgtctgaaacacatggactgcatgatcaacaggtagaagagcagatgaacatgaagaattcaygtgcaccattactagatttaggtccagaagtaatacacatcactttcacttacagctgatgggccagaacttatagtacaacataacattatctaactacaaaaaggctaggaaatgtagagaagcacatcaattttttggtaggctgtaaaatgtctctgccatgatatctaatatttattgagttcttaacatgtgctaggtgctatgttaagcatgttgtgtcattgccttacttaatccttatcatagtcctgtactataaatatgaccattgtaccaatgagagaactgagtttgagaatgataatatgtacatggtaacatggaacataaatggcggagccaggattcaaactcacattcttactatttgcttggccttttattctagagctaaaaacatgctaatttgtttaagtccaaatccgtttaatggcttctcatcttgtgatcttttttaaatgtgagctatagttttcacctactctccccca

SEQ ID NO: 357807 - DNA, 607 bp, Homo sapiens
tatttactgaccagattggcagaggttctacagtcttataactgcactgtctgaaacacatggactgcatgatcaacaggtagaagagcagatgaacatgaagaattcacgtgcaccattactagatttaggtccagaagtaatacacatcactttcacttasagctgatgggccagaacttatagtacaacataacattatctaactacaaaaaggctaggaaatgtagagaagcacatcaattttttggtaggctgtaaaatgtctctgccatgatatctaatatttattgagttcttaacatgtgctaggtgctatgttaagcatgttgtgtcattgccttacttaatccttatcatagtcctgtactataaatatgaccattgtaccaatgagagaactgagtttgagaatgataatatgtacatggtaacatggaacataaatggcggagccaggattcaaactcacattcttactatttgcttggccttttattctagagctaaaaacatgctaatttgtttaagtccaaatccgtttaatggcttctcatcttgtgatcttttttaaatgtgagctatagttttcacctactctccccca

SEQ ID NO: 357808 - DNA, 602 bp, Homo sapiens
gttaggtcatgagggaccctcttcttgttaatgagattaaggccattatgaacgagtcttcctgcagagttcagcttttttcctgtctaccttacaccatgtaaggacatagcattccttcctcttgaggatggaacaacaaaatgctactttagaagtagacagcagcctttttcagataactgaacctgctagttccttgatcttacacctttcagcctccagaactgagaaaaataaatttatgttctttataaattacccagtctctagtaattttttgtagcagcacagatgaactaagacaactagtgccccataggctcatttaatttaggggttaaagtgaacttccttattgcaccaatggggaaattggagcctatgataagttatttatttataatccggtaaatagctagaggaagcacacctaggyctcctgattctctgtctaggctaatttaaaataatatcaaaataaagctttcacacagcaaagcaaacaattaacagagtgaaaagacaacctgcagaatgagaaaaatatgtgcaaactgtgcattcaacaaggaaccaatagccagaatatgcaaggaact

SEQ ID NO: 357809 - DNA, 602 bp, Homo sapiens
gttaggtcatgagggaccctcttcttgttaatgagattaaggccattatgaacgagtcttcctgcagagttcagcttttttcctgtctaccttacaccatgtaaggacatagcattccttcctcttgaggatggaacaacaaaatgctactttagaagtagacagcagcctttttcagataactgaacctgctagttccttgatcttacacctttcagcctccagaactgagaaaaataaatttatgttctttataaattacccagtctctagtaattttttgtagcagcacagatgaactaagacaactagtgccccataggctcatttaatttaggggttaaagtgaacttccttattgcaccaatggggaaattggagcctatgataagttatttatttataatccggtaaatagctagaggaagcacacctaggtctcctgattctctgtctaggctaatttaaaataatatcaaaataaagctttcrcacagcaaagcaaacaattaacagagtgaaaagacaacctgcagaatgagaaaaatatgtgcaaactgtgcattcaacaaggaaccaatagccagaatatgcaaggaact

SEQ ID NO: 357810 - DNA, 508 bp, Homo sapiens
ccttacacattgtatgcatatatcaaaatatcgtatgtgccccataaatatgtacaattattatgtatcaataaaaaataatagtaatgtttataaaattttacttctagaaagttaaaatcaaacctcttaaaatactataaatgcttttattaggtaagctaacacttctccattatgtatttgtaactcttatcctaggataattacattggaattttgtcattgagcaccagaaaatagctaaggatatgctcaaaacaggtatagaaagaaaacagatatagaaatatggctagactctcagcattaattactaacatgttaaccgagatgctatagcaatttttaggtatctttgtgccatttgacttatacaatgagcatgggatactcttttttaaaaaaaaaaaacagttttataawttttttcaatgcaatagtagcttacatttgtttaaaatcttttaacagctgatctcaatgtacttttctgattttaaaggat

SEQ ID NO: 357811 - DNA, 616 bp, Homo sapiens
ctctaacaaaacaaatggctctcttctgatgtctgttctgttgaccttgtgtctctgtgctaaaaatcttttttccaacttgctctttctgtaagaatgaaatgtttctgattgaatatatcataccccagaaatttggggcctttttgagtttaaagtgtttacaaaaatagccttttcccctggatttgattatctcattgacagcagccaatatcctcatgcatagaaatgtatttacttataggaacataagtaattcatttataaaattgaattatctcactaggaagattgcttgctttgattgtgtagctgtccttatgaaactgacttacaattgataaaagccagatggaaagggaaaacagtccatttcattactctttaaatgtttaagtttattaacccttgcacttcaaattttttaaagttagtggtagtggggaagcaatttgtcgttgagttttaatatgcaaaatagacagtaagtgcttgtgacattctataccagggaaaagagtttgggctttamaggagcttcatggaaaatatttacagctcatctttaactcctgcgtattgttactttttttctcattcatattttttcatc

SEQ ID NO: 357812 - DNA, 389 bp, Homo sapiens
aacttcctatattaacacatattcygtgtgttattggtttgagtgcaacacataaacatacttcttaataagacatttgccatgttcttaaataataatttaaatgccaggtaatatcctaaacacttttattaattataacttaatcttcacagcaacattctgatgtacgtactgtttattttcaatactctcattcttcagctgaaggaagctgaagactggagagtttacacaactttttcatggtcacaaaactgggaagcagtggaaccaggatttgaatccagaaaaattatgcttcagagtctttactctgaacaattaccatatattggctctttgtttcttaagaaactagtcaagtgtgatgttatggtaagcaccat

SEQ ID NO: 357813 - DNA, 569 bp, Homo sapiens
tatacttgagttcaccaaagcttatgcctgatgtgagataggaaggtaaattttctccacatccaagaaagcatataccctccaagtccaaagggcaatagaaactgatacaaacttgaatactagctgaagagttgaggaaattagctggaaaggcagtgatattataatctatagacctatgatatagacttagattattacaaacaggttgtttgagcctgagtctcctttgttyccatagggtgacagggacttgattaaaaagagcttttttttttttcctatgagtcaaattgtatatattgtgtacatgagtcaaatttccatgtattgatgcccagaaaagaggggacacatagatgcaaattgtttctgggaggggtttccaaaacatttatagtacaagtagctaatgcttattatatgacaggcatttttgtaactgctttacatatctcatttagtagtcactaaaaccctatgaggtcattaccattaaaatcatccccatttacagatgagaaaactaaagtagagatgtatataacttgtcaaggtaccgtaaa

SEQ ID NO: 357814 - DNA, 569 bp, Homo sapiens
tatacttgagttcaccaaagcttatgcctgatgtgagataggaaggtaaattttctccacatccaagaaagcatataccctccaagtccaaagggcaatagaaactgatacaaacttgaatactagctgaagagttgaggaaattagctggaaaggcagtgatattataatctatagacctatgatatagacttagattattacaaacaggttgtttgagcctgagtctcctttgtttccatagggtgacagggacttgattaaaaagagcttttttttttttcctatgagtcaaattgtatatattgtgtacatgagtcaaatttccatgtattgatgcccagaaaagaggggacacatagatgcaaattgtttctgggaggggtttccaaaacatttatartacaagtagctaatgcttattatatgacaggcatttttgtaactgctttacatatctcatttagtagtcactaaaaccctatgaggtcattaccattaaaatcatccccatttacagatgagaaaactaaagtagagatgtatataacttgtcaaggtaccgtaaa

SEQ ID NO: 357815 - DNA, 543 bp, Homo sapiens
agtataatttgatgttgagtagcatgatgcattcagctttgttctttttgcttaggattgtcttggctatttgggtgcttttttgggtttcatattaattttaaaataaattttttagttctgcaaagaatgtcagtgatagtttaatgggaaaacttacttgggcagtaaggacattttaacaattttgaatatttttatctatgagcatagaatgtttttctatttgtttgtgtcatctctgatttctttgagaaggggtttgtagttctccttgtaaagaaagrtcttttacttctcttgtaatctgtattcttattttattattttttgtggcaattgtgaatgggagtccattggtgatatggttcttagcttgattgttgttggtgtataaaaatgctagtaattttttgacattgatttttttatcctgagacttgctgaagttgctcctaagcttaagaagcttctgagctgagacaatggggttttctagatataggattgtctcatctgcaaacaggaatagtgtgacttcct

SEQ ID NO: 357816 - DNA, 563 bp, Homo sapiens
gaactctaaaattcaaagttatgacaagaaaacaaatttttaaaatatttcaggtattattgcaataagtttattattttattrttttttaaaaatttgtagtcacatagtaggtgtatatatttatggggtacatgagatgtattgatacagacatgcagtatgaaataagcacatcatggagaatggagtattcatcccctcaagcatttaacttttgagttacaaacaacccaataatgttctttaagtgatttaaaaatatacaattaagttattgttgactatattcaccctattgtgctatcatgtagttggtcttattcattgtttctattttttttttgtacacattaccaatccctaccttccacccaacccctcattacccttatcgccctttggtatccatccttctactttctatttccatgagtttaattgttttgatttttagattccacaaataagggagaacatatgaagtttgtctttctgtgcctaacttatttcacttaacttaatgacctccagttccattcatattgctgcaaatgactgga

SEQ ID NO: 357817 - DNA, 594 bp, Homo sapiens
aggctgtatccttacctggtttttcttaatttgctgtctgagtgctttctggaagaacatgagtttgcatttgcctgcaagttctggtagaagcaggaatgctgtgcagaaatttttagtgcatgtggcccatttgactataaggggctgaggtggatgaagttgcctgatcttccatcaagatgtctggggggaaacaggaagctgcacctctcagcaaatttaggcagatgtatgtctgctgtgctggaagctccagaaggtgtggcttgcttatctccaagacacagaggtgggtagtcccccaccatggcatctgagtayttcttagggaaacagaaggctttgccctctggctaagttcaaacagaagaaggagcgttgggctggaagcactagcaagcattgcccacctggctaccagtggtcagggtttatgggttcactggccctgccatcggggtgcttcctgggacaacagaaggctatattctccagctgagttcaggcagaagagggatccctgaggtggaagtctaacaggcattgcctgcctagctacaagcagcaggggtgggccggtcacccatcctg

SEQ ID NO: 357818 - DNA, 628 bp, Homo sapiens
ctttaaaaaacctccctccagaatctttatgaaagacctccctccagagtatttataaagactatttaataaaagagggctgagtttaagtgacctgatttatttgctctagatacaattcaggtcccaaatgaaaggttaaatctttttgaaaaatcagattaaatagacagaaggtatttctcaaatctgtattcrtttcccactgctcctgtaacaaattgccccaaattttatggcttaagaaaatgcacaaatttattatatcacaattttggagactatatttctaaaatgtgtccacgctgctgcattacttttgaaagcttttgtctagaatctttttttctttttccagcttctagaggtcacgtactttacttggcatatggccccttcatcttcaaaagccagaagcacagcaacctttttactgtcttcctcattttcttttgagcacgcatcatcagcatctttaacaactgtactactaccaacagtctgtttatgactatgtatgcattctcttcttttctactatgttcttcctttccgtctgaaaccttgacagcagtctttaacatttatacgtatactcacactgcattaaaaaaaattaggcttttgc

SEQ ID NO: 357819 - DNA, 556 bp, Homo sapiens
gccccctctccttcaaatgacaacatcacctctccagcaagggttcagaatggggctgaggctgggatggctgaaatcaaaatgtggataaaaacgagcttcactgagctaaaggatcacatacttactcaatgaaaagaaactaaaaatcacaataaaacattgcaggaactgacagacaaaatagccaggatagagaagaacataaactgatctgacagagctgaaaaacacaatacaagaatttcataatgcaaccacaagtattggtagtgggatggaccagggggaggaaataatctcagatctggaagactgtgtttctgaaataagacaggcagacaatgaacaaaacctctgagaaacatggaattatgtaaagagaccaaatctatgactgattagtgtacctgtaacatctggggaawatttaaccaattttgaatgcatatttcaggatatcatgcctgagaacctcctccaccttgctagacaggccaacattcaaattaaggaaatgcagtgaaccccattaagatactccacaagatcatcc

SEQ ID NO: 357820 - DNA, 492 bp, Homo sapiens
acatatccacagaactctccaccaaaaaccaacagaatatatatattattctcattgccacatagtgcttactgtaaaatagattacataattagatgtaaaacactcctcaacaaatagagaagaactgaaatcacaacaagcagtctcctggatcacagcacaattaaattaraactcaagactaagaaattcactccaaaccatacaattacatggaaattgaataacctgctccagaatgacttttggataaataatgaatttaaggcataagccaagaagttcttagaacctaataagaatatagaacatacaagaatctctgggatacagctaaaacagtgttaacatagaagtttatagcactaaatgcctgcccacatcaaaaagctagaaagatctcaagtttacaaccaaagatctcaactaaaagaactagagaaccaagagcaaacaaatcccaaagcaagcagtagaaaataaataacc

SEQ ID NO: 357821 - DNA, 531 bp, Homo sapiens
cctgtcttgctttaagtggaggtgatttttcctggggaataatttaatttcctctcctttattttatgtgactccattgtgtgtttttaggtttgatttaccatgaagcttgaaaataatatattatgttccattattttaaaacaatgacaacttcacactgactgtataaacaatctaaacaaaaacaaaactaataagtttctatactgtaactttgtctttctgctcttaattttttgttgcttccagtaatgtcttattgtattgtctatgyattgaaaatgtttttattaatagttttgattgggtcatcattttgtctttctacttaagatatgagtagtttacccaccaaacttacagtattataatatgttgtgtttttctgtgtacttattattatcagtgtgttttgtactttcaaatgatttactattgctcattaacatccttttgtttctgatttaagaagtccttttagtatttcttggaggactggtcttgttttgatgaaatttctcagctttt

SEQ ID NO: 357822 - DNA, 381 bp, Homo sapiens
tgctgttaagagactctgttgcattcttcagtatatcaattgcatttttcaactgcaggatttctgcttaattattttcaactgtttctatttcattttaaaatttatctcataaaattatgaattagttctctgtgtcttttaggattaataaactgcagctattctactgttacgtatacaccccccaccaaaaggaaacatrtgctcacaaaaacatgcacataaatgtttatagcagctttattcataatggccaaaaagttaaaagaacccaaatgtccatgaattaataaatgaataaacaaaatgtagtatagccataaaatagcatattactcataagctatttgagtttatttgagtttttttcaatacagc

SEQ ID NO: 357823 - DNA, 463 bp, Homo sapiens
  misc_feature (1)...(463): n = A,T,C or G
ttgtgtctttatctttggagcagcaagttacacaagccccaggcacattcagagctattgtctggggccagggcctggagtcagtaaccttagaaatctaactggtgttctattctactgcagctaagatggcatcaaaaccacaagacaaattcttcccactcttttctcccctttctccaggcagaggagtctctccccatgctcactaccaccacaggccatggggwgtagtgccagggtaccactgatgtttacttaaggcccaagggctntttattcagctngttgtgaatgctgccaagccttcagagaagtgagccgctctctgccccagggtaagttcaaaaaaggcatccaagagccaaggcctggaattggggaccctaagagcaatctttgggctcttccttactataactgagttggtacctaaagtgcnnnnnnnnnnnnnnnnnnnnnn

SEQ ID NO: 357824 - DNA, 620 bp, Homo sapiens
gtatcttccaaattaaaaaaatgctataaagcaaatggaactaataaaaaacaaaacaaaacaaatattcatctgggctttaaatgttttggctgaaaaaatgtaggaagatgctttttgaaaattttattttttcttactcaaagcaatgggtctggacttcatcaaatggacaattctttctgtgttgctgaaatatagttttatttgtggtggctagagtactattttaaaagctcattctttgtacaaatctttcagatataatgactttaaaaagcagagaaaccaacaccagtgaagtaagtatattaatattttaggtgggggttgaagatagggaattggcacagtgattgaattctgggaaagtatatataaattttttttttttaccaatcagactgaatgttattgtttgtaggaatcacaggaagaacaataaaagcagtgcagagtataccacacttaccttgtctttttaccacactggaacatgacctgtgagataaagcaaagacytttgtagtgttccccttgatcctaagatctctttgcttcctaatgctcttcttcttgactagtaatgtaaacatacctagtttcatgggtagagaaat

SEQ ID NO: 357825 - DNA, 527 bp, Homo sapiens
attacaaattatttttatttaattgatatgggactattaaaatgatctattttatgttgagtgaactgtggtagattttaggcttagagaaaattgatgattttatctcagttgtcaaatttacagtctaaagttgttcatttcttatcctcatgatgtttagagggtctgtagtggtgtattatatttcattccttatattattaatttttgctatttctttttgtcagtcttgctagatgtttctaactttcttttaatttttgtggctacatagtagttatatatatttatagggtatatgatatgatacaagcatgcaatgcataatagtgacatcagggtaaacgagatatccatcaactaaaggatttatctttctttatgttacaaacaatscaactatactctcagttactttaatatgtgcagtaaattatcgttgactgtagtcaccctgttgtgctagccaatactggatcttatacaatctatctaactataattttgtgctcattaaccattct

SEQ ID NO: 357826 - DNA, 598 bp, Homo sapiens
ttctaagaaaattaacccagaaacagaaaaataaatgttatcacatttaagtgagagctaagcattgagtacacatgaatgtaaacatgctaacaaaagacactggagactactggagaagggagggtgtagggggcagggggcaagagttgaaaaactacctattggctaatatgctcactacctgggtgatgggttgaattatactcgaaacctcagcatcacacaataaactcttgtaactaatctgtgcatgtacctcctagatttaaaatagaagttataatttaaaattattattaataataatattgtgtcattattggttaattaattatgactaatgtatcactaatgcaagattttggcaataggaaaaactgtgtacacggaggggtacatatgagaattttttgtactctttgtcaattgtgttgtatatctaaaagtgttctaaaatataaagacttttaattaaaattaaagcacaccaaaaacaggcaaacaatatgaatagaagtttctccaaagaaggcatatmgttgggcaataagcacactaaaatatttgcaaaatcattagctattaggagaatgtt

SEQ ID NO: 357827 - DNA, 598 bp, Homo sapiens
ttctaagaaaattaacccagaaacagaaaaataaatgttatcacatttaagtgagagctaagcattgagtacacatgaatgtaaacatgctaacaaaagacactggagactactggagaagggagggtgtagggggcagggggcaagagttgaaaaactacctattggctaatatgctcactacctgggtgatgggttgaattatactcgaaacctcagcatcacacaataaactcttgtaactaatctgtgcatgtacctcctagatttaaaatagaagttataatttaaaattattattaataataatattgtgtcattattggttaattaattatgactaatgtatcactaatgcaagattttggcaataggaaaaactgtgtacacggaggggtacatatgagaattttttgtactctttgtcaattgtgttgtatatctaaaagtgttctaaaatataaagacttttaattaaaattaaagcacaccaaaaacaggcaaacaatatgaatagaagtttctccaaagaaggcatatagttgggcaataagcacaytaaaatatttgcaaaatcattagctattaggagaatgtt

SEQ ID NO: 357828 - DNA, 483 bp, Homo sapiens
ggtaataacaaatgttggcaaggatgtggaagaattataacctttataatggctactgtgagtataaaatggtgcatccacatagcaaaatattttctcagtttctcaaaaaastaaatatagattcaccatataacctagcaattctactcaggtttgggtcataatcccaaaaaacactatctcaaacaccataatcacaaatgttgaaattactaaagattaaaatccttaaagtctaaaattacaaaaattacaattccaaaaggtcaaaatgctaaaaatatattttgaacaaaagtatttaaaagacatttattcacatttttaatatgagattcatttgagaaacatattaaaaacatggccaaacacttcataagccactttataaagtgggcaaaaataatatacatatttttgcaaatataaacacttaggtatgctaatgataactacataacagttgtgagcagataaatc

SEQ ID NO: 357829 - DNA, 626 bp, Homo sapiens
agaacatttaaaaaaaagatccaaacaaagaaaggaactaaaaactccaggatgtaataagcaattctacatagtaaggttattagatatagagtttatgtataaaattcaacttcttttttttactccagcaatgaataattaaaagttgaaattatgtacacggataaagctggaaaccatcattctcagcaaactaacacagaaatagaaaaccaaacactgcatgttctcactcttaagtgggagatgaacaataagaacacatggacacggggagtggaaggaacatcacaaacctgagcctgtcagggggtgggggacaaggagagagagagcattaggacaaatacttaatgcatgccgggcttaaaacctagatgatgggttgatgggtgcagcaaactacgatggcacatgtatacctatgtaacaaacctgcaagttctgcacttgtattctagagcttaaagtaaagaaaaaacaaaacaaaacaaacaaacaaaaaacctaaccctcaagggaaaaaaaccccacaaaatcatttacactggcaaaaaataaaatacttagattaaaaactaacamattaagcccattatccacttttggaaaacaacaaaact

SEQ ID NO: 357830 - DNA, 634 bp, Homo sapiens
ttatattgcttttctcattactaatcttktataattttgtattctctctcttttaaaaattatttagtggcttatctattttaattactttaatcatagtaatagctttttgttttaatcattcttctgtttttgaaatctcatttttgcctcattctcatgctaagagaaaagagagtgaataaaagcatttgtatgtatatatacaaatgattactatacagaaatgaaaattaatgaactgtatcctgggccactaaatgtagctcacagcattaatttatcttcaaaaagaaatcttaatttattaaatgtaacattaaacttatttttttcatttttaatttgtgtgggaacatagatgtatatatttattgggtacatgagatattttgatacaataatgtaatgcacaaaaatcaggtcagggaaaatggagtaaccatcacctcaagcatttatcttttctgttataagcaacccaaatacactcttttaattatttttaaatgtgtaattaaatgatcattgactatgatcatactgttgtgctatcaaataatagttcttatttattgcttctaaatactttttgcagccattaagcatccttactcctcctcctcactgcctc

SEQ ID NO: 357831 - DNA, 634 bp, Homo sapiens
ttatattgcttttctcattactaatcttgtataattttgtattctctctcttttaaaaattatttagtggcttatctattttaattactttaatcatagtaatagctttttgttttaatcattcttctgtttttgaaatctcatttttgcctcattctcatgctaagagaaaagagagtgaataaaagcatttgtatgtatatatacaaatgattactatacagaaatgaaaattaatgaactgtatcctgggccactaaatgtagctcacagcattaatttatcttcaaaaagaaatcttaatttattaaatrtaacattaaacttatttttttcatttttaatttgtgtgggaacatagatgtatatatttattgggtacatgagatattttgatacaataatgtaatgcacaaaaatcaggtcagggaaaatggagtaaccatcacctcaagcatttatcttttctgttataagcaacccaaatacactcttttaattatttttaaatgtgtaattaaatgatcattgactatgatcatactgttgtgctatcaaataatagttcttatttattgcttctaaatactttttgcagccattaagcatccttactcctcctcctcactgcctc

SEQ ID NO: 357832 - DNA, 541 bp, Homo sapiens
gatattttgatacaataatgtaatgcacaaaaatcaggtcagggaaaatggagtaaccatcacctcaagcatttatcttttctgttataagcaacccaaatacactcttttaattatttttaaatgtgtaattaamtgatcattgactatgatcatactgttgtgctatcaaataatagttcttatttattgcttctaaatactttttgcagccattaagcatccttactcctcctcctcactgcctctagtaaaagttattctactttctgtctagatgagttcaattgttttaatttttgcctcccaccaataagtgagaacatgcaaagtttgtctttctgtgcctggcttattttacttaatgtaatgatctccaatttagtcaatgttgctctaaattactacatgacattctcttttatggataaatagtactccatggtgtagatgcaccatattttctttatacattcatctgttgatggacactcaggttgctagcaaatatttgctattgtgaatagtgctacaataaaca

SEQ ID NO: 357833 - DNA, 571 bp, Homo sapiens
ttgtgtgtctttttcaattatttaattaatgttttatggtttgcattctagaaatctcttacttttgtggttaattcccatgtgttttattttatttgtagctattgtaaatgggattaatttcttaatttttttcagattgttcactgttggcatataaaaattctgctaatttttatgttgattttgtatctttcacgttttctgaatttgtttatccatttgaattgttttttgatggagtcttcagatttttccaaatataaggttttaccatctgcttttcttggataygattcagaagaattctctggattatcagtcgaagactcttgttctcttcccttgctttttttggaatctctctctgtctctctctctctctctctctctctctctcattctgtgtgtgtgtgtgtgtgtgtgtgtgtgtgtgtgcgctgagccgcctggaagtggtagtgaggtgatacaagcagccctgtgaccaccaccattgagactgtccttattcagacttgaaggtagcacatcactgggtcttccccaagactcacagtaaccactacct

SEQ ID NO: 357834 - DNA, 571 bp, Homo sapiens
ttgtgtgtctttttcaattatttaattaatgttttatggtttgcattctagaaatctcttacttttgtggttaattcccatgtgttttattttatttgtagctattgtaaatgggattaatttcttaatttttttcagattgttcactgttggcatataaaaattctgctaatttttatgttgattttgtatctttcacgttttctgaatttgtttatccatttgaattgttttttgatggagtcttcagatttttccaaatataaggttttaccatctgcttttcttggatatgattcagaagaattctctggattatcagtcgaagactcttgttctcttcccttgctttttttggaatctctctctgtctctctctctctctctctctctctctctcattctgtgtgtgtgtgtgtgtgtgtgtgtgtgtgtgygcgctgagccgcctggaagtggtagtgaggtgatacaagcagccctgtgaccaccaccattgagactgtccttattcagacttgaaggtagcacatcactgggtcttccccaagactcacagtaaccactacct

SEQ ID NO: 357835 - DNA, 571 bp, Homo sapiens
ttgtgtgtctttttcaattatttaattaatgttttatggtttgcattctagaaatctcttacttttgtggttaattcccatgtgttttattttatttgtagctattgtaaatgggattaatttcttaatttttttcagattgttcactgttggcatataaaaattctgctaatttttatgttgattttgtatctttcacgttttctgaatttgtttatccatttgaattgttttttgatggagtcttcagatttttccaaatataaggttttaccatctgcttttcttggatatgattcagaagaattctctggattatcagtcgaagactcttgttctcttcccttgctttttttggaatctctctctgtctctctctctctctctctctctctctctcattctgtgtgtgtgtgtgtgtgtgtgtgtgtgtgtgtrcgctgagccgcctggaagtggtagtgaggtgatacaagcagccctgtgaccaccaccattgagactgtccttattcagacttgaaggtagcacatcactgggtcttccccaagactcacagtaaccactacct

SEQ ID NO: 357836 - DNA, 552 bp, Homo sapiens
ccccttgggtattgtaatcccagttgggatcaacctggggaactgcagtggctcctacaggtagccacwaggatcagtcaggatcagtcatatgcattacattttcaaattgttggacagcctctgtaatatagtcacattctcccttagacagggttttccctagtattactgagagacccctcaaagtgagttcaaatgttaggcccagtttataaaacccttcagtgtatttgtcagggtcctccataaacttccctagtttcattttaatttggttcaggtcttgcatagtaaatggaatatggactatagtggatccactaaggccactaacctctcaaaaggggcatagcttaagggagtggtgttcagaggatggccctgggtagggaggggaaggctccgggactgacagacttagatataatggggtagaaggggcagtgaagtttaatctaagctccgcccttggttccttcagggttgagccctgggtaaacccaatcatgaggtcttctgaaccaaatatagggggctgccacagctatt

SEQ ID NO: 357837 - DNA, 552 bp, Homo sapiens
ccccttgggtattgtaatcccagttgggatcaacctggggaactgcagtggctcctacaggtagccacaaggatcagtcaggatcagtcatatgcattacattttcaaattgttggacagcctctgtaatatagtcacattctcccttagacagggttttccctagtattactgagagayccctcaaagtgagttcaaatgttaggcccagtttataaaacccttcagtgtatttgtcagggtcctccataaacttccctagtttcattttaatttggttcaggtcttgcatagtaaatggaatatggactatagtggatccactaaggccactaacctctcaaaaggggcatagcttaagggagtggtgttcagaggatggccctgggtagggaggggaaggctccgggactgacagacttagatataatggggtagaaggggcagtgaagtttaatctaagctccgcccttggttccttcagggttgagccctgggtaaacccaatcatgaggtcttctgaaccaaatatagggggctgccacagctatt

SEQ ID NO: 357838 - DNA, 642 bp, Homo sapiens
tgcatgttctgcacatgtatcccagaaattaaagttatatacatatattccaacagaatgagaagatacatttttctcaagctcacatggaacatttcttaggataaagcacattctgtgctacaaaacacgttaacatttttaaaagaatagaaataaaacaaggtatkttctcagactactgtgaaattaatgtagaaatcaatagcagaaaaatagctttaaaattctccaagtaggtggagatttgtatgcatatccaaataatacatgaaacaaaaaagtataaataaaatttaaatttatttcaaagtaagttagaatgaaattacaacttatcaaattggtagggtgcaataaaatctgtgcttagaaggacacttacagcattgaatgtatatattagaaaagaacaaagatctaaaatcagtaacctaagtttccgtttaataaaagtagagaaaaaagagttatttacatctaaagcaattaccaaaagtttaagaattagaacagaaagtaataaaactgaaaacagaaaatcgagaaaaatcaacaaaattaaaatctgttactttgaaaatattaataaaactgataaacatctatccaagataatcatgataaaaaaggagtaagatt

SEQ ID NO: 357839 - DNA, 494 bp, Homo sapiens
ataaaaagcattctagaaaagcccgggccctaataacttcattgctgaatgttaccaaacattaaaagaggaactaataataattctacagaaagtattccaagaataaaggatgggatatttccaaagtaattgtatgaggccagtattgccttgataccaaagccagacaaagatacatcacaaatagaaaactacaagtcaataccttttatcagtattagtgcaattaccctcaacmaaatactagaaaacctaattcaacaatacattagaaacatcatttatcatgagcaagagggatttattcctgggatgcaaagattgttgaacatatacaaataaattaacatgataccccatatcaacagaattaaagacaaaaccatatgatcatttgaattgatgctgaaaaaatatttgataaattcaacaccgcttcatttaaaaaaaccctcaaaaaactggtggttttagaaggaatatacctcaac

SEQ ID NO: 357840 - DNA, 389 bp, Homo sapiens
cacaggggaccaagtcctgaggctgcacagatcagaagcagggccctgggcccagccctcagaaccatttttaactcttaggtctctgggcctgtgatgggaggggytgcctggaagatcgctggcatgccttgcatacattttccccattgtcctggctattaacatttggcttctcattacttattcaaattcctgcagcagacttgaattcctctccagaaaatgctttattttttttctaccacatcatcggggtgcaaatttttcaaacttttatgctctgcttcccttttgaacataagttccaatttcagatcatctctctcaagttcatagtttcacagaactttaaactttctagagcaaaggcaaaatgctgccagtct

SEQ ID NO: 357841 - DNA, 544 bp, Homo sapiens
aaatggaaaaattaagcaccactctatgttcttctgtttttatagtcttcataatcctttagatgtcatgcttaccttccataactatggactttgatttcctgttatcaagatgttttaatgcaatgttattgtattagtaaaataatatgacaacataattttaattaaaatgttaatggttaatgactgtgggagttaattctttcaggaatactcaaaatttaatgaagagctctggaaggccacaaaagttttaagagtaattgaaagctataacaacaatcaattttgttcttcaagaatgttccaccaacttgtatttttaatcaagttctattgaaggccttgtcaaaatccaaaattttataaaawtttttttcatgaaaaagaccctttttggggtaattataggttgaatagttgaccaaaatcctttttgtatttgcttcaaaagcttttgtagccaactaatattaacttacaatattcatgaaaaacagtgactgagcagttgtattaatcagggttctctagagggaca

SEQ ID NO: 357842 - DNA, 506 bp, Homo sapiens
aaaaatggaaaaattaagcaccactctatgttcttctgtttttatagtcttcataatcctttagatgtcatgcttaccttccataactatggactttgatttcctgttatcaagatgttttaatgcaatgttattgtattagtaaaataatatgacaacataattttaattaaaatgttaatggttaatgactgtgggagttaattctttcaggaatactcaaaatttaatgaagagctctggaaggccacaaaagttttaagagtaattgaaagctataacaacaatcaattttgttcttcaagaatgttccaccaacttgtatttttaatcaagttctattgaaggccttgtcaaaatccaaaattttataaaattttttttcatgaaaaagaccctttttggggtaattatargttgaatagttgaccaaaatcctttttgtatttgcttcaaaagcttttgtagccaactaatattaacttacaatattcatgaaaaacagt

SEQ ID NO: 357843 - DNA, 487 bp, Homo sapiens
aggaagaagatagatgttgggctgaagggggaggaacctgggatgcctgcatggggctatgacatatcaacactcatgcttgcccccagtgactccaggggaaaatgtgagttgagcaggcaagaatcaacccactcttgccatagccctttggaattccgacagtaggagaacccttgatgcccacagacacgtgagctggcagggaaagctgttcagagaggtaataggggaagaactctagccaatgtggaatctagagagtttgttgtgaaagcatctacagtggaacatasccagtgatggccatttcaccttgctcccctaagaaactttagcctatggagaactgtcagacctaaagagaacagggtaatcgtgctcgtgagatggggctggttcaatgtgagtttttccctgtctgctggtttttcccagggctacaacctggtcatgcctgcttgcagtccagcctaggatgcccagc

SEQ ID NO: 357844 - DNA, 609 bp, Homo sapiens
ttcaggtatcttttcagcagcaccccactctactggtaccagtttactgtattagttttcacgctgcagataaagacatagctgagactgggaagaaaaagaggtttaatggacttacagtttcacatggctggggagtcctcacaatcatggcagaaggcaagaagaagcaagtcacttcttacatagatggtggtaggcaaaaagagattgtgcagggaaactcccattttttaaaccctcagatatcatgagacttattcactatcacaaagacagcatgggaaagacccaccctcatgattcaattatctctcacctagttcctaccataacatctggaaattatgggaactayaagatgagatttgtgtggggacacagagccaaaccatatcaatgtggcatcaagtatacaagagtaaactgtcaaaacctcatcagaaagggaagttccatagcttagatgatgaggattaatttatacatttgaccactgaatggtccctcactcaggaatggaggaaacaaataaagatactgttagccgatcatggaggtatgtttgacaccacagatgcctggatctagagaagcacaagagacagc

SEQ ID NO: 357845 - DNA, 609 bp, Homo sapiens
ttcaggtatcttttcagcagcaccccactctactggtaccagtttactgtattagttttcacgctgcagataaagacatagctgagactgggaagaaaaagaggtttaatggacttacagtttcacatggctggggagtcctcacaatcatggcagaaggcaagaagaagcaagtcacttcttacatagatggtggtaggcaaaaagagattgtgcagggaaactcccattttttaaaccctcagatatcatgagacttattcactatcacaaagacagcatgggaaagacccaccctcatgattcaattatctctcacctagttcctaccataacatctggaaattatgggaactacaagatgagatttgtgtggggacacagagccaaaccatatcaatgtggcatcaagtatacaagagtaaactgtcaaaacctcatcagaaagggaagttccatagcttagatgatgaggattaatttatacatttgaccacygaatggtccctcactcaggaatggaggaaacaaataaagatactgttagccgatcatggaggtatgtttgacaccacagatgcctggatctagagaagcacaagagacagc

SEQ ID NO: 357846 - DNA, 458 bp, Homo sapiens
tcccattttacctgttaaagaaagcaatggaaaatacaggctagtccaggacctgcaaattataaatgaggcagttttccaatawaccaaatggtctctaactcaaaagtaattctaggagaagtatctctagatgctcagtggttttcagttttagacatcaaagatgctttcttttgtatccccctagactcatcctcccaacttctatttccatttgagtgggagaattaaaaaggaaggattcaacagctcacctgaacagtgcttccacatgattccagtaaaagtccccatttgtttgggtaaggcttggctatagagtcaccaactcttgagaagggaggatgtctcctacagtacatggatgacgtgttaatctgctccccaacaagagagctggaatccaatctgtagtccagacactcagtttcctcacagacagagggtacaagtta

SEQ ID NO: 357847 - DNA, 590 bp, Homo sapiens
aaatgttgagattaaagcacagaaaaaataattagggtgtgaattgcctgaaaggcagaagggtatccaacttagagcccagatgggcagatttaccctagattggaagaggaacagctcctctgtacagcagtagggaaagaggagctgatgggtgtcactgaatttaggtctgttattctggtgggaggcaggttctttctactgtcttgcatcytctctgtgaagtgagttatgtggtgagagtggagtggaggagaggcactgaaagtttccggaagcagtgaaaacacaagctgaccagagaagccattgttgtcattgctgttgttttgataattttataagttagagatttgagctaggagtctattttccatagaacatgttctcctaaaaaaattggctagtttttcatgaaactcacaaaaatcttcttaattcttaatgaagtagtagtaatataatattaatgatactattttagccttaatgactcaaaggaggtgtttaataagtgcttttattaaaaaagaaaaaacattcaacctttagtgtgtaattctacgggtgaacgtcaggaaaactaa

SEQ ID NO: 357848 - DNA, 622 bp, Homo sapiens
ggcagatatgtcctgaaggtcttgtgtaaacaaaacacaagtgaaataatattcaattcaaaatgagacaatagttacagtgaaatagagaaatacaaagttggtttttttacttattattatttactgacatcaagttggtttcattaatatttacttartatctatcagaaacaaatattattttaagtaaacagtttctcttaagttttaggcaaattgctctatgatttcactaactgaataccatccatctttaagatgctaaaactatgttacttctatccatacaactttcagtattaaatatcctttattgaaaataataagcaaaaatctttaatacatgcacaaacactgacttgttacagtttcttttactcagtttatccatttcttctgggcagattcttttggtttcttgacaatactgtgcactggtgaatctaactctgctggaagtgcttaagtggtttcaaatatgttgggaccagacacataacttaattgccatcctaatttccaaggatcttgctttcaaggatacctgggatttttgctcacttctgtggaatgtgccctcacaatgacctgtgataaatagtgcacgatttttaaaaaa

SEQ ID NO: 357849 - DNA, 622 bp, Homo sapiens
ggcagatatgtcctgaaggtcttgtgtaaacaaaacacaagtgaaataatattcaattcaaaatgagacaatagttacagtgaaatagagaaatacaaagttggtttttttacttattattatttactgacatcaagttggtttcattaatatttacttaatatctatcagaaacaaatattattttaagtaaacagtttctcttaagttttaggcaaattgctctatgatttcactaactgaataccatccatctttaagatgctaaaactatgttacttctatccatacaactttcagtattaaatatcctttattgaaaataataagcaaaaatctttaatacatgcacaaacactgacttgttacagtttcttttactcagtttatccatttcttctgggcagattcttttggtttcttgacaatactgtgcactggtgaatctaactctgctggaagtgcttaagtggtttcaaatatgttgggaccagacacataacttaattgccatcctaatttccaaggatcttgctttcaaggatacctgggatttttgctcacttctgtggaatgtgccctyacaatgacctgtgataaatagtgcacgatttttaaaaaa

SEQ ID NO: 357850 - DNA, 604 bp, Homo sapiens
ccatatttttgtcttttctacacaaattcacagggaggagtgtttgctttctcttcctcccttcaggtgtgggcttcaatgttttggggctgtctctggagaagcctgggaagttaaaatgccttaaaagcaagatgtccaaaagccataggggatacatattatcaactgcaggwtgaaaaatgcttttgcaaacctgcagcagttaaggatacaaaatgatctaggacttcgaaataatacagctaaatcaacaagcaaatgttattcttagtgtctggcaattacagtaaggcttttttttcattgtttaaccacattgtttaatcaattttcattgtttaattgcattgtttaatcacattgatacatatatatatatatatatatatatatatatatatatataaaatgttctttgctttaatactggtgttgattaaagtgggaaaatgtctatagaatgaagatgtcacctgaaaccagtcctctttataaagttagatatctcacagaaatcttccaatcaatatggctggcaatgagacccataatccaaactctgtgatcacacagcacaccctcgtctgaaaatattttatga

SEQ ID NO: 357851 - DNA, 644 bp, Homo sapiens
ctcatgcccatctcctagaagtctcacacacaaatatcccttctgcggaaatgcctgctcttgcagtttaggtggctgccttaagtttttatttagtcccttgcccccctttctaaattttggactaactacacctgtcagtcaaatctccagctcttataaatgggaatatacagagatgggtaattgaaaccacggggtaattctcaaatttccatttgcccagtgtcaaatttctctcracctagcaaacagaaaagcacgatctacctgaattccctggtcacttttctgaccctactctgtccttgctcatcacataatgggggcactttacgtgattcaacgagtggccaaactcttgcagatccagcgataaccttggttgctcacaccacataactcaaccgtggaagaaatggtgccaccgctggcaggtgagacgccttcctctggtttgtaggatacgattgggcatgaattgttttaatagactgagactgccccgcgggtaattctacttgctaggagtgttgagcagccttcctgcaagccatctactccagttgggagtctgctggcacctgctcccctgcacacccccaggatgcccaggccgcaggaagatgtctaaaacttcctac

SEQ ID NO: 357852 - DNA, 579 bp, Homo sapiens
attcctcaagtgaattgactaagctggcttgtttagtacaatgttttcaatgtacctctgtaacaaacctgcacrttctgcacatgtatcccagaacttaaagtataataataataataataataatcagagcaagcctatagataggtattttattttcttctcttgacaaataagacaactaagtgacccagatgagataatgttcccaaagacacagagctggtaacaaaaatgagcaacaatttgaaccaagtgatcctaactccaaagctatacttaaacagaagctagagtttcttcaataaaaggtcatttaaacaacataagaagatgaattaagtagatgtacataaagtggaacatagtaaactatataaacctttttctattccattggcttgattctctttgaatactgcttatatggaagttggatcttcttatcactttccatatttatcactttttttataatcatgtttctattcatattcttttccaattaatttcatgagatttattcaatgttttcagtgtatttcagtgacatttattaggtttattcccattttgatt

SEQ ID NO: 357853 - DNA, 579 bp, Homo sapiens
attcctcaagtgaattgactaagctggcttgtttagtacaatgttttcaatgtacctctgtaacaaacctgcacattctgcacatgtatcccagaacttaaagtataataataataataataataatcagagcaagcctatagataggtattttattttcttctcttgacaaataagacaactaagtgacccagatgagataatgttcccaaagacacagagctggtaacaaaaatgagcaacaatttgaaccaagtgatcctaactccaaagctatacttaaacagaagctagagtttcttcaataaaaggtcatttaaacaacataagaagatgaattaagtagatgtacataaagtggaacatagtaaactatataaacctttttctattccattggcttgattctctttgaatactgcttatatggaagttggatcttcttatcactttccatatttatcactttttttataatcatgtttctattcatattcttttccaattaatttcatgagatttattcaatgttttcagtgtakttcagtgacatttattaggtttattcccattttgatt

SEQ ID NO: 357854 - DNA, 585 bp, Homo sapiens
cacggtggtttttatctgagatgtccgcatcacacatttcctcactgctcttgaggttccactgacaatcagaagaatttcaatttttacattaattttgttttgttactgctttggggaggcaactggagatgattcaacatttattaaatcaactctttgggattaatgggtgttctcttcttctgaaatacaatgttctgttctgttttcatgaggctccaattgaaaactcattcctgcccctgtcctcatttccctccctgggtctgtgaacagctttctgaagagacagagagaagtgagctagctctgggagtaggcagtggaagagcactacagtgctttccatacctagctgaaaaggacctgtagaaaatctgcagacacatttatgatcagggacttctttcccttcctaaccaaaatagaaaacmaagtctcagataaacaggccagatctccaagtcttgcgcatttctccagtcctgtctgcatttcccccatctctaccctgagccaggctcctaccagccccgcaagggaaaagggagtaaaacagcctttcaatatgcttaggaggat

SEQ ID NO: 357855 - DNA, 417 bp, Homo sapiens
ttgagttaacttgtgtatatgatgatagggagatgtccagttttattcttctgcaaatggctagtcagttatctcaggactatttccaagactacttaacaccagaatacctctgtgaagaaagaagtatgttgcgacaaataattttcatgttttttacaagagagacraaacagcaaacggatatggatatataattaattgaagaaacaacatcagtacagatgtcaatacagatgatttatttctagatataaagacaaaacattaaatatctcttgggcattgcttgtttcagacagctcttgcagcagaaataatttcttgggtttcatgagtgtacacaatattttacaaatgctgtacaccatggcatttactagttaaatctgttgatttaccaaattagctggcaaa

SEQ ID NO: 357856 - DNA, 417 bp, Homo sapiens
ttgagttaacttgtgtatatgatgatagggagatgtccagttttattcttctgcaaatggctagtcagttatctcaggactatttccaagactacttaacaccagaatacctctgtgaagaaagaagtatgttgcgacaaataattttcatgttttttacaagagagacaaaacagcraacggatatggatatataattaattgaagaaacaacatcagtacagatgtcaatacagatgatttatttctagatataaagacaaaacattaaatatctcttgggcattgcttgtttcagacagctcttgcagcagaaataatttcttgggtttcatgagtgtacacaatattttacaaatgctgtacaccatggcatttactagttaaatctgttgatttaccaaattagctggcaaa

SEQ ID NO: 357857 - DNA, 646 bp, Homo sapiens
ttgaagaaacaacatcagtacagatgtcaatacagatgatttatttctagatataaagacaaaacattaaatatctcttgggcattgcttgtttcagacagctcttgcagcagaaataatttcttgggtttcatgagtgtacacaatattttacaaatgctgtacaccatggcatttactagttaaatctgttgatttaccaaattagctggmaaagccacacctttttggtttattacacaaaatctcttgaagtttgtgtaacgtgtgatcaatatgttgacttatttgagattggagctttttcaatttctccaaatgtttcaccaacattgccatcaccccaaaaagttttctcatgcccctttgcaattaatccctttccctcatctcaggctcctcgcaatctgttttctttcactctagatttcactcaaaattccatataaatggacttacagagtatgcagtcttctatgtctgtttctttcacttggtatatataataatttttagattcatctatgtttttatgtgtacagaagtaccttcttttttattgtggagtagcatttcattttataaatatgccacactttgcttatctatttgctaattgattgacatttcgatcgtttctagtttt

SEQ ID NO: 357858 - DNA, 646 bp, Homo sapiens
ttgaagaaacaacatcagtacagatgtcaatacagatgatttatttctagatataaagacaaaacattaaatatctcttgggcattgcttgtttcagacagctcttgcagcagaaataatttcttgggtttcatgagtgtacacaatattttacaaatgctgtacaccatggcatttactagttaaatctgttgatttaccaaattagctggcaaagccayacctttttggtttattacacaaaatctcttgaagtttgtgtaacgtgtgatcaatatgttgacttatttgagattggagctttttcaatttctccaaatgtttcaccaacattgccatcaccccaaaaagttttctcatgcccctttgcaattaatccctttccctcatctcaggctcctcgcaatctgttttctttcactctagatttcactcaaaattccatataaatggacttacagagtatgcagtcttctatgtctgtttctttcacttggtatatataataatttttagattcatctatgtttttatgtgtacagaagtaccttcttttttattgtggagtagcatttcattttataaatatgccacactttgcttatctatttgctaattgattgacatttcgatcgtttctagtttt

SEQ ID NO: 357859 - DNA, 646 bp, Homo sapiens
ttgaagaaacaacatcagtacagatgtcaatacagatgatttatttctagatataaagacaaaacattaaatatctcttgggcattgcttgtttcagacagctcttgcagcagaaataatttcttgggtttcatgagtgtacacaatattttacaaatgctgtacaccatggcatttactagttaaatctgttgatttaccaaattagctggcaaagccacacctttttggtttattacacaaaatctcttgaagtttgtgtaacgtgtgatcaatatgttgacttatttgagattggagctttttcaatttctccaaatgtttcaccaacattgccatcaccccaaaaagttttctcatgcccctttgcaattaatccctttccctcatctcaggctcctcgcaatctgttttctttcactctagatttcactcaaaattccatataaatggacttacagagtatgcagtcttctatgtctgtttctttcacttggtatatataataatttttagattcatctatgtttttatgtgtacagaagtacmttcttttttattgtggagtagcatttcattttataaatatgccacactttgcttatctatttgctaattgattgacatttcgatcgtttctagtttt

SEQ ID NO: 357860 - DNA, 590 bp, Homo sapiens
ggggcagggctctcagggtctgaggccttgtgccaggttaaatatatgccagcatctggaacatttcagtacattttctcaatcagtcttagcacagatgagccaagtatttgtatcaggtaaaytctggcgtcacctttggaatatactggcttaattgctcctggtaccaaatctcgaaggaatgttgcaacaatctgaaaaagttcaataggcaatagaagtcactgtgatccaatatgcaaaacctgatgaaagacaagctgcttggttcaattctgcacaagggtgaggactgctggatctttgggtggtcctcatccattcccttgggaaacaagtcagacaaataagtggtatagaaccattctcactggctgaatatgcttcccagcaatgactagtgagtatctgagagtaaatgaaagggaaacactatttaataaattgcatctttattatgcttctactcctgggagatagctaccattaagacataattcctagcctctagtcaaagtagagggattggtttttttaaaaatcagcttttcataatgagcatctaatccccacaatccagaaaaata

SEQ ID NO: 357861 - DNA, 560 bp, Homo sapiens
gagtctgtcccttgcagacccctgacctggtgamggatgaataaagtacactgacacacagatattctcctctgccagtccagctgtgttcgagccgcttatagactccctgctgagtcctgtaaacagttgcgactggccctgatcagctagtcagactcacatttattcagtaagattaattaacaaaagcttgagtcaacaccattagagggtaattgacattgtgggcttcctgagtaaaacgcacttaagcacccacggtacatcaaaggttagtcttaagattatatgagtaaacaagttagctaggtaaactactcttcctttattgctattttaatttgtttaactaaaggtaaagggatcaggctgcctccagccagatctattaccaaagttatgcaaacttctcagccttccaacaagatttgtgtctatttctataactatctctaatatttttcccaccagcctgattgaaccccaacagacagtggctggggtcaagcaccttcaagaggtaggagagagagagcatcccaaatttagaagaagac

SEQ ID NO: 357862 - DNA, 560 bp, Homo sapiens
gagtctgtcccttgcagacccctgacctggtgacggatgaataaagtacactgacacasagatattctcctctgccagtccagctgtgttcgagccgcttatagactccctgctgagtcctgtaaacagttgcgactggccctgatcagctagtcagactcacatttattcagtaagattaattaacaaaagcttgagtcaacaccattagagggtaattgacattgtgggcttcctgagtaaaacgcacttaagcacccacggtacatcaaaggttagtcttaagattatatgagtaaacaagttagctaggtaaactactcttcctttattgctattttaatttgtttaactaaaggtaaagggatcaggctgcctccagccagatctattaccaaagttatgcaaacttctcagccttccaacaagatttgtgtctatttctataactatctctaatatttttcccaccagcctgattgaaccccaacagacagtggctggggtcaagcaccttcaagaggtaggagagagagagcatcccaaatttagaagaagac

SEQ ID NO: 357863 - DNA, 560 bp, Homo sapiens
gagtctgtcccttgcagacccctgacctggtgacggatgaataaagtacactgacacacagatattctcctctgccagtccagctgtgttcgagccgcttatagactccctgctgagtcctgtaaacagttgcgactggccctgatcagctagtcagactcacatttattcagtaagattaattaacaaaagcttgagtcaacaccattagagggtaattgacaytgtgggcttcctgagtaaaacgcacttaagcacccacggtacatcaaaggttagtcttaagattatatgagtaaacaagttagctaggtaaactactcttcctttattgctattttaatttgtttaactaaaggtaaagggatcaggctgcctccagccagatctattaccaaagttatgcaaacttctcagccttccaacaagatttgtgtctatttctataactatctctaatatttttcccaccagcctgattgaaccccaacagacagtggctggggtcaagcaccttcaagaggtaggagagagagagcatcccaaatttagaagaagac

SEQ ID NO: 357864 - DNA, 560 bp, Homo sapiens
gagtctgtcccttgcagacccctgacctggtgacggatgaataaagtacactgacacacagatattctcctctgccagtccagctgtgttcgagccgcttatagactccctgctgagtcctgtaaacagttgcgactggccctgatcagctagtcagactcacatttattcagtaagattaattaacaaaagcttgagtcaacaccattagagggtaattgacattgtgggcttcctgagtaaaacgcacttaagcacccayggtacatcaaaggttagtcttaagattatatgagtaaacaagttagctaggtaaactactcttcctttattgctattttaatttgtttaactaaaggtaaagggatcaggctgcctccagccagatctattaccaaagttatgcaaacttctcagccttccaacaagatttgtgtctatttctataactatctctaatatttttcccaccagcctgattgaaccccaacagacagtggctggggtcaagcaccttcaagaggtaggagagagagagcatcccaaatttagaagaagac

SEQ ID NO: 357865 - DNA, 394 bp, Homo sapiens
cacttcactttcccttcaggccaagcaaagtaatctctgtactttccattcagtttcagaaaattcagtgtcagaaaactgaatggaaagtatagatacttcccatattccctctgcttgccccttccagagcctccccaactatgaacattccacaccagagcagtccatttgttacaactgatacatctacaatgacacaacattatcacccaaagttcatagtttaccttarggttcactctcggtggtgtgcatcctatggcttttgacaaatgtatagtgacatgtagccaccattgtagtattgtacagaatagtttcactgtcctaaaattctctgcgctgcacttgttcactcctctttctccactaatatttggcaaccaccaat

SEQ ID NO: 357866 - DNA, 510 bp, Homo sapiens
gatctaagtcctcataggtttgggtaggatatgtggacttgataagaagtagggcagtacaaggaaggattttaagcaggatgttaagaccctacccttgtgatcagagctgactgatccaagagtgatcacctgattttagctagaccaattagatttttcccttccagaaatttggatttctgaaccaaaagacacaggctctgaaagtttctggaagctcagtgtawtagtctgttctcacactgcagtgaggaaatacccgagactgggtaatttataaagaaaagaggtttaattggctcacagttctgcatggctgggaaacctcatgaaacttacaattgtagcggaaggcacctcttcacagggtggcaggcgagaaaacgagtttagagcaaagggcgaagccccttataaaaacatcagatcctgtgagaactcactcactatcatgagaacagcatgggggggaatcgcctccatgattgaattacttcccaccagttc

SEQ ID NO: 357867 - DNA, 510 bp, Homo sapiens
gatctaagtcctcataggtttgggtaggatatgtggacttgataagaagtagggcagtacaaggaaggattttaagcaggatgttaagaccctacccttgtgatcagagctgactgatccaagagtgatcacctgattttagctagaccaattagatttttcccttccagaaatttggatttctgaaccaaaagacacaggctctgaaagtttctggaagctcagtgtattagtctgttctcacactgcagtgaggaaataccygagactgggtaatttataaagaaaagaggtttaattggctcacagttctgcatggctgggaaacctcatgaaacttacaattgtagcggaaggcacctcttcacagggtggcaggcgagaaaacgagtttagagcaaagggcgaagccccttataaaaacatcagatcctgtgagaactcactcactatcatgagaacagcatgggggggaatcgcctccatgattgaattacttcccaccagttc

SEQ ID NO: 357868 - DNA, 516 bp, Homo sapiens
atgaattttgtctgtgctggtttctgacgctaacctgcccctccgactttggccttctgacttctcctgtaaaatggtgcttacataacctgtagtctttcagggtgaaaggaagagacctgcccaagctatatgaaatggtggggatttatgagaattaccaagaagtgagaaaccaccaaaatctattttagcactatggagttaggctgggtcctgaggcttccgaggccggtgggtacctacagcaggcatcagggagaactgaatcaatagctcattgctaatcaaaatacaatagctccctaagtgccctagttattttattgtttcataagaatggttaatrtcattaatccctgttgccttttttgtgtgcaatttaattccaggacatctgactaggggcattttgtcactgtctcacattaaaaagaactttcagggaggagtttggtaccaaagtacctctctgataattgacctctctcaccagtatccacagttgtttcagct

SEQ ID NO: 357869 - DNA, 443 bp, Homo sapiens
tgcctggcttcaaaacttcaaagacaggctggctcccttgttaggggctaatgcagctggtgatattaagtcgatgtcaatgcttatttatcattccagcaatcctacagacctyaagaattacactaagtctgctctgcctgttctctataaatgcaacaacaaagcctggatgacagcacatctgtttacagcatggtttacaaatattttaatcccactgttgagacctactgctcagaaaaaaaaaaagattcctttcaaaatattactgctaattgacaatgcactagtcacaagagctctgatgaagatgtacaagaatattaatgttgttttcatccctgctaaaacaacatgcattctgtagcccatgggtaaaggagtcattttgacttccaagtcttattatttaagaaatacatttcataaggctatatctc

SEQ ID NO: 357870 - DNA, 610 bp, Homo sapiens
taaatcatctgatcaccagccaacacagagacatgtgaacaagcccagctgaactaagcagagttcaaaccaagctcaaaccaatcaatctcagacatccccatccaatccacagatgcaggagttaagtaaatgctcattgttgggcatgtttcgtatgtaacagtaattaaccagtataacaccagagttccaacttcctgacaaaagctcaaacttatctattggattttttttttcccagagataagcaaatggtagacaagatatagagcccaaagaaatgtcattttctacattttcctctttcctcttcatttctcctcctctctccagttccagaggtctygtccaggttgtagttagaagctttgcccccactcattatttagtctctttgagacacagattatttgttttaaccgcattctattgtgtcagtccttctataagacagtaagcttgaaattccttatctgagtgaatggaggctaaaagtataaggaatgggaggtgaaggaggaaatgtcccttaatattacaaaatagtatccaatcatatttgctagggcagaatttgctaatatgggagttttataatggcttagaa

SEQ ID NO: 357871 - DNA, 524 bp, Homo sapiens
tcagctgactcatagacccatgagcagtaataaatgcatactattttaagacactgggtttggggtgattggttgccttagcaatagacagtggatgcagctatagctgttttcttactatctttatgtaggtgctgggattggttataaagaaagacaaaggaagtgataagaatataaaacgaagttaaactggaagttttaattgaggtagtgagaaaagatagccctcagctaccaaaagaggctgtgatatatactaacaagtaaatagttcaaagtagaggtcctagaaactccttagatatcaccagatwgagggcataaaagagtgctgaatagagatggagaaatatttttgtgagaattattttcttagagcatgttctccaagggctatagtggattgcctgcttctgtcctccaatacagtgtgaggaacgtgaattggaccgtttggaggcgtgacacattgaaaacatggcggattagtgtccacctcagtcttacccaggaaatccaga

SEQ ID NO: 357872 - DNA, 575 bp, Homo sapiens
gattggttgccttagcaatagacagtggatgcagctatagctgttttcttactatctttatgtaggtgctgggattggttataaagaaagacaaaggaagtgataagaatataaaacgaagttaaactggaagttttaattgaggtagtgagaaaagatagccctcagctaccaaaagaggctgtgatatatactaacaagtaaatagttcaaagtagaggtcctagaaactccttagatatcaccagatagagggcataaaagagtgctgaatagagatggagaaatatttttgtgagaattattttcttagagcatgttctccaagggctatagtggattgcctgcttctgtcctccawtacagtgtgaggaacgtgaattggaccgtttggaggcgtgacacattgaaaacatggcggattagtgtccacctcagtcttacccaggaaatccagagtgcaagagttgagttggtgagtgctatggtattgtagcctggagacttgctgtattttgtgattggcatatactcttaatttttcttttaagaaaaaacatgtgggagtgtttccc

SEQ ID NO: 357873 - DNA, 575 bp, Homo sapiens
gattggttgccttagcaatagacagtggatgcagctatagctgttttcttactatctttatgtaggtgctgggattggttataaagaaagacaaaggaagtgataagaatataaaacgaagttaaactggaagttttaattgaggtagtgagaaaagatagccctcagctaccaaaagaggctgtgatatatactaacaagtaaatagttcaaagtagaggtcctagaaactccttagatatcaccagatagagggcataaaagagtgctgaatagagatggagaaatatttttgtgagaattattttcttagagcatgttctccaagggctatagtggattgcctgcttctgtcctccaatacagtgtgaggaaygtgaattggaccgtttggaggcgtgacacattgaaaacatggcggattagtgtccacctcagtcttacccaggaaatccagagtgcaagagttgagttggtgagtgctatggtattgtagcctggagacttgctgtattttgtgattggcatatactcttaatttttcttttaagaaaaaacatgtgggagtgtttccc

SEQ ID NO: 357874 - DNA, 622 bp, Homo sapiens
agccagctaagggatcctgaagtcaaaaggcaaggtctggaatggcagaagggatgaagtaaattttggacctgggtcagttgctacataaggataaaatacacacatttgtgccttaacatctctttagtaatttcttggtgcatttcaggatcctagaaaccaggtctgctctttgcaggtatgaagttcttgcctctaaggtcctggttcctgtgcaatattcartctacctgcatatcaatagtcttagttatagtgactccatggatagcttttggtgtaaagtaccaacggtatacacattgccacttctaccgtattctgttggctaaagcaaagtaaaagccaagccagaattcaaggagcagtaaaacagactctatttcttggtgggaagagcccccacatcacattgcctagagtacagacacagaaagatgtgaagaattgggcccattttgtaatcaatctaccacattgggtgtgatggagaattctagctgtccatcaaaatccactctcccttcttccatagcaaaagaaatgcagccagccatgtagattacattgcacagcctcttttgcaactcattgtgacctaggtgactaagttctcatc

SEQ ID NO: 357875 - DNA, 587 bp, Homo sapiens
gcacagcctcttttgcaactcattgtgacctaggtgactaagttctcatcacttttcactaatggaatgtgagyagaagtgacatgtgccacttaagatatctgagaatgtcttctgggaggctatattccatccttttgtcagctagaatcttgatgtagcaacaaatccagcatcattttatttatgcagctgatgacaatgtccctggagatagaggagtaacaacttacaagaaacttgggttcccaaatgaccaagagaagcagagctttttcctgacctgaattgctcacatcagaagtaatatgcaaaagagaaatatacttttgttctttaaactgctcagttacagcctaccatcacctaacaaatacactggggcaactgaaggcgcagtcaccattcattagaaaacgaggtcaacgaatacttcactctggtattttgtggaaagaatccaaagtcagtcctaatccctccctcctcagtccctccatggccctcagcctcagagggaaaaataaagcaatgatctgactccttgttaagaggattttggttaggaaggtggggaggagaaatac

SEQ ID NO: 357876 - DNA, 587 bp, Homo sapiens
gcacagcctcttttgcaactcattgtgacctaggtgactaagttctcatcacttttcactaatggaatgtgagtagaagtgacatgtgccacttaagatatctgagaatgtcttctgggaggctatattccatccttttgtcagctagaatcttgatgtagcaacaaatccagcatcattttatttatgcagctgatgacaatgtccctggagatagaggagtaacaacttacaagaaacttgggttcccaaatgaccaagagaagcagagctttttcctgacctgaattgctcacatcagaagtaatatgcaaaagagaaatatacttttgttctttaaactgctcrgttacagcctaccatcacctaacaaatacactggggcaactgaaggcgcagtcaccattcattagaaaacgaggtcaacgaatacttcactctggtattttgtggaaagaatccaaagtcagtcctaatccctccctcctcagtccctccatggccctcagcctcagagggaaaaataaagcaatgatctgactccttgttaagaggattttggttaggaaggtggggaggagaaatac

SEQ ID NO: 357877 - DNA, 587 bp, Homo sapiens
gcacagcctcttttgcaactcattgtgacctaggtgactaagttctcatcacttttcactaatggaatgtgagtagaagtgacatgtgccacttaagatatctgagaatgtcttctgggaggctatattccatccttttgtcagctagaatcttgatgtagcaacaaatccagcatcattttatttatgcagctgatgacaatgtccctggagatagaggagtaacaacttacaagaaacttgggttcccaaatgaccaagagaagcagagctttttcctgacctgaattgctcacatcagaagtaatatgcaaaagagaaatatacttttgttctttaaactgctcagttacagcctaccatcacctaacaaatacactggggcaactgaaggygcagtcaccattcattagaaaacgaggtcaacgaatacttcactctggtattttgtggaaagaatccaaagtcagtcctaatccctccctcctcagtccctccatggccctcagcctcagagggaaaaataaagcaatgatctgactccttgttaagaggattttggttaggaaggtggggaggagaaatac

SEQ ID NO: 357878 - DNA, 549 bp, Homo sapiens
tcagagacagaaagaaaaagagagacaaacagacacacgaaaaggagaaacagagaacatcagtttgctacctgatagaatggttcacgtgccagtgaaatgctggaggcacaccctccaccccggatcccaggatagcggcacagcatctctcctccatgtcccactagttgtttcagatgttagccaacttgttttattctccttggagagatgcatccgtgaggaattggaatgcaccttactgcacattcccttgtaatagcaaacatggtgaattgaatcagtggcctgggcttagggacaaattgcatttggaaattgtatttatgtatcaaaaaactaattaccaccaagttccacttcagtagtacttgatgatttcattattggatctaattgtacttctattcaggatgagagtttactgtcttttaattgatcatggaaattgaagatacaaaaatgtgaatggatacaagacctctttctttygctgatttctggcccatggaaaacaaaatagcctctcaccactttcaggtgaaa

SEQ ID NO: 357879 - DNA, 469 bp, Homo sapiens
tccccaaccccacctacacccagaaagaaggaacccttttgtctaccttaataataggttttgatttatttatctttgctttctttttttttttttttttttttccagaaaacagtcacacagggctccgggggtatttttaaagtggtgaccttcctgccccctccaccaaagggaaaaaggtttgctggctggctggcttgtgcacttccctcttatgaccaaacccctagttcccttgtctctcacatctttatgtctttcgagtgcctctgtgactcatgtctccttagcttgaggtctatgcagtcggtcagttggagaatgagagtttgtaacctgcagtgtgcagaatccaagggccaacaggcaactagggcacgcttctctttasccgatgatgttttgtcagggctcttgttccagtctggttgtgaataggcttcatttcctggttccatcacatctt

SEQ ID NO: 357880 - DNA, 584 bp, Homo sapiens
ttttctgttgagaatgaactaaattccgtcaggctgggctctcagggtctctgttcactcccagttcatgatgcagtgacctgcgctgaagtctcccagggtaaatctattttttaatcatctcctccatcctgctttccctgtctcttaaatgggagatgcctatccttaccactgctgcttttataattgakaagaaatcaatcaggaatgaccaaaacacaatgtgtctataaaatacaacaaaataatcacagctattacaatgtttaaaatccaccagggccttcaaatcacttgggaaagcattttatgtgtgaatataaatcacaccatctgctgctctcccctaatgtttaaatcagatcactgccaaatccaagcatcaaagaaagaagaaaaatgagaccattttttttttttgctttctcatacctttgagcctcttcacctcattgcacctccctttgtccttctaagatgtaggttttccccaaggatgttcattgagatcaacttcacaagtgattggctttcaaaaaagtaaatgtataatctccaacatagacacccacaaaaactaa

SEQ ID NO: 357881 - DNA, 584 bp, Homo sapiens
ttttctgttgagaatgaactaaattccgtcaggctgggctctcagggtctctgttcactcccagttcatgatgcagtgacctgcgctgaagtctcccagggtaaatctattttttaatcatctcctccatcctgctttccctgtctcttaaatgggagatgcctatccttaccactgctgcttttataattgagaagaaatcaaycaggaatgaccaaaacacaatgtgtctataaaatacaacaaaataatcacagctattacaatgtttaaaatccaccagggccttcaaatcacttgggaaagcattttatgtgtgaatataaatcacaccatctgctgctctcccctaatgtttaaatcagatcactgccaaatccaagcatcaaagaaagaagaaaaatgagaccattttttttttttgctttctcatacctttgagcctcttcacctcattgcacctccctttgtccttctaagatgtaggttttccccaaggatgttcattgagatcaacttcacaagtgattggctttcaaaaaagtaaatgtataatctccaacatagacacccacaaaaactaa

SEQ ID NO: 357882 - DNA, 584 bp, Homo sapiens
ttttctgttgagaatgaactaaattccgtcaggctgggctctcagggtctctgttcactcccagttcatgatgcagtgacctgcgctgaagtctcccagggtaaatctattttttaatcatctcctccatcctgctttccctgtctcttaaatgggagatgcctatccttaccactgctgcttttataattgagaagaaatcaatcaggaatgaccaaaacacaatgtgtctataaaatacaacaaaataatcacagctattacaatgtttaaaatccaccagggccttcaaatcacttgggaaagcattttatrtgtgaatataaatcacaccatctgctgctctcccctaatgtttaaatcagatcactgccaaatccaagcatcaaagaaagaagaaaaatgagaccattttttttttttgctttctcatacctttgagcctcttcacctcattgcacctccctttgtccttctaagatgtaggttttccccaaggatgttcattgagatcaacttcacaagtgattggctttcaaaaaagtaaatgtataatctccaacatagacacccacaaaaactaa

SEQ ID NO: 357883 - DNA, 584 bp, Homo sapiens
ttttctgttgagaatgaactaaattccgtcaggctgggctctcagggtctctgttcactcccagttcatgatgcagtgacctgcgctgaagtctcccagggtaaatctattttttaatcatctcctccatcctgctttccctgtctcttaaatgggagatgcctatccttaccactgctgcttttataattgagaagaaatcaatcaggaatgaccaaaacacaatgtgtctataaaatacaacaaaataatcacagctattacaatgtttaaaatccaccagggccttcaaatcacttgggaaagcattttatgtgtgaatataaatcacaccatctgctgctctcccctaatgtttaaatcagatcactgccaaatccaagcatcaaagaaagaagaaaaatgagaccattttttttttttgctttctcatacctttgrgcctcttcacctcattgcacctccctttgtccttctaagatgtaggttttccccaaggatgttcattgagatcaacttcacaagtgattggctttcaaaaaagtaaatgtataatctccaacatagacacccacaaaaactaa

SEQ ID NO: 357884 - DNA, 543 bp, Homo sapiens
ggtgcaccagctggtaaggggatttggaaagggcataagcaatttctactccaacactattttaggtgctttatgtatattaattcatgatgctcctctgaggttctcctttgatttatagaggaagaagctgaagcccagatactccaagtaacttgctctaagtcattcagtgacagagccaggatttgtrctgcagcactctggctctagaacccacacaccaggccactgtactgccttttgagatattgttatggagcaaagcatggtggctcatgcctgtaatcccagcactttgggaggcacaaggcagaagaattgcttgaggccaggagttcaagagatattgttatgtgttgaatggtgtctcccacaaataaatgttgaagtcttaatcccaagtacctcagaatgtgaccagttgtatttagaaataggttgttattaactaagttaagatgacgtcatactagaacagggtgggcccttatatgaacatggctggtgtccttccctataagaagaaaaagcacccctggg

SEQ ID NO: 357885 - DNA, 592 bp, Homo sapiens
gcatacagtaatagtgtcctttgtaaatatgayacatgttgacaatgttagcttattatttattctccactggactaaagagaactaattatataggctggtgagaagaaatatttccctctgagatcctggaggccaggacttctcaaactttcctggctacacaattcacccagggagatcattgaaatgcaccatctgattcaacagctctggggtggagcctgacattttacatttctaagaagtcccagatgatgtccatgctgtaggctcagaatttacaggggcatgtagctgcctccgaaaacaccatgagatttaccagggagatggggttcacctcttagccagtagggctgtgctccctctgggatttagcaagatgatgtatccttgctctgggaacaaaatcagaggccttttattgtaagtataaattttgtgtctgagctggccgccccggggataaacatcgtcagaagagctcttgggaagtccctctggggtgaggttgatgccctgtttgtgccctgaggggtgcttaatgcttcccaaaagagtccccttggtctgaattgcttcaatcact

SEQ ID NO: 357886 - DNA, 592 bp, Homo sapiens
gcatacagtaatagtgtcctttgtaaatatgatacatgttgacaatgttagcttattatttattctccactggactaaagagaactaattatataggctggtgagaagaaatatttccctctgagatcctggaggccaggacttctcaaactttcctggctacacaattcacccagggagatcattgaaatgcaccatctgattcaacagctctggggtggagcctgacattttacatttctaagaagtcccagatgatgtccatgctgtaggctcagaatttacaggggcatgtagctgcctccgaaaacaccatgagatttaccagggagatggggttcacctcttagccagtagggctgtgctccytctgggatttagcaagatgatgtatccttgctctgggaacaaaatcagaggccttttattgtaagtataaattttgtgtctgagctggccgccccggggataaacatcgtcagaagagctcttgggaagtccctctggggtgaggttgatgccctgtttgtgccctgaggggtgcttaatgcttcccaaaagagtccccttggtctgaattgcttcaatcact

SEQ ID NO: 357887 - DNA, 543 bp, Homo sapiens
ttttctttgccttgcttctgcatatgcagaacaaaagttttccccttgggtcccttcagtggagtcctgagccacttgcagtttggtgctgcctaattcacgmatcaatgtttgtttaaataaagctgttaaaattttaacgtgcctaagtttatctttaccacataaaaggcagcaaataattccaactttgacaagttgttaggaaaattatatgaactaagggttgaaaccatctgacatacacaaggcactgaaaatattatagctctcttcattggctatttcacaattttgttgtgaaatgtgaggtgtgaatgaaatgatgtgtgtgaaagttcttaccacaattcgtggcacttagtagaagctgtatgttgttaatgctgtgggaggtcacccagatccccctaaaaccttcagcagagtgttgtcagctaagtccccctctgggtattgttcccaactgaagacagtagccttgtccttaccagttgtggcccacaaccaaagactcatcagttggtgggtttaaaggcccaa

SEQ ID NO: 357888 - DNA, 566 bp, Homo sapiens
ctcctagtcaggggtgagcctatgtcccagcctagcactgactcttctcctgtgaacaagcaaaatgaaaacagctgaagatgattcaccctctggaagagcttgtccatcatttccttccatcttaattccttggactcccttggcttttgttcttttccagctgtgttttaaatgaattgtttctttagtatttgtttgtgtgagctaccctctacccttccaatgaattcactttctgcttgtttctgctagtttctgttgcctataagcactccaagaataaggagaaattagccatgtgaggatgagaagaggcaagcaattcaaaggcaaagggaaaagtatgtgcctgaggtgataagcagcttatattttgagaagcttccagaaatctacstggctggagttattgtgtgggtgtaggtgggggttagcttgagatggagttcacaagattggcagggacctgatatgcaaacacatgccttgtgaggatttgattatcttaaaatcaatcatgtagtttttaattttaattttatttatttgttttttaaagcaag

SEQ ID NO: 357889 - DNA, 620 bp, Homo sapiens
gctactgtggctgggcaccaatgatcaacccctgccctcaaactctgagttctaccagttcagggttagcccctttctgctgatctcaccttccaccttgtgatggttaatactgagtgtcaacttgatcggattgaaggatgcaaattattgatcctgggtgtgtctgtgagggtgttgccaaaggagattaatgtttgagtcagtgggctgggaaaggcagacccacacttaatctgggtgggcaccatctaatcagctgccagcatggctagaatataaagcaggcagaaaaaaaatgtgaaaagactagactggcctagtctcccagcctgtatgtttctcctatgctggatgcttcctgtcctcaaacattggactccaaattcttcagttttgggacttggactggctctccttgctcctcaccttgcagatggcctattgtgggaccttttgattgtrtgagttgatacttaataaactcccatatttatactttatcctattagttttgttcctctagagaaccctgactaatatacacctcaaatggttattttggatgaaatccctttaaaggaagcttagggttggtggaggcatcaggcaaactgtag

SEQ ID NO: 357890 - DNA, 566 bp, Homo sapiens
aagtcacacttcagtgactaacccaggcctagactccagcctgtcaaagggagtttagagctcaagaagtcagacccttcagattataaaygggccaagtgcttgacagagatagcatatgacttgtctaagaccaaattgccaaaactagaaactcaggtcttctgactccttctgatgctctttttaatatcttacagtattctcctttgtaaccctgagacatttgtgctgctggcttatgggactgatcttctggatttcagtcctgcttctgagcctctcttttctcaattataaaaggaggatcatagaagtagtgtctgcctctttgccttcttgtggaaaccaaatgaggctgggtctgtgcaaatgctctgtgactgtaacatactctataaatgttggaatattgtttttgaggttgtcactcttattgctgtcctctcagatgggccccatttttctccttttatttttagttgacatgtaataatatttatgggctaagagtgatattttgaaacatgcatacaatgtgtaatggtcaaatctggataattagc

SEQ ID NO: 357891 - DNA, 566 bp, Homo sapiens
aagtcacacttcagtgactaacccaggcctagactccagcctgtcaaagggagtttagagctcaagaagtcagacccttcagattataaatgggccaagtgcttgacagagatagcatatgacttgtctaagaccaaattgccaraactagaaactcaggtcttctgactccttctgatgctctttttaatatcttacagtattctcctttgtaaccctgagacatttgtgctgctggcttatgggactgatcttctggatttcagtcctgcttctgagcctctcttttctcaattataaaaggaggatcatagaagtagtgtctgcctctttgccttcttgtggaaaccaaatgaggctgggtctgtgcaaatgctctgtgactgtaacatactctataaatgttggaatattgtttttgaggttgtcactcttattgctgtcctctcagatgggccccatttttctccttttatttttagttgacatgtaataatatttatgggctaagagtgatattttgaaacatgcatacaatgtgtaatggtcaaatctggataattagc

SEQ ID NO: 357892 - DNA, 531 bp, Homo sapiens
acgactagtcttcagtcttgacggtaaggtctctgggtactctttttccgactctcccctcttttcaggtttgtcgaccggtattattccagggttattatgggacaatgacaatctaaacaccaggcttatctgtcttttattaaacttcttcttaaacagggtggaatcaaggctgattccaataaccttattctcttatttcagactattgaaaaatattgtccttggttccctggcaaaggttctatggacctgttagactgggatagagwtggcgccatgcgtcaccaactcatgaaagatggtgttttacttcctatttctgtttggaccgactgggctcttattcatgttgctttacttccttttcagtctggtgatcctcttcaactgccacaagttaatgcggatggtgagccgctccctttacctcaggtagctgacccccctaccagtcctccttctgatgatgaggaggaattcaatctttccttgttttctccccaagaggaggaacctggtgatgat

SEQ ID NO: 357893 - DNA, 495 bp, Homo sapiens
tatcgtcctcttctttcctggatattagcagcaatatcacaggggatgatgtattgttcctacgattatgcatattaatgacatccactccccctctggatattagaaacaatgtcatgcgggggtgtacaccccctgtgatattgggagtaatatcctactctgaccccctgacwattagaaacaatatcacagaaggggtgtacactccctgtgatattgagagtaatatcatgctcttcccccctggatattaggaaaaatatcatgaaagggtattgggagtaatatcaacctctccccccaatggatattaggaacaatatcacaaagtgggcgtacacatcctgcgctattgagaataatatcatcctctcttccccgggatattaggaacaatatcacaggcggggtgtacactccctgtgatttcgagagtgatagcatcctcttttgacctggatattaagaacaatataacaggaggggtgtaca

SEQ ID NO: 357894 - DNA, 495 bp, Homo sapiens
tatcgtcctcttctttcctggatattagcagcaatatcacaggggatgatgtattgttcctacgattatgcatattaatgacatccactccccctctggatattagaaacaatgtcatgcgggggtgtacaccccctgtgatattgggagtaatatcctactctgaccccctgactattagaaacaatatcacagaaggggtgtacactccctgtgatattgagagtaatatcatgctcttcccccctggatattaggaaaaatatcatgaaagggtattgggagtaatatcamcctctccccccaatggatattaggaacaatatcacaaagtgggcgtacacatcctgcgctattgagaataatatcatcctctcttccccgggatattaggaacaatatcacaggcggggtgtacactccctgtgatttcgagagtgatagcatcctcttttgacctggatattaagaacaatataacaggaggggtgtaca

SEQ ID NO: 357895 - DNA, 495 bp, Homo sapiens
tatcgtcctcttctttcctggatattagcagcaatatcacaggggatgatgtattgttcctacgattatgcatattaatgacatccactccccctctggatattagaaacaatgtcatgcgggggtgtacaccccctgtgatattgggagtaatatcctactctgaccccctgactattagaaacaatatcacagaaggggtgtacactccctgtgatattgagagtaatatcatgctcttcccccctggatattaggaaaaatatcatgaaagggtattgggagtaatatcaacctctccccccaatggatattaggaacaatatcacaaagtgggcgtacacatcctgygctattgagaataatatcatcctctcttccccgggatattaggaacaatatcacaggcggggtgtacactccctgtgatttcgagagtgatagcatcctcttttgacctggatattaagaacaatataacaggaggggtgtaca

SEQ ID NO: 357896 - DNA, 591 bp, Homo sapiens
aatgtgactttattacaccttgaaaccatgtgttccctagagtgttcccggctccagactgggccctcttctcctttctgtttataatagggggattcccagtgcactagaaaacatgtatatgctgataattttctaacatttctctctagtctttatctctcccctgagggccagactcgtagatccacttsctccctggatacctccattcaaatacataatccacaactcaaacatgacaggtctaaaatggaacttttgatttctacccagaattaaacagtttagaaggtgcattaaacacaacatttctatgagcctttcataggccggtgcatgttgttaatttccaacagtttcccagacttgagaagtgctgttctggaacaccctttggaaatactgttctggaaccaaagagctttgaaataaaacctatggttttctgctagaaccaagctaatggagtgaagcatgctgctctggagcaatggcactcctagaagcatcagggtgcagagaaaggctggactgcctacatacagctgatcatctgattcgttggagcagctatgatgtaactgactt

SEQ ID NO: 357897 - DNA, 582 bp, Homo sapiens
ctattacatttgttgtgatttatgacaatttgaatttatttttaccatcttatttataacttctattttatcatttttacattttatttttctttcttccaccgtatgaatattttctttcagaacttttyccctcctctcctggtttggaagtatcagcttcatttctattaagtagatacatttacatttttaacatgtctatttaactgaatatcatgcaaattctaaagttatgcagtatttctagcctctgcttgaataaggtaaggtccttcacattccttaatcctgtctaaacattttaaatataaaagattcctctttacaggcactaattatttagatataacaacttcatttaccaaattgagtaatttaattaatttaatttaccaaattaagttcataaataacatctttattgcatttctatatcatatgtgcttagactcttttctctagagtaatcaaaggtattttatcctattccttctctctacttttgcccttctgcaagtctccatctcttcatcctatactcccaactaagaaatactgaagagatttctttcttaattt

SEQ ID NO: 357898 - DNA, 594 bp, Homo sapiens
tggtgtttttgcctcacagctcttaagattctttcctttgtcttaactttagataatctgatgacagtgtgcctgggtgatgatctctttgtgatgaatttcccagatgttctttgagcttcttgtattcagatgtctagttctttagcaaggctggggaagttttcctcaattattcctcaaaatgtattttccaaacttagatttctgttcttcctcaggaatacattattcttaggtttggtcgtttaacataatcccagacttcttggagtctttgttcatatttccttattcttttttctttgtctttgttggattgtgttaactggaaaaccttgtctttgagctctgaagttctttcttctgcttgttcaattctattgctgagactttccagagcattttgcatttctataagtgcatccattgtttcttaaagttttgattattttttatttatgctatctatttcattgaatatttctcccctcacttcttgtatcatttttttgatttcctyacattgggcttcacctttctctggtgactccctgattagcttaataactaaccttctgaattatttttcag

SEQ ID NO: 357899 - DNA, 565 bp, Homo sapiens
taaatatgtactttgagggttttatgagttgcaagacaaaatatagttaaagtacctcatagcaccaggtacatagtagattctcaataaatccttgtctttattattctcccagtggaaatatctatccattctaccattaattttgatattaaaaatgctggtttgaactagcattttacaatttgtatttctctatgacaacataaaatttcaagacgatagctaagcttaattacaaataaaacacatccaaagaagcacatggaaccattagtaacatcatagaaagttgccttatatgctttttggaaaggcagtaaataaatgatagatgaataaatgaatgactgaatgaatgaawaaaaaatcaatagaaaatactaataattctataatttaataaaagatttatatgttctaaatgttctggttcctaagtattactaaattttctgggaaattagcataagcatctaaataaatgaatatattaaggaaattaaatttattaaactaattttgttatatttgttggcattttcttaatatctgaaagagttct

SEQ ID NO: 357900 - DNA, 571 bp, Homo sapiens
aagttgccagcagattcagcacctgatgagggcgagattcctggttcatagacagcaccttcttgacacatcctcacatggtagaagaggctagcagctctctgggattccttttgttagggcactaaatccattcatgagggctctgccccacatgacctcatcacctcccaacggccccacctcctaacattggtgaytagacttcaacatagaaattttgggtgattagatttcaacataggaatttcaggaggatacacacatgcagaccacagcactaggcttcttgatggaagggcattcgctgagccctgagtgtggagaggtggaatccacagcaacaaaggccagggcagggaaggcagcagcacaagcccaggctggctgggaacagcactgtgtgctgtggggagagggagccccacctagctagagaagacggggaacatacccagcaagtgggagacgccatgccgcagacatcagggaagaccctcctgcaaagccacaccagcgacagactgaactcacctggtgagcaacaagggaccacttctaggtagaggag

SEQ ID NO: 357901 - DNA, 571 bp, Homo sapiens
aagttgccagcagattcagcacctgatgagggcgagattcctggttcatagacagcaccttcttgacacatcctcacatggtagaagaggctagcagctctctgggattccttttgttagggcactaaatccattcatgagggctctgccccacatgacctcatcacctcccaacggccccacctcctaacattggtgattagacttcaacatagaaatttygggtgattagatttcaacataggaatttcaggaggatacacacatgcagaccacagcactaggcttcttgatggaagggcattcgctgagccctgagtgtggagaggtggaatccacagcaacaaaggccagggcagggaaggcagcagcacaagcccaggctggctgggaacagcactgtgtgctgtggggagagggagccccacctagctagagaagacggggaacatacccagcaagtgggagacgccatgccgcagacatcagggaagaccctcctgcaaagccacaccagcgacagactgaactcacctggtgagcaacaagggaccacttctaggtagaggag

SEQ ID NO: 357902 - DNA, 496 bp, Homo sapiens
tttccacagtgcattcagcacttccctctggacaatgccaggctctttatcgtggcaactaaccttaaatgacagcaatcacaatagtgcaatgaaggagcagcaatatcctcacattgcaaaggaggaaacagactcatagcractgatgtcttgcctaggtgcaaagttgagactcccatctgggaaagagagaagggccagagagaaaactacaagagctagaaaaagaccttgctcctagaagtggaggtaacacacaaagtccagacaaagacccagatggctccatgtcaaaccacaagcaccttatcagcaggcctgagcatctctccagcctagatcaggattagatttggctcttggagatagctgcgcctgcacatggggaccaaactcacctcgctgggaatgaagggaagaacctggtggctgggaaacaagctgggcttgacttcacttgcctaagattttggagctacttcaaagctactgg

SEQ ID NO: 357903 - DNA, 626 bp, Homo sapiens
agttcattttgttcatgtttttaatgaaattgcttctattcaaagacaaggtatctaagtaggagctgaaattcaccatctataaatggagtaaattagactgagaatgattcagtgatgtatcaaaggctacaaagaaagaggataatgaagccaaagtcagaactctgtctgatctcaagcatggtattctgttagctctgtgatttagatgtaaactttaccagctctgaaatgtgatctctgtacaatagacaagtggaaaattggccattcagcaaaacacagtggaagggaagcaggctgctggtgagttccatcatttattaccacgctggtcctaaattttcacacctaattaatcaagcttgctctgtaatcacttttctacacgtgctgttggtggattttacagctgcggttttaatgagctgctgtttcttttgacatttggaaatctaatctggaaaaatgattcartgacttgttaagacctttcatattacatgtttagccatgtagctttctagggtcctgggaggaaattacggccagccacatttcccatatagctctcggttcatggcaggcaattcctatggagctaccgaacagatgtagccggc

SEQ ID NO: 357904 - DNA, 547 bp, Homo sapiens
gaaaattggccattcagcaaaacacagtggaagggaagcaggctgctggtgagttccatcatttattaccacgctggtcctaaattttcacacctaattaatcaagcttgctctgtaatcacttttctacacgtgctgttggtggattttacagctgcggttttaatgagctgctgtttcttttgacatttggaaatctaatctggaaaaatgattcaatgacttgttaagacctttcatattacatgtttagccatgtagctttctagggtcctgggaggaaattacggccagccacatttcccatatagctctcggttcatggcaggcaattcctatggagctaccgaacagatgtagccggcaacccaatgagttaatgaaaatgaatatcagtgattgcaaacacctaggaaataaataagaatttgcaacttgacttatgagaagatgatatttgaaaacccaaaagctctcataaaawacaaaaaatttgggtggccatcccatttcaggaaacagtcatcagggtggagagaaaaaatac

SEQ ID NO: 357905 - DNA, 480 bp, Homo sapiens
aaacacctaggaaataaataagaatttgcaacttgacttatgagaagatgatatttgaaaacccaaaagctctcataaaatacaaaaaatttgggtggccatcccatttcaggaaacagtcatcagggtggagagaaaaaatacattcagtacagatcggaaacaactaccgaattatagaaacatgtcagrtaccaagagagaaatagcatgagaagcactctttccacttacaaggaacattaattaatattctatagcctgtgtaattcttgtaattacttctctaaaattggggtgttttgcagtgaaaagagatcctagaggaaatacacatgtcaaaatacattattcctgagtgcacggcacatatggatgaggctaaattggccttcttattcccatagcaaaccccacaggagttctaggattaaagactggcagtcattgctctatcaagctgttcattcccagggattt

SEQ ID NO: 357906 - DNA, 623 bp, Homo sapiens
atacccttttccctcgcccaccttgactatttgctgtcaaattaattggtaactatttgcctagttcacctatttcttctttcttccttgtgttcttcctcagttcatcaacaagtgaaaaactctcggccataaaatcaaacaatcaattttggttgctaggagggaaaacatcagtccagaaaaattgaagctgaagggtcagaatttgctaatgtcatttcaagctcagagctcataaatattctgaggtgaaagagaattttgcaaatagtctgaaaacaaactgaatcaaagaactggctctgcgatggatggtatttcaaaatggcaccactgaaaagcaaggttagaaataatacatatcataccctgtttaatgtttaaaaattacacatacaaatatccacagtaaatgcatggactatctctgtaagggaacatgtggaactaataacacctcctactcccatggggaggarcaagatgctggtagacagggaaaggatagagctttgtcttgctctctacattatcttttggtcccttctaaattgtattcgatgtacatatgacttatgagaaataagaatctatttttaatagcagtcctttcaccaata

SEQ ID NO: 357907 - DNA, 590 bp, Homo sapiens
acagtccctctggtgggggaggcaggaagagctcctcattaagctaatggaccactaattcatttccaggtgaagagaaggggcctgcagagctgcctcatttgccttgtctagagggtcattaagatgaagggtggcaggctcttgagacagagccagcagtgacagctgctggctgtcgggagggcacggggagtctgcagrggattccagagagagactgatgctgcagacttttcactgacacggtgcaactgttgaccagatgtagacatagaacataccagagcttcatgtcagggatgcaagatacctgtgctgcagccctcagtgaccttcactcgctatgtatttaagcaaatgtccctctaaagaggcccgagcacatgagactggcttgtttccaaaatcctgccaaggaggggcttcctgttactgggactccaatatgcgtcttcctttcattcctcttaccagcattcttcccagggattttcagaaatgtcatagacttattgcttttattcacatattatgttatcaggaacacttctcttatcattaatattttaataagaaaataatgtttc

SEQ ID NO: 357908 - DNA, 555 bp, Homo sapiens
tcatatacaagtctttttgtgaacatacttttttctctgagataaatgcctgggagagtaaatgctgtttcaaatgatagttgcatgcttatttttcaaggaactgccaaacttttccagaattgctgttctattttacattctcactagcaatgaatatatgaatattctagtttctctgaatcctcactagcatttggttttgtcccaattttttatttttgccattctgataggtgtgtgataataaatcattatggtttaaatttggatttccttgatggttaacaatgctcaatagcttttttgtatttrtttgctatatccttttcagtgaatatagcacgtctactgaatgaaatgtcttttcacttttttgcgtccatgttctaattttattgtttcttcactgttgaattttaagaggtttttttatacatatagtctagatactagtcttctgtcaactatgtggtctgcagacattttctcccagtctatagtttgtcttttaaccagttaacaggatcttttagaaagcaaatttttgatttt

SEQ ID NO: 357909 - DNA, 571 bp, Homo sapiens
aaaataagactcccagatgactctccagccagcacaagtctgtagacatgcacaaagaaaccactgaaaaacacagttaatatacagacctatattcacaaaaagaaatgcttcattggtcaattctatgaaatgtctagggtggttcagtgaaaagaatagtgaacaaagagtcaaaaaacttgagttccagccctgtccctgccattaatttgttttgtgacctcacagagctttcttcacttctctaggtcctactttcttcatccaaaaaaaaaaaaaaaaaaagaggaraatggactaaataatatctaaaggccctccgatttccaaaattctattacctcttatccaccatcatctgtaagtcccacttaatggaaagactgaatcaattgcaagcaagttctagaatatgagttataaagctttgaatggatgctcagatataacctgaccttactaagtctggaaaaagaaggttaaggaaataactgtagtatgatagacagaaacttatcaggcccaagaagagatgctttgaagtgcaacataaaacaatatggtggtg

SEQ ID NO: 357910 - DNA, 601 bp, Homo sapiens
gcaacctcccacccactcttytcccaccaccccttttttttattaccaagatgatagaaaccacggaaagttaacagacagaaaaacagctcatggtaccattgcaatcaaactctgacacattgggtataatgcctaaaattgagaggagaagaaacctcataaagactaaaactcaccttccctccccctttcagcttgaaataatttagcatttcctgctggctttctttgaggggtggcttccaggtataattcctcaaacagggaatatttttaaatgtatccatatcacaacttcaatcactatgttaagtgaagattcagcactctaggccagcaacgatttctagaaatattttggcatttcattcgtagctctcagccaagtcatctcttgtctcatataaaaactttctgatgaacccaccatagataatcacaacgcattgcacctatataacacataatacgtttgaaatgatttttacaaaaactgtctaatttcatctgacctaggttacgaaggatatatgatgattcccattttacagctgaaaacactaagtgtctgaaaaataaagtgaatgctctgaaatca

SEQ ID NO: 357911 - DNA, 601 bp, Homo sapiens
gcaacctcccacccactcttctcccaccaccccttttttttattaccaagatgatagaaaccacggaaagttaacagacagaaaaacagctcatggtaccattgcaatcaaactctgacacattgggtataatgcctaaaattgagaggagaagaaacctcataaagactaaaactcaccttccctccccctttcagcttgaaataatttagcatttcctgctggctttctttgaggggtggcttccaggtataattcctcaaacagggaatatttttaaatgtatccatatcacaacttcaatcactatgttaagtgaagattcagcactctaggccagcaacgatttctagaaatattttggcatttcattcgtagctctcagccaagtcatctcttgtctcatataaaaactttctgatgaacccaccatagataatcacaacgcattgcacctatataacacataatacgtttgaaatgatttttacaaaaactgtctaatttcatctgacctaggttacgaaggatatatgatgattcccrttttacagctgaaaacactaagtgtctgaaaaataaagtgaatgctctgaaatca

SEQ ID NO: 357912 - DNA, 597 bp, Homo sapiens
aggcagatcacagtggaaattgatgctaggtctgggtctcctccctaacctcccctgccaccacacatacatgtgcgcacacacacacaacacgcacaccacacaccatatgcacactacacggacatcccacacatacacgtgcacacacaacacatatacatatgcaccagacacacataagcctcttgtttaacagtaattgagtgtctatcaaatggcaggtactccaggagagcactgatgtaatattaccttcagagctgggctcaggggcacgcacctgtagttccagctactccagaggctgaggcgggaggatcccttgagtccaggatattgaggctgcagtgaactgtgatcgcacactgcactccagcctgggcaacagcctatccgtgtgtgtgtgtgtgtgtgtgtgtgtgtgtgtgtgygcttcatgtattaccttcaggagctgcctagaagttcatacccctgttacaggaaagggattccaatccagaccccaagagagggttcatggatctcacacaagaaagaattcagaccaagtccatagagtaaaatgaaatcaagtttattaggaaagtaaag

SEQ ID NO: 357913 - DNA, 591 bp, Homo sapiens
gagctatcattaccaactaacaactctatacactaacttgacagcttagatgaaattgttcaattgaccaatgactagaaaaccacaaactactgaaacccacccaagataaaatagataacctgaagagtcctacaaggaaataaaacttttcctatatgcagatgacaaataaaggagaaatgagaggcacataataggcacatggaagttttgaaatccagctggacacgtttaaaaacatgttcccattcaaagccaaggaatgagggcccagtctcgttccacaggagttgctcccttcttcattgctcttcttggttccgtccttagagagggtcttcttttttcataggaaatggtctgtttgaatagcttcaaatagtgggagagttttmccagtcttcttcctgctcacagaatgttgggtggggtccagctgctttttcattctttactgactcagtcccttttaatctgatgctctttgggcacttttatgattgaggtttattccacaccccaaataccatttctataattcttttacaacagacctctctagttagcaggaaatgtcgggaacaacac

SEQ ID NO: 357914 - DNA, 547 bp, Homo sapiens
tgtttatgtggatgaattacatgtattgacttgcacttgttgaactaacyttgcatctcaggtataaagcctacttgatcccgctagctaagctttttgagtgctgctgggttcagtttgctaatatattgtggaggacttttgcatctgtgttaatcaaggatattggcctgagactttcttttgttgttgttgttgttgttgttgtgtctctgtcaggttttggtatcagaatgatgctgatctcaaaatgagttagagtggaatctttcctcctcaattatttggaaaactctcagtagaaatggtaccaactcttctttatatatttggttgaatttgactgtgaatatgtcttgtcctgagattttccaggttggcaggctttttatcactgattcaattttgtaactaattatggggttgttcagggattcaatttcttcttggttcagtcttgggttgttatatgtgttcaggaatttatccttttcttctagattttctagcttgtgtgcatagagttgttcatagtagtctcaagatc

SEQ ID NO: 357915 - DNA, 547 bp, Homo sapiens
tgtttatgtggatgaattacatgtattgacttgcacttgttgaactaactttgcatctcaggtataaagcctacttgatcccgctagctaagctttttgagtgctgctgggttcagtttgctaatatattgtggaggacttttgcatctgtgttaatcaaggatattggcctgagactttcttttgttgttgttgttgttgttgttgtgtctctgtcaggttttggtatcagaatgatgctgatctcaaaatgagttagagtggaatctttyctcctcaattatttggaaaactctcagtagaaatggtaccaactcttctttatatatttggttgaatttgactgtgaatatgtcttgtcctgagattttccaggttggcaggctttttatcactgattcaattttgtaactaattatggggttgttcagggattcaatttcttcttggttcagtcttgggttgttatatgtgttcaggaatttatccttttcttctagattttctagcttgtgtgcatagagttgttcatagtagtctcaagatc

SEQ ID NO: 357916 - DNA, 547 bp, Homo sapiens
tgtttatgtggatgaattacatgtattgacttgcacttgttgaactaactttgcatctcaggtataaagcctacttgatcccgctagctaagctttttgagtgctgctgggttcagtttgctaatatattgtggaggacttttgcatctgtgttaatcaaggatattggcctgagactttcttttgttgttgttgttgttgttgttgtgtctctgtcaggttttggtatcagaatgatgctgatctcaaaatgagttagagtggaatctttcctcctcaattatttggaaaactctcartagaaatggtaccaactcttctttatatatttggttgaatttgactgtgaatatgtcttgtcctgagattttccaggttggcaggctttttatcactgattcaattttgtaactaattatggggttgttcagggattcaatttcttcttggttcagtcttgggttgttatatgtgttcaggaatttatccttttcttctagattttctagcttgtgtgcatagagttgttcatagtagtctcaagatc

SEQ ID NO: 357917 - DNA, 477 bp, Homo sapiens
atagaacgaataaggaaaatttgcatttcccaaactaaatataatgtaataatctgatayataaattgtctgctcaaaatcctcaaggtcttaatgaaagaaagggtaattgttgataggtcatgtagattaaaaatttgtaatgatatcaaggtaaacaaccaatagagagtatgcattcttctcaagtatgaatgaaacatttataaaatgatcatataataggtcataaagggagtgtcaaacaatctaaaatattcaataaatgaaagatcaaattctgtggtcacattacaagtaaattttacaaatctcaattttacattaaagatctttactctaaatgccatatgcttgtttatttagttgcccactcagcatatccatttgactgattcatagacatctcaaacacagtatagctaaaagtgaacctctgacttcccactagcagacttgctctacctattgtttccc

SEQ ID NO: 357918 - DNA, 591 bp, Homo sapiens
gagctatcattaccaactaacaactctatacactaacttgacagcttagatgaaattgttcaattgaccaatgactagaaaaccacaaactactgaaacccacccaagataaaatagataacctgaagagtcctacaaggaaataaaacttttcctatatgcagatgacaaataaaggagaaatgagaggcacataataggcacatggaagttttgaaatccagctggacacgtttaaaaacatgttcccattcaaagccaaggaatgagggcccagtctcgttccacaggagttgctcccttcttcattgctcttcttggttccgtccttagagagggtcttcttttttcataggaaatggtctgtttgaatagcttcaaatagtgggagagttttcccagtcttcttcctgctcacagaatgttgggtggggtccagctgctttttcattctttactgactcagtcccttttaatctgatgctctttgggcacttttatgattgaggtttattccacaccccaaataccatttctataattcttttacaacagacctctctagttagcakgaaatgtcgggaacaacac

SEQ ID NO: 357919 - DNA, 616 bp, Homo sapiens
tgataggtcatgtagattaaaaatttgtaatgatatcaaggtaaacaaccaatagagagtatgcattcttctcaagtatgaatgaaacatttataaaatgatcatataataggtcataaagggagtgtcaaacaatctaaaatattcaataaatgaaagatcaaattctgtggtcacattacaagtaaattttacaaatctcaattttacattaaagatctttactctaaatgccatatgcttgtttatttagttgcccactcagcatatccatttgactgattcatagacatctcaaacacagtatagctaaaagtgaacctctgacttcccactagcagacttgctctacctattgtttccctatctttatggttttasgccaaaagacttgaaataatttttttctcctctttctcttaaacctgtctccaatcgtgaggaaatcctgaggacactacccttaaaagtacatcccagataaaactagttctcaccacctactctgcagttgccctagtgtaagccactatcttctctacattagccttataataggtcttctcttggcccactgtagtctattctcaacactgcagccaacacaatcccttac

SEQ ID NO: 357920 - DNA, 457 bp, Homo sapiens
tatcattcttccacatagaagctttacactttattaattacaatgtcaaactaaattastatctgggaattgtatccactcatttaaaggataattttttttttgcattcataaagatttcctccttttgtaatgtgatcacaagaccccttaaagcaacatatcctcaaaggtttgtttacagatgataaagtactttatagaagggcctaaaacctgaattgtaagacactactgattaagtatcaattggaaattaagaataagcaaccatgtaattatgagaagtaataatcagatgtgtgtccatgaaaagattttaaaccgatataagctaaaacactgaaataatgtaccaactagtttaaaatgagacacctgccaacccatccacagtatccctgtatatacccctgagaaaagagctcttagtttcttctgtaaacactctgcctaa

SEQ ID NO: 357921 - DNA, 435 bp, Homo sapiens
tttagaattttccttttatactaaaataacaacaaataagtttggatttttgaccagtttcatacgtaaatcttcccttcagatcactgattgaaaagcatagaccaaaatttatgaagtaaatatgaaaaacaaaagcaaaaatgaaataaacaaaaaagagatgaggcattctgtaacatttatgtattttagttatgatttttagtttttgtgggtacatagtaggtatatatatttattagatgtttgatacagccatgcaacatataataatcacatcatggaaaaatggggtatccatctcctcaagcatttatctgttttgttacaaacaacccaattatactyttttagttgttttaaaatgtacaataaaatcattattgactatggttaccctgtagtgctatcaaatactaggccttattcatt

SEQ ID NO: 357922 - DNA, 568 bp, Homo sapiens
caaaccacatcatctcacccctgggccctcccaaattgcatgttcttgcatttcaaaacataatcatgcctttccaacagtctcccaaaatttcaactcattccaacattaacccaaaaaacgaagtgtaaggtctcatctgagacaaggcaagtcccttctgtgggtgagcatcagctgagtttggtccagttttgttttctgatgtaacaagggtagcactgagtccaatgcctacaatttgctgagttctccctctccctatctcccagaaaygctctccacaccatgccactgctaccgggggttgggagaggggtgatgtcagtgattcaagactatttttcctatatcttcagtgcctctttcagtgatatgaagttaaaactaggtcctgtaagtgctctcctcatttttggtatatatgaagatgtgtgtgtgtgtgtgtgtgtgtgtgcatgtctgtgtgtgtgtgtagatagttgttaaactggtgttcctgatgattagtagagccttttattctgccatcttacaccacctggagtctccactctgtaacttttaa

SEQ ID NO: 357923 - DNA, 558 bp, Homo sapiens
aaaggcctgaaaaccaggagcaggggtttgttgatgtaggtactggagtatgaaggccagagaactgggagcttccatatccaagggcagaagatggatgtcatctcagatcaaggagagagatggagggagggaggaagggagagagacagaagaagaagaagaaggagaagagaagagaaagaagaagaaggaggaggaggaagaggaggagagaaagagagagaattaattaattcactgttcctccatctttttgttctatctgggagaagaagaagaagaaagaagagaaagatgagkgagaagaaaagaaaagagaagagaaagaagaaggaggaggaggaggagagaaagagagggaattaattaattcacttttcctccatctttttgttctatccgggtcctcaatggattggatgatgcctgcccacattgggtgagggtggatcttctttacacagcctactaattcaaatgctcatctcttctggacacaccctcacagacccagaaataatgttttaccagctacctggccacatcccttaacct

SEQ ID NO: 357924 - DNA, 589 bp, Homo sapiens
tatttgattatatcagaaagtatggattaattattatttagtttaactaccaatggtccttttgaacatataccaattttatgaaattcttttgaaactcacagccttaactgagtcaaattcatttatatgaaacaaaaaaattaaacagaacaaggtgtcaatgaatcagttaaataattcccctttaaagagtagtacagtgatagagcaaattgattaacataaaatatttttaacaaattcttaaaatgaggagatttaatttggkctcaagtattaaaaggaatatgcagcaaatatgctactggcaaatgtttatttttgagtatcggaagtgctctgggctcagtgccctctccacaggaggggaggccacagtccactgctgtcctgcacgacccatgcttggatctgccctgctgtgcctggagccacttcttgaagtagcacagggcatatgcggtggccaggatctgagtgtgtgagaagtgatagcacaggactggttctgctacttcatgtttttctgacatggaggcttcctttatttgtaggtgagcgtccctatcaatgtccttactgtgaa

SEQ ID NO: 357925 - DNA, 339 bp, Homo sapiens
aacttctcccatcaagctcttgaaatattttattatttgtcagaaaagtcatcatatggcactaacctatgcattctaagatttaatgaattgttttggaggaagttgaaatccagtgttctgaatcttaaatattatagaagctttaaacaatttgtcttagttggagaaggctgggcatatttaaggatattatgtaccctgtattacttcttaagaaacagactttctgaataatagctayaacacttgactctgttatatatcacggtaagactaagtaattgaagatgaaggaacctgaccctggaaataacagagacaaattagacagaacac

SEQ ID NO: 357926 - DNA, 582 bp, Homo sapiens
caaatcgtataagacatttaattgcttagagcactttaaatccaatttctttgtatcagtttcagaccagcctctgcacaatgagactctaaacacaagtactctttttctgggctaggaatttgtctacatatccaaattatgtcaacctataattcattcaacttccacattcattccttcactcatttaacctatcgggagtgcttacctgccacctgctctatattaatgcataatcccttgtgttatttctggaactcttccaacagttatgggtcacaatgacagtacaccaccccaaacgtaggctgagcacttgttcgcagtgatgagctacatatgttggccaataccatcacaatttaatgcttcagttcctcctgtacccttgagaagatggcatctggtccaaattttgggtccctttgaagatccatgataggtaactgtcatctggatagcaaagacacttgaccagtcaattaagtattccaaaatctaggaagtttatgtaggtgaggataattagttgtaaaaataaactcagtataataagmcttatgaagtggaacctagcca

SEQ ID NO: 357927 - DNA, 584 bp, Homo sapiens
atccccaagagaagagaaacaaatgctgtgagccctacaattgccccctgattactgcctagagagagtttctaagctgcagtgaagggtgggggaccaaaacagagttcagtagtctcaatgctttgagaagacagagttggggaggctaagtcagttagactagcagtggcaaatatcaggaagaaaggtgctagacccagagagctcaaaaaatttgcagagctcagttttttgacccagtgctgatgtgtacagaggtgattatgtaggaagaaacttcctgagatggaatagaattacatgaaagaagaggtggagtaatccccagagtttagatgattctctgcttggaatactttgcaaataaggtttttcaatatacrtaaaaaaggataacacatcatgacctcatgggtttatcccaggcaagcaaggttgattaatttaaaaatcagtcactataattcaccatattaaaaaaataaagatcatttctatagatgaagaaaaagcatttgacatatttgaacatccattcatcattttttttaaaaaacagcaaaaatccttttagcaaacta

SEQ ID NO: 357928 - DNA, 600 bp, Homo sapiens
tctaactgtgttgaccatgttctgattggtatttctttggcatggcttattaggggtaatgaaaagaaattagtaagggagggtctatgtgagggtttactctctgagaaagaaaatgcgtttattttcttctattttggtttatttggttctcttaactttagaggtgagtggcctatgacctcttggctctgcctctagtataagagccatttactagagcaagaattctctaagacttgctttgatgacattcactataaattggaatccttttccatggtaggcattagaagttccttcaaggagcactatagacagtctgactagtatctrccatgaattatatatcttcttgtgatatcttcaggaatagtgcaggctctgtgtaagatctgggatgaagaagagaggcatttgaaggacaaacacagctgcctgttgatatacttagttatgacagagagcctttcttgccagactaacatagaagtatgctcgtggggccttcatgtgcttctcttagggcaaaaccccaaagactccctggctttaaatggttctaggtagagaagagggagtccaggcagattgaaaact

SEQ ID NO: 357929 - DNA, 600 bp, Homo sapiens
tctaactgtgttgaccatgttctgattggtatttctttggcatggcttattaggggtaatgaaaagaaattagtaagggagggtctatgtgagggtttactctctgagaaagaaaatgcgtttattttcttctattttggtttatttggttctcttaactttagaggtgagtggcctatgacctcttggctctgcctctagtataagagccatttactagagcaagaattctctaagacttgctttgatgacattcactataaattggaatccttttccatggtaggcattagaagttccttcaaggagcactatagacagtctgactagtatctgccatgaattatatatcttcttgtgatatcttcaggaatagtgcaggctctgtgtaagatctgggatgaagaagagaggcatttgaaggacaaacacagctgcctkttgatatacttagttatgacagagagcctttcttgccagactaacatagaagtatgctcgtggggccttcatgtgcttctcttagggcaaaaccccaaagactccctggctttaaatggttctaggtagagaagagggagtccaggcagattgaaaact

SEQ ID NO: 357930 - DNA, 582 bp, Homo sapiens
agttcttttacacagcaacatttttcttacacacataacaagagttacaaaggaagccgaaaaaaatctgctgataagaattctgagaacaacgtacttgtgcattgtaaagaatgtcctttgtaatccttgaaagaaaaggaatgctggttaagtgaaagagtgttattatttaaaktatctaatgggaaattacttctttccctgcataatgactaagtgtttagattttattttaatcttacaaaagaagaataatcatatgaaaaggaaaattttgttacaagaaaaaagttatgctcaccatcttaaaaaattatgatgcaaacttcgaaaaatcaatgcaaattgtaaagaaaatataaggaagtacaaatgaaagagaaagaaatataagggaagtaaatatgataaaaaatatagaagatatacagaaaatataaaaacatatatatacacacacttatgccgactgatatatatagtgtccaaggcaaaaatgttgagtttcaaataacattcagaatggaagtcaactaagagaataataaattgtcagagttgggagagcaggtttctgat

SEQ ID NO: 357931 - DNA, 582 bp, Homo sapiens
agttcttttacacagcaacatttttcttacacacataacaagagttacaaaggaagccgaaaaaaatctgctgataagaattctgagaacaacgtacttgtgcattgtaaagaatgtcctttgtaatccttgaaagaaaaggaatgctggttaagtgaaagagtgttattatttaaagtatctaatgggaaattacttctttccctgcataatgactaagtgtttagattttattttaatcttacaaaagaagaataatcatatgaaaaggaaaattttgttacaagaaaaaagttatgctcaccatcttaaaaaattatgatgcaaacttcgaaaaatcaatgcaaattgtaaagaaaatataaggaagtacaaatgaaagagaaagaaatataagggaagtaaatatgataaaaaatrtagaagatatacagaaaatataaaaacatatatatacacacacttatgccgactgatatatatagtgtccaaggcaaaaatgttgagtttcaaataacattcagaatggaagtcaactaagagaataataaattgtcagagttgggagagcaggtttctgat

SEQ ID NO: 357932 - DNA, 448 bp, Homo sapiens
cttggtttgtcttataaaatagcaactatttattttcctatcaaacgtgagactttgataacttattcttaycctcatctgcaaagaaatagttggatatcttgatttatttctatttaaattggtaaaaccagctgcaacaactggcatttgcaagtgagtgcacacacacagacacatacagacacacagacacacagacacacaaagaataacaataaaataaaaaggcctattagggaagtatattataaacttcattacagagggatggccaagaaagagagccatgactcctttctccatttttataagacagagcacaagttgcattttgcaaggctatggagttgtattttttttccatttataccatttcttgttaaaagtaagacttttttttggttgcatatgcatctacagactctaaatgtaggcaaataagaac

SEQ ID NO: 357933 - DNA, 558 bp, Homo sapiens
ttcaatttcagattttgcaatttaccagaagagggaaaagatgtttcctaaaggtctcagggattccttctatgtcatcaacatcccttttctaaatggacatttcaatgaataygcaaacatgttctagaatcctctcactatttaaaaaataataacatcctcagcccttatatttcccattaagtaccaccatattcgtatactaccttcacagcaaaacccacagagagagttgtctacagagtttgtcattactttctcatctcaaaaatccttcctccagccactgcactcagacatccatgtcctaccatgctgtgaaggctgctgttgccatattctccatattctcaatgatcttcatgttgccatcacctagttttgatctatgatctatgtaagggaaaattggatattcattaaatatcaaaaagattgtaaatatctttttcattaatgtacttagactgctatttatgtgacaaaattaatttaaggatttataaggggtttactatgtattgaacactgtcagactccaaaagaacactaaaa

SEQ ID NO: 357934 - DNA, 621 bp, Homo sapiens
ccatgtcctaccatgctgtgaaggctgctgttgccatattctccatattctcaatgatcttcatgttgccatcacctagttttgatctatgatctatgtaagggaaaattggatattcattaaatatcaaaaagattgtaaatatctttttcattaatgtacttagactgctatttatgtgacaaaattaatttaaggatttataaggggtttactatgtattgaacactgtcagactccaaaagaacactaaaaatcattttcccaaataagttttctttctacttaaaaataaaatatggacaaaaatgaataatatatgcatgctgaagagaataaagaactaaagggaagtgcagaggaagccaagtagcttaggaaatctttctgaagtagttaaattttaagccagggttagaagatagtcaaagsggaataaaaaagcttctttactaaacatctggcattaaattccaaatactatcctatgatattttcattccattaactcccacattttcttcaagatccagcttatacagagacaatctcttttatcagttcttccctgccccatacctgaagcattctatattgttccactttgtacaaggcatttta

SEQ ID NO: 357935 - DNA, 500 bp, Homo sapiens
tatcaacagctaaggtggcaaagactgattggagataaaacagatggtatcctgctgaaacaacaagtgaccaagagtttagtacttcaaattcaacagctgtcaaaatcaggcttgagtctctgtgaccatctctggcctagactatgacagatatcacaacctctgggatgtgctttatcctaagaacctrcacatatggagaccacagggtgtgagctgtttagaaaatgctacagtcaaatcctgcagatattgctgttgctgcaactgacaccttccagggatgatgcttttaatgcctggactctcagagcatgccatctatctgctactcatcattttttgtctgtttctttatttttcaattttcagtcaacgtccatagtgtaaattctccaaatggcttaatcctcaaccatatttgtgtctcttaatgctctgaaccttcttgtcctagtgtagcccatgccactcaccatcagcccgtcccaggcctt

SEQ ID NO: 357936 - DNA, 511 bp, Homo sapiens
aaaatcaggcttgagtctctgtgaccatctctggcctagactatgacagatatcacaacctctgggatgtgctttatcctaagaacctgcacatatggagaccacagggtgtgagctgtttagaaaatgctacagtcaaatcctgcagatattgctgttgctgcaactgacaycttccagggatgatgcttttaatgcctggactctcagagcatgccatctatctgctactcatcattttttgtctgtttctttatttttcaattttcagtcaacgtccatagtgtaaattctccaaatggcttaatcctcaaccatatttgtgtctcttaatgctctgaaccttcttgtcctagtgtagcccatgccactcaccatcagcccgtcccaggccttgtagtctactagcataactcttcccctacaccttctgattggcctctctgtagtcagaaagctctcctaccacttcccatttttctgagtctgtgctttacatttcgcttggcta

SEQ ID NO: 357937 - DNA, 500 bp, Homo sapiens
tatcaacagctaaggtggcaaagactgattggagataaaacagatggtatcctgctgaaacaacaagtgaccaagagtttagtacttcaaattcaacagctgtcaaaatcaggcttgagtctctgtgaccatctctggcctagactatgacagatatcacaacctctgggatgtgctttatcctaagaacctgcacatatggagaccacagggtgtgagctgtttagaaaatgctacagtcaaatcctgcagatattgctgttgctgcaactgacaccttccagggatgatgcttttaatgcctggactctsagagcatgccatctatctgctactcatcattttttgtctgtttctttatttttcaattttcagtcaacgtccatagtgtaaattctccaaatggcttaatcctcaaccatatttgtgtctcttaatgctctgaaccttcttgtcctagtgtagcccatgccactcaccatcagcccgtcccaggcctt

SEQ ID NO: 357938 - DNA, 511 bp, Homo sapiens
aaaatcaggcttgagtctctgtgaccatctctggcctagactatgacagatatcacaacctctgggatgtgctttatcctaagaacctgcacatatggagaccacagggtgtgagctgtttagaaaatgctacagtcaaatcctgcagatattgctgttgctgcaactgacaccttccagggatgatgcttttaatgcctggactctcagagcatgccatctatctgctactcatcattttttgtctgtttctttatttttcaattttcagtcaacgtccatagtgtaaattctccaaatggcttaatcctcaaccatatttgtgtytcttaatgctctgaaccttcttgtcctagtgtagcccatgccactcaccatcagcccgtcccaggccttgtagtctactagcataactcttcccctacaccttctgattggcctctctgtagtcagaaagctctcctaccacttcccatttttctgagtctgtgctttacatttcgcttggcta

SEQ ID NO: 357939 - DNA, 433 bp, Homo sapiens
tactaacaatgtaaaaaacccaaaaagtatatgataatctcaatagacatagaaaaagcacttgaagaatacaacatcaatttctgataaaaattttgtcaagccaggaatagaaagggattttctctacccaataaaactgttagcaagaatctatagctaacttaatagttcacagtgaaaaacagaatgcttttatcttgagatcagaaataaaatgataaactggaggtttataaaaagataaactggaggwtctggtcatgcagacagcatgattgtctgtgaaaaatccgacagaatctacaaaaaacaacttgccagtaactgagtttagtaaggttgtaggacatgatattataatacaaaaatctattgtatctccatacaataaaaataatcagaaattgaaataaaacaaaattacttaaaa

SEQ ID NO: 357940 - DNA, 638 bp, Homo sapiens
ggtgatgcaaaagcaagaaatggaggcctacaggagccaaaatcctgagggagctgaaatacctccctgctcagtagcgctgctttagcactcgctgcttttgtcttccatcctactccttgactgtggattgagatgaagttgtgcaagtacacaacagggcagggtaaccaaagccctggatttctagctggaggtccaaaataaggactcctagggaacaagaaagtactagaaagattgttgagaaagaagaactgagaaaagcagccttatagagttactaatgaattcttaagtctacccctatgcatccttagatgtgatacaccaccacccagatccaagacgactgggcagcacatatgtagtgcagactcaaacaaactgcaaaggatttgaaaactgaattggcactgaaaccacagcctacagaaggcagattggaacttgtgacctgaatcyggcagattcaactgcctgctaaaacaaaaaatatcaacattcccctcaggacttaaacaaaattcagagaatcataacataatactccaaatttccaggatatgatccaaaattacaaagcaaagaaccagaaaagtctcaattcacataggaaaagaaaatgaaccattgcc

SEQ ID NO: 357941 - DNA, 487 bp, Homo sapiens
aattctgtgagataattttgagtggggatgaactcccttgaacagaatctgggggtsagcaggaagtgtgctacagactggagctgggtgcctggcctgtgtagctctgctgggtgcctggccataccagcagacagggagggacatggccagaaagctgtgcttgctatctctgcagggaggcttatggcctggggtaggtctgagttctgtgcacaggctgcctggatctaaacctggtgttgctagtgggacactgtgagatcaagaccagcctcaccaactgcacaggagctgggtgaggtctgctgctgctggctactccccactccccttgtgaactcttctgcacagcagagacagttatactcccctttgatacattacctcagcagcctgagaactacctcccatcccccacagtggctgcagcaggccccacccaagaagagtctgagcccagacccacctaacacaaaggatgtaa

SEQ ID NO: 357942 - DNA, 564 bp, Homo sapiens
tgggaacacagtgtggaagcaacctacagacagccttcctggaacaattcagggtgattgcagtccaccatgaggagyactcctcagatttaggcctgcatgagaggcagagtcacaagtcctccctacttggaacatcaacattcctacagatgaaaagaggtgcctgtctcatctgaatagccagaacactgggacaagagtgagggtgtgagatggatagctttcctgctggcctggaagaggagctgaagtatatcccactcttaccatcataaaatttcatctaattgagagctcccccagccactttcatcaaggctgggacctctgcccaccattgggtgttatatctccccagctgccctagctacgaccagtgcctacccagggataccttccctattggtctgaggcctgaatcatcaactcagtaaataaaatactggggaagaattaaataaataaataagtgtacactatgagagaatgagacacttcaagggatccctgctattccaaacccataggagacagttaacttacccacagaccacacacata

SEQ ID NO: 357943 - DNA, 564 bp, Homo sapiens
tgggaacacagtgtggaagcaacctacagacagccttcctggaacaattcagggtgattgcagtccaccatgaggagcactcctcagatttaggcctgcatgagaggcagagtcacaagtcctccctacttggaacatcaacattcctacagatgaaaagaggtgcctgtctcatctgaatagccagaacactgggacaagagtgagggtgtgagatggatagctttcctgctggcctggaagaggagctgaagtatatcccactcttaccatcataaaatttcatctaattgagagctcccccagccactttcatcaaggctgggacctctgcccaccattgggtgttatatctccccagctkccctagctacgaccagtgcctacccagggataccttccctattggtctgaggcctgaatcatcaactcagtaaataaaatactggggaagaattaaataaataaataagtgtacactatgagagaatgagacacttcaagggatccctgctattccaaacccataggagacagttaacttacccacagaccacacacata

SEQ ID NO: 357944 - DNA, 512 bp, Homo sapiens
taaagaggaagtcaaactgtcactgtttgctgatgatatgatggtttaccttgaaacccctaaagactcctccagaaagctactagaactgataaaagaatttagcaaagtttccagatacaagatgaatgtacaaaagtcagtagctcttctatacaccaacagmgaccaagcagagaatcaaataaaaactcaacctcctttacaacagctccaaaaaaaaaaaaaaaaaaggaatataccaaaccaaggaggagaaagacctctacaaggaaaactgcaaaacactgctgaaaagaaatcatagatgacacaaacaaatggaatcacatcccatgctcatggatgggtagaatcaatattgtgaaaatgaccatactgctaaatgcaatctacaaattcaatgcaatctccatcaaaatgccaccatcattcttcacagaattagaaaaagcaattttaaaattcgtatggaaccaaaaaagagcccatggatagccaaaacaagacta

SEQ ID NO: 357945 - DNA, 588 bp, Homo sapiens
tttctagttttaaagttttgggttttacatttagatcttcaatccattttgagttaatttttgtatatggtgtaaggctccaacttctttttttacatgtggatatctagttttcctaataccatttattgaagagactatcttttcccactgtgtagtcttagctctcttgttaaagatcatttagctgtatacatgaaggtttacttctatgctgtctattctgttccattggcctgtacatatctgtttttatgccagtaaaaactggcataaatactgttttgatgacagtaattttgtaatacgttttgaaatcaggatgtgtgaagcttccagctttgttctttctcaggattgttttggcttatagaacatatattttgtattcctcgtttcattctagtgactctgtgccatccatayaccccctttatctagatctgtggtaaacaacaagtcatctgccctttactgcactgatgcaactcgggtcagatctgtagcttagaaaactgtggaatagtttttatcaggataaagccaactggctcaactcacatacttagtctaatagtatcttaacca

SEQ ID NO: 357946 - DNA, 601 bp, Homo sapiens
catggtttgcatatattctctctgatctccactaaaactcaggaatatataggtgttatttgcatatatatgaagaagtcgaggttcactgaggttgagtgacttgcctgcagttcacagcagtcaagattctagagtttaaggtttcagtgagccaagatcgtgccactgcacgccatcttgggcgagggagcaagactttgtctccaaaaagaaaaaaaaaaaaaaaaagatctaggatcaaaacccagatctttctgagcagtttaccatgcagctttcactcacaccctgtaattcctgcctttgyatctacctgtttttcaaacataccaccatctctaaattctcattgtcacctttatttctctaattctctcacaccctacatctaatccagtagcatatccaattggttctacgttaaaataagttcagagtctgaacgtttctcataactccacagctttatctcagtctcctggaatattgcaatatctttttaactgctctctctccttctgtctttgctcccaacagtctcatgcagagtaatctttgtagaacctgagtcagattatatatttgtaaaatgaatata

SEQ ID NO: 357947 - DNA, 564 bp, Homo sapiens
attatgaatttgaatatatacttataaaaacaatttagcatttctttcacttgaaaatactctccattgatactttcttcaatttctccaggattattctgcagtctttgggggtacttatattgtccatagagatttaatcaatcaatcattgaatctatcaaccattatttcttcctttaattcaagaaatttttatgtagtggctactcttgccctcatgttccttagtttagcaaggagacagacataaaaaaataacgcaaatcatgaatgacacttgaggaaagtgttgttaaggaaaagtaaaggccgctatgagagcatttaacagagaccaaccatcacctggcagatgtgtcacgtgggcttcctaaggatgagtaggagtaagctgggtaaagagaagcragaaagttctgaggcaggaagcccaatggtttcttcaagaacctagaggaggcctgtttagtttggctagagctcagtgattaccttacaagtagcaaaacaccatggaacaattttaggtaatattgtgacatttgtgttttcaaaaagtca

SEQ ID NO: 357948 - DNA, 656 bp, Homo sapiens
aaacattcttcaaatcagatcatatcctgggtcataaaacacatactataaatttttaaacatttaagtaatacaaagtatattatctggccataatagaatcaaacaaaaaattaacaacagaaagatactaagaacatcatcaagtacttggaaatcaagcaataaatttctacatatttcatagaccaaagagtaagtctaaaagaaaagcaagaaatattttgaactgaataaaaatacaacatatcaaaatttgtgggatggtatgacagtaattcagagtgaaactgacaacgttaaatgcttatataagaaaaaagtctcaaatcagcaatttaagctcctaccataagaaactagacaaagaagagcaaaattagttctaagtaagtagaagaaagaaaatagtaaatataagaacagaaattaataaaataaaattcagwaaatctatatagaaaatcaataaaatcagaagctgtttctctgaaaaatcaataaaattaataactctctaataagattgaccacgaaaaaaaagacacagtaaaccagtatcaggaatgaaggagctatcattaccaactaacaactctatacactaacttgacagcttagatgaaattgttcaattgaccaatgactagaaaacc

SEQ ID NO: 357949 - DNA, 635 bp, Homo sapiens
ctggttaacagtattttgtcaactcagtggcccattccaattaaaaataaaaagcaatrtagctttgggtagatttctacctcaggccactgcagaagatagatagtaaaatttaatacaatagtaaaattcacatgtaacaattcttgtacacattttgaaagcaaaacatctaaaaaggtatttgaatgtaagaacctaagatatgtgtaatattttccaatagttactttatcatattaaattttactttgttacacaaagaagatatcggcttagggtatcttctttctctctgtgctttgagaatgcgatttgaaatttgaaatagatatttttgtctaaccccacaagtctacaggcaagacataaataattttacaaaaattatattccaaaaaggggtcatcgtgcataaagtatggattatctatcatagaggaacaaatcttgaaaccaatatattgtatatatatgtaaggaggctttagataagtttcagtttttgtttgctttgttttgtttttgtttgtgtcttccaggactatggtaccattgttcccttccaattccttccttgtgtagtccatcactgaagaaaagaagtactggatatcaaactaatttggtaccat

SEQ ID NO: 357950 - DNA, 526 bp, Homo sapiens
cttttgctttctctccttactcttaaaatttacattatttagtattctctgcatcctcaggcccattatggggttagaatggtaggttttataggttattctcattattcagagccaaggttttttatttctttctacttcctaagttgaaacaaaagttctcagtctacttttaagcttttctttctccttttttcctttggcagtcagcagttttgcttggtttggtttggtttcctgcccataggtatggctctatttgtttatcttggttggtgtttctctgctgtattcatatgttgaatttcttgtatttgcagactgttgtttttccttatttatgtaraattctcaatcattattcttttaaattttatttttgccccatacagtctctcatttctggaattccatatatatgtatgctagaacttcttaacacatcttgcatgcttctcactctgttcttttcttttcttctcttttcttttcctttgtgctttcctatgggtattttctattaccc

SEQ ID NO: 357951 - DNA, 588 bp, Homo sapiens
agaaacagggagactggttaatttataaagaaatgaggtttacttggctcacggttttacagactgtacaggaagtgtgacttgggaggcctcaggaaaattacaatcatggtagaaggtgaaggggaagcaggcatgtccttcatggccagagcagcaggaaattagagaggagagaggtaccacatgcttttcaacaaccagatcttaagataactcactcactgtattagtccattctttcattgctataaagaactacctgataccaggcaatttagaaagaaaagaggtttaattggctcattgttttgcaggctgtacaggaaacatggctgagaaagcctcagaaaactttcaatcatgagggaatcaggcaagtcttacatggctgaagcaggaggaagagaaagaagtgagagttgctacacacttttcaacaaccagatctcgtgagaactcactccctatcagaagaacagcaagggagaaatgtgttccttgacccagtcacctcccaccaggccccttttcagacattagggattacaatttgatatragatttgggcatagacacaggcccaaa

SEQ ID NO: 357952 - DNA, 367 bp, Homo sapiens
acagatgactttcatagccttatactacaattaagtaactttaattatactagtaggatttttatgacatattcagtacgtactcttctatgattttccaaatatttcaagatagtcatgagtatatgtattatgtaattcccctttaaagtttaaatggagatwactcaatcaattgtagttgtaattgatatgtttgttattcataaaaatggagttgcctttctatatatatatatactagttttcttctttaaagcacaacttaaacattccatttgggtttcttcatgagtgacaatttctttttaagagacaaactggattagcaatctaatactgcataaaaacttatcttaaatgtaat

SEQ ID NO: 357953 - DNA, 367 bp, Homo sapiens
acagatgactttcatagccttatactacaattaagtaactttaattatactagtaggatttttatgacatattcagtacgtactcttctatgattttccaaatatttcaagatagtcatgagtatatgtattatgtaattcccctttaaagtttaaatggagattactcaatcaattgtagttgtaattgatatgtttgttattcataaaaatggagttgcctttctatatatatatatactagttttcttctttaaagcacaacttaaacattccatttgggtttcttcatgagtgacaatttctwtttaagagacaaactggattagcaatctaatactgcataaaaacttatcttaaatgtaat

SEQ ID NO: 357954 - DNA, 547 bp, Homo sapiens
gaaagaatttacaacatgtgaaagcaaaatagaatcccagtgtcccaaactcactgtgccaaagaaacaattaagcttgggaactgagtcaccaatactgtttttcttttattcccaaacaagtagctgtaatttcagaactcgttgttatagccttatttcctctcctctatcttttsacatttactttattttatataaaatgtagattcaagagtaagagactatgtaccaatattttcctctattccccctttacacatgtaaattgtagatttaccgaagctaataagactcacgaaagctaaagttgtaggagcagataggtggtaattcgtttacttttcatcataaagggtctaaaacagcacccctataacagaagacaggttaacaagagaaaaacataacacaattattgcatgcacatatgtgcacgccaatatggaagtcatacaaaacattaaaacttaagaacagggccagatggttgatgcttgaatgcccttttaattggggagaaggtagtgggggagcaggagcaaaa

SEQ ID NO: 357955 - DNA, 476 bp, Homo sapiens
cctttatcagcctcctgattagtagggactacaggtgcaagccaccacgcctggctaatttttstatttttagtagagacggtctttcaccattttggtcctgacctcaggttatccacccatgtcggcctcccaaagtgctgggattacagacgtgagccacctcgcctagcttcataatgatttcttattatattggtatatttctgtctgactctcaggagacccactaagatgttacaaagatcaaaccgtctatggaaataatgtttctgtaacaatgaaagggggacatcaataataaaaatcagttgagatattcagtgttttccttacttcatttagtttcatgtcctttctccacttgccttcctcttcatctttttcattgggagcaaattaaaccattgttttgcgacaagcattcctcgaaggcactgatggcagcttttgaaaacaatttcaaactgtaaaaa

SEQ ID NO: 357956 - DNA, 545 bp, Homo sapiens
gatcagagcagaagcacaatcagtaataatgagtaacacagttattcactagtttctaaaatgtggacacaatcctgtgtcactggatgaagggtaaagagttttacttattgagcattacatcctgaaaggcattgagtaattcacagataaaragatttaattatttcgtatgtttctggaggacagatgtcactacctcagttggatgtaattgggagtctgtttgaaagcctaaaagttgaggtcaaagagaaaatgtttctggacttagaagtcccttttcattccttctgattaactctattagaggagatgaatattccccagaggaattggcttgcctcatattaaccgtggcctcaatgttttttcttttcctaaataatcaaatgaccatatatattaagaagttattagtctgacattatttctcaaatgtagaaattatcttaaattaatgtaaatatatatgtttggtacatcaatggagtgaataatatgaatggtattgtcacattttgtccctctggatatttacaaga

SEQ ID NO: 357957 - DNA, 495 bp, Homo sapiens
ctaaggggaacactcaagaaagaaaaaaactttctaaagtcactgcttggtaaataaaaatattcttttggaacagaaaaaataaattgtgagatgctaataactgattaaaaacattttagctttcagcgtatgtatttttgaatgatcttttttcagtaggagcaaggcataattaaacctaaagaatacaaggtaataataaagttcctaagatgtgatgacacagatactcgttaatgagctgtagaaaattttgcttatgacagtgcgtgtgatggtgataataaatgaatgtcwtcaagtggcacctaattagcgtgattaaacaactttagtactcaccagataattcattgaatcaatgtgcttctatttatacatagaacatgtttttcatttgggatcaatgtcttgcctctaaagcacctttcgtagagctctttccttgtttttactctcacgtatctgaccggtctgctatcaggcagcttg

SEQ ID NO: 357958 - DNA, 599 bp, Homo sapiens
ttttccggcagtgttctctttctccacataaactatttcaaacatgtcttattaactggccttttacttctgggctatcctatatgatcttcttgtctttcattttgatgagctcctgtctgttctccagaattcaggcataactggaaaactaaatgcaaatgtggttatgacactctctttacctgcataacaccaatagttgggatttaacttcgatgccacttctttcaataattgaagggcctgagcttcaatttattttactaaagcattagtagtagtgtaagttgtattatgtattccrtccagagaaagcagagagatagattgatgttgtttcactctttccctctgcattagtttattctcacactgctataaagaactacccaaaactggataatttatgaagaaaagaggtttaattgactcacagttctgtaggctgtacaagaagcatgactgagaggcctcaggaaacttacaatcatcacagaaggtgaaagggaagaaaacacatcttcacgtggtggcaagagaaagagagagagaagggggaggaactacacactttcaaaacaaccagatctcatgag

SEQ ID NO: 357959 - DNA, 552 bp, Homo sapiens
tattagagtttttcccatagagttgtttaagcaccttatatactctgggtactaatcccttgtcagacagrtagtttgcaaatatttttgtccattctgtggattgtctcttcactttttcgattgtttcttttgttgtacagatggtttgtaacttgaagtgatcctatttgtccaatttcgcttttgttgcctatgcttgtgggacattactcaagaaatctttgcccacttccatgtccgggagagtttccccatgtattatttcagtaatttcatactttgaggtcttagatttaagcctttgatccatttttatttgtttttgtatatggagagagatagagttctagtagtttcattcttctgtatatggatatctagtttttccagcaccatttattaaagggactgccctttccccaaagtacattcttggcaactttgtcaaaaatgagttcgttgtagatgtatggatttattttggggttctctgttctgttccgctggtctatatgtctgtttgtatgtcagtatcatgttgttttgttc

SEQ ID NO: 357960 - DNA, 552 bp, Homo sapiens
tattagagtttttcccatagagttgtttaagcaccttatatactctgggtactaatcccttgtcagacaggtagtttgcaaatatttttgtccattctgtggattgtctcttcactttttcgattgtttcttttgttgtacagatggtttgtaacttgaagtgatcctatttgtccaatttcgcttttgttgcctatgcttgtgggayattactcaagaaatctttgcccacttccatgtccgggagagtttccccatgtattatttcagtaatttcatactttgaggtcttagatttaagcctttgatccatttttatttgtttttgtatatggagagagatagagttctagtagtttcattcttctgtatatggatatctagtttttccagcaccatttattaaagggactgccctttccccaaagtacattcttggcaactttgtcaaaaatgagttcgttgtagatgtatggatttattttggggttctctgttctgttccgctggtctatatgtctgtttgtatgtcagtatcatgttgttttgttc

SEQ ID NO: 357961 - DNA, 545 bp, Homo sapiens
cataagtcgttttttaaattcttttttcgtctcctctgtgtattttcaaataccatgtcattaggctcacaaatttttttttttgcttgatcaattctgctattaagagactagtatgcattattcaatatgtcaattgcatttttcaactccagaatttctgtttgatttttaaatattatttcyatctttttgttaaatttatcaaatagaattctgaattccttctctgtgttatcttgactctccttgagtttcttcaatacagccatattgaattctctgtctaaatgtcacatagctctgtttctccaagattcgtccttggtgccttatttagtttgtttggttataacatgttttccttaatggtcttgatgcctgttgatgtttgttggtgtttgggcacttattgttatcttctgtctgggcttgtttgtactcatgcttcttgggaatgctttccaggtattaaaaaagacttgggtgttgtaatctagacatgtctacagtaacagggcagcccaaatgcagtaatgctgtgg

SEQ ID NO: 357962 - DNA, 591 bp, Homo sapiens
ataggtgttgtttccagttttgagctattacaaataaagctgttatgaacattcacctgtaggcttttgtttgaacataagttttatttctctaggaataatccccaggggtcaattcgctagattgtatgtttagttttaatgcagaactgttaaacatttttttttccagagtgggtgtaccagttcacaatcccaatagaaatgatgtaagaagcaggacacaactccagaggtggggctcagacacggaaccagattgaggacaagttaacacagggcctggtaagaagcagttttctaattagacatgcccaccaatgtgccatgtcaatttatcattccaatggcaacacccarcttttaccgagtctttacatggctatgacccaatgacccaagttactaccccttccctagaaaattctgcataaaccacgccttaatctgcatgcaattaaaagtgggtataaatatgactgcaaagctgccctgagctacggtggtctgcctactactgggtagccatgctctgcaggagcagtcatggagctgtaactccatcagactgtaacactgcctcttcaatac

SEQ ID NO: 357963 - DNA, 591 bp, Homo sapiens
ataggtgttgtttccagttttgagctattacaaataaagctgttatgaacattcacctgtaggcttttgtttgaacataagttttatttctctaggaataatccccaggggtcaattcgctagattgtatgtttagttttaatgcagaactgttaaacatttttttttccagagtgggtgtaccagttcacaatcccaatagaaatgatgtaagaagcaggacacaactccagaggtggggctcagacacggaaccagattgaggacaagttaacacagggcctggtaagaagcagttttctaattagacatgcccaccaatgtgccatgtcaatttatcattccaatggcaacacccaacttttaccgastctttacatggctatgacccaatgacccaagttactaccccttccctagaaaattctgcataaaccacgccttaatctgcatgcaattaaaagtgggtataaatatgactgcaaagctgccctgagctacggtggtctgcctactactgggtagccatgctctgcaggagcagtcatggagctgtaactccatcagactgtaacactgcctcttcaatac

SEQ ID NO: 357964 - DNA, 337 bp, Homo sapiens
aaaaaaaaaaaaaaccttttcagatagtgaaaagtcagacacacatgaactgattttgccctggggagatagtggttcaaatcataataactaataagaggcttcttttgtgaatcagtcaaaccatcagtttcacagaactctatgatagtaccttagggtcatgaaggtgttgtatcaatagttatctctgtattactcagggttatccagaaaaagaaaataaaggaagagctgttctaggcaactcatacttgggggatattagtgcattcataattaattcatcagatakttattaagcatctattaaatacttgctaaactttgagcaatt

SEQ ID NO: 357965 - DNA, 542 bp, Homo sapiens
gaaaaagtttacaggtttgttatattcacagttcctgcaaacaacaagggggaagaggcctctgagtaatactttattatggtttctgcaagaacaaaaggacaaggcaggaaaagtatgtctaggattggctaatgtgaataatttcagtagcatcyggagtacaggggctgtctctggttgtctggtatctgattctgctggggctattagggctgatacagagtagcccacagtttgatggcccattgaaggaaatggttgaagtatagacttagccacttaaaaaaggcaacttactggccttttgctagtgcatcaaacctggatcaagacagaacacagagaactatgttacatcatgatatcatgatgatcagatcacgaagtataatatgtctgtatatatcagtcatgagcagtagcaaataatgtggctaactgcacaagagcctgaaataaaaagaaatgaaacatcaaagacaaatagttcttggatagaaccatgtatatggctatatggtgaaagcacaaagtgtaaa

SEQ ID NO: 357966 - DNA, 626 bp, Homo sapiens
cataaagttctgctcttgtgcagttcactgtttagtgaggaacagtgctaaataaaaaagcaaaaagataaccaaaggcatgcattgtaaatcagatgatagttaccagagtggatactggagcaaggcccaggamcacagtcagagcaaaatccctgaggtgggagatgataatgtcataggagaacacaaacaaataaacacacaaacaaaatctcccactgtgaagaatatttggaaactgctagattaaacactaagtttgttcctttgttgtaggatctcttgcaacttttgagattctaatatatattttaacgcttcatcagaagagaggcatagagtaatgtactcacttctcataatgatcagtttttcttgatcatcttacaaggcacattttcttcttaggaggagaatcttcctagtggctctcagctagtaattggtctctcgccaaagaaagggaggcgaatgagtttctcatgtagaggaggcaaagagtggattataaaatgcaggtgaaattacatggaactgagtttaagtcacagattgtacaataggaagtgattaaaaaagaaaaaagaaaaaatattaattctgctctcacaggtactggataa

SEQ ID NO: 357967 - DNA, 590 bp, Homo sapiens
gtccggccagatagatctgcattctcatttgtatccaaaacccctctgagcctcaacgtcaccctctgcaacatgcagggatctgtgggggragatgatctctacatgaaatggaataacagtatctggcacaaaggcagacacttaatcaacgctagctcctttcctctccgcagtttattccggggaagaactctggcctgggaaacagcagacctggtccaactcccggctctgccagatcccaagtgactcaaatgcttcagctgccctgacctctgcttcctcgttactaaaatgaaaagcacgggatctacctccaacaacagtcatgggattcaaggacaccaggacacctcccccgtgaaaaccagggcaatgaattcaaacaaagcacattaactaaatctaaatctaaatcgatggcattttgtcccataaacactcagcctgaaagtctctccttcagcttgctgtttgtttttttgttttgttctgttttttggagatgggatatcgctctgtcgcccaagccgcagtgcagtggcgcaatctcagctcactgcaacctctgcctactgggtttaagt

SEQ ID NO: 357968 - DNA, 590 bp, Homo sapiens
gtccggccagatagatctgcattctcatttgtatccaaaacccctctgagcctcaacgtcaccctctgcaacatgcagggatctgtggggggagaygatctctacatgaaatggaataacagtatctggcacaaaggcagacacttaatcaacgctagctcctttcctctccgcagtttattccggggaagaactctggcctgggaaacagcagacctggtccaactcccggctctgccagatcccaagtgactcaaatgcttcagctgccctgacctctgcttcctcgttactaaaatgaaaagcacgggatctacctccaacaacagtcatgggattcaaggacaccaggacacctcccccgtgaaaaccagggcaatgaattcaaacaaagcacattaactaaatctaaatctaaatcgatggcattttgtcccataaacactcagcctgaaagtctctccttcagcttgctgtttgtttttttgttttgttctgttttttggagatgggatatcgctctgtcgcccaagccgcagtgcagtggcgcaatctcagctcactgcaacctctgcctactgggtttaagt

SEQ ID NO: 357969 - DNA, 590 bp, Homo sapiens
gtccggccagatagatctgcattctcatttgtatccaaaacccctctgagcctcaacgtcaccctctgcaacatgcagggatctgtggggggagatgatctctacatgaaatggaataacagtatctggcacaaaggcagacacttaatcaacgctagctcctttcctctccgcagtttattccggggaagaactctggcctgggaaacagcagacctggtccaactcccggctctgccagatcccaagtgactcaaatgcttcagctgccctgacctctgcttcctcgttactaaaatgaaaagcacgggatctacctccaacaacagtcatgggattcaaggacaccaggacacctcccccgtgaaaaccagggcaatgaattcaaacaaagcacattaactaaatctaaatctaaatcgatggcattttgtcccataaacactcagcctgaaagtctctccytcagcttgctgtttgtttttttgttttgttctgttttttggagatgggatatcgctctgtcgcccaagccgcagtgcagtggcgcaatctcagctcactgcaacctctgcctactgggtttaagt

SEQ ID NO: 357970 - DNA, 590 bp, Homo sapiens
gtccggccagatagatctgcattctcatttgtatccaaaacccctctgagcctcaacgtcaccctctgcaacatgcagggatctgtggggggagatgatctctacatgaaatggaataacagtatctggcacaaaggcagacacttaatcaacgctagctcctttcctctccgcagtttattccggggaagaactctggcctgggaaacagcagacctggtccaactcccggctctgccagatcccaagtgactcaaatgcttcagctgccctgacctctgcttcctcgttactaaaatgaaaagcacgggatctacctccaacaacagtcatgggattcaaggacaccaggacacctcccccgtgaaaaccagggcaatgaattcaaacaaagcacattaactaaatctaaatctaaatcgatggcattttgtcccataaacactcagcctgaaagtctctccttcagcttgctgtttgtttttttgttttgttytgttttttggagatgggatatcgctctgtcgcccaagccgcagtgcagtggcgcaatctcagctcactgcaacctctgcctactgggtttaagt

SEQ ID NO: 357971 - DNA, 634 bp, Homo sapiens
cgcctctcctaggaaagtccccgcggcagatacacggactccgtaatggaaactccggcgtgcctaacaacagcgtcactgtcacacaygcgtgacgtttgacagccagggactggtaacccacggccaccgcgcccaagaaaattatttcccatgggagaaagaaaactacgttcagctcctggcaggtcccaggcaagtccgagccaggcttgcagggaggcgaatgctctgtcctgggaaagggaggcagaggttaagggctgttccaccctccagtgacccagatgggaaaggcagctgcgtggacatcaaaatgacagcagagacgtgtggcttttccccagcgtcactgaaacaaagccagcatgggctgccccacactgtttacaggacaatcaattagcaagatggatctcatgattaagagaaactcaatttcttcttgaaagcacgttctagggtggggtgcatccttaccacatcagtcagatgtcaaaaggcagcacgtaaattgaataagggaaggaaaatgccgggcggcctcattcacgtccggcatgttccgctattattgaaaggaaattgagaaattagacagtactgcctattagcttcacaatgccccgtccta

SEQ ID NO: 357972 - DNA, 634 bp, Homo sapiens
cgcctctcctaggaaagtccccgcggcagatacacggactccgtaatggaaactccggcgtgcctaacaacagcgtcactgtcacacacgcgtgasgtttgacagccagggactggtaacccacggccaccgcgcccaagaaaattatttcccatgggagaaagaaaactacgttcagctcctggcaggtcccaggcaagtccgagccaggcttgcagggaggcgaatgctctgtcctgggaaagggaggcagaggttaagggctgttccaccctccagtgacccagatgggaaaggcagctgcgtggacatcaaaatgacagcagagacgtgtggcttttccccagcgtcactgaaacaaagccagcatgggctgccccacactgtttacaggacaatcaattagcaagatggatctcatgattaagagaaactcaatttcttcttgaaagcacgttctagggtggggtgcatccttaccacatcagtcagatgtcaaaaggcagcacgtaaattgaataagggaaggaaaatgccgggcggcctcattcacgtccggcatgttccgctattattgaaaggaaattgagaaattagacagtactgcctattagcttcacaatgccccgtccta

SEQ ID NO: 357973 - DNA, 634 bp, Homo sapiens
cgcctctcctaggaaagtccccgcggcagatacacggactccgtaatggaaactccggcgtgcctaacaacagcgtcactgtcacacacgcgtgacstttgacagccagggactggtaacccacggccaccgcgcccaagaaaattatttcccatgggagaaagaaaactacgttcagctcctggcaggtcccaggcaagtccgagccaggcttgcagggaggcgaatgctctgtcctgggaaagggaggcagaggttaagggctgttccaccctccagtgacccagatgggaaaggcagctgcgtggacatcaaaatgacagcagagacgtgtggcttttccccagcgtcactgaaacaaagccagcatgggctgccccacactgtttacaggacaatcaattagcaagatggatctcatgattaagagaaactcaatttcttcttgaaagcacgttctagggtggggtgcatccttaccacatcagtcagatgtcaaaaggcagcacgtaaattgaataagggaaggaaaatgccgggcggcctcattcacgtccggcatgttccgctattattgaaaggaaattgagaaattagacagtactgcctattagcttcacaatgccccgtccta

SEQ ID NO: 357974 - DNA, 634 bp, Homo sapiens
cgcctctcctaggaaagtccccgcggcagatacacggactccgtaatggaaactccggcgtgcctaacaacagcgtcactgtcacacacgcgtgacgtttgacagccagggactggtaacccacggccaccgcgcccaagaaaattatttcccatgggagaaagaaaactacgttcagctcctggcaggtcccaggcaagtccgagccaggcttgcagggaggcgaatgctctgtcctgggaaagggaggcagaggttaagggctgttccaccctccagtgacccagatgggaaaggcagctgcgtggacatcaaaatgacagcagagacgtgtggcttttccccagcgtcactgaaacraagccagcatgggctgccccacactgtttacaggacaatcaattagcaagatggatctcatgattaagagaaactcaatttcttcttgaaagcacgttctagggtggggtgcatccttaccacatcagtcagatgtcaaaaggcagcacgtaaattgaataagggaaggaaaatgccgggcggcctcattcacgtccggcatgttccgctattattgaaaggaaattgagaaattagacagtactgcctattagcttcacaatgccccgtccta

SEQ ID NO: 357975 - DNA, 623 bp, Homo sapiens
acagtagctctgacaatctaatatagctattgatagaatctctcagccatatcagatttaaattcaagtctgtttcaaacatttaatctttgaaatagggatcaatacattttggagaataattgctttagtatttttccaggctaaccacaaaactcctttcagaacctttctaatgaaataaaaattctctagactaggtcccaagaattctacctttgaagaagtaaaattatctctatttgcaggtgatatgatcttatatatgcaaaatcctgaggaatccactaaaaaactattaggactaataaatgagctcagcaaggctgcaggatatatgattgatatagtacaatcaattatatttctatacattagcaatgaacaatcaaaaaatgaaattaataaagcaattctattcacaatagcatcaaaagcataaatacttaggaatacacccaacggctggccrggtgtggtagctcacacctgtaataccacaactttgggaggctgaggtgggtggatcacctgaggccaggagtttgagaccagcttggccatgatggcaaaacctcatctaaactaaaaatacaaaaattagcagggcatggtggcgcgca

SEQ ID NO: 357976 - DNA, 594 bp, Homo sapiens
tgttcattgattttcacaatagagtttgtgtcttgaacttcaagccttaacaaaggtttgataagcactattcatctctcatcttcttgcataaagtttagttggtgaaattctgccttttttcctagagtacaaaattaagcagaaatagaataggtagagtttagggtgctgcactatttaggaattgctggaattacttgatgcatgcaggaaaaatgtgagaacttcataactggtagtctattgtgaaaatattattgtagtaggactcaaaacagactagagttctatattatatttgactggatactgaagcctgagagcagcttattttctaaaataagtacacagtatgactgtcagaagtgtttscccctctccaaagtctttttctgaaaaggaatgttggcttagttcctgatgacagctgagtggccaaattatggtgctttaatagaccataaatattttaaaaagctgagatgggtatttgcaaagtgagtttctgttaaggtacatgtattctacagccatcttcactcctgcctttcaaaacaggcagttggttgaggaaaaaaaaagatgcataaa

SEQ ID NO: 357977 - DNA, 477 bp, Homo sapiens
aggacgatggggcaaatgtctccagggcatgtcagagaccttcatggcagcccctcccatcacagacctggaggcctagtaggaaaaaatggttttgtgggccaggccccgctgctgctctgtttgtagccttgggacttggcacccttcatcctagctgtggctgaaagggtccaaggtacagcttgggtcatggcttcagaggrtgcaagccccaagtcttggcagcttccatgtggtgttgggcctgcgggtgcacagaaaaacaagaagtgaggtttgggcacctctgcctagatttcagaggatacatggaaatgcccaggtgtccaggcagaagtcttctgcaggggcagagctctcacagagaacctctgctagtgcagtgtggaagggaaatgtgaagttggatttctcatgcagagtccccactggggcactgcctaattggagctatgagaagagggccaccatcct

SEQ ID NO: 357978 - DNA, 563 bp, Homo sapiens
aattttctataatgctctgacctgctacagtggctctgaaaccttgactgcacactggaatcacctagagagctttaaaagctactgatggctagatctcactaccaaagattcagatttatctggtcttaggtgcagcctggacactgagatatttaaaagttctccaggtgattctaatgtgcagccaaggttgagatcaactcatgtagaaaayagtgaagcactaagattcttaagcatggtaataatatgttaaaatttagtttagtttttttgttttttttgttttttccaagacggagtcttgctctgtcgcccaggctggagtacaatggcatgatttcaactcactgcaacctccacctcctgggttcaagcgattctcctgcctcagcctcccgagtagctaggattacaggtgcgcaccacaacgtctggccaattttttgtatttttagtagagacagggtttcaccatgttggccagggtggtctataactcctgaccttgtaatctgcctgcctcagcctcccaaagtgctgggattacaggcatgagc

SEQ ID NO: 357979 - DNA, 582 bp, Homo sapiens
gtataaatgagttctttgacaatctgtactggcagtaggaaaagataaaggagaaggcagaagggatagaccacctgaaggtatggggagatgcaatgtactagtttgaaggttcaagaaggcacattttatttcatacatttgctttgaatcacccagtacagaaagagttttctgtacaggtaaagatggagaaatgtgtttcttggttaaaaaaaattaataaacctttccaggaactttccagaatatctagttaaagacattttctcactgccartttcacagctccatttcacaattgagcctttgatttatatccttttaaattttatactgaaaatacagagatctgcaacttttaaaagcttgaagatgaccaatacactacagcaaattgtgtcttctgtggcctcttatgttgacttcttcaatagagtacaatctccttaagactgttctttattcatatttgcttcccaaggatccaagtgtcctatgagtttatcaattgtgagtggattattcaattgtcaatcacttttccattccttatagtaatttagtaaccagttactgtat

SEQ ID NO: 357980 - DNA, 609 bp, Homo sapiens
caataacatgatacactgacatcatcacacctgggaacttcacttcagtgcatctattctctgaaaagtctattcaagttaaggactgtggcatatgtctgctatatgaatcacttaatgtagggcatccaacatgtgttccaaamtagtcccactcgatgttccacgacaaggagcacaatatgatttacctaaatgtgtgaaatattcctgtgggagactcataatgcatagtcacatagttaagactcttagatgttctagaataagaaacgtttacctacgtctaaatatttttcttaaacttattggaacctaaaatcttctcctttttctaagaactagaagatcatggaacgtattttgggaaactctaccttggcacaatatagcattagctagataacaaaccctcatagactttgtggccaaacatccataccatttgagattatcacacttaaaaatactttctccctctttatgcctgtaaggtgctgaattttagagttaagaaacatatcagaactaaaaataaaataagattcctaaaaaatttagtgaggaggccttcaaacaggtattaagtacattcataactcttcacat

SEQ ID NO: 357981 - DNA, 609 bp, Homo sapiens
caataacatgatacactgacatcatcacacctgggaacttcacttcagtgcatctattctctgaaaagtctattcaagttaaggactgtggcatatgtctgctatatgaatcacttaatgtagggcatccaacatgtgttccaaaatagtcccactcgatgttccaygacaaggagcacaatatgatttacctaaatgtgtgaaatattcctgtgggagactcataatgcatagtcacatagttaagactcttagatgttctagaataagaaacgtttacctacgtctaaatatttttcttaaacttattggaacctaaaatcttctcctttttctaagaactagaagatcatggaacgtattttgggaaactctaccttggcacaatatagcattagctagataacaaaccctcatagactttgtggccaaacatccataccatttgagattatcacacttaaaaatactttctccctctttatgcctgtaaggtgctgaattttagagttaagaaacatatcagaactaaaaataaaataagattcctaaaaaatttagtgaggaggccttcaaacaggtattaagtacattcataactcttcacat

SEQ ID NO: 357982 - DNA, 609 bp, Homo sapiens
caataacatgatacactgacatcatcacacctgggaacttcacttcagtgcatctattctctgaaaagtctattcaagttaaggactgtggcatatgtctgctatatgaatcacttaatgtagggcatccaacatgtgttccaaaatagtcccactcgatgttccacgacaaggagcacaatatgatttacctaaatgtgtgaaatattcctgtgggagactcataatgcatagtcacatagttaagactcttagatgttctagaataagaaacgtttacctacgtctaaatatttttcttaaacttattggaacctaaaatcttctcctttttctaagaactagaagatcatggaacgtattttgggaaactctaccttggcacaatatagcattagctagataacaaaccctcatagactttgtggccaaacatccataccatttgagattatcacacttaaaaatactttctccctctttrtgcctgtaaggtgctgaattttagagttaagaaacatatcagaactaaaaataaaataagattcctaaaaaatttagtgaggaggccttcaaacaggtattaagtacattcataactcttcacat

SEQ ID NO: 357983 - DNA, 527 bp, Homo sapiens
cattttgagtttaggaggaactgatacaatttgcattcactacctgcaggcaagcacamctgtaaacacctgccttgagacagatatgtgttttaatagagcagtaatagtagctttctctctctcatatatggaaatacagcttctaaaccacagtagtagggctaggctttgattttttttcccagtattcctagtgtttcaaaatcaattttctgagcacctattaggggacagacatccttttagtcagtgaaaataaatagatgaatgtgacatattccattccttctctgaactcaccagaagtaggaaaaaatggattcagatacaaggtacaatactaattctctttaacaaatggctatagtgaaactgcgaatctaagtaaaacaaagttgtagaagttcagaggttctatcttagaagaaaatggccctgggaaatgtatttctacttattaaattaaattagatcagacagtcataagttatgtgaagaaaaatcaaataaggcataaagagaga

SEQ ID NO: 357984 - DNA, 660 bp, Homo sapiens
gggaagaaaagaatgaagctggaaaggaagaaggaagagagggaaggagggactaaggagctaagggaagaaggaggggaaaagaaagggatcactctgattggttcttatttatcccaaatacttgtagtactcaatttatcaaaaaaaataagtatgccagtagcaagttttggggggataatcttgctaaatcttcaccagagtaaaaatataaggaagatatcattttaagscacacacttcagatttcagcaaaattctaccccattttccaaaatgcaatggcccagcgtaaggatccccttttcctccatccttctcatcctgatagcctttcacccctttcatactcctgaccacttcattttcagcagagccccacaggaataatagcttctgtcacaagaagtgggaggaatatgatgtaatgctctgggtaattttgttaaacccacttagcacctaatccactcaagtcaaagctggtactggagttatcactcactagactggctttgtgcgcagagcaattcaatacccacacatcttcacaaattactggtacgcgtcttcagacagtaggctgcgacagctgaaaaagatacctcttcaactcctaattttctgtatttttatttcattcttaacacctctttg

SEQ ID NO: 357985 - DNA, 622 bp, Homo sapiens
cacacacctatttctgtctaagcttcaacattagcgtggacccycaagttaccacttgtacaactagaagcatgagtgtttgcagctgggaaaatgaatttttcacacattgctggagtcctaaccctgagcagacacagcatcctcccagtatacaagttttctgagtgaaatcagtgctgctgacaggatccacgttttcaatctatattcatctacacagcatcatatcttcttgggaagggcattgtcatacagttgaagctaatgttctggcaggcttttgtcttgctagtctatcattacaatcccaactgaaccggaaggcctcaggggttttctgttgctctcagtcaatcagaatggcaggtaccgacttttcataacatgctgatccaaaggaggcagtcactgcatggggtttccgtgtttggcctcttttcctccttgtacatgagaaacctggaataattaattggaaaaaaattgagaagcattaggtctgcagtatttgaccaggctatgagtttcaattaatgttcataaatttccagtttcctttctcgctgttatctagcaagctgctgctaaaatttaaagttcaagaagaactttcccagct

SEQ ID NO: 357986 - DNA, 622 bp, Homo sapiens
cacacacctatttctgtctaagcttcaacattagcgtggacccccaagttaccacttgtacaactagaagcatgagtgtttgcagctgggaaaatgaatttttcacacattgctggagtcctaaccctgagcagacacagcatcctcccagtatacaagttttctgagtgaaatcagtgctgctgacaggatccacgttttcaatctatattcatctacacagcatcatatcttcttgggaagggcattgtcatacagttgaagctaatgttctggcaggcttttrtcttgctagtctatcattacaatcccaactgaaccggaaggcctcaggggttttctgttgctctcagtcaatcagaatggcaggtaccgacttttcataacatgctgatccaaaggaggcagtcactgcatggggtttccgtgtttggcctcttttcctccttgtacatgagaaacctggaataattaattggaaaaaaattgagaagcattaggtctgcagtatttgaccaggctatgagtttcaattaatgttcataaatttccagtttcctttctcgctgttatctagcaagctgctgctaaaatttaaagttcaagaagaactttcccagct

SEQ ID NO: 357987 - DNA, 622 bp, Homo sapiens
cacacacctatttctgtctaagcttcaacattagcgtggacccccaagttaccacttgtacaactagaagcatgagtgtttgcagctgggaaaatgaatttttcacacattgctggagtcctaaccctgagcagacacagcatcctcccagtatacaagttttctgagtgaaatcagtgctgctgacaggatccacgttttcaatctatattcatctacacagcatcatatcttcttgggaagggcattgtcatacagttgaagctaatgttctggcaggcttttgtcttgctagtctatcattacaatcccaactgaaccggaaggcctcaggggttttctgttgctctcagtcaatcagaatggcaggtaccgacttttcataacatgctgatccaaaggaggcagtcactgcatggggtttccrtgtttggcctcttttcctccttgtacatgagaaacctggaataattaattggaaaaaaattgagaagcattaggtctgcagtatttgaccaggctatgagtttcaattaatgttcataaatttccagtttcctttctcgctgttatctagcaagctgctgctaaaatttaaagttcaagaagaactttcccagct

SEQ ID NO: 357988 - DNA, 443 bp, Homo sapiens
ttgatcacataataaagctatgatggatgatctaatagaaactagcatctcagagtcaataacaaacttgattctcttagtagatgcagctgattttcagttttgccatttacaagattgtgtgcataataaaagatgaaaaaaagaaggggttctattttgaaaatgagaactcagttacagtatttatctctgttggaaactataatatgtaagcartgtagaatttgtagatagacatatctgcaagtaattctctaagatacttggctgaaaagcacatcaaagaacagggaaataatgagacagtctccagctgttggattcctacagcttttgatttgtgctctaccagaaactccaggttttgatgctgtgttgattatttccatggtaccgaagttgatttgtgcattatttaaaaacagacagtaggcagcaaa

SEQ ID NO: 357989 - DNA, 443 bp, Homo sapiens
ttgatcacataataaagctatgatggatgatctaatagaaactagcatctcagagtcaataacaaacttgattctcttagtagatgcagctgattttcagttttgccatttacaagattgtgtgcataataaaagatgaaaaaaagaaggggttctattttgaaaatgagaactcagttacagtatttatctctgttggaaactataatatgtaagcaatgtagaatttgtagatagacatatctgcaagtaattctctaagatacttggctgaaaagcacatcaaagaacagggaaataatgagacagkctccagctgttggattcctacagcttttgatttgtgctctaccagaaactccaggttttgatgctgtgttgattatttccatggtaccgaagttgatttgtgcattatttaaaaacagacagtaggcagcaaa

SEQ ID NO: 357990 - DNA, 443 bp, Homo sapiens
ttgatcacataataaagctatgatggatgatctaatagaaactagcatctcagagtcaataacaaacttgattctcttagtagatgcagctgattttcagttttgccatttacaagattgtgtgcataataaaagatgaaaaaaagaaggggttctattttgaaaatgagaactcagttacagtatttatctctgttggaaactataatatgtaagcaatgtagaatttgtagatagacatatctgcaagtaattctctaagatacttggctgaaaagcacatcaaagaacagggaaataatgagacagtctccagctgttggattcctacagcttttgatttgtgctctaccagaaactccaggttttgatgcygtgttgattatttccatggtaccgaagttgatttgtgcattatttaaaaacagacagtaggcagcaaa

SEQ ID NO: 357991 - DNA, 556 bp, Homo sapiens
aacaccaggtatttaccccaaagcatcttccttctctctgaatggtagaattatgttaacaacttccccagggacaaatataaaatctctgtttaaaattgacttaattatattttaagttagtataagaagagaccatacgttaactccattcaaaacatttttgtttatcagtggtcagatttaaattttcatagttatgaaattattagataacaaaattgtgatgaataggagtagctatttattgataaatgatcagagaccgattatagctactatatttctagtagtgatccttttataatacaggatatatttttctcttcaaagccattaagtattcttaacagaccatttcaagtctggttccataagaataaacacaaaaatatttagagttggcgaccatgatctgatacattacatgaatgctaagaagaaaaaagatttatggagcgtctgattgcatataaatgaattgcaatatagatgaaaggaagcaaagacaycagtcatgcacaatataaataatatgtcctagtagctaatcacc

SEQ ID NO: 357992 - DNA, 560 bp, Homo sapiens
ctttccttgtattatcttgatagtctctgacacaaagatggccaccgctgcaactacccataaacagtgaggccagccttttgctactacatcagtttccttacttaggtatgccactggttgtggggttgtcccacaagtctgagtaaggactctgagagctatccctgctctctctgtggcatgtaaagagaagttttgtcctgtcagaaggcttaaagctgaagcttgtactagggcctgctttaaggttttgaaggctgtttctgcccckggttcccattctactagatgagtatttcccctctgggtttccttgattagagtatagaggggcctggctatctcactgtatccagggatccatagtcggcaaaagctggtgattccaaggaacccccacaagagttttaatgtcttagggcaaggataagccagtataggctgtattcattccttgctgagggccctggtccctctggctaagattaggcctagatatttgacctgctgtaggcaaagctgggacttctacccagacaacttgtacccttgattag

SEQ ID NO: 357993 - DNA, 581 bp, Homo sapiens
gggcggcttgtttcttgttggacaatcttttttaaagtgtcctagtaaaccacaatgataacaagccctaccgggtgattggcctgctccattttctgtcctctctgagtcaccaaggtttgtttgtctgagggccatgactaaggctgcagccttccctgatctcgcttttccttttgggcctgttcctcttggtccctattatagaacactgagattgccaggttaataatgcttccaaattttgttcggggcccagggcttgcttttggagctttctcctggtatctgcagctgattgggtaataaacttatcttttagaatcaattggccctcaattgattcaggtgacgggggagtatattttcttaaggcctcccatagccactcgaggaaggcagaaggattttcttcctttccctgagttatggtggacatcattgaataattcacgggctttttcctaattctccttagttcttctagaacacaggtsaacagatgtttgcgactccagtccccatgatctgagtcaaggtcccagtggggatccatactggggacagcttgctgaccggta

SEQ ID NO: 357994 - DNA, 580 bp, Homo sapiens
gtctacattaacatgacttggctattcagttgtcttcagtgggtctccttttcagggactgtgcagctccagcacatgtttgatttttcattccaggaatgttgagaaagacccatcaacctttccatgggaagcatcaatagtcagcatgtgccagaggattcttttaatcctcctctcaaaatcaccaccttgttgttatatccaccaatcctgagctgttggatcatgatccatacccagtcctaataaagcacctgttttgaaagttatgctttatatcacacttccaattatcaaggaattaccatcttactrtctccctgcaaaccctgccaccagggactggcacagctttgtgaggcggtgttcatccttacctcggtgagaagtaaacttggctttgtcttagcagtttgtgtcggtgatatctggggagccaggtttaacaaatgtctagaagtaatagagttccacaaaatactcaataacaatctttattgtagaacaaagtttatgaaatctcatttcataatacttatttaatttctttttcctgaaaacaacacatttgtaaaac

SEQ ID NO: 357995 - DNA, 544 bp, Homo sapiens
tgcagtccaggaactgggaactgagccctctaaaattttccagaaatgaagccagttgtctgaatccaccttataygacaatcaaaccctcaaaatcatcaaacaaaataaaagaaaaaaacatccaaaggccagcagcctcaaagattgaaggaacataagcccacaaagacaataaagaaccagtgcaagaaccctgacaacacaaaaagccagagtgccttcttttcttcaaatgactgcaccactactccagcaagggttttgaaccaggctgagatggctgaaatgatggaaatagaattcagataatggatataaaaatatcattgagatgcaggaatacattgaaacccaatccaaggaagctaagaatcacaataaaacaatgcaggagctgacagacaaaatagccagtagagaaaagaacataacaaacctgacagactgaaaaatacactatcagaatttcataatacaatcacaagtattaacagcagaatggaccaggtcaggaaagcatctcagagcttaaagactgact

SEQ ID NO: 357996 - DNA, 547 bp, Homo sapiens
aattgcaacaaaagccaaaattgatgaatgggatctaattaaaaaaaaaaagagcttttttcttttttgataccgagcgtcactctgttgcccwggctggagtgtactggcactatctcggctcactgcaacctctgctgagaattgtttttcttaacctgtgttccttagacagcaaagttagtgaaaatttctcagcaggattatatacagttgatctgtatttctgcttttcaaaagtaatgcatgtgtatgcctgtgtgtgtgtcttggcctatttattttaatatggatagtctaatataaaatttgcttagttctatcttttttctctttgagagaaacattgggatagagtatccagaagtgtctgcacccacaattgttaataaacagcttctaccaacacagagcctaggcataattaattatggagatgagagtctatgctgcctcagttctttaggttatatcaagtttttttaccagcagcaggttatacagacgttagtaggtctccccacaatgccccccaaccataacacta

SEQ ID NO: 357997 - DNA, 577 bp, Homo sapiens
cattttagatcatctgagatttatgttctttgatttttcatccttcagttgtgtgaactgtactatttggagatcaggggacaaaagtatttttcaaatatttatgaagagtaatagaagcatgtggattcaaacaaggaagcacaggaaagagcaacagggatgactgatatatcaggacgtgaaaagatgctctttaaattacacacacaaaaaatagcacaaagaatgcaaagccttactgaccaaggtttttgttgctctttgttatttttttttagtctaaataagtaagatgaccctatcaaatagggaatgaagttagggaatatggaagcaggaggggagtactcttttttgactgattttgtccttttctccagaggcactcctcttggtcaaaagcaccaagactgcttgctgacaattgcaaaatttctctgtataaactttaaagagtggttgagaacaagacaggggtatgacgactggaggtatgtaaagttaccyttatgcaaggtaaactttgttagttatcccgaagccatagcatagaggctaggccaagttggtgaca

SEQ ID NO: 357998 - DNA, 551 bp, Homo sapiens
ccttttagttcactgttacattgttacatgttagaataagccaagaacttttaaactgcagagtcttaattaatttctatttatatttttctagaagtaaaaacaaagaaaacaaactcaaaaataatcacattgaaaatcagtcaagaacatatatgagaaatgtggcccctatcacaaagcgctttatttagagagcataaaaaggaaagatgccttttgaacatcaaggacaaatgttttgttccacctaaaggtgactttcagcagctcaatttatctagytttcagcttctatgttagccatagtaaaatagaaaattacttattgaaaaacattgatgaatagtttaagatttcttaacataaataatgtgtatgtatttgtatttatatgtgtgcatatagatgtaggtgtgtgtgtatagtgggtgtgaatatgtgcacttaattggagctatgtaggaccttctactaatgtgcattaataagaaataattcacctaagtatgtttctggatttggggaatgcaaaagtttcaaatcaacat

SEQ ID NO: 357999 - DNA, 526 bp, Homo sapiens
tttgttaaaccaaaacttacatacagtagtgtttaaaacttttgagaggagttacaaataagcaaggaggaaggagaggctagaaggaacctgwggaactgaaatgaagtcagaattatcactataaactcatgtttaccttaatctgttaaaagacagatgaaattaaaacaaattgtagacatatattgcttggtttacatacctacatttctagctctgttgctgtgtgggcctagaagaaatgacactctggtaacaatgagaattcctaaagccaagataattgtttctattaccattcttcaattaaagcaaggagagatggctgacgctagcactgtggtagagaaaataccaaatgttcctggggcatcttgtagtgcatgaaaataaagaaataaaaaaaaaaaaacacaggtgatagtatcgtgtcaaaaagcttttctacaggagtcaagtagaaagagctactaattgccaaaactaagaatttgatcaataaaataggtattgatagcattaa

SEQ ID NO: 358000 - DNA, 587 bp, Homo sapiens
aaaaaaatttaaaataatgacaaaatactacaaaatgaaaattaaattaggtggatgagtaccaagaaaattataatgcaccaaaattggtacaaaaaatgtaaatagaccaaaagtaagctattacaaaaatgaaattatgggaagaaaagttgttcccttcccaaattttatctcttccaaaaaattaattcctaccttttgtractttttgtctcacaaaatagaaaaagaaaaatagaaagctgttcagattcttttaagaggctactatattcttgattccaaatccacatacatgtataaggataatacaagaaaataaaactgaccaatttgtagacataaatgactaaatattaactaaacaagtctagacatatatatcaaacagcaatgtgttatgatcaaattggtctgattccaatataaacattattcaagaacagaaaaaatgaatcactgtttttatcatactaatacactagaggaaaaaatattattagatactgagagaatatttgatgaaattcaataaataaaacatcttaataagctaggagcaaaaaagggaatgtcccaatatg

SEQ ID NO: 358001 - DNA, 510 bp, Homo sapiens
aaaattaattcctaccttttgtaactttttgtctcacaaaatagaaaaagaaaaatagaaagctgttcagattcttttaagaggctactatattcttgattccaaatccacatacatgtataaggataatacaagaaaataaaactgaccaatttgtagacataaatgactaaatattaactaaacaagtytagacatatatatcaaacagcaatgtgttatgatcaaattggtctgattccaatataaacattattcaagaacagaaaaaatgaatcactgtttttatcatactaatacactagaggaaaaaatattattagatactgagagaatatttgatgaaattcaataaataaaacatcttaataagctaggagcaaaaaagggaatgtcccaatatggcaagtattatgtaaaaaaaaaaaaatctacttcaactgcagttgaaactttagaaccgccccctagtaacagccacaaggcaagtctgcccattagcaaaatgac

SEQ ID NO: 358002 - DNA, 510 bp, Homo sapiens
aaaattaattcctaccttttgtaactttttgtctcacaaaatagaaaaagaaaaatagaaagctgttcagattcttttaagaggctactatattcttgattccaaatccacatacatgtataaggataatacaagaaaataaaactgaccaatttgtagacataaatgactaaatattaactaaacaagtctagacatatatatcaaacagcaatgtgttatgatcaaattggtctgattccaatataaacattattcaagaacagaaaaaatgaatcactgtttttatcatactaatacactagaggaaaaaatattattagatactgagagaatatttgatgaaattcaataaataaaacatcttaataagctaggagcaaaaaagggaatgtcccaatatggcaagtattatgtaaaaaaaaaaaaatctacttcaactgcagttgaaactttagaaccgccccctagtaacagccacaaggsaagtctgcccattagcaaaatgac

SEQ ID NO: 358003 - DNA, 600 bp, Homo sapiens
tgtggagtgatgttggtgatggtttaaatgtgtttctcaaaatttatgcgttggaatctttatacccattacaacaatsttgggaggtagggctcagtggaggtatttaggttatgagggttcagccctgataaatagagtaatgccattataaagggcttgatgagggaagttactgtctcttgccctcctgtcctccaccacgtgaggatgcagcaagaaggctcttgcaagatgccagtcctttgagcatgacttctcttcctttagaactgtaagaaaatgaatttccctgatttataaattgtccagtcagtgctgttctgttatagcagcacaaaacagacaaagacagagaggcaaacggcttttggagaaatggggaagtagaattaacagggaattaatgaatgtatttatgtgcttcgtgatcacttccacttatagcctctgggaagactctgcaaatagagagtacaaagcatgtgaagacccatgtttcatggatcccaagtgtaaataataaaaatgaaattgcaatcaacattgctggaggaaaaattgaattacctttatattatctttatataaaatgatatt

SEQ ID NO: 358004 - DNA, 537 bp, Homo sapiens
tgtcttttttcattctcctccttttgtatgtggagtgatgttggtgatggtttaaatgtgtttctcaaaatttatgcgttggaatctttatacccattacaacaatcttgggaggtagggctcagtggaggtatttaggttatgrgggttcagccctgataaatagagtaatgccattataaagggcttgatgagggaagttactgtctcttgccctcctgtcctccaccacgtgaggatgcagcaagaaggctcttgcaagatgccagtcctttgagcatgacttctcttcctttagaactgtaagaaaatgaatttccctgatttataaattgtccagtcagtgctgttctgttatagcagcacaaaacagacaaagacagagaggcaaacggcttttggagaaatggggaagtagaattaacagggaattaatgaatgtatttatgtgcttcgtgatcacttccacttatagcctctgggaagactctgcaaatagagagtacaaagcatgtgaagacccatgtttcatggatc

SEQ ID NO: 358005 - DNA, 600 bp, Homo sapiens
tgtggagtgatgttggtgatggtttaaatgtgtttctcaaaatttatgcgttggaatctttatacccattacaacaatcttgggaggtagggctcagtggaggtatttaggttatgagggttcagccctgataaatagagtaatgccattataaagggcttgatgagggaagttactgtctcttgccctcctgtcctccaccacgtgaggatgcagcaagaaggctcttgcaagatgccagtcctttgagcatgacttctcttcctttagaactgtaagaaaatgaatttccctgatttataaattgtccagtcagtgctgttctgttatagcagcacaaaacagacaaagacagagaggcaaacggcttttggrgaaatggggaagtagaattaacagggaattaatgaatgtatttatgtgcttcgtgatcacttccacttatagcctctgggaagactctgcaaatagagagtacaaagcatgtgaagacccatgtttcatggatcccaagtgtaaataataaaaatgaaattgcaatcaacattgctggaggaaaaattgaattacctttatattatctttatataaaatgatatt

SEQ ID NO: 358006 - DNA, 594 bp, Homo sapiens
caagcaggttgccactgctggctggagtggcctgcttttattcccttatttggccccacccacatcctgttgattggtccattttagagagagctgattggtccatgttacagagagctgattggtccattttgacagagtgctgattggtgtgtttacaaacctttagctagacacagagtgttgattggtgcatttacaatcctttagctagacagaaaagttctccaagtccccacctgacccagaagcccagccatcttcacctctcatttctgcaggctattcaagaagcatagcaacttctgcttctgggaaggcctcaagaaacttgcaaacattgtagaaagtgaatggcgacccaggtgtcttacatggtgcagcaggagcaagatagtgaggggaaaggtactacayacttttaaacaacctgatgtcatgataactcacttactcactatcacaagaacagcacagaggggatggtgctaacacatccctgataactctgtctccatgatccagtaacctctcatcagaccccagcttcaacactggggattacaattcaagatgatatttgggcagggacac

SEQ ID NO: 358007 - DNA, 576 bp, Homo sapiens
agaactgtgaaaagagcctaagggacatgtgataccctacagtggaccaacatatgcactgtgggagtttcaaaaggagaaaagagagacaaaggggcagagagaatatttaaagaagtaatagcccaaaacttcccaaattagatgaaagatatgaacataaatatgcaggaagcttagtgaactccaagtaagatgaactaaaagagacccacaccatgacacattataatcgaattgttgaaagacaaagagagaaagttttgagaaagtttgaaaaaaataagagagaagcaatttattatatacaaagtatcctcaatcagattatgagcagatttttcattagaaactttggaagccggaaatattgaggccaatgtattcaaagtactaaagagaaaaaaaaggcaaaaccaaacctgtcagccaaaaatcctatatctgacaaaactgtccttcaagtgaggaaaatattaagacaytcccagataaataaaagtgaaggaattcatcactactagacctgccccacaacaaatactaaaagaaatcctgaaggttgaaataaaaata

SEQ ID NO: 358008 - DNA, 643 bp, Homo sapiens
agtttaggagcataggtagaagacgccaattacaccaaccacagtgggtgaaaaagaacagaaaataagttatttattgagaaaaagaatgaatgaataaatgatgaattcctatagtgtgttgattaaagttatctgagatatgtgataagttccaaacatgatcttgagaaaatctttgttaaaatcctgtaataaaaaggtggaaacttttccaattttacaaacacaaagatatatggaacctataaacgcttttatttatggaaaacatgaaactaagaaaacttccacaagttagaggaaacaatactagattttcccaggaaaactcttatccttgaatttaagctgagctactcatcaatatttaagcatgcatagcattgcaagttcaaagtaatatgacttctggcttttatgaatgtataactataattaatacaatccaatatttaaaaatgtgttcaggtttaaaaagaatatttcattttaaaccatatgttcacaacttggtcattcatcatatggtatgcaatgcctgttgcttacaggtaggtttgacagtctatcagataataacacacgtatcttttgtatgttttattamtgcttaagttaatcctgatgtggtccaaattag

SEQ ID NO: 358009 - DNA, 555 bp, Homo sapiens
tgtaataatacaatatttcacctccacatgcaattgacaaagttcttatgaaagaatcaacattcaaccaatattccatgagttcaagagacattgattgacatccttctaaayagctcaacggcaccgctctgagcagtgagcttactgtggtgaatgaacaggaggaaatacctgcattaatgatgctaaagggagttagagagggtaaacaaataaaaaccactatcagaacatatgtggtgaggaatgctgaacacaggaaggaagaagcaggtgaggagacccattctatcaggtgtggaaggaggctgattttcacagaggcctgaagagacgagtgagggtgccctgaagattcttgggtgtaccaccttccccaggaggtccatacagggccgaggccctgaggcaagaccatgctgcacaggtatgaggacaatcacggaggtcatgaggactgagatgacaaagaaaagctttttaagtcaattgcagcaatttccatttctcccccatctctaaaatgtttgacaattcccctatgctgattta

SEQ ID NO: 358010 - DNA, 536 bp, Homo sapiens
ttcctataatgtaagactggcacgcgtgaacctttagtagatactgccaaaatgttttccactatggttgtataaatttaccctcccacttactgtgttgagagttccagttactccacaaagttatagacaacgagctttgtcttattcatttcagccttccagatgggtatgtagtgtcatagcctgtgtatttgttttaatagaaggggaagagttacttttattatttgtgtttgttttaaaatatttttatatttttaactggtttcttgcataaattttagccagaaataagtggcaaaaatagtacaatgcatttttctatatcgtcactcagcatctccaaattttcactttccatgcaacaacaacaaaattactataatcaggaaatccacatcaatgggatactactaaatagtctaaaaatcacatccacattwctgattgttccctaacgtccttttcccgggccagaatccaattcagaaacaacattgcacattgatgtgctaactccacagcctccccca

SEQ ID NO: 358011 - DNA, 619 bp, Homo sapiens
atgcctttccttatcccagcaaactgtggcatttagaaccaaaatctaaattctttgcctttgaaatgtaaattttctagctaggactcatccctttggaaatgacaatttagggtggtctagctcacaattgcttagggcaatggaacagacaattgaaaaattggtaatctcaaagggtaggaaaaaaattggaactgtcaaatagaaaatcttaattaaaactttaagatctttgcatctatctgtatgtttatgtatgcacatctgtttgtatatgtrtgatatttttctgcttccaaatagtgtacaactaatttattaaattctttgaaggagttctgttcaaattggcttagggataaatgagttctcatacaaattaagtatttacaaaaccttcagaaaagtagaaactgacccaatattttcctacattcatgtgatttggtttaatttttggcaaataaaagctggttttaacattttagtaaaataaaatagaaatgtcttcaaaattgtcagcattaaaaacgcacgcacacgtccatttttacctaaatttactattagtcaacaagcttatggtatctcctagatgtctcaggtaataaaacta

SEQ ID NO: 358012 - DNA, 596 bp, Homo sapiens
agaaggaaagaattcacccaaatcttcaggtgttaaaaataagttatttgatgcatttcagtcaaggaagtaaaaagacagaggaaagaaccatgtttaaagtcttattttgggggccttgagaagagaattcayccaaatctttaggtgttgcaaacacagtatgatggcaagtctttggcttggcttcttaacctcaataggctttgaaatatctaatctgaaattccttgtcaaaagttccagcaaagcacacttaaaatgttcccatataggcaatcactattcttggtacacttaataatcaggctatgtttaatgagactagtcctattttgcagacaaattggtcttatgtggttatcttcagtaggattggcagtgacagtaaagagaaagataatgtttcagaagaaaatggtacacctgttactagatttagccctgttcatggttttgaagctttttattatttacctgtaaactggactggacctgaacccttctgttttcctacagtcccgttttctcccacttggcatctctgagaacaagaactgctctgtccctgaagccctacaggctgaagctggaca

SEQ ID NO: 358013 - DNA, 575 bp, Homo sapiens
agaaggaaagaattcacccaaatcttcaggtgttaaaaataagttatttgatgcatttcagtcaaggaagtaaaaagacagaggaaagaaccatgtttaaagtcttattttgggggccttgagaagagaattcacccaaatctttaggtgttgcaaacacagtatgatggcaagtctttggcttggcttcttaacctcaataggctttgaaatatctaatctgaaattccttgtcaaaagttccagcaaagcacacttaaaatgttcccatataggcaatcactattcttggtacacttaataatcaggctatgtttaatgagactagtcctattttgcagacaaattggtcttatgtggttatcttcagtaggattggcrgtgacagtaaagagaaagataatgtttcagaagaaaatggtacacctgttactagatttagccctgttcatggttttgaagctttttattatttacctgtaaactggactggacctgaacccttctgttttcctacagtcccgttttctcccacttggcatctctgagaacaagaactgctctgtccctgaagc

SEQ ID NO: 358014 - DNA, 613 bp, Homo sapiens
ggtcttatgtggttatcttcagtaggattggcagtgacagtaaagagaaagataatgtttcagaagaaaatggtacacctgttactagatttagccctgttcatggttttgaagctttttattatttacctgtaaactggactggacctgaacccttctgttttcctacagtcccgttttctcccacttggcatctctgagaacaagaactgctctgtccctgaagccctacaggctgaagctggacagcttgacrtaaatttcagcggcttgtgcctaacctgcagttcactcagagagttcaccaaaatgctcaatgccataactggagattgatatggtttggctctgtgcccctacccaaatctcatgttgacttgtaatccccagtgtggggggagggacctggtgagaggtgattggatcatgtgggcagatgtcccccttgctattcttgtgatactgcgtgagttctcatgaggtccgggtttttgaaaatatgtagcacctctccctctgctctctctcccctgctctgctatatgaagatgtacttgtgtccctttgcccttccagcatgattgtaggtttcctgagacctccccaaccactc

SEQ ID NO: 358015 - DNA, 575 bp, Homo sapiens
aaaatgctcagtcttaaattcctgagttttcttctaggttcttcttgctaattgttgctgggattgttgatattatcttatttttaggagatgaagtcagtagagcaacgtggtgggaaaattgtgctatgtttctcagagcatctgcttagagaaggttgtgtcctattttgaattgttttaagatcttgcaactctatgtytgtaaaaatgattttaagaacagagtcttacttttttaactttttcttaggcaatgtcatgtcatagtttgaagatggggattttccatgagtgagagcatggatagattttatttcataccatgccaattgtctaatgattaatgtctctccatcccagatactgtcattagcttattcatcattcttcatttacagaactaagagttttcatctttgccatgggcacagtaatacagaaacaagttagaaaaggtttctcttatatctatatgtagatacattttgaattcaacattttactgattttatagttgtctgttttaaaattatactagcatgcagtgttccattctggatttaaacaaagga

SEQ ID NO: 358016 - DNA, 552 bp, Homo sapiens
cataagcaggaatgtcaggcaaccatcaggtgagggtcaggcagttgttacactattcctctaaaataataattggtgcaggcaggccagggaaaggcagcctcctgatagatagaaaacacctgaaactggtgatcaacagcttcccaataagatctcaagagctgggtgagtgggctcaggactacgctttgagagacaaaatggcagagtttaactggtatatgaccttctaggaacatttggctggtaagggaagaacgcctcaagtgagcaggtgtacagctccagttacacactgcctatgaagcccctcccaagtactagcaggccactgagcatgtggatagcccaccccaagggaaggaacaggggagaagggacgcaagccaccagaagcatgccaacatataaaaccctaagtgacaggtccaatcatgcacttgatccctcaggtcgccyactagccctcatccaagtatactttgctttctttcattcctgctctaaagctgcctcagtctctccttctgccttatacccatcagtcga

SEQ ID NO: 358017 - DNA, 574 bp, Homo sapiens
gcacctgtagtcttagctactcaggaggctgatgtggcaggataacttgagctcaggagtccaaggctgcaatgagctatgatcacaccactgtactgcagcctgggagacagagtgagattctgattctttaaaaaaaattaacaccagttatataygatatctttgagaagactgagaaggaagaaacactttcaattcatcttgtaaagatatttttgctctgactttatcaccagacccaaagacatcacaagagaagaaagtcacagagcaatatatctcatgaacatagatgaaaaaaatcctcaacaaagtgttagcaagcctgatccacaaatatagaaagataattatactccatcgccaggtttacctagatatgcaaggccattcaccattcttaaattgaacaatgtaatctcccttatcaataagctgaagagaaaacatattgtcgtatccattgatgcataaaaagccatttgacaaaatacagcacccattattattccagcaatttaagaatagaggggaattacttcaactgataaaatgcatgtagaaaaaaccc

SEQ ID NO: 358018 - DNA, 595 bp, Homo sapiens
tgatattatattaagcaaaacaacttttaggatgctattgagaactaacagaattatctagcagctatgacagtggtttgaaatgggatgctagtggtaggggttgtagggagagggacaattctgaaattattttaaacattgagcccgtggaatttgctgttgagatggcagtgctgtggagtttgctctcaaagccctcttggagaaggtgagctcattcactggcaaaggatttggtttcagagatgaactgagtctaatagaagcttcaacccaattttcacaatttagcttttgaagtttggagcaattaacccattatagcagaataatttggaacatgagttgagaatcagaaaaatattctcttagtctggaattccatggaactggtagaagaattaagctaacggcacaaaacagcctaaaagtgtattggatgtgatggaatmaaatctgtcacttcttcacactagttgtctaaagaggaaaggacacaggtaattgccataaagcattcattctgaaaagtggacaaagggaagcattgtctgtagcaaatttcaaatcctagtgtgcagatgcactgtgg

SEQ ID NO: 358019 - DNA, 624 bp, Homo sapiens
gagctctaaatcttgaaacaaatcctggaaacaaataaaaacagaacctctttaaagcatatatctcagaggacctataaaacaaaaatacaatttaaaaaacaaaaacaaaaaamcaaggtacacaggcaacaaatagcacaataaatggaatggtacctcacatctcaaaaggcctaaatgctcctcttaaaatatacagaattgcagaatggatgagaattcaccaagcaactatcttctgctttctttcaagaggctcacctaacacagaaggactcccacaaacttaaggtaaagagttggaaaaagacatttcatgcaaatggacaccaaaagcaagcaggagtaactattcttatatcagacaaaacaaatgttaaagcaacagccatttaagaagacaaagagggagattatataacgataaaagaccttgtccatcaggaaaatatcacaatcctaaacatatatacacctaacactggagctcccaaatttataaaacaattactaatagtcctaagaaatgagatagacagcaacacaataatagtggaggacttcaatactccaccaacagcactagacaggtcatcaagacagaaagtcaacaaagaaaca

SEQ ID NO: 358020 - DNA, 624 bp, Homo sapiens
gagctctaaatcttgaaacaaatcctggaaacaaataaaaacagaacctctttaaagcatatatctcagaggacctataaaacaaaaatacaatttaaaaaacaaaaacaaaaaaacaaggtacacaggcaacaaatagcacaataaatggaatggtacctcacatctcaaaaggcctaaatgctcctcttaaaatatacagaattgcagaatggatgagaattcaccaagcaactatcttctgctttctttcaagaggctcacctaacacagaaggactcccacaaacttaaggtaaagagttggaaaaagacatttcatgcaaatggacaccaaaagcaagcaggagtaactattcttatatcagacaaaacaaatgttaaagcaacagccatttaaraagacaaagagggagattatataacgataaaagaccttgtccatcaggaaaatatcacaatcctaaacatatatacacctaacactggagctcccaaatttataaaacaattactaatagtcctaagaaatgagatagacagcaacacaataatagtggaggacttcaatactccaccaacagcactagacaggtcatcaagacagaaagtcaacaaagaaaca

SEQ ID NO: 358021 - DNA, 624 bp, Homo sapiens
gagctctaaatcttgaaacaaatcctggaaacaaataaaaacagaacctctttaaagcatatatctcagaggacctataaaacaaaaatacaatttaaaaaacaaaaacaaaaaaacaaggtacacaggcaacaaatagcacaataaatggaatggtacctcacatctcaaaaggcctaaatgctcctcttaaaatatacagaattgcagaatggatgagaattcaccaagcaactatcttctgctttctttcaagaggctcacctaacacagaaggactcccacaaacttaaggtaaagagttggaaaaagacatttcatgcaaatggacaccaaaagcaagcaggagtaactattcttatatcagacaaaacaaatgttaaagcaacagccatttaagaagacaaagagggagattatataacgataaaagaccttgtccatcaggaaaatatcacaatcctaaacatatatacacctaacactggagctcccaaatttataaaacaattactaatagtcctaagaaatragatagacagcaacacaataatagtggaggacttcaatactccaccaacagcactagacaggtcatcaagacagaaagtcaacaaagaaaca

SEQ ID NO: 358022 - DNA, 587 bp, Homo sapiens
taccaatcctattgacactattccacaagatagagaaagagggaatcctccctaaatcattctatgaagccagtatcaccctaataccaaaaacaagaaaggacataaccaaaatagaaaactacagactaatatccctgataaacatggatgctaaaatccttaacaaaacactagcgaaccaaatccacaatatatcaaaaagataatccaccatgattaagtgagtttcacaccagagatgcagggatggtttaacatacccaagtcaataaatgtgataacacaacataaacagaattaaaaacaaaaattacatgatcatcccattacatgcagaaaaagcatttgacaaaatccagcatctctttatgattaaaactctcagcaaaatcagcayataaggaacatatctcaacataataaaagtcacctatgacaaacccacagccaacataatactgaatgggaaaaagttgaaagcattccctctgacaactgaaacaagacaaggatgcccactgtcaccactcctcttcaacatagcactggaagtcctagccagagtaatcagacaaaagaaagaa

SEQ ID NO: 358023 - DNA, 606 bp, Homo sapiens
agaaactctaagtttgcttttcctgtgggtgaaaatagatattattccattaatatactgaagtatcattctaattctgataaaattaaaaagagacagcaagttttagtgaagaatattagactgggtatcaggacccagcatgataactatacatacaatgaaaaatttcagatcaaatagaagaacaatgctttagtgagtttggggaagcttattatgggtaaatggtttctcccaggaactgtgatttatcatctgccactactgtcttcatgaacccctggggacataagtagcccacataagcagtcagtgcactagaccatttatgactctttccatctttaatattttaggattaaactgaaggaagaatactctcatatttgttatggaattgttcagatacttaccaagtgacatggggggtactggtggcccccaggctaamgtatatacagtcttcttatgatatgtgctagaaatctgtggaggcctttagaagagcagggagagagaacaaatggagatttaaacaaaaaggcataatgaaaaacagaccatctttttctaaaaggtccccattataaacataactactaa

SEQ ID NO: 358024 - DNA, 551 bp, Homo sapiens
agacaaagcaaggaactagtaactgaccctaatgagatggtgatatgtgagctctctgargaagaatttaaaacagtagttttaggggatctccaagataacacaaaaaagcaagtcagaaatttatcagaaaaatttaacagagattgaaataattttaaaaaatcaaacagaaatcatgaaactgaaaaatatatgtgctacactgaaaaatttattagagggtctcaacagcagaattgatagagtggagaaaagaatcgatgagctagaagatgactatttgaaaacacacaaacagaggagaaacaaaaaggatgaacagcaagattgcctacaagatacaaaaatattaccttaaaagaccaaatctaagaattatggatgttcaaaaggcagctgagcaagagtacagggtagaaagcttattcaaagaaataataacagaaaactttaaaaaacttggtgaagttataaataaccaggcacaggaaggttagagaacaccaaatagctttgaccccaaataagactacctcaaggcatgtaat

SEQ ID NO: 358025 - DNA, 471 bp, Homo sapiens
ggattctctacagaatgttgatttccccacaagagacagctttgcagggccatttcaaaatatgtcaaagaaatacattttggggtaaaacacttcatttcctttcagtgcctgctatttgtcatgtgatgctatactagagtcaggttggaatttggtaccttattgctacaaagagtctgttttgtcagtcctaagatttctctttcaatgttaatgctggtcayttgtgcctaaattccaaagggaagagggtataatgaggcatgctctacccccacttcccagcatggcctgaactagtttttcaagtttactttggaatgcccttggtggagagtgggggtccattcagtcagctggggatttagaattttattttttatttacaaaccaattgtaactcagctgtcagctggagcctctctgtccttgtcatacagagaaaatagaatgtaagctcttttagag

SEQ ID NO: 358026 - DNA, 471 bp, Homo sapiens
ggattctctacagaatgttgatttccccacaagagacagctttgcagggccatttcaaaatatgtcaaagaaatacattttggggtaaaacacttcatttcctttcagtgcctgctatttgtcatgtgatgctatactagagtcaggttggaatttggtaccttattgctacaaagagtctgttttgtcagtcctaagatttctctttcaatgttaatgctggtcatttgtgcctaaaytccaaagggaagagggtataatgaggcatgctctacccccacttcccagcatggcctgaactagtttttcaagtttactttggaatgcccttggtggagagtgggggtccattcagtcagctggggatttagaattttattttttatttacaaaccaattgtaactcagctgtcagctggagcctctctgtccttgtcatacagagaaaatagaatgtaagctcttttagag

SEQ ID NO: 358027 - DNA, 558 bp, Homo sapiens
atatgctgcctataggagacgcatttgagattcaaaaacacaaataggttgaaagtaaaaagactggaaaagatatatatatactatgcaaacagtaattgaaagagagctggaatggttatactatattatacaaactagatcagtggaaaacaattgttactagagacaaagaaagatattttataatttttaggtcacccatctagaatatgtaacaattatagaaatatatacacctaacaacaaagccccaaaatgcattaataaaaaactgacagaattgaagggagaaaaaagcaatgcaaaagagacttaagagacatatcaaacaaatgcaattcaatgcatgtaccttatttgagtcctgattcagataaacgaaatgtgaacactgactggatatttaatgatactaagaaattactgggctttttaggtatgatagaggcattgtggatatgtctagaaagaacgcctcctttcttttagaagtacactcgaagatttttagataattttatrttatatctgcaattttcttcaaaaaatctgaga

SEQ ID NO: 358028 - DNA, 567 bp, Homo sapiens
cacaagagaggcccaaatgcagggygctagtgagtcagtgagggaggggttattactgatggggtacaaggcaagactgaatcatagactattcaagcaggaagagtctttattacaactattttatttacatttgataaatctaagctccagagagaggaagtcactttccccatttatcacagcaacatttttttctgtagttaacattcattgaaaatgtattatgtcctatcaccttgccaagaacttcgcccatactatttcatttaattctcataatgtattccattattatcccattttccagagaaggaaacagcacctcagagagtgtaagtgactcatccaagttagcacagccaggaagtggcagagctgtgtctcaaacctaagtagtttgtctctaaaaactttcttcttcccactattcttgggtttaatcagaattccttccactactccatgctgggttatgctgtaataagatgtacagagaaagacagagagagagagagagcagcaaatattttaggtagaggaaatggagaagatgaaactaacgtg

SEQ ID NO: 358029 - DNA, 578 bp, Homo sapiens
agaagttttcaattgcaaatttaatttatttaattaatgcattactttcagaattttacatttttttcttgtaatagtgtcagtgatttttgtcttttagggtgtttttacatttcatcttatgcattgaatttattaaaatgaggttgttcataatattattttatattttttaaggtttataggatgaaatgttcccactttcattccagatattgttgatgtgtgttttctcttaagctagctagagaatttttttctttgttgacttttttttctattgttgatatactttctttttttttttttttggttcctatcttatttcttctattcattttggcaacattcttcttttttttttttacttttataaagtgaaagatcaggtcattgaatttgaacttttcttgaactatccatttttttaacactttttgctacatcccaraaattttgtattttgcattttcattttgattcaactaaaatatttttattatcctttgcaaattctttaatacatgtgtaattttaaactatgcttgtttaacatacaattttagggattttcttag

SEQ ID NO: 358030 - DNA, 498 bp, Homo sapiens
gggaaatgattctctaatgtagttaggtttaaaggtaataatggttctgtttccagtggtaacaagggcactggtggtttatggtataatgtgaaatagagatacataaaatattgtcattggatactcctgatcaaatacctataggtggaaaggcttatgtgtttaaaatgaaatgcaaaatttgtatatttaaattccatatgtacartttataagatagtatttataaagtcagtctcttagattaaaaatcagttttgaagagtatgaaaatattttaaactgggagttaaagatatgccaccactttattatagctttatcatttgttattttctattttgtttatttgccctttacatttattatttcgtatgcccttaaaattgttaaacaacttacatttagccatcttgtttgtaggggatccagtattaagcttgctattctctactgtgtgattacaattttaaacctgaatttgaaatttcttca

SEQ ID NO: 358031 - DNA, 578 bp, Homo sapiens
aaatgctcccctacaaaacaatcagatacatgtatcagattcatgttcaggttaggtcattataaaattgtttatatataagtagagttccaactgtcacaccagcagaatgaaggagaaaggactaggaacatrcagcagctgtcatttatggacagttctaggaagctttgtcttatgtattactgtgcagtcacactacatgagagactgagaaatgtttttattctaggcagccatgtgtccagctaaatatcagcaattttgtgataatgtgaaaaggagagtttcttttacattgtttcactgggcaaattaactccaatttgtcttagcctctccaatctactcttgtctctccttagaataactaaagggctcattaacatttcttccaaacaaaaaaagtggtctttttctttaaaaataacccactactttcttagaatttaaatggatttagccaacttattaaaatacttattgcctcattttaaagataaatgattcaaaattgcagttctagaatattctgtttttattttaaattatagacatgtggatatgtgaatgaattc

SEQ ID NO: 358032 - DNA, 627 bp, Homo sapiens
catgtgtccagctaaatatcagcaattttgtgataatgtgaaaaggagagtttcttttacattgtttcactgggcaaattaactccaatttgtcttagcctctccaatctactcttgtctctccttagaataactaaagggctcattaacatttcttccaaacaaaaaaagtggtctttttctttaaaaataacccactactttcttagaatttaaatggatttagccaacttattaaaatacttattgcctcattttaaagataaatgattcaaaattgcagttctagaatattctgtttttattttaaattatagacatgtggatatgtgaatgaattcagggaataaagcaaaatgctaacatttatttcttgaatagtaggatataagattattttaagttgtgcttgtatttaawgcattttataaatgttttaaaaataaaaatctataaatcagaagtgaaatatcaattgctgtatatagtgtcaagaaataaattccattaattcaatcattcattcatttatcctatatatttacatattttatattctatgtactgaacaccataaactaataattcatgatcctatcatcaagatgtatacctccaattacagta

SEQ ID NO: 358033 - DNA, 556 bp, Homo sapiens
tcagtctattgtcggaaataaaaacagtcctgcagttgttgattgagtgtactatgcctttaagaagtcatggcactcatgcaacagccatgtagttgttgattgagagtactgtgtcttaaaaaaagaacttttgctaaataaactgactctgtgagcagcccttcatcatttaagtgagaaatgtattgaattaagttaccttgatattgccttttgttatatttttatttctttgatacaaaagagtaacaatttaattcgaaatttgaaatccctgaattgcctatcctctccagtaagtcactacacacctgtataggggagcagcctttcagaatatttttcctgaacatgagaatataaagcaggaggtggtcatatttgtttgagtagcacctccygataccattaatctgagcagaagagtatgggtccatactagaacaggatatgactaggaaaatgaagaagaaatgaaagcaaagtattcaacagaaacatctatgctttttgccattagctgaatgtgacataagagtatagaatgatttga

SEQ ID NO: 358034 - DNA, 530 bp, Homo sapiens
tttcttgttttaggttggttagacatcttactctatacttattgtgttttgtaggggccaagggaatacttccctttcattctctgaaggtttgttgaaaattaactgacaaatgacatatcaataggaaaaaggcatacacatttattaatgtggatgagggagaaccacagagactaccacaatccttcaatgggatacaaaagctcatatatcatcttgagtttacaaaaagaataggggctcaaagcatggcccaaaccaggttacagtcagtaaatgaggttacaatggcaaaacaggttatcaragagagacaagaggaggtctgactgcaaattccccctcacccccacaaaacacagctttagagggctatttctgtttgcagaactcaacagccatctcaaaatatgtcaaagaagtatatttggggtaaaatattttgacttccttccacttctttacataggtacctctttctcccatatttatatattttttctggtgttttcctttgttcctatgtt

SEQ ID NO: 358035 - DNA, 530 bp, Homo sapiens
tttcttgttttaggttggttagacatcttactctatacttattgtgttttgtaggggccaagggaatacttccctttcattctctgaaggtttgttgaaaattaactgacaaatgacatatcaataggaaaaaggcatacacatttattaatgtggatgagggagaaccacagagactaccacaatccttcaatgggatacaaaagctcatatatcatcttgagtttacaaaaagaataggggctcaaagcatggcccaaaccaggttacagtcagtaaatgaggttacaatggcaaaacaggttatcaaagagagacaagaggaggtctgactgcaaattccccctcacccccacaaaacacagctttasagggctatttctgtttgcagaactcaacagccatctcaaaatatgtcaaagaagtatatttggggtaaaatattttgacttccttccacttctttacataggtacctctttctcccatatttatatattttttctggtgttttcctttgttcctatgtt

SEQ ID NO: 358036 - DNA, 444 bp, Homo sapiens
tgaaagttacccttaactcttaaatgcacatctttcaaaacatatatttgcatatttgtcataaatcaaaacaaaagcgatacctgtttttcaatgaactgcccctaccttatcttatctgacctcagtttaaaatatcaaattgctgagactaaaataacatgaaatcacattcaattttttttattcacctcccatatgcaaacctgtatttctagtaccyaaaatggagtttgccaaatattagccacctaatatacctttgctgtgtaaataaatatttctaacaaaatatttaatgttttttgttagaatctagaagcaggttatacctataaacccacaaactaggacacagaaggtatcatttgctcttctccctccatccaacatcaactgctgatttgagaacacctaagattttagtttcatgtaactaaacac

SEQ ID NO: 358037 - DNA, 553 bp, Homo sapiens
ataaattaacatagccattatttcacatagttggacattttttgcttctgtggcaagagcaactataatctactcatttagcaaaagttctaaatataatacactattattaattacagtcctcaggttgaacattagatctttcaacttgttcatactacatatttgctactttgcatactttcacctacattttcccatttactcccttcatgtcaaccctgataatcactatttattctctatgtgtrtatatttgaacatttttttctagatttcccttataaatgagatctttgctgacatatcagcctctccaagaaaacttcccttgccaccttcctcatagcatttatagcattgcctgtacaactcccaaatttaatttttcatagcacttatcttcatctgacattctgtatgttttagttgtttatttgttaatctaatatctctcctatacatacagaaattcaagcaggacaggactttgttgatttgtagtgtcaaggctcagaaaagcaacaccccgaagtatgtatcttggcatcct

SEQ ID NO: 358038 - DNA, 659 bp, Homo sapiens
ccacattttttgtaatgtgattattactcactgcatgcctgtatcaaaacatttcaagtaccccataaatatatgtacctactatgtacccataacacattaaaaatgaaaagattattaaaaatttaactatttaaaaagacgaaggaacgagaaaaagttccactgtaaaaacaatatagaaaaaattgtttgtgactcttagtatctaataccatgcagtatgcaaaatcgatacttcacacttaattattctcaggtctggagagatttgaaataatttagtctaattgccataaaaggtaactattgcatttgagtagtaagtctgaagattcagacaataacactagcagtttaacaaatctcaaataaaacacatagtcaattcaacaccgcatcagtcacaaaagtcacaagagttttccatgatgctagtggggttatttattttttcaatcattcaatatttttaacacagcaaaatayaacaatgtctccaaaggacagctctttattatcaagcatacatccaggttaaattcttctcctaaactcttctggataaaataaaacaattagaatattaatacataataagtgacaatttttgaggacagattttcatatatttgggatgttaatactggtatgtattc

SEQ ID NO: 358039 - DNA, 595 bp, Homo sapiens
taatgttcagcatcatagctaccaaaaatgtacttatggaaaaatataaggtcttagaaacttgagtttacttatagagaaattgatttaaatatgttagaaaaataagatatctaaatctagcatatgaattgccaaaaacatgtttgactaaagagtttgatatccccagtgagtccagtccaaaatgttcatagtttatctaacaaaattatcttcatctaaattaaatatgtaaaagtaaaaataatgttcttgatgagtcccaaaaatgacttcaaaaatatattttttcaatattttatttagcaatgttatatttttttatgatagatactcattaaatgacaacagacatttaaaatatttcctctatgttgactttgtgataaaagtactatcgagttcttacactaatcttttgaaatagacttttcaccatagtagtctataagagaaaacattgtttctttaagtcaatcacaaatttacctgcatcctacacatcaaactttaaaacattttgtaatttcaatagctttataatttacacytaaaatcttctcatctgaaaaaaacaaatctttatttgttt

SEQ ID NO: 358040 - DNA, 639 bp, Homo sapiens
ggttctgtaacattaaccatgggttagcaatatgtaatctgaaatataatatcctctgtcatacatgtcaacaaaatgagtattagtggccaaatgtcacagggattttttattgcctctaatctaagcttcattttgttgttgttttttaataaaattaattaagttccctgacaagtagtttcatgagacatgcacacaaactaattaagcttgttttcttagggatttatgacttatggttgatcgactatgtaactgaattacatactaatcttctagggttgtaactcctgacatttttggctttacaatattccttttatcacaaaatatctttaggaatgtattcacagaaactattactactgccaaagcacagatttaaaatagccttggtgttacaacaatgctcggcattataacagtagaaatgcttcctgtgtgagrgaagccctgttagggcaatactaccatacatacgggccacaagcatcattagtcacccagctattcaaaggcaggtactatggctacatacaattaataaatgcattgcagtgcctgtgtatattgcaatataaagccttctggacctgatatcatggtgtaaaagtagcttgataatcaagagaggca

SEQ ID NO: 358041 - DNA, 627 bp, Homo sapiens
  misc_feature (1)...(627): n = A,T,C or G
acgagttagtgggtgcagcgccagnncatgtcacatgtatacatatgtaactaacgtgcacaatgtgcacatgtaccctaaaacttaaaagtwtaataaaaaataaaaaataaaaaaataaaataaaataaaataaaataaaatattctcccaacccacgctgggcccatcattagtgagaggaagttaatgcttttcaaggaccaaatccagaaaaaaactttttttaatgcttaactttgaaaagtgaccagaaatcccccttcaggttcatgtcagcgtcaactgccatcatccttttcctccatggagccaccttcaccctctgccattagctccaactccagtgccctttttttctgcattcatggaaacatggccacatctagtagttgttgctgccttggcctactttctacttgaagcgcaaacttcctctggatgttcagatacaaacagtgagttctgaaaggcaaagtaaacttgtttctaggaaaatatttccttttgctggaagttttttttcccccacacgttcagattaaattaactctccttcaccactagcaagtgtcattttaagcatctttcttgcagcttttggtcccctaaatagccacagactct

SEQ ID NO: 358042 - DNA, 606 bp, Homo sapiens
agtggtttacagtctagaaagctttcactaatgatgttgatcctcacaattgcattgtgaggtgttttaatattgccattgtgcaaaagagaaaactgcgtgtcaggaagcctaagtaacttgtttgaggtcaatacattagtactattttatttatttatttatttatttatttatttatttatttatttatttattgtgagacagagtctcactcttgtcacccaggttggattgcaatggcgtattcttggctcactgcaacctctgcctcccgggttcaagtgattctcctgcctcagcctcccragtagctgggattacaggtgcatgccaccctgcctggctaattttgtatttttagtagacagggtttcaccatgttggcaaggctggtctcgaactcttgacctcaggtgatccacccccctcagcctcccgaagtgctgggtttataaggagtgagccactgtgcctggctatttttttctgataccaagagacttatacataattttaataattttcaattttagtaaggaaattatcaaagttatgaataataaaattatatttgagaaaatattttacaacaatttccaactt

SEQ ID NO: 358043 - DNA, 480 bp, Homo sapiens
atgcagtgtgggaattaaatgttgtaattaattcttatcttatttagattttatatcatacttaaaaagatatttatgaaaatatgtaatgtgtatatattatattagaagagtattgcactaagaattatatatatgggtcaatatggattagggagcatgctccaatatttattgataacatatatactcataaatggttctagatcaatggtccagagacatattagatacagtgtttctctatcattatttatcattttgtttcaatattctgagttttaaaagttttatttcttcaatgtctatccagccaggcagccaaccaaccaagcattcatctagccatctactcatccagacatttatttattcaatatttrttcagcatctgctttgtgccaaatattatgacacgtatcgacttttatagtcttaatataaaaatttctcatctcttcatgcttctgtttgctgcaa

SEQ ID NO: 358044 - DNA, 602 bp, Homo sapiens
ggtaccccagacaaaggtgaagtggtatttctccccttattgaagtcacaacctgacactccctctgaagttccccacatcccaccttccccttgccacrtcttggcaagcccacctccttccctccgtctctaggcctgccaagaggccctgtgggccccttatggccccacccagcttccccagaagctcgtctgagataagttcccagggctgccccactttcaggtgccccacagactcgggggcgggtgaagcaggaaggatcgagtcacgagggccccagaaaacatgacgggaggaaccacagcacttccccacctcctcagcttccgccttctcagggagagagaccttcagcccgaggaggagggccgagcttccctccatgtggcaagagaccctaacgtcgctgaggatcatctaaagagggtgttgaaggatgcataggagttagccaggagacaacccatttgttaatttaacaaactcataggcatcactcatcaacaagaacaattttcatcattcaatcaggactttctaatgcctctgagggatcatttgaggatgtttaattattatttttatttgagacaggg

SEQ ID NO: 358045 - DNA, 602 bp, Homo sapiens
ggtaccccagacaaaggtgaagtggtatttctccccttattgaagtcacaacctgacactccctctgaagttccccacatcccaccttccccttgccacgtcttggcaagcccacctccttccctccgtctctaggcctgccaagaggccctgtgggccccttatggccccacccagctkccccagaagctcgtctgagataagttcccagggctgccccactttcaggtgccccacagactcgggggcgggtgaagcaggaaggatcgagtcacgagggccccagaaaacatgacgggaggaaccacagcacttccccacctcctcagcttccgccttctcagggagagagaccttcagcccgaggaggagggccgagcttccctccatgtggcaagagaccctaacgtcgctgaggatcatctaaagagggtgttgaaggatgcataggagttagccaggagacaacccatttgttaatttaacaaactcataggcatcactcatcaacaagaacaattttcatcattcaatcaggactttctaatgcctctgagggatcatttgaggatgtttaattattatttttatttgagacaggg

SEQ ID NO: 358046 - DNA, 544 bp, Homo sapiens
gggaatgaggactggctgctaataggtacagggtttcttttggggatgatacaaatgtcctggaatcagatcgtggtgatggttacacaactctgtgagtatgcttaaaacactgaatttattgcacactttaaaagcgtgaattttatggtatgtgaattatatgtcaatttttaaaattgtatgagaaaaacaagttttccctggcatcctgtatttttatttgctcaatctggccaccataacttgatgcaattctacagtacctcatggacagtcaggcccagtgacccttcctagggtcccctcgagcctgaaagcatactccagtgtccacactgtacagyggggcagccgaagacaactgcggctgcagagaaagtgcgagtcccagggaaagaaaaaatgcaggtgctaagccaggcacagtggctcatgcctgtagtcccagcgctttgggaggctgatgcaggagcatcacttgaggccaggagttcgagaccagcgcgggaaacatggcggtactccatctctacaaaaaaaa

SEQ ID NO: 358047 - DNA, 579 bp, Homo sapiens
tacgcaattcatcttgcacgccttccagaacttgccaggtggaatcttgactttgagactttttttttttttttgagatggagtctcactgtcgctaggctggtgtgctgcggcacgatctcggctcactgcaacacccgactccctggttcaagcaattgtcctgcctcagcctyctgagtagctgggattataggcacatgccaccacacccagctaatttttgtatttttagtagagacagggtttctccatgtaggccagaatggtctcgaactcctgacctcgtgatctgcctgcctcagacttccaaagtgttgggattacaggcatgagccaccgcctccggccttggcccatgctcatttcttgtcacttcacctggagaccttgcctctgagctgagcaagggatccacgtgaaccctttccaagtccgactgaatagaggcggcacctaataggtgctgacttccggcttcagctgaggggtggcgggtggcccatgtcgctggagcggtgagcaagtcgctcagcctctagggcatctgcctaataggtcccaaagacacgcgagccc

SEQ ID NO: 358048 - DNA, 567 bp, Homo sapiens
gggaggtgaggtggggcctttgagacagacacaggctgagaggaayggtggtgtctccacgcacccctagaccttctaggggcggctaggggacttgaggcccgagacccactctcagagtgggcctgtgacctaacaggggtgacgtcggatggaggctggggatgggatggaggccggggttttgggggagtaactgaaatattcaggcccccgagagtgggcaaggcctgtgtggccaggtctcctccctccagtctcgcccgtgacctccctcacacccaacccccacatcctgcccctcaacccttcccccctcaaactcctgaccccgacgctccagacccctcaccgtggtcccgtgggactgactcaggcttgaccacagccacgccggaaagcagaagctggcgcagggagtggcgtgtcatttctctagggtacccacccagccccacttctggcttggggtgaagagaactggccttccttcttttcatcgttcaaggcttgtggggggtggggggcaacctggccttcaagggacgcccatgggggagagaggca

SEQ ID NO: 358049 - DNA, 574 bp, Homo sapiens
tgatgccagaccctgagaggcaggaggaaagagaacagagccaccagactcagccaggcagctgctgttgtgtccttacaataatcaccccattacctccagtgacctgtgttttcctgtaactaatgagtctataaatacagagagaaagatatatttttgagagactgctggctacaatttttttctctaagcaaattttattaaggtaaccaactaggggggcggacatggtagctcatgcctgtaattccagcaatttgggtggccaaggcaggcagatcacttgagctcaggagttcaasaccagcctgggcaacacagtgagacctcatctctacaaaaaataaataaaattagctgagcatcatggtgcacgcctgcagtcctagctgcttgggaggctgaagtgggaggattgcttgagcccaggaggttgacactacagtcagctgtgattgtgccactgcacccaggcctgggcaacacagactgtcttaaaaataaataaataaataaataaataaataaataaataaataaataaatacgctaaccaactaggatcagaggt

SEQ ID NO: 358050 - DNA, 632 bp, Homo sapiens
cctcaccatcaagtggcagatttacatggatcttataaggaccttcccagctctaaaatcctaagattctattaatttcagaagagtaaaaatgtcaattgtgccaaaaataccagaacattttctgtctaattatttccagcagcagccaaagttgttatgactaagaaggaggaaatccaaatggtgtggaataatctctcaataagggaatttcaaagaagtaagctcgtctgtaatgaggtcctcagggttctgcttgcccacaccttaggtcagatgcagtttattcagaattgcacaccaaagggatgaatcagtgagaaaccccaggcatcattttcaccttcaattatgccaaggcagtctctagcaacaaacaccaccaagcctgccaaaattcctcatgtttccaaatggcactctcaccaatgccaccactgacaaytgctgaaaaactgagtactgttcactgagcacaagagcaaacaattgggtattcccggaggttacttctgtaaaattaaacaggaaaaaagaaactaaagatacatcacattcctttgaagccgattctgatttcttctgagttccaaacatatagatgttcatgaatgtatgcctaataaaaa

SEQ ID NO: 358051 - DNA, 577 bp, Homo sapiens
tccatggacaaaccagaggtgtttctgtgtgcgccttgcctgaggctcttgagagtcagaaactctcaagatttctgactgacccagaaatcagggtgcacttctcttcaccagagccagggagtgtgttttcagaagactaccatgctgtagaggacatatgcatacaggcgaagagatcaaaaatctgtggttctgactctcactgctaaaaactttccagagatgacagcagcagaaacccaggcctgacagcacctgtggtccccggccccacactctccactccgggtgggcccccttaatcttcaggtgccacaatcccttyctgcaccttcaccaccaccccaatgtacatatatttgcctaaataatacaagaagatcaatctcaataatctgttcctattccatacatgactaccacatgggttctattccctttttatttaactggcagttcattagtaaaagaattatgagactagaaaggatatcaagatctacctcttcaaacaagatcaccttacaaaaagtgataacaattcttttctttaatagtatattaccattttggc

SEQ ID NO: 358052 - DNA, 586 bp, Homo sapiens
ccagaaaatacgttgcttgactaaattaatggtacaaaaaatttaatcattagagagttcaactgttttatcagtctaatggaatatttaggacaaaatgatatatttggtgtgttgattttaacaattagarataatgcattactatccttacttcataccacacacaaaaattaatgagaatgagtgtagtactaaatttaaaagtgaaaactttaagattttatttttttaagagtatttaatttctttctttctttctttttttttttttgaaacagggtttggctctgtcgctcagcctggagtgcagtggcacgatcatggctcactgcaacctctacctcccaggctcaggtgatcctcccacctcagcctcccaagtagctcggactacaggtgtgcaccaccacgcccaactagtttttgtatttttagcagagacgggatttcaccatgttgcccaggctggtcttgaactcctgggctcaagtgatccacccacctcagcctcccaaagtgctagtattacaggagtgagccattgtcctcagcctataaagattttagaagaaaacacaggagt

SEQ ID NO: 358053 - DNA, 489 bp, Homo sapiens
cctgatgctgtgtttcccggggttcacagatttatggtgtcatttgatttttgcttttcaaatatcttgaaatatttcttttggctgaccttgtttaggtgtgcttcattttagctgtctgtcaactaacctccctgtgcaggctgtttctaagcctccttatccycaccctttgctttggttgttacatcctgctacctctcttttcaaattttacttccttagattcggttatgttacttaagccagttaaaatttctcttagtttctgatactatcagtgcagtggaagggaggcaacagtgtgagagttaagtgaggaccctgaggttggactctctgagttcgaatctcagctttgcttgttgccactatctgtgattcgtttgattacttacctttcagagcctcagcttccttcttcttacaatgggggtttcagtgatacctacattattggtcattgtgagattaaatgagttgatatct

SEQ ID NO: 358054 - DNA, 592 bp, Homo sapiens
tccctatttaaatctttcaggagagatagtaaagattttttgggaagatgaaaacttcaaaatgctttcatatattttaaaataaaaaactgttaccaaaagtaggttgccatcaatagctataatatcttaataaataaactcctaaaatggtctaatacatgtttctcctaacaaagagtttaatattcataaataaatatctgagatacmttttaagaaaaaagtcactgtcactaaatagtgtttactgaaaatcagtaattgtaattaaatcaggatgtattacttgtttaacttaccatcttttgtaaaactttagttcatgtcaataagggcacatccacatattaataactgatttctttcttaaaaaaaagagagctaggaataaacttgtatattattttagaagagaaatagacaggttggcctatataatgttactgctatttgcatataaattacttcacagatataatcaagaaatatatttgcaaatagcaatcatgaaaataaaaatattgtgaaaatacaaatatttatgggtttattgtctcactagtgtatgtatgtatctagattgatacat

SEQ ID NO: 358055 - DNA, 601 bp, Homo sapiens
taaataaaaaacttcagtagtaagttgtaatggggataataacattttctgcttgttattccaagtctctctaatgaaacttctatttctaattgataacacattttcaagcagccagcaaaatatcacagaaaaccttttctatattaacaagacacattccaattctacagaaatcatttttgatcatttaaaacaaatattctagtttagttttaaactggcatcatttgagggggaattaggagtgtttgtttagatcagctgacattaaaaatagggagatctgaaaataagtcataaatattttacaataaatgtaattaacttttctcaattatttttagttatattgataatttagtaggaaagtgctgcatgataattataaatataagccaagtgttcttgggatttctggtagccattacaaagcaaacmtttttaaaatgtcagtttgatcaccagtatccaaacatgtatcatggctaaatgtggtgactggaatttttcaacttaaaatttccccacatgctatggttttacctctctgttctcttacattatgtgctttattaaaagagccaaaagcgttccccta

SEQ ID NO: 358056 - DNA, 481 bp, Homo sapiens
ctgaaaataagtcataaatattttacaataaatgtaattaacttttctcaattatttttagttatattgataatttagtaggaaagtgctgcatgataattataaatataagccaagtgttcttgggatttctggtagccattacaaagcaaacatttttaaaatgtcagtttgatcaccagtatccaaacatgtatcatggctaaatgtggtgactggaatttttcaacttaaaatttccccacatgctatggttttacctctctgttctcttacattatgtgytttattaaaagagccaaaagcgttcccctaaagtccatctcccaaattctcttacattttggttgctttagggatcttaatctgatacagttagtctataaagatgatgcatttcagtataaagagttgatatccctgcttctgatgggacactaaagagaggacaatccctaccctgaatgttcgcagatgtctt

SEQ ID NO: 358057 - DNA, 609 bp, Homo sapiens
catcttgcaatcagaaggacaagagtcatatcctaaggctgtctgagtgaaaagatagtaggaacctgggatattgaggacactgtagctggtaygctggtcctggtctccctatcactggacttttcataaagtcataaaaataaaatttttaattttgttagggatgaattcagtacaattaaaatggtaaaatattattaatattattgtaaatagtaacgtttatgatttttgagtgttttctatgtggaaggcacagtgctcaacactacatatattgtttaatttaatccttataatcccatataatcctatacatttgacattttatctccattttatagatgaggaaaacaagattcagagaattaaagtaaattatccaaagttacacaactagtacacttactagtctcccttctaaacccatcaattaatcttgcatcagtaaatgttgacttcatgttcacttttggactgttttgctcttagccatttgttatccatatctgctagtgataaaaagtaatatttcaaacaagaataagacgagcattactggtaaatacattgaatgaatatatgactgtggagactggtgccagt

SEQ ID NO: 358058 - DNA, 620 bp, Homo sapiens
caacatttgttcatgtctgcaaaactgcaattaatttcaattgaaatgtagccataattgttgaatatacccacrttattttctcaaaaggagatttgtgatagctgttgtcttcatttttcaagttagcaaaacctgtgatgcgcattgtaaatgctcaatatggcttcatcgcaaagtaaatacctttccttatgtgcaaagaatttggctcacacatgttgtacagatattcatatggttagagtaattcaactgcatggcagggagacacaatttatggtcattcctctggtatactagggaattattcatataccttcttctgtttagggggaagaaagtgtgagcctgagatctgatcaaatgtgatttctttattagactcaggcatgagtctctaaatatccaccttgcaaattggggaagctttaaagtgggtattttctgctctccaaaggtggttttctggaaagggaaagagattggaaggcattctggtatgcctgtgttgtaatcagtaaagttaggccaggaaattccagatgtatcttcatttctgcatttcttcttacaaaaatccatactgtttcttttcacaacacagatcaagaacttaa

SEQ ID NO: 358059 - DNA, 620 bp, Homo sapiens
caacatttgttcatgtctgcaaaactgcaattaatttcaattgaaatgtagccataattgttgaatatacccacattattttctcaaaaggagatttgtgatagctgttgtcttcatttttcaagttagcaaaacctgtgatgcgcattgtaaatgctcaatatggcttcatygcaaagtaaatacctttccttatgtgcaaagaatttggctcacacatgttgtacagatattcatatggttagagtaattcaactgcatggcagggagacacaatttatggtcattcctctggtatactagggaattattcatataccttcttctgtttagggggaagaaagtgtgagcctgagatctgatcaaatgtgatttctttattagactcaggcatgagtctctaaatatccaccttgcaaattggggaagctttaaagtgggtattttctgctctccaaaggtggttttctggaaagggaaagagattggaaggcattctggtatgcctgtgttgtaatcagtaaagttaggccaggaaattccagatgtatcttcatttctgcatttcttcttacaaaaatccatactgtttcttttcacaacacagatcaagaacttaa

SEQ ID NO: 358060 - DNA, 569 bp, Homo sapiens
acagagacataattagagggttgggacttttagccccaccccactacctcctgggagaggagaggagctgaaggtcaagttgatcaccaatggccaatgatttaatcaatcatatatatgtaataaagcctccatagaacccaaagaggacagggttgagagagcttctggatagctaaacacaaggaggttcctgaagggtagcacgcccagggagggaatggaagctccctgccccttctcccatgmctcttcatctgtatcctttttaatatcctttataataagttggtaaatgtaagtgagtgttttcctgagttctgtcagctgctctagtaaattagtcaaacccaaagagggggtcatgaaaaccccaacttaaagacagtcggtcagaagttctgaaggctcaggcttatgactggtgtcttggggggcagaagaggggcagtcttggggactgatcccccaatccgttgaatctgacactatctatgtacaggtagatatgttggaatcacattggaggacatccagctggtgtccaatgcttggtgtgtggggaaaaa

SEQ ID NO: 358061 - DNA, 595 bp, Homo sapiens
ctttataatattttactataatcctattgtctgaaaagatatattttatcaaatttgaaaataagaaaaatacagcctcatggcttctcttagaggcctttctttctttcttttgtatactgcacgtggcaggttaacagggctgagctgttttgattaactatccaaatgtttaatcaatacagcaatagcaagatgcattctggctgtgaaagaccttggaaaggtcccacttgccttatgctccacccccaagtgggacatcaatgaactattacatggtccctgcatatcaatgcagtagggcttagacaaatacagtgttaatggataattgtgggtcaccttgtcaaaatatgttaaatgccccttgagtacagattttttctccctattaaaaatgacagtaaactgcgaccttgttgatatcatacatgctttcaggaagcaaatattattattyagtctgtaacaggtttattgatttatgggtcaaaaaattcattatgactaaattataaaacacactttctgtgttgatacaacccacggtaattgtgtgacaaagtgctgaacagtcttacttggtttaggc

SEQ ID NO: 358062 - DNA, 529 bp, Homo sapiens
caggtttattgatttatgggtcaaaaaattcattatgactaaattataaaacacactttctgtgttgatacaacccacggtaattgtgtgacaaagtgctgaacagtcttacttggtttaggcaaaatacctttatgaacattcattcagaaaacacacatagaggcagcttctagcagaatgattcataagcaaggcctgtgtccctgtgtgtctgggatatcgacatagcacagagtcagggaaagttcactcggtgaccaaggtccttgrattctggccaagaatatgccatctgtcaggatggtggtacgtgcaggaagcctgagccttggactcttgcctcccactagatctattcacaacgctgtgaacacccacacggatcctccactgtttctggtgctgctgaaggacagaggattgcttgtcatctggtgccatgagtcacaaggagacgaattgtggcacttggtacttctagattccaagtgctgcttcggcagcatgacacacagaatggaatggg

SEQ ID NO: 358063 - DNA, 571 bp, Homo sapiens
gtacagagcttcttattgacaaagtgcttgacaattatatcatcaaaataaaatatttctcactaatttcattacttttaaatattggtcaaataataaaataatatttataatatattaaaatttaaattgtttatacccatgaaaacctagacagagaaggccacatgagtcaaattgtataatattcaatattagtttattgcacaagcaaatatatatacaatttcttttctttttttcagggatggatctcactatgttgccaagggctggctcgagaactcctgggctcaaccaatcctcctgcctcagcctcccaaatagctgggactacaggtgtgtgccgccactctcccctttttattggaagagagttcatagaggactgagcacctatttagtatatrtttctaggtttggttacaatttgttaagaaaagtagatttgcaaactcactacttttgaaatattaaaaatacatgccatgaatttctacttcagcacagatttggacaaccaccttatgtatggaaagaaaatttactgaatttagtgctaggcatagat

SEQ ID NO: 358064 - DNA, 594 bp, Homo sapiens
tagcacaatgttcataagtgaagtttgactttagttgtcttttttcttgtgtagtttttgtcaggttaggtgtaaataggatactcatttcatttaaaaagtatttacatgtttttcttatgtttctatgctctggaatagtttatgtggaattggaattatctgatctttgaagtcaaatagatttccccagagaaactggtgctggtgtgtttttgaatagctttcagataactttatttcttccttcaaagtcatctctrtctattattttgacatcagtttcctttgttttaaagtttatctgtataaagttgtgcaaagtagtctcttaaaattcttacaatttcctctgtttaaattgttatttcttcctcgtcatttcttgagtgtgagtactttctcacttttttttctagtttaagttgtctactggttaagtgtattttattaaatttttcaaagaatcaactttatttattagttgacttgtttttcctattctaattcagtaagttttacttattttttactattttcttctctttttggttaaattcttgctttgtttctacctttgagatacaggttaat

SEQ ID NO: 358065 - DNA, 594 bp, Homo sapiens
tagcacaatgttcataagtgaagtttgactttagttgtcttttttcttgtgtagtttttgtcaggttaggtgtaaataggatactcatttcatttaaaaagtatttacatgtttttcttatgtttctatgctctggaatagtttatgtggaattggaattatctgatctttgaagtcaaatagatttccccagagaaactggtgctggtgtgtttttgaatagctttcagataactttatttcttccttcaaagtcatctctatctattattttgacatcagtttcctttgttttaaagtttatctgtataaagttgtgcaaagtagtctcttaaaattcttacaatttcctctgtttaaattgttatttcttcctygtcatttcttgagtgtgagtactttctcacttttttttctagtttaagttgtctactggttaagtgtattttattaaatttttcaaagaatcaactttatttattagttgacttgtttttcctattctaattcagtaagttttacttattttttactattttcttctctttttggttaaattcttgctttgtttctacctttgagatacaggttaat

SEQ ID NO: 358066 - DNA, 594 bp, Homo sapiens
tagcacaatgttcataagtgaagtttgactttagttgtcttttttcttgtgtagtttttgtcaggttaggtgtaaataggatactcatttcatttaaaaagtatttacatgtttttcttatgtttctatgctctggaatagtttatgtggaattggaattatctgatctttgaagtcaaatagatttccccagagaaactggtgctggtgtgtttttgaatagctttcagataactttatttcttccttcaaagtcatctctatctattattttgacatcagtttcctttgttttaaagtttatctgtataaagttgtgcaaagtagtctcttaaaattcttacaatttcctctgtttaaattgttatttcttcctcgtcatttcttgagtgtgagtactttctcacttttttttctagtttaagttgtctactggttaagtgtatttkattaaatttttcaaagaatcaactttatttattagttgacttgtttttcctattctaattcagtaagttttacttattttttactattttcttctctttttggttaaattcttgctttgtttctacctttgagatacaggttaat

SEQ ID NO: 358067 - DNA, 542 bp, Homo sapiens
gtttttacatttttgaatccatatatagacacactgtggaaagcaaaaatagatatagaatagactgtattattgaccttgatgatatgaataattgtttagccaatagaaatttgtaggaagtacaatgtagaaatgtaggtgtaatttccttatcttatataaagcacaataagtatatattgtctaacaatgtaacatcataagtagatattgtctattcattcttaaagaatcaatacaggcttgaggttaatatatcatgataaaatrtagctattagagacattaaagtaataaaatatgatcaaaaatcaagaattaggaagaggagggggtgagaggtagtgtaattggtttaagttctttatttttcatagcagggagtgggtagataactatctgaaagtgataaagatataggttataaatattttatttaaaatacagtactaatcaccataaaaagaggtaaaaacagaaatcattaaaagaaattgcctctggtaatgggaaaggagatggtttgagaatagaacatt

SEQ ID NO: 358068 - DNA, 362 bp, Homo sapiens
gtttgagaatagaacatttcacttttcattttatactcttctgtactattttcgatttttgttttaccaaatatatgtacggttttataatttaaaacaattttataatttaagaaatagtattttaagagctgacgaaatacctctagcatatatagcagccaacacaaaaatcactagagggttggagccctctccttagagatctctagattattatttgttataatgtggaatcyatatgttatcagctcaggacacatattactgcactgaatgagacattatatttatagcctaaggctagggaatgagagactggatcaaaacattctatagataaagtatgccgtttcctagat

SEQ ID NO: 358069 - DNA, 362 bp, Homo sapiens
gtttgagaatagaacatttcacttttcattttatactcttctgtactattttcgatttttgttttaccaaatatatgtacggttttataatttaaaacaattttataatttaagaaatagtattttaagagctgacgaaatacctctagcatatatagcagccaacacaaaaatcactagagggttggagccctctccttagagatctctagattattatttgttataatgtggaatctatatgttatcakctcaggacacatattactgcactgaatgagacattatatttatagcctaaggctagggaatgagagactggatcaaaacattctatagataaagtatgccgtttcctagat

SEQ ID NO: 358070 - DNA, 532 bp, Homo sapiens
ttttggagtgcccatttctgtcagaacggccacctctttccaatacctggcctgaaaatctcagggtgtctgctttgcttatgcaataaatgttagtgtcaaaagtacacatattagtcagggttctccaaagatacagaaccaatgtawatatttttatacattgttttatacatatatatgtacacacacatatatataggtttatgtgtatatatatgtaatttgttacgagaaactggctcatacaattatgaatgcttggaagtcccatggttatttaaaagctggagctctaggaaagccattcttgtactttttgtccaagttcaaactcagagaactgatgatgggagttctattccaattcctaaggcccaagaaccagaagtaccaatggtctaagtcccagtcagagggcagaagaagatgatgttgcaggtcaagcaatcaggcagagagcagagaattcttccttcatctgcctttttgttctattcaggctcttgacagattggatcatgcccaccaa

SEQ ID NO: 358071 - DNA, 591 bp, Homo sapiens
gcccataaatgctaaaatttctctgtgattttgtgtaattctcttttcatgaaatgaacttttacccaccagagcaaacaaacactgaaccagctcttcatatatacagcaagggaaaggcatgtgattatttagcatttgaggcttagtcatcatctgcttttctttcaactatttgtccagattatttctttcatgttctcttaggctttcttatcaaacaaaacaaaagcttttaaaaaagaagcaatacaattttatgataaaaagaaattaaagaaaaaccaaagagtagaaaataaaaaccattgaaaagcccatcatccggaaataaccattagtctatttgctcacattaatttatatgtatgtatacaggtttataaaagttttattttatttgaattgttgatgacctgcttttctgttaataatgtactataaacattttttatgtcatcaaatactctgtagtggtgtcgtttttatggctacttgtaccccttttacagaygtgcctgaatacattcagccaataccctatttgtggtcatttatggtgttttaaattttattctgtacagtacaatg

SEQ ID NO: 358072 - DNA, 544 bp, Homo sapiens
gtacatacacttttcagattaggaattatggtatttaaggatactaaccaaaatatataaagatgaatagcaggtaggagaatagaaaacccaaatgagtgttatacagtactagctacctgacatggtatgaacagaacttacaggaagagccccatccaccaccccagtggayggggctatcatcattaacaggaggctcaaaccagtggacacacaaagctgtgtctactgggaagccctgcagaatatggatagaggtatgctctagctgctggggtaatgaacccaaataaatacctataaaaataatgcaagacacccaaggtgcagccctttggagcatctgcagcagcagcaataacatgcaatgagaaataggctctgtgttgctgcttcatggagcatatcccaggtctagcctgcagcagaactaagcttttcagtcccagcagaaatgaatggaaatcctaatattcctagggataaagtgagggaagatcaaatgggcaaacacgaattttttcttataaatatattgaat

SEQ ID NO: 358073 - DNA, 627 bp, Homo sapiens
tttgttgttgctgttggtatttaaccctagtctattataatagaattctgtatagtacatacacttttcagattaggaattatggtatttaaggatactaaccaaaatatataaagatgaatagcaggtaggagaatagaaaacccaaatgagtgttatacagtactagctacctgacatggtatgaacagaacttacaggaagagccccatccaccaccccagtggatggggctatcatcattaacaggaggctcaaaccagtggacacacaaagctgtgtctactgggaagccctgcagaatatggatagaggtatgctctagctgctggggtaatgaacccaaataaatacctataaaaataatgcaagacacccaaggtgcagccctttggagcatctgcagcagcagcaataacatgcaatgagaaataggctctgtgttgctgcttcatggagcatatcccaggtctagcctgcagmagaactaagcttttcagtcccagcagaaatgaatggaaatcctaatattcctagggataaagtgagggaagatcaaatgggcaaacacgaattttttcttataaatatattgaatgggaggattagatcactgttttgtgtgat

SEQ ID NO: 358074 - DNA, 578 bp, Homo sapiens
gatggccggatagttagcattcaacttagcctatgtttgtatttaaaattaggaatgagtaaacttatttcagataagataaaatttaaaaaaagatcctaaagtatgtatggtattttggattgaaaaaaatgtaaataatgaaataatttgagaaaacaaaataattgatattttatttggttctaaattttttttctaaataattaacatgaattgagttgaaattttgaatttcctgctctttcmaaatagtaaaatatctttcctctcttaatgtcttccaactgaagtgcattagaccaaatagagatattatgcattgttttggatatatgctgccataaaaaattaagtagacaattgaacacttaaagcaactgaaatactaataaaagtatattaaacatcaaatgtaaaaattatcatttctagatacataatatttggtttatgtagctttacttagtttatcaatttcaataattttacttcaattttcttttaaataaataactttagtctgttctggagacctgaaaacaattcacatgacaaatacttaaattttggcaaaa

SEQ ID NO: 358075 - DNA, 303 bp, Homo sapiens
atatgataactaagccaggaatacaatatttgtaaattgtatcaaggagacaaatcttattgattacattttatcttactttacaccagttaaaaaaacctttaggttttccttattgccttaaggagaaaactctaaattcttaggatggcataaagtttcctctagtatttgtgtcctagttacttttgtagtccagtcatcttacttgcctatagataccccatgccatagttgtctacactaygtgaagtggcgtgtgtagttctaccagcctgaaacatttctcctccctgtctggtg

SEQ ID NO: 358076 - DNA, 585 bp, Homo sapiens
ttcaacaatacattagaaagatcattcatcatgcccaagtggaatttatccctggaatgcaaggatggttcaacatatgcacatcaatcaatgtgatacattatrtcaacaaaatgaaaaataaaaaccatattatcacttcaattggtgctgaaaaatcatttgataaaattcaccatccttcatgataaaaatcctcaaaaaaactgaatatagaagaaacatacctcaatataataaaagccatatatgacccatccacagctagtatcatattgaatgaggacaaactgaaagcctttcctctaagatctggaacagaacaaggatggcccacgtgtcaccactattattcaacacagtactgaaaatcctacctagagcaatcagacaagagaaagatataaagggcatccaaattggagataacaaagtcaaattatccttgtttgcagatgatatgatctcatatttggaaaaacttaaagactccacaggaaaactattagaactgataaacaaatcagtaaatttgcagggtacaaaatcaacatacaaaacttagtagcatttttataagccaac

SEQ ID NO: 358077 - DNA, 589 bp, Homo sapiens
aaatcagttttaaaaagaaactaatacatttaattatcaatttttatgttggattgttagatgagttgtagaggtagaaatgcaatcagccaatcagaaattcagaattactatttagaagagaataatttggagatctgtgttgaaacaacagctttttgaayctccatggtcagatgaaggtatttttatttttattttcagaactaagtataagagacagaaaaacaaaatacggcagaacttagaagcatacctacaattatggagcagaaaaagagaaagaaattatcacaagctgagctggaacatttataggggtagagggagaactaagaataacattgcacaaaccaaatagaaactgtaaaggagaaaaggaataagaatatcaattattctatgagatcaagtatggtaatgactgggaagatgttacagggcccaacaaataggacgttaagtttggcttttgaagaagtagttgatctaccaaaaactcataagaattttttcccaaaagttacttatttcagattgtattagttactaaaattgatttagcagaaatatgttcaagtgctcaact

SEQ ID NO: 358078 - DNA, 601 bp, Homo sapiens
catctggtccttggtttaggcaagtagagacataatgttagagacgtaatgcaagttgtagcaaattaggaaaatwaagccacataaaaatgtcattatgaaactgttaggacattctcagaaaactgtgactcagtgaaatatgatgtggaagcactctgccctaggtggtaagggagctatagcttcctgttcggtaggcttacacaccaacgggagtcctgctgcctagactctttctgtctcatggaagccatctgcctctcagcggacctgaacacctgagtctgcaaaggcaaggccagctccctatgcagcccttagcctgagcagggcttccctgcattcctgaaattcgatcctactgattgctctaaagggctacagatttggctaatggcactagtatttggaacggaatgggcccttgaaaggtctcaactgtaaaacaagtcctgtgaataaggagtttaactttcacattccactaaagcttcaaatatgtaacagaaaaaataattgttttcttttgctcaaaataaatggccattttcttattttatatctttgttggaattagcaatattttctattttttcct

SEQ ID NO: 358079 - DNA, 601 bp, Homo sapiens
catctggtccttggtttaggcaagtagagacataatgttagagacgtaatgcaagttgtagcaaattaggaaaattaagccacataaaaatgtcattatgaaactgttaggacattctcagaaaactgtgactcagtgaaatatgatgtggaagcactctgccctaggtggtaagggagctatagcttcctgttcggtaggcttacacaccaacgggagtcctgctgcctagactctttctgtctcatggaagccatctgcctctcagcggacctgaacacctgagtctgcaaaggcaaggccagctcccyatgcagcccttagcctgagcagggcttccctgcattcctgaaattcgatcctactgattgctctaaagggctacagatttggctaatggcactagtatttggaacggaatgggcccttgaaaggtctcaactgtaaaacaagtcctgtgaataaggagtttaactttcacattccactaaagcttcaaatatgtaacagaaaaaataattgttttcttttgctcaaaataaatggccattttcttattttatatctttgttggaattagcaatattttctattttttcct

SEQ ID NO: 358080 - DNA, 582 bp, Homo sapiens
tcatgataaaaatcctcaaaaaaactgaatatagaagaaacatacctcaatataataaaagccatatatgacccatccacagctagtatcatattgaatgaggacaaactgaaagcctttcctctaagatctggaacagaacaaggatggcccacgtgtcaccactattattcaacacagtactgaaaatcctacctagagcaatcagacaagagaaagatataaagggcatccaaattggagataacaaagtcaaattatccttgtttgcagatgatatgatctcatatttggaaaaacttaaagactccacaggaaaactattagaactgataaacaaatcagtaaatttgcagggtacaaaatcaacatacaaaacttagtagcatttttataagccaacaytgaacaatgtgaaaaagaaataaaaaatagtcatacataaaataaaatatctatgaatgaaattaatctaggaagtgaaagatctctacaatggaaacgatagaacactgatgaaagaaattgaataggacacacaaaaaatagaaaaatattccatgttcatggattggaagaatt

SEQ ID NO: 358081 - DNA, 490 bp, Homo sapiens
aggtacagttatttttttatatactttagtcttcctgagtatcttggtttaggttagaaataattttctctcataatttcaaaggcatctttcttgtcagcaccttaaatagtacctggttcagagcaagcactcagtaaatcattgttgaatgaattattttctagcttacagtgttgctgttttgaaargtgcaattccatatgccattttaatgactgctcttttatattaccctgtttttctgtctgggaacttagcatctcctcttcatctcaagatatttgatatttcagaatgatttgcatgagtatagatttaaaaaattattctgctatgcatcagtgggcctttttatacagtgatctagggtgttttattatggaaaattaatatttgtattcattccctttttgttattacctttcctttagtctccctttctaaattttctaatagtaaactatggaatttcttgaatagattctaa

SEQ ID NO: 358082 - DNA, 496 bp, Homo sapiens
aaaatttgcataattacttagatctatttctgtacttttaaatctctgtgactgtgctgcctgtttaatcagtcttttgtttagaagcatttattttctacaggcccacaacctgcagtgaccagcgcaggaaatcaacccattcttcagctacaggtagccaggtctctatctataagatagactayaggaagtcgtactgctacccctagttcaacctaaaagacccaaaacttgtttaaacactgacagcttccttaatttttattcccacttccaacttaagaagaaacacagaaagccaaatatgcacccctagccaatcacataggataccctgtttctagttagctgcctacagcttgcccatgccaacagcctccaaccagggcatgccagaagctttcccttttttttgttgtaaagcttcccactcctctgcctgccttggagtgtctgccaaatgcaagtgatggtggctactcccttgctgtag

SEQ ID NO: 358083 - DNA, 535 bp, Homo sapiens
  misc_feature (1)...(535): n = A,T,C or G
nagggagcctgagtggtttcctggaggtgctaacctctgaatttcttcaccttttgctrtgtgccctatcaactcttccagcacctttgcagctttgttataaatccctcatcttgaactacacagtgtgagttccatttccctgactggacccagactgatagagctggttagctttatttgcccatgaagactaaggtctggggtcaccacctgcaggaaatctctttggtctgggtcagtagcccttcctctgccacctagggccctctgtgatcagcactctcagtttcacactgcattgtacttgtttctgtggtctatctccctagaggaatgtggatttctcaagaataaagactgttgtatttgactgtgtcttttgtatggaactctactgggctcagtgagcacccggtaaatatttgttgaatgataatattagaaatatggaaaattttcttttgaaattgacaggagagttgccagtccttagatggaatcctaaggtatttcttatgaatgtcttttatag

SEQ ID NO: 358084 - DNA, 535 bp, Homo sapiens
  misc_feature (1)...(535): n = A,T,C or G
nagggagcctgagtggtttcctggaggtgctaacctctgaatttcttcaccttttgctgtgtgccctatcaactcttccagcacctttgcagctttgttatamatccctcatcttgaactacacagtgtgagttccatttccctgactggacccagactgatagagctggttagctttatttgcccatgaagactaaggtctggggtcaccacctgcaggaaatctctttggtctgggtcagtagcccttcctctgccacctagggccctctgtgatcagcactctcagtttcacactgcattgtacttgtttctgtggtctatctccctagaggaatgtggatttctcaagaataaagactgttgtatttgactgtgtcttttgtatggaactctactgggctcagtgagcacccggtaaatatttgttgaatgataatattagaaatatggaaaattttcttttgaaattgacaggagagttgccagtccttagatggaatcctaaggtatttcttatgaatgtcttttatag

SEQ ID NO: 358085 - DNA, 535 bp, Homo sapiens
  misc_feature (1)...(535): n = A,T,C or G
nagggagcctgagtggtttcctggaggtgctaacctctgaatttcttcaccttttgctgtgtgccctatcaactcttccagcacctttgcagctttgttataaatccctcatcttgaactacacagtgtgagttccatttccctgactggacccagactgatagagctggttagctttatttgcccatgaagactaaggtctggggtcaccacctgcaggaaatctctttggtctgggtcagtagcccttcctctgccacctagggccctctgtgatcagcactctcagtttcacactgcattgtacttgtttctktggtctatctccctagaggaatgtggatttctcaagaataaagactgttgtatttgactgtgtcttttgtatggaactctactgggctcagtgagcacccggtaaatatttgttgaatgataatattagaaatatggaaaattttcttttgaaattgacaggagagttgccagtccttagatggaatcctaaggtatttcttatgaatgtcttttatag

SEQ ID NO: 358086 - DNA, 616 bp, Homo sapiens
tttttctctttgtttttcagttttggaagtttctactgtcctatcttcaagatcagagattcttttctcagccatgtccagtcccctaaggcgctcatcagagcattcttcactatgttacagcgcttttgatgtctggcatttctttttttttctttcttagaattttcatctttcacttaaattatttatctttttttgcatacatctacttttttcattaaatctcttagcattttgatcatagctttttttaaaaaataaatgttatctgctaactataacatttatatcatatctgactctagttctgatgcttgtccagtctcttcaaattgtcatttttgccttttactgtgccttgtaattttttattgacaggtagrcatgatgtactacacaaggacactatagtaagttggtctgtagaaatgtagcagtaaagtgtacctgtggtggcgaagaaagggtgctatagttctactattaagtttcagtctcttggtgggcctgtgaccccggcctgtgaacttcactaatgctttttagattacgtgggacaggatggctggaggaggctagagttatgtatttccctgctttcacatggaaggct

SEQ ID NO: 358087 - DNA, 584 bp, Homo sapiens
ctattattatccctttgaataatttttctacccctaactctttctctgcctcctttttgaggccagtaactcttagatttgcgcttttgaggctattttccagatcccrtaggtgtgctttgttttgattttttattcttttttcttccatctcctctggctgtgtattttcaaatagcctgtcttcaagttcgctaattctttcttctacttgatcaattctgctgtaaagaactctgatgcattcttcagtaagccaattgcatttttcagctccagaatttttaattctttataattattttaatgtctttgttaaacttatctgatagagttctgaattccttctctaggttatcttgaatttctttgagtttcctcaaaacagctgttttgaattatgtgacttaaatgtcacataactctgtttctccaggattggtccctaatgcattatttagttcatttggtgaggccatgttttcctggatggctttgatgctagcagatgttcttcagtgtctgggcatagaagagttaggcatttattgtagtcttcactgtcagggctgatttgtagctgt

SEQ ID NO: 358088 - DNA, 584 bp, Homo sapiens
ctattattatccctttgaataatttttctacccctaactctttctctgcctcctttttgaggccagtaactcttagatttgcgcttttgaggctattttccagatcccgtaggtgtgctttgttttgattttttattcttttttcttccatctcctctggctgtgtattttcaaatagcctgtcttcaagttcgctaattctttcttctacttgatcaattctgctgtaaagaactctgatgcattcttcagtaagccaattgcatttttcagctccagaatttttaattctttataattattttaatgtctttgttaaacttatctgatagagttctgaattccttctstaggttatcttgaatttctttgagtttcctcaaaacagctgttttgaattatgtgacttaaatgtcacataactctgtttctccaggattggtccctaatgcattatttagttcatttggtgaggccatgttttcctggatggctttgatgctagcagatgttcttcagtgtctgggcatagaagagttaggcatttattgtagtcttcactgtcagggctgatttgtagctgt

SEQ ID NO: 358089 - DNA, 585 bp, Homo sapiens
ttcaacaatacattagaaagatcattcatcatgcccaagtggaatttatcsctggaatgcaaggatggttcaacatatgcacatcaatcaatgtgatacattatgtcaacaaaatgaaaaataaaaaccatattatcacttcaattggtgctgaaaaatcatttgataaaattcaccatccttcatgataaaaatcctcaaaaaaactgaatatagaagaaacatacctcaatataataaaagccatatatgacccatccacagctagtatcatattgaatgaggacaaactgaaagcctttcctctaagatctggaacagaacaaggatggcccacgtgtcaccactattattcaacacagtactgaaaatcctacctagagcaatcagacaagagaaagatataaagggcatccaaattggagataacaaagtcaaattatccttgtttgcagatgatatgatctcatatttggaaaaacttaaagactccacaggaaaactattagaactgataaacaaatcagtaaatttgcagggtacaaaatcaacatacaaaacttagtagcatttttataagccaac

SEQ ID NO: 358090 - DNA, 532 bp, Homo sapiens
aaatcaatacaccttctttctctctgttctctgctttccagtgaagtgaagggaagtattgcacagatgactcaaaaacataagaatctgaggctttaggggggtttagctttgcatgagctcatttcctttttctctgattaaacctcatggaaaaccagcccactcagattaagaaagagtgagagggtcccatgggccattatctcttggtaaagtgaaatcaatcccagaaggcagactgcttgaaaagcccatcttcattaatcaaccaataagtctgtgaagtggaaatgtgcacttccttttgcctcttttttgtgtggagaagaagggagagctagagaggtcatcccagcctaggaattcgaactggtctatgaaaaagaragaactataatttcaaacgtctgctgtgatgctttggggtggagtcctggatcaaatggcctggtcagcaaagtatttcactgacagcacagttatgtgctgaagtttaggtttaggaagaggctggaggttgctgaatttt

SEQ ID NO: 358091 - DNA, 562 bp, Homo sapiens
ctgtgaaacagcaatcctcttttgggtcccctctccacaatggagaactttcttctttcgcttattaaacttttgcatcaacctcacccttggtgtccaccctccttagttttcttggtcatgagacaaagaacttcaggtgatacctcaggcaatgagatcrcttcaattattttaggttgacaggccactgatttgtgatttactaggcatattagtttgctagggctgccaaaataaagtactcacaactatgtagcttaaacaacagaaatgtgttgcctttacagttctgggggctagaagtgtgagattaatgtgttgacaatgtaactgcctgatgggttcttcctgcccactgcacaaacaaaattgattcaccaagaccatcacattgcagtaaagaaatagtttaactgacatgagatggagctaataatcacatcaatctccctgaagtcttggaggtgagggcttacaaagagagtttggtgagcaagggagtaagatggggacatgctgattggttgggttggagaagaaatgataggaaatcaaagct

SEQ ID NO: 358092 - DNA, 562 bp, Homo sapiens
ctgtgaaacagcaatcctcttttgggtcccctctccacaatggagaactttcttctttcgcttattaaacttttgcatcaacctcacccttggtgtccaccctccttagttttcttggtcatgagacaaagaacttcaggtgatacctcaggcaatgagatcacttcaattattttaggttgacaggccactgatttgtgatttactaggcatattagtttgctagggctgccawaataaagtactcacaactatgtagcttaaacaacagaaatgtgttgcctttacagttctgggggctagaagtgtgagattaatgtgttgacaatgtaactgcctgatgggttcttcctgcccactgcacaaacaaaattgattcaccaagaccatcacattgcagtaaagaaatagtttaactgacatgagatggagctaataatcacatcaatctccctgaagtcttggaggtgagggcttacaaagagagtttggtgagcaagggagtaagatggggacatgctgattggttgggttggagaagaaatgataggaaatcaaagct

SEQ ID NO: 358093 - DNA, 479 bp, Homo sapiens
gaggttattttcaagagtaattgaggaagttgcaaatcttttgacctccagaataatggctggtaattgtttagaattcaagcccctctcttcctaacttggtgggcctttcattagttttacaagaacaatttagtttttggcaagggctattatcacttaaactataaactaaattcctaaaattagcttggcccatacccaggaatgagcaaatgcagccaatctgtgaagctacagacaaaatggagtcagctatatctgatttctcttactgtcgtaattttgcaaaggtggtttcaacagggttggttccttctgaggacactgaaggagaatgtgccctakgtctcttccccagcttctgttggtttttggcccatcttcgatattcttcagcttgtagctgcatcacctgatctctaccttgatattcacatgacattctccctgtgtgcatctgccctccaatttccttt

SEQ ID NO: 358094 - DNA, 479 bp, Homo sapiens
gaggttattttcaagagtaattgaggaagttgcaaatcttttgacctccagaataatggctggtaattgtttagaattcaagcccctctcttcctaacttggtgggcctttcattagttttacaagaacaatttagtttttggcaagggctattatcacttaaactataaactaaattcctaaaattagcttggcccatacccaggaatgagcaaatgcagccaatctgtgaagctacagacaaaatggagtcagctatatctgatttctcttactgtcgtaattttgcaaaggtggtttcaacagggttggttccttctgaggacactgaaggagaatgtgccctaggkctcttccccagcttctgttggtttttggcccatcttcgatattcttcagcttgtagctgcatcacctgatctctaccttgatattcacatgacattctccctgtgtgcatctgccctccaatttccttt

SEQ ID NO: 358095 - DNA, 541 bp, Homo sapiens
tgcgtctcttctttctggtatgtgttacctgtgactttcatctgcataacaagatcacccttgcttaccttatcttcttttctctccctcccataacctgtcttgccatgctctgagcctctattctttctgtaacttcaagatggtataaaagcatcaatcrtcaggccctttccttaagttttcatatttcttttaatttttttttcagagacagggtcttgctctcttgtccaggctagagttcagaggcatgacatgactcactgaagcctcaacctcccaggctcaagggattctcccacctcagcctcctgagtaactgggactacaggtgtgtgccacccttcccagctcatttatttattgtttagatatggggtctcactatgttgcccaggctggtctcaaactcctgggctcaagcagtcctcccacttcaacctcccaaagtatttggattacaggtgtgagccaacatgcccagccaagttttcatattttgtatgactcctacatgtgcacattaaagacatttttt

SEQ ID NO: 358096 - DNA, 523 bp, Homo sapiens
gcacgccagtgacattgttttctgttcttgcaacgtaggggtaaattctgttcctgcaatgtggtgttaaatgtgacctcctctggtccctcctgctcttgtggggaaagaatttccctggtttctgttccatgcatggcagtgggggcaggtccagaaacaaaaggtgtcatttgagaagtgggtggtcgggcagggagttggcagtggacaggggcagcaattgctccaaggtgaaaaaagtgcttgttcctactttggggtctgcatacgtttattttctgtttttacgttgcaacttctataagcaatcaagttatagcatataaaagcttttccttttctttctctctctctctctttttttttttttttttagttaacagaagaaaatttkgtttagcttcatataaacagaattaatctgtgttatggaacactttagaaggtatagatcatgccatcctcctttctgtccctttggtctctgccacagttcactgcattaactttataacccatt

SEQ ID NO: 358097 - DNA, 536 bp, Homo sapiens
catgacatcagccctgtaggtataattatccctttggggcacaagagggaactggagcacagagagattaagtaacttgcccaaagccactcagctagtgagtagcaatgctgggatttaaacgagggtaagctgactccagaggcatcattcttaactgctgtgcaacactctctgctaagagctaacataggattgaaattttagtaggtgggagatttttcttaatcctcacagcaacttggatgtagtattaccctgttttcacaggtgcagaaactgagtttcaagtagatccagcaacttgcccragtcgtaaaaccagaaagagtggagccgagaatcaaagcttggatgcctgaccagagtggacctttgaaacactcctctgtatattgtcttcaggctgcctgtatttacaaactctgatattgacctcattacttctccccgttctgcaggcagaagactgctatgagagcacttaggacccaagcgacatcagccttggaacaggcaaataaaaatggaaagct

SEQ ID NO: 358098 - DNA, 519 bp, Homo sapiens
tgtggaactgtgagtcaatgaaacctcttttctttgtaaattacccagtctctttatttctttatagcaatgtgagaatggactaatacactacaacagactatgtccctgggttattggaacctcattcacagaagcacaggagaaaggaggcactgtgttcccctaaactgaagcaagagcacagttgcttcatacatgactgatgaaggtctaagtggttgcagaagctccagcctccagagcctgagaaaaccttctgcctctagcaacagagctggcgaaattctgaaaaaaattcccctccacaaacacaaaaaattactggataagacacaccaaacatttggccaaatgcacaactacacttctaagaaagtaagtgagattcaaaggaaataaaatgttgcaataaaatggtgtgaaaactcggaagcacagagcatctgctgatcctgggaacctggttytcagtgggagaattagggtaaaggaaggagctaggggtcccaaatacca

SEQ ID NO: 358099 - DNA, 629 bp, Homo sapiens
gtctcattcactttccacaaatgttatcactctggactataggaagaaacagctgcaattgatattttggtcaaccactaagagagggaccaggttttggataaagaattcctgtcttctctcaaatccttgctagctgggatgaggaggcctgccatctacttatggagcaaaggggtttttgaaagtctgagcctttcctgagacttaatgcctctgatgtttcaggctggcttgttctggaaaacattgattgtttgtatctactgagaacattgaacatgccactcattctttcttaactgttacaaattaattgtcacagagcctctatttctattgtgatccttttccaaccactctccccaccctcyatacgggtcaggaagttaatttttgttctggaaaaattgtttttagggaatcacatttaaacagtcagagacaagctatcacaaggtgatagcaaggttgatgaattctggctctgtgactttcaattccagtggcaccacttgctggctatgggaccctgagcaagccaattagcctatctgagcctcagtgtctcatctgtataatggggccatggttataaagtgcatggttcattagggattttgtaagga

SEQ ID NO: 358100 - DNA, 629 bp, Homo sapiens
gtctcattcactttccacaaatgttatcactctggactataggaagaaacagctgcaattgatattttggtcaaccactaagagagggaccaggttttggataaagaattcctgtcttctctcaaatccttgctagctgggatgaggaggcctgccatctacttatggagcaaaggggtttttgaaagtctgagcctttcctgagacttaatgcctctgatgtttcaggctggcttgttctggaaaacattgattgtttgtatctactgagaacattgaacatgccactcattctttcttaactgttacaaattaattgtcacagagcctctatttctattgtgatccttttccaaccactctccccaccctccrtacgggtcaggaagttaatttttgttctggaaaaattgtttttagggaatcacatttaaacagtcagagacaagctatcacaaggtgatagcaaggttgatgaattctggctctgtgactttcaattccagtggcaccacttgctggctatgggaccctgagcaagccaattagcctatctgagcctcagtgtctcatctgtataatggggccatggttataaagtgcatggttcattagggattttgtaagga

SEQ ID NO: 358101 - DNA, 513 bp, Homo sapiens
aatcccagctactcgggaggctgagcaggagaatcgcttgaatgtgggggcagaggttgcagtgagctgagatcacactgagatcgckccacttcactccagcctgggagaaagagggagactctctctcaaaaaaaaaaaaaaaaaaaaaagaatgaacttgagatactcatcattttttttttttactcttttgtaataacgcttagcttaaaacacaaacacagaacctgggggaggggcaggagtgtaaaaacaaaacaagaaaaatacaaacccattgtgcagaggtacaggtgtcttctttctttatatccttattctatcagctttttttctattaagaacagttttttaaaactttaaaagctttttttgttaaaaatgaagacacaaacacacacattagcctaggcctacacagggtcaggatcatcaatatcactgtcttcacctccacatcttgcctgactggaaggtcttctggggcaataacatgcatggagctatcat

SEQ ID NO: 358102 - DNA, 513 bp, Homo sapiens
aatcccagctactcgggaggctgagcaggagaatcgcttgaatgtgggggcagaggttgcagtgagctgagatcacactgagatcgcgccacttcactccagcctgggagaaagagggagactctctctcaaaaaaaaaaaaaaaaaaaaaagaatgaacttgagatactcatcattttttttttttactcttttgtaataacgcttagcttaaaacacaaacacagaacctgggggaggggcaggagtgtaaaaacaaaacaagaaaaatacaaacccattgtgcagaggtacaggtgtcttctttctttatatccttattctatcagctttttttctattaagaacagttttttaaaactttaaaagctttttttrttaaaaatgaagacacaaacacacacattagcctaggcctacacagggtcaggatcatcaatatcactgtcttcacctccacatcttgcctgactggaaggtcttctggggcaataacatgcatggagctatcat

SEQ ID NO: 358103 - DNA, 559 bp, Homo sapiens
ataatccacaaattcccctctggcagtggtgtgctggtaaaacagctcttaaaaagcaaacaaacaaataacaaagccttgatttgtagcacttgccagtttccaagatgtaaatactccccccatgatctattttacgctattgtaacatcactacatgtagacttgtgcatatatactcatcttttgtgagcttacacgagctggctctagcacaccactgccttaggtttaagttaaagtgggtgggtttctgtcccttgatccaaatgtcccactatatatcaaattaagrtaccattgattggctggtttatttatcaccaaaaaagaaaaacaccactctgcccattaaactgtgatataatgctttaagaacagtcctgctcgtgcatgaaattagtgccaccagcctttgctcatttgatacttccctgtgtatattcctctgggtttggcaactttcctgcctttagctgtgttgcttagtgtgtgatagacaattcttttttttggtatcttagtaacaaaatataacacagcttcacatacttgtggg

SEQ ID NO: 358104 - DNA, 559 bp, Homo sapiens
ataatccacaaattcccctctggcagtggtgtgctggtaaaacagctcttaaaaagcaaacaaacaaataacaaagccttgatttgtagcacttgccagtttccaagatgtaaatactccccccatgatctattttacgctattgtaacatcactacatgtagacttgtgcatatatactcatcttttgtgagcttacacgagctggctctagcacaccactgccttaggtttaagttaaagtgggtgggtttctgtcccttgatccaaatgtcccactatatatcaaattaaggtaccattgattggctggtttatttatcaccaaaaaagaaaaasaccactctgcccattaaactgtgatataatgctttaagaacagtcctgctcgtgcatgaaattagtgccaccagcctttgctcatttgatacttccctgtgtatattcctctgggtttggcaactttcctgcctttagctgtgttgcttagtgtgtgatagacaattcttttttttggtatcttagtaacaaaatataacacagcttcacatacttgtggg

SEQ ID NO: 358105 - DNA, 559 bp, Homo sapiens
ataatccacaaattcccctctggcagtggtgtgctggtaaaacagctcttaaaaagcaaacaaacaaataacaaagccttgatttgtagcacttgccagtttccaagatgtaaatactccccccatgatctattttacgctattgtaacatcactacatgtagacttgtgcatatatactcatcttttgtgagcttacacgagctggctctagcacaccactgccttaggtttaagttaaagtgggtgggtttctgtcccttgatccaaatgtcccactatatatcaaattaaggtaccattgattggctggtttatttatcaccaaaaaagaaaaacaccactctgcccattaaactgtgatataatgctttaagaacrgtcctgctcgtgcatgaaattagtgccaccagcctttgctcatttgatacttccctgtgtatattcctctgggtttggcaactttcctgcctttagctgtgttgcttagtgtgtgatagacaattcttttttttggtatcttagtaacaaaatataacacagcttcacatacttgtggg

SEQ ID NO: 358106 - DNA, 624 bp, Homo sapiens
ctgctgtactgaaggcaatggtaacacagtggtaagtacttgtatatctaaacatagaaaaggcacagtaaaaatacagtataaaagataaacaatgaagctgggtgcagtgtttcacacctgtagtttcagcctttttggaggctgaggtgggaggattgcttgaacccaggagtttgagaccagtctgggcaacatagggagaacttgtctctaaaaaaaaaaaaaaaaaaaaattagccaggcatggtggtacatgcctgtgtttctgcctacttgggaggctgaggtggaaggatctcttgagcccaggaggttgaggctacagtgagctgtgattgcaccactgcactccaatctggccaacagagtagagaccttgtctcaaaaacaaaacaaaaacaaaaacaaacaaacaacacaaaatccaaaaattaaaaatggtacasttgtaggtgacacttaccatgaatggagcttgcaggactggaagttgctctgggtgagtgagtgagtgagtgagtgaatgagaagtgagtgaatgggaaggcctaggacattactaaacactactgtagactttataaacactgtacacttaggctacactaaagtttattaaaa

SEQ ID NO: 358107 - DNA, 624 bp, Homo sapiens
ctgctgtactgaaggcaatggtaacacagtggtaagtacttgtatatctaaacatagaaaaggcacagtaaaaatacagtataaaagataaacaatgaagctgggtgcagtgtttcacacctgtagtttcagcctttttggaggctgaggtgggaggattgcttgaacccaggagtttgagaccagtctgggcaacatagggagaacttgtctctaaaaaaaaaaaaaaaaaaaaattagccaggcatggtggtacatgcctgtgtttctgcctacttgggaggctgaggtggaaggatctcttgagcccaggaggttgaggctacagtgagctgtgattgcaccactgcactccaatctggccaacagagtagagaccttgtctcaaaaacaaaacaaaaacaaaaacaaacaaacaacacaaaatccaaaaattaaaaatggtacacttgtakgtgacacttaccatgaatggagcttgcaggactggaagttgctctgggtgagtgagtgagtgagtgagtgaatgagaagtgagtgaatgggaaggcctaggacattactaaacactactgtagactttataaacactgtacacttaggctacactaaagtttattaaaa

SEQ ID NO: 358108 - DNA, 559 bp, Homo sapiens
tttggaagcgtttgatgggaaggtgctcacagtttcagctgatagcacagcagggacactgcatagaatggttagactgtgtgcgttccaagctgcaggtcatgaaatcaatcacccagcagttgttttttaaataaaattcaggctgggtgcagtggctcacgcctgtaatcccaccactttgggaggccgaggcaggtggatcacctgaggtcaggagttcgagaccaacctgaccaatatggtgaaaccctttctctactaaaataaaaataaaaaaaaaaattagctgggcatggtggygggcacctgtagttccagctactcgggaggctgaggtaggagaattgcttgaatccgggaggtagaggttgcagtgagccaagatcgcgccactgcactccagtctgggcgacagagcgagactctgtctcaaaaaaataaaaataaataaataaataaatataaataaaattcaaactatatcagagtacaacaaacagggtaagggtaaacaggaacgggtgtttttcaagaaatgcttttggttatattgtat

SEQ ID NO: 358109 - DNA, 559 bp, Homo sapiens
tttggaagcgtttgatgggaaggtgctcacagtttcagctgatagcacagcagggacactgcatagaatggttagactgtgtgcgttccaagctgcaggtcatgaaatcaatcacccagcagttgttttttaaataaaattcaggctgggtgcagtggctcacgcctgtaatcccaccactttgggaggccgaggcaggtggatcacctgaggtcaggagttcgagaccaacctgaccaatatggtgaaaccctttctctactaaaataaaaataaaaaaaaaaattagctgggcatggtggcgggcacctgtagttccagctactcgggaggctgaggtaggagaattgcttgaatccgggaggtagaggttgcagtgagccaagatcgcgccactgcactccagtctgggcgacagagcgagactctgtctcaaaaaaataaaaataaawaaataaataaatataaataaaattcaaactatatcagagtacaacaaacagggtaagggtaaacaggaacgggtgtttttcaagaaatgcttttggttatattgtat

SEQ ID NO: 358110 - DNA, 316 bp, Homo sapiens
cactgggctactcacaatatataactgccctgaaatatatagccaccacctaccagtgcatgattcagaaagctagaagacactttcccaaaggatgcagttggcattggctttgagaaaaaatgccccaatttttaaacattgatggattggaamttttgtgctctgtaactgggttacggtgcctcagtggcatggagagatagagcagtaataagaagagaggaattgggagttagaatagccggagtggtgtgcacaggaaaagaatcacgccttggtctcttcatttgtgcattccttacagtgtccattt

SEQ ID NO: 358111 - DNA, 316 bp, Homo sapiens
cactgggctactcacaatatataactgccctgaaatatatagccaccacctaccagtgcatgattcagaaagctagaagacactttcccaaaggatgcagttggcattggctttgagaaaaaatgccccaatttttaaacattgatggattggaacttttgtgctctgtaactgggttacggtgcctcagtggcatggagagatagagcagtaataagaagagaggaattgggagttagaatagcyggagtggtgtgcacaggaaaagaatcacgccttggtctcttcatttgtgcattccttacagtgtccattt

SEQ ID NO: 358112 - DNA, 583 bp, Homo sapiens
agaaagcttcattcagtaggtagaggtgtacaggatagattttatgtaggaaaaaaatgttatatatggcagcaaaggcctgatgggattttatgcctgatctttcagctcatatttggatttttcaaatgtttagggtaaatataaccttaaagaactacaaaattgttcttttctggcttctaaaatggtgtcaacaaaatattcaattagtctttattttatagaggtggctagcttcctctagataaaagtgtayagaaatgattttctggtggtttacagtgcttttacagtggtttctagaaatgtattttcaagcactttagttttttccataaaatacataggttggtctatatgtgtgcaaagtcaactctttcaaaaagttagttcccccatgccttgcaaattcttgtaatctactattgctttgtaatgattcatccctttggtaattcaatatttattctttagctttgtttgatatacaaatatgaataagaaatctgctgccataaaaatgtatagtttatttagcaaggaatgtaggacaaaagaacaagaaaattatgacgtgaaa

SEQ ID NO: 358113 - DNA, 568 bp, Homo sapiens
tttcaaatgtttagggtaaatataaccttaaagaactacaaaattgttcttttctggcttctaaaatggtgtcaacaaaatattcaattagtctttattttatagaggtggctagcttcctctagataaaagtgtacagaaatgattttctggtggtttacagtgcttttacagtggtttctagaaatgtattttcaagcactttagttttttccataaaatacataggttggtctatatgtgtgcaaagtcaactctttcaaaaagttagttcccccatgccttgcaaattcttgtaatctactattgctttgtaatgattcatycctttggtaattcaatatttattctttagctttgtttgatatacaaatatgaataagaaatctgctgccataaaaatgtatagtttatttagcaaggaatgtaggacaaaagaacaagaaaattatgacgtgaaagtatagtaaggtaaaaaagcaagaaaatcctaacattttcgacaatgtggaacaaccaagaggacacaggttgagtgaaataagccaggaatagaaagaaaaacacc

SEQ ID NO: 358114 - DNA, 477 bp, Homo sapiens
gggtgccatgcttactacctgggtgatgggatcatttgtataccaaacattagtggcaaacaatttgcctatgtaacaaatctgcacatgtgccccccaaacttaaaagctggaaaaaaaccgttcacttacatatcccaaagataaatcctgaaagagggtggggtctacttcaacataaaggaagaaaaccctttccccagaggcaggaaaacctactgaactcattttgcagataagaaagctggacattgaaagtgacttgytccaagacacactgtgctaggaaacagcagtgcttcagtctcaacctattccctcagaggaggactcttatgagttggattgagtcccccaaaacagatatgttgaagtccaaagccccacgacctgtgaatgtgatcttgtttggaaataaatagggtctctgtagatataatcaagtaaacatgaggttattaaaatgggccctcatcc

SEQ ID NO: 358115 - DNA, 570 bp, Homo sapiens
gctttttgttttgagatgtgtatatatacaacatggtatcttttgtacctggcttcctttgcacactactacgttgatgagactcatccacactgttgcatggaactcaccagtagacaaagttctcttactgcttccttctttaagaggccttggctactattggctgkctttctttccataaaaaatttagaattagcttgctaaattccatttaaaaacagctgttgggatttttattccatttcattgactctatagataatcatggggagaactacatcctttgaaacagaatattctaacatagaaacttaaacacctattgatttgtttacttcttgtttctttgtcaaatatatttcacagattactgggtagaattattgtgcctactttattagaattattattaactacaatcattccttggtatccatggggaatgggtttcaggacccacctcccacccacagataccaaaatccacagatgctcaaggcccttatataaaatggcgccgtatttccatatagcctatgcataccctcccatatggttgatatcatc

SEQ ID NO: 358116 - DNA, 570 bp, Homo sapiens
gctttttgttttgagatgtgtatatatacaacatggtatcttttgtacctggcttcctttgcacactactacgttgatgagactcatccacactgttgcatggaactcaccagtagacaaagttctcttactgcttccttctttaagaggccttggctactattggctgtctttctttccataaaaaatttagaattagcttgctaaattccatttaaaaacagctgttgggatttttattccatttcattgactctatagataatcatggggagaactacatcctttgaaacagaatattctaacatagaaacttaaacacctattgatttgtttacttcttgtttctttstcaaatatatttcacagattactgggtagaattattgtgcctactttattagaattattattaactacaatcattccttggtatccatggggaatgggtttcaggacccacctcccacccacagataccaaaatccacagatgctcaaggcccttatataaaatggcgccgtatttccatatagcctatgcataccctcccatatggttgatatcatc

SEQ ID NO: 358117 - DNA, 502 bp, Homo sapiens
tacggtcagctagtatgtcttcatgatagatgttaagtttcttaggacaagggcagtttcttatgaatcattgtattctaaatgcctaacacacagcaaatkgtcattaactgcttattgaataaatgaatgcatgcatgcatgaatgaacaaacacacatgaggtgtggatatatctttagctcacactaaatgtggttgcagaagtgattaagtagttaaatacttagaatttcataagttgttcacttgtttctctttagttactaggactcctaatgagtgttatagagaaagctgacctagtcctctccctaagcccacctaatcatcagattgttgctatacactctgccaacataaatgagccacaatttagagaaatgtcattattacatttcaatacagggagtggagtaggtaccaatcatgaagttatgaaaagtcccaaagtcacctctctctaaagtgaagagattccatcaaatgtgccctgatcaag

SEQ ID NO: 358118 - DNA, 625 bp, Homo sapiens
agatttttaactttctttaacatctatttgaaaaatttcaatcttacagaacagttgcaactatagtacaactatataagctccagggtcccatttgcctagattcatagactatttatattgtcacatttgcttctttctccttatataataacaacaataataatgggagtatataattattaatatttgacaaactacatgasagtaagttagagatcttttgccttttaggccaaatacccatacttctgtgtacatgaacaagagcaaccacttccagaaccataatgcaattatcaaattcagaaaaatttacatcaacatcatggtgagtgtaaattaaccataagcccagctgtaaaattcctctctttgtactctttctctttatttctcagaccagccgacactcagggaaaatagaacctacattgaaatattgggggctttaattcacaatccatattcaaattccaccaaatgtcttaataatgtaccttgcagcagttttccccagttcttagtggagcccaggatctcactttggtatcagttgtcttgcctccttgatctcctttagtctgaagcactttctcctaattcttggtcttccatgacattg

SEQ ID NO: 358119 - DNA, 630 bp, Homo sapiens
acacacgtgtcagttttctggggaagtggacagaacatttttgtaggactcaggaatctagattttagtacagtttcttccactgacagatgatacctttaacttaattgctatgagactggaattctcaaatgtaaaataggagagaaggaccaggtccaagatttttaactttctttaacatctatttgaaaaatttcaatcttacagaacagttgcaactatagtacaactatataagctccagggtcccatttgcctagattcatagactatttatattgtcacatttgcttctttctccttatataataacaacaataataatgggagtatataattattaatatttgacaaactacatgagagtaagttagagatcttttgccttttaggccaaatacccatacttctgtgtacatgaacaagagcaaccacttccagaaccataatgcaattatcaaattcagaaaaatttacatcaacatcatggtgagtgwaaattaaccataagcccagctgtaaaattcctctctttgtactctttctctttatttctcagaccagccgacactcagggaaaatagaacctacattgaaatattgggggctttaattcacaatccatat

SEQ ID NO: 358120 - DNA, 616 bp, Homo sapiens
ccttttgctcagatatattctccagatctttacagagctacctctttctcaaaattcaggactttctgcctatttcatctactcaaagagacccttcctagtctctctaaataaaacrgccctcaaccactcacccatccagttactctgctaggttttcttcagagcacttgttcactactgtgactacctatgtctttatctttttccttcctggacagaaatgtcactcctgtgagggaaggaggtgtctgtcctgttctgtttgaatcctgtgtgcctggcatagaagagaatgctccacacgtgtttcggaaagatggggaaatgacgcctgctgctccacatcctcatgccccagagacactttcaggatgaagagtttgaatgtttccctgagacctgccctttcttccccagtgtccacactgctctcacatgtggggctgcctgtttttgcttgtttctggggaaaattaaagtctaatttcaggtaaacgaatggcaaaaggaaggttaatagtgtgacaagtaatgcaaatcgtctgatttacttttggaaacccccccctcccaccacagatgctctgaaaagccatttacacatttaagggtc

SEQ ID NO: 358121 - DNA, 537 bp, Homo sapiens
tctgtaatcagatatgcagcctccgagaaaggtaaattttgctggcaaagcactttgcgcctcagatggtggagccccttgttctatgaagctgccaagtcgtcccacacagaatgctgtggtcgaagattcgggggagtctcctttaggagaaactgtaccctttgggggcatactcacacctttcaggtttctttaagagtccaagcaaaaattaaacaatcaatgggttgatatgtcagcattaatacaaagttttaaaattttacacagctacaagcaatttggaagaaagccacggtaagtggaaaaagaacccaagaaaggctctcccgatggatactaagggtgtcaatggatagagatgtagaaaaaaggaacaaaagaaaattcaccaagactgtgaaatatgaatcattgctatctctgggttatcggattgtaatcarttctcatgctgcttggatccttttgtaattgttggcaaggggtgtgcattaatttatcacaagggggaaattaaaaacaagctacaga

SEQ ID NO: 358122 - DNA, 511 bp, Homo sapiens
ttcctacgctgtgggtactaagagaaccagaaatgctccctctccgtccacggagccaaccggcyacggcaggaggagatgtgacacactggcgtctgaatcataagaaagcctggccctgccaggctttgaaaacctgcacaatacctttgaaatgaactccaaacgtgagtctatgctttccattcttaatacactgagaataaatattgcctgtgagcgagcttacttcattttcactgttatctccttcagaaatgctgtgtgcctgtgttcaactttttaaaattaatattcataaacctcattcattcaaatgcatgaggggagaaacagaacagatatgatgtattttttgacctcaaagagcatacaatctgggaggaaggatatccttaatttgaaggaaaccactagaaaaacatacatgctaaagtggagcacgagacatttatatcaaagagcggtgaggaggtggaagaagtgggcagtgcatagggtgaagtaagtc

SEQ ID NO: 358123 - DNA, 488 bp, Homo sapiens
aagtggaggtggtctgagcagaccacctcaatttctatttcagggaatattttattatataaaataagattacattttgaataagtttgtactacttctgggggaaaaagaatttatatttagaggtaattactgaaaaattcgataaactttgaggcaaatayatgggcaataggtaaacatttttcaagtgtcaaaagattcaacttttgatatcacaagacaagtatcggtacaaggtgggcgggggttgtgcttggtgaaccctcaagtaggtttcagatttgaacatgtttcaagtgatcatatcaaactgttctaagcaactagaaagtgcataaaatgtgaagcagcctctcagctgtggtctccaacatgacaaacctgtagataagatagttagacagatagatctctaatttctagttttgatacatcaattttttttcaatctagcagataactcatactaagtgtataaggttagt

SEQ ID NO: 358124 - DNA, 488 bp, Homo sapiens
aagtggaggtggtctgagcagaccacctcaatttctatttcagggaatattttattatataaaataagattacattttgaataagtttgtactacttctgggggaaaaagaatttatatttagaggtaattactgaaaaattcgataaactttgaggcaaatacatgggcaataggtaaacatttttcaagtgtcaaaagattcaacttttgatatcacaagacaagtatcggtacaaggtgggcgggggttgtgcttggtgaaccctcaagtaggtttcagatttgaacatgtttcaagtgatcatatcaaactgttytaagcaactagaaagtgcataaaatgtgaagcagcctctcagctgtggtctccaacatgacaaacctgtagataagatagttagacagatagatctctaatttctagttttgatacatcaattttttttcaatctagcagataactcatactaagtgtataaggttagt

SEQ ID NO: 358125 - DNA, 606 bp, Homo sapiens
atggtggtatttatgtagaaattatcagtttatgtatgatatggatatatttaggytggtaattacagtttttgccattgaatgtaatggcaaaaattgcaattacatttgcaccaacctaatagaaaatcaatgggttctgatgcttgaaatcaggattcgtactgtgggagaaggttatgcaaatcaggagtgggtgaaattgaagaaccctgtggtgttgggtttcaactagagataacaacgtgaatgaatgcatgacttttagaacaatatatttatcatatatgttcattggaagtgcctacaagcgataaccacagtagcaaccacataaacacagctagtgcagatggtgttttctaaaaaatctgcttccactaatagaaaccactcaccttggagaaatatctaattccaaatacattacatataaatgatgaggtgagcctaggatatcttattatgcttgaaaacaagagatgttcaaataataatgaattcttgtcgaaacaacatggatttgatttgaatgggctcccacactcagcatctaatttgagcatcggaaaaaaaataatgatggtaatgacttataccacatca

SEQ ID NO: 358126 - DNA, 606 bp, Homo sapiens
atggtggtatttatgtagaaattatcagtttatgtatgatatggatatatttaggttggtaattacagttyttgccattgaatgtaatggcaaaaattgcaattacatttgcaccaacctaatagaaaatcaatgggttctgatgcttgaaatcaggattcgtactgtgggagaaggttatgcaaatcaggagtgggtgaaattgaagaaccctgtggtgttgggtttcaactagagataacaacgtgaatgaatgcatgacttttagaacaatatatttatcatatatgttcattggaagtgcctacaagcgataaccacagtagcaaccacataaacacagctagtgcagatggtgttttctaaaaaatctgcttccactaatagaaaccactcaccttggagaaatatctaattccaaatacattacatataaatgatgaggtgagcctaggatatcttattatgcttgaaaacaagagatgttcaaataataatgaattcttgtcgaaacaacatggatttgatttgaatgggctcccacactcagcatctaatttgagcatcggaaaaaaaataatgatggtaatgacttataccacatca

SEQ ID NO: 358127 - DNA, 606 bp, Homo sapiens
atggtggtatttatgtagaaattatcagtttatgtatgatatggatatatttaggttggtaattacagtttttgccattgaatgtaatggcaaaaattgcaattacatttgcaccaacctaatagaaaatcaatgkgttctgatgcttgaaatcaggattcgtactgtgggagaaggttatgcaaatcaggagtgggtgaaattgaagaaccctgtggtgttgggtttcaactagagataacaacgtgaatgaatgcatgacttttagaacaatatatttatcatatatgttcattggaagtgcctacaagcgataaccacagtagcaaccacataaacacagctagtgcagatggtgttttctaaaaaatctgcttccactaatagaaaccactcaccttggagaaatatctaattccaaatacattacatataaatgatgaggtgagcctaggatatcttattatgcttgaaaacaagagatgttcaaataataatgaattcttgtcgaaacaacatggatttgatttgaatgggctcccacactcagcatctaatttgagcatcggaaaaaaaataatgatggtaatgacttataccacatca

SEQ ID NO: 358128 - DNA, 589 bp, Homo sapiens
aaatgttttctatttatagaatttttgttaaccctcttactttgttttttatgtttatcatatatgttagtaatccaaactctagaataatatataggaaatgaaatcatatctattacactgtttttgtttgctttgctcagctttgttagtraaaaaatcatatttatacatgtagttgtagtacatttttaaatttaggattccattttgtaaatttaccaaatttttaaaatatattctattgatgatgaaaatgtaaagaatttcatagttagctaatgtggaattttaagtcagccaggctggcttctttcttgttgttttgctatgtatcatttttattatcaaaaatatctcgaggcttcagatgatttctcaggatccagccattatatccacattctgggcagcacaaaagttagaaagaaggaggcaggcacactcttttaaagacattttctagaagctgttcatgttgttttcacttgttcccaatggtcaaaattgaatcatttggtcacatccaggtacatgggagctgggatatgcaattttcattttagggagtcatatgtttaggtaaaaa

SEQ ID NO: 358129 - DNA, 589 bp, Homo sapiens
aaatgttttctatttatagaatttttgttaaccctcttactttgttttttatgtttatcatatatgttagtaatccaaactctagaataatatataggaaatgaaatcatatctattacactgtttttgtttgctttgctcagctttgttagtgaaaaaatcatatttatacatgtagttgtagtacatttttaaatttaggattccattttgtaaatttaccaaatttttaaaatatattctattgatgatgaaaatgtaaagaatttcatagttagctaatgtggaattttaagtcagccaggctggcttctttcttgttgttttgctatgtatcatttttattatcaaaaatatctcgaggcttcagatgatttctcaggatccagccattatatccacattctgggcagcacaaaagttagaaagaaggaggcaggcacactcttttaaagacattttctagaagctgttcaygttgttttcacttgttcccaatggtcaaaattgaatcatttggtcacatccaggtacatgggagctgggatatgcaattttcattttagggagtcatatgtttaggtaaaaa

SEQ ID NO: 358130 - DNA, 513 bp, Homo sapiens
cacttctcatgttcattcagtctcacatctattgattccagctttcgaattttcaaatatttattattgctttcatccatgctgctggatgaaactgagtttggaatagctctttaccagaatggtagaaatgctcaggatgactgagatacggacaagggttggccaaaaatccgtatggctacaaaatttagtgtgtccaagtagtaaggtaatggacaaaattcaactgaattacaaaatartaagcagaaagacaagtattgtgctatgggtatagagggtggacaccaatttcactatgtaggaggaaggtttggggctcacagtgggcaagacgaggctgggaccatgtcactgtgtttccttatctacagacttggattaatctcaatcagtttccttatctatagacttagattgagaaatatatttacaacattgaagacacattattaaaacaaataactaccgaaatttattgttactctgcactaacaagttatcattaac

SEQ ID NO: 358131 - DNA, 631 bp, Homo sapiens
ctgttttatgctaggtctagaactaggcataggactcagctactttgcttgaatgacaggttaaaagtaactgctaagtattgatcatgtggtcaatagattggatatttgatgataccaaagagattggcacttagcccctgtggcaatataaacaggtttaaaattgaagatgaagtattatttgttattcaacagttccttgttttttattagcctaaagaaatttcctcgtttttactagcttaaatccaagctataaatacaaaaagaaagaaaacttgaaaataaaccttamgatttcattacatttagatccccataataataactacatttgttgatagctttccatgtgccaagcactgagtttggtattttacatacatctaatttaagtggactccttctttctttctctaggtttgattttagatgaggcattcttaactctaaaactcattttagctccttcaccacattgctgagtcattcttctccctctgcatgggtcgattccctttctttctttattccattagtcctgttatattcccaatgcagttgagtttaatctcttttgttgcttgctaactccttttctcagagctcaccttttatttcaataagt

SEQ ID NO: 358132 - DNA, 531 bp, Homo sapiens
tcccaatgcagttgagtttaatctcttttgttgcttgctaactccttttctcagagctcaccttttatttcaataagttattgtcccaaactgtattagtctgttttcacagtgctataaagcactgcccaagattgggtaatttataaaggaaggagatttaattgactcacagttcagcatggctggagaggcctcaggtaacttacaatcatggtggaaggtaaaggggaagcaaggcgccttcttcacaaggtggcaggaaggagaacgaatgcaggcggaactaccaaacacttacaaaaccatcagatytcatgagtactcactcactatcacgtaaacagcatggaggaaaccgcccccatgttttaattaactccactcggtctctcccttgacatgtggggattataggaattacaattcaagaagagattttggatagggacacaatcaaaccatatcacgcaccaagacagtttctgccttaagtggaatgcttacattaagataatagcattattttat

SEQ ID NO: 358133 - DNA, 566 bp, Homo sapiens
tggtgagctgagattgcgccactgcactccagcccaggcaacgagagcgaaactccgtcaaaaaaaaaaaaaaaaattcctattgcctagtgactgtataaatctgtagccattacagtgttgtagcacaatgcactaccttttctgtttagatatgtttagatacacaaataccattgtgttaaattttctatagtattcagtacagtaccatgtgtacaggagatatatatataggagatatatatatatatatatcaataggatatatatatatatcaataggatatatatatatatcaataggatatatatatatatttttttttttaataggagatatattatctcatgtagcctgggcatgtagtaggcataccctctaggtttatgtaagtacactctttgatgttcacacaatgaacattatgagcccgttttcacactgctgcatacytgagacatggctagggaggcctcacagtcatggcagaaagcaaggaggagcaagtcacttcttacatggatggtggcaggcaaaaagagagagcttatgcagaggaact

SEQ ID NO: 358134 - DNA, 618 bp, Homo sapiens
ctctttcttctgaatctaaaaaaaaaaaaaaaaaaaaccctccaaaacagaaaaaaaaaaaccctttgtttctttgttaaaattatccgcccccccccgccaacacatacacataattccagctccaatggtggaaaaagtaatgcaatttagcttaaacatttctaaaaacaaaagctctgggtgatggtctctctttgagattgtgggttttctgagtcttcaggaagcacctgcccctaatgtcaagtatttccttttgacattatgtaccattcatttggatatctgtagggagtaatatatctgactgatttttttttaaatgaaagctattaatgtgtattttctatctgttgtgaagctgccttcttctggaactctttgcagggtgtttgttttagtccttttccaaccttctgcctgtgcctaggctgggatctcctgccttctgtttcctttacctccagtacatccttgagtgaacaccatcatacagtgttaatgttatagctgcatattggyctctccgagaccatgtatttcaacatgacacagccctacctgcacgctgcttgtgacatcccagagattctcacagtgcccagaatacagcag

SEQ ID NO: 358135 - DNA, 573 bp, Homo sapiens
caaaaatatcctccagaaagcagcttaccctcctttcgccgcatttccatttcatgtccattcttcaacacacaaggttcagcctctcctcatagccctgccaaawctgttcttgtaaaggtcatttgatcccaatggttccaattccaatgagactacttagtcctcatatgatgttactattcacccctcatctcaacctttatttttcttaaaaccttctattcctcaggattctctaacaccacagattcttgttttaactacaattcaatgaccttctctcttctcaaattcccgtgatggagtatcttgcatgacttgctttctaggtcttggaatcactagggccgggtttaggatagcatcctttttatacctatcctcttgcccaatcttctatgtacttaaacattgtgtttgtctcattccagactttgacacccctgattttttatgtcctacttcttacataatatctctaccttatcttaccaacatttaaacctatatgtctcactgtattcaccatctcacccagctcctgttaataatcagaaactatccttaatt

SEQ ID NO: 358136 - DNA, 573 bp, Homo sapiens
caaaaatatcctccagaaagcagcttaccctcctttcgccgcatttccatttcatgtccattcttcaacacacaaggttcagcctctcctcatagccctgccaaatctgttcttgtaaaggtcatttgatcccaatggttccaattccaatgagactacttagtcctcatatgatgttactattcacccctcatctcaacctttatttttcttaaaaccttctattcctcaggattctctaacaccacagattcttgttttaactacaattcaatgaycttctctcttctcaaattcccgtgatggagtatcttgcatgacttgctttctaggtcttggaatcactagggccgggtttaggatagcatcctttttatacctatcctcttgcccaatcttctatgtacttaaacattgtgtttgtctcattccagactttgacacccctgattttttatgtcctacttcttacataatatctctaccttatcttaccaacatttaaacctatatgtctcactgtattcaccatctcacccagctcctgttaataatcagaaactatccttaatt

SEQ ID NO: 358137 - DNA, 573 bp, Homo sapiens
caaaaatatcctccagaaagcagcttaccctcctttcgccgcatttccatttcatgtccattcttcaacacacaaggttcagcctctcctcatagccctgccaaatctgttcttgtaaaggtcatttgatcccaatggttccaattccaatgagactacttagtcctcatatgatgttactattcacccctcatctcaacctttatttttcttaaaaccttctattcctcaggattctctaacaccacagattcttgttttaactacaattcaatgaccttctctcttctcaaattcccgtgatggagtatcttgcatgacttgctttctaggtcttggaatcactagggccgggtttaggatagcatcctttttatacctatcctcttgcccaatcttctatgtrcttaaacattgtgtttgtctcattccagactttgacacccctgattttttatgtcctacttcttacataatatctctaccttatcttaccaacatttaaacctatatgtctcactgtattcaccatctcacccagctcctgttaataatcagaaactatccttaatt

SEQ ID NO: 358138 - DNA, 523 bp, Homo sapiens
ttttcatgtagtaaaatactacttggcaataaacaagaacaacttagtgaaacataaacaacatagatgaatctcaaaagcattatgctgagtgaaacaaatcaaatactacaagtatattatatgattccttatacctgaagtgacatagaaaaactattctattgtgatagaaatcagaacagcggtggccaactgtgggtggtggctgactagaacagaatgtgaaaaaaacacatctaggatgaaggataattgagatgttgtttaccasgtgtatacactgatccacgttcattaaattacacacttaggatatgtggttttcatcgtatgtaaattttatttcaaggagaaagtaaaagaaaatatatcaagtgataaacaggtacgaggatgtacacttccttaagattcctaaaatgtacataattcttattccaggacttgtacttctatctcctaaggaaggtatacaaaataaacctcctccttggtatataaataaaaagatctatatcta

SEQ ID NO: 358139 - DNA, 585 bp, Homo sapiens
acttaaagtctaaaacctgaaaccataaaagttctagaagataacatcagaaaaactcttctagacattggcttargcaaagacttcatgagcaaaaacacaatagcaaattcaagaaaaacaaagataatagattggacttaattaaactaaaaagtttctgcacagcaaaacaaacaatcagcagagtaaacagacaacccagaaaaggggagaaagtctttgctttctgtacatctgagaaaaaactaatatccacaaggaactcaaacaaatcaacaagaaaaaaaattaaacaatcccatcaaaaattgggctaaggacatgaatagacaattctcaaaagaagatatgcaaatgacaaacaaacatactcaaaatgaaaaaatgctcaacatctttaatgatcaggtaaaggcatatcaaaaccacaatgcgagaatagccatattcaaaaaattaaaaaaaatccatgttggcatggatatagtgagaagggaacagttttacactgctggtgggaatgttaactggtacaaccactatgaaaaacagtgtgaagattgcttaaagaactaaaattag

SEQ ID NO: 358140 - DNA, 561 bp, Homo sapiens
ctatgaaaaacagtgtgaagattgcttaaagaactaaaattagagctaccatttcatccagcaattccacaaccgggtatctacccagaggaaaaaaaagtcgttatataaaaaagaagcttgcacccacatgtttttagcagcacagttcacaattgcaaaaatatggaaccagcccagtggtccatcaatcagcaagcggataaagaaattgtgatatatataccatggaattctactcagccataaaaatgaatgaaataatggcattcatagcagcctggatggaattggagaccattctaagtgaagtaactcaggaatggaaaaccaaacatcatatgttctcacctgtaagtgggagataagctatgaggatacaaaaggcataagaatgatacaatgaactttgggcacccaggggaagtggggggagggagatgagacataaaagaccacacacagygtacagtgtacactacttgagtgaggggtgcactgaaatctcagaaatcaccactaaagaacttattcatgtaaccaaaccccacctgttcccca

SEQ ID NO: 358141 - DNA, 593 bp, Homo sapiens
agaccttatcattaaattgacactgacttttgttgtacctgaaatttgaattattgctagatcaatttttactttgataaaaaatatgatgatatttacttttccaagttttctttttcttttttctataaagctgttgagaaaatcattgcatatatgctctagttaggggaaacctttctattttattgactcttacaagtgtcaagatgagagcaatagtttcatcttatggcatgatagcagtagtttcattaggtttttataaaaagaagtatagtgattcaatttatcaaaacctaacatggaaaactaaaaatatgttgttgaaatgattaccaggaaggatttttggcttcatctctcagaggtaaagagcttaaaagtcttcacttcattattaaaacaagaaaaacccagaaaaactaaaaatcaatgatttttttcagatccaccaaagaattgaaaytgtagtccaaaccagcactccaaaatctggaaagacaggtgcatccagaggggcactgctgagattgactaaccaggaacaaattttgcttgagccacaaactcataaaaacatgaaaatagta

SEQ ID NO: 358142 - DNA, 567 bp, Homo sapiens
  misc_feature (1)...(567): n = A,T,C or G
nnnnnnnnnnnnnncttagtttccatagagaatctgacacaatttccataaactccatcctcaaatacacagataatgtttactttctttagcttcagagatgtgaattttctctaagattggagagatctcaacccttacattaggttctgctactccatggcttggagatggataggcaattgaaactttatattgctgttttgaagtgataagtacactccatgaatgtattaaacattatacccctgtacraggttgaatattgtcccccctaaatttatgtctcccggaaactcagaatatgaatttacctggaaatagggattatgtagatataataaattaatctgagttatgctgaattaaaggcgggcttaaatccaatatgagctgctgtcctcataggaggaaaatttggagacagaaatgcagacataagtgggagacggccatgcaaagacagacgcagagatcagagtgatgccgcggcaaaccaagtaagaccgaggagtgccagccaccaacagaagcgagggaggggcaaggaaagcatcttctctaaga

SEQ ID NO: 358143 - DNA, 565 bp, Homo sapiens
cttattgccaaacgaagagagaaaacattataacatgtctccatgagcatatgctcaatctccaggacagagccctagaagtggaatttgtaggtctaaagatatgcactctaaaaatcttaccagaaaaagactaattgctctctaggggtgttatgcatcaacttatactagaccaatatactactaggtagtatattttcccattcctcaaatcttacattaacacttatatttaatttttgctgagctggatagatgtaaaatattttactgttcctttagtagttttctacagcagtcataacaaattaccacacatttagtggcttaaaataacaagcatttctacacttcagcatgggcgatagagcaagactctgtctcgaaaaaaaaagaaaagraaagaaaaaataacaagcatttattttctatagctctgtaggtcagaagactgggtatagtgtgttgttcagctgggtcctgcattcagaatcacacaagggcaaaatggaggcgtttacaggtgtatgtatgtttctggaagctcattcaggttattggt

SEQ ID NO: 358144 - DNA, 593 bp, Homo sapiens
tcaagaaaaatcccactatctctcctataatactggaatcagagacttcttactttcagataaggaaaggattacaaaaaaagttctccttttttaaaatcagaggaaattgaggttaaatatctccaaactaactcaagttcttcatagaaatagctagcatttactgaaatagctggcattacttcatgtgtgaggcaccatgcaaggtactttaaatatattaagttcatataagaaagacactaagtagatcaatctaatttttcaaaagctaacaacataaaataataggaaaatcttcaaaatgcagaaaaaaactatttattcacaaattacacaaaaaacaaacatccattactcaaaacaatataccaaatgttgagtactcacttctctagatacctatttaygttttgagaatgttctttattaaacaaaataaaataattaacatattttttggagcactctgaaactaacctctctaaccagagctaattttctgatgatataacttaaggaaagaatattcttttcaaggcaagtgctaatttctccaaccctgaaaagagatatgcattccaataaaa

SEQ ID NO: 358145 - DNA, 566 bp, Homo sapiens
gtggatatccaactgcctcagcaccatttgctgaagactattccttcccccattaaattgtcttgacacccttgtccaattaactgtaaaaatgtaggtttatttctgtactttcagttctatcccactgatctatatgtctacattatgcctatctaagtactatactgtcttgattactaatgctttcatatttactaaacttaaatatacatatgtatttaaagtaaatccaaagagctgcaattacattttcaaatttaagatagtttaaaatctcccaagggcactcctcttcaaagaacttcacaaaacaaaatggcagaggrgtagcatcagcaagatggcagagtgggaagccctggaccctccttcatccaacaaatacaccaattcagcaacaattcacaaacaaaattcctttgtgagaaatccagaaactaactgaaaggctcctgcaccctggatgaataagaatacacactcatcaaagccagaagggagattcaggacaccctctcaccagaatcctactcccagcacagctccacaggattgggaagaac

SEQ ID NO: 358146 - DNA, 502 bp, Homo sapiens
aattgtgttgcatttcagtgtattattaaaagaggataaatgtaacacaccatacctagtggcactggtctgtggccaggacacacaattgtaataaagttccctttcttccaataattcacagtcactttcttcctcaatkataacacatcaggaaggagagctttttcccaactggttactttttttacgggattaagtgagagagatgatgaaataataaatactaagtcaattcctgtatcttactaggagaggaaagcttaatcaatcaaaataatcttttctctttctgagatattttaaattaatgcatgccaaaatttaggtgtagcacagacggagttattcttttctcttcgtttaaagaggagaatatcatataatataaccaaatgaccaaattcagtttgacatttgtttcatcctttttatctgaatactaagtttaaataatggcaaacgggtttttaagatattttgtgttgaaaaatgtttaatt

SEQ ID NO: 358147 - DNA, 537 bp, Homo sapiens
ttttgccattctcctgagtctcagggatcttcatttctatccatattctgaattttattcctgtcatttcagcaagcccagcctggttaagaactcttgttggagaactgatgtggttgtttggaggacatacaacactctggctatttgagttaccagagttttcactggttgtttctcatctctgcatgtggatgttctttttactgcagtgtagaatgagtatagttactagacttcttttctggacattttcacagggctgatgctttgtgcagggtctttatytgaagctgacttcttgtctctggattcagatggggatatgttagtgaggtatttttggtattgaatctttggagtgtgatccagtacatgacacttaggcatttgttcagttattagactcttgctcagttgtgactcccctatattttctcagttgtagccatgttcactctcagtgctctaaaaatgtgggttcttctcaagtgctggctatagatcgtgacttggcacccctgggctgcccactgt

SEQ ID NO: 358148 - DNA, 651 bp, Homo sapiens
atcttggtgtgcataccatactgagtgttagtttttgttgtgagagagcacatgaccttggggtgtgtcctgagggttagctygtgttgtgagattgcataaccttgggttgtatactgagggttagtttgttttgtgagagaacatatgacattttgggatttgtagtggctgatgagtcactggcaagagctttagttttaaaggtaatttgctgtggctgtggtaagttgcagggtctgtgaactatgacttttgaaattcacagcaatttgaattatatcttttttgttactttatttttgtttttttgcatgttaagctagggggaaattattggccaagttagtcaagcagatctcaggcacaaggcataacttgactggtgggcaagattcaggcacttaaaagctattagagcacataacaccaaaaattagactactgtgggaggataaactagacacagagcttgatagcacccaacagcctaaagaaaatgttcctgtaatgaggtttactgtgaaagcattacatgacccaaccgtgtggtgtttccctctcggggtattatcttggctggaagacaccaaagattcaatgtaaaaataaaatccttgatttctatagaattaagtaatctattttcca

SEQ ID NO: 358149 - DNA, 590 bp, Homo sapiens
tggcatgcaaataaaagagcttaactaaaattgtgagcaagtggagatgaaagtgaaacttattcactattcccctaatattccctccatgtgaaggtatgttctttagtatgacactctactttcttatactttcttatgattattcagagttttaagagtaaagaactgagcctagctagttctacctccttctcagttgcttgtctaaattgtaagcttaaacataaagcccctgctctgactgggttagaagtagaagcaggctaacgtggtatagtaatatttgttactgcattgggaagtctgtctaattctaggactctgggctaggatcaatttgcccattcatataagccccactttccaatgtctgctttattgggtgaaaaggtaaatctgatttgtgaagatggccgactagaggcaactagtgtacacagctctcgtggagaggaatagaarcgaagagagaatacacaccttcaactgaaacacccttgggactaatcatgccttgagactgatcaagaaaacaacttgacccatggagaacggagaaaaacaagactggacgatggcccacccag

SEQ ID NO: 358150 - DNA, 569 bp, Homo sapiens
tcacttatctttaattcttcagtatttaaattaaatttcccatattcttccatatttttcttattttgttgtctgcctttatatagatgctagcaattgttttcttattcatccatccactcattccttcatgtattttggtttttaaagatgtgccctaaacaccagaaaaggagagcagtttaatagagaaaagccacccattttatcacttgtcggccttttggctaagatcaagtgtgagaaaagscacccattttatagaaaatggtagttgactgcaactactaatagtatttatcaacattttagctcagctcaccgagtgatgactgtttgaacatggccttttttatcctctctacccacctccctctactatttctatgtcatatagaaaaaaagaatgaaaaaggacatgttctgtatgaaacacatgaacatgttcttcctcattctttttcagtttttctgctaaaagaatatagaaacagaatgcctttctttcttaatgaagaatcatttccatcatgaagttttaatggagggggacagaataagtttttaac

SEQ ID NO: 358151 - DNA, 569 bp, Homo sapiens
tcacttatctttaattcttcagtatttaaattaaatttcccatattcttccatatttttcttattttgttgtctgcctttatatagatgctagcaattgttttcttattcatccatccactcattccttcatgtattttggtttttaaagatgtgccctaaacaccagaaaaggagagcagtttaatagagaaaagccacccattttatcacttgtcggccttttggctaagatcaagtgtgagaaaaggcacccattttatagaaaatggtagttgactgcaactactaatagtatttatcarcattttagctcagctcaccgagtgatgactgtttgaacatggccttttttatcctctctacccacctccctctactatttctatgtcatatagaaaaaaagaatgaaaaaggacatgttctgtatgaaacacatgaacatgttcttcctcattctttttcagtttttctgctaaaagaatatagaaacagaatgcctttctttcttaatgaagaatcatttccatcatgaagttttaatggagggggacagaataagtttttaac

SEQ ID NO: 358152 - DNA, 480 bp, Homo sapiens
tctatgtgaattctcaaatgacatccctkttaaagctgtggtaatataaccagtatttctaatggtatcttgttataaagggagttgattataatttagcttatccaaataattatatttccctaaaataacaatattcctgaatagtttctaaattctggatggataagatagggagaaaaagtaaatgtttccatttctgttcacaagaatagactttaccaaatttctgtaaactatatatagctcaaaagaaaaacataatctttaaatctgaaaaccagagcattttttaaaagcaatatttcaaattaataagatgcataaattcataattatttttatcagctcattctgtctcatgtaattaattattgttttgtttgttcttagcagtttcacaaatccaacagagttagagttctagaaattcttacctggtccaatggtataatcttaatgttatcagaaatctgtatt

SEQ ID NO: 358153 - DNA, 533 bp, Homo sapiens
attatctgttgttacaatattctgtattataaaagtgagatccttcttttaaatacacagtcactcaggttggcaagctttttaaagatatgtgttaagtgcatactagaaaccctgtgattctcattttcttatggtttagaggtctacggctgttcaacaaatgtcatgattgcatgttagagagatcagagtaattaaagttcaaacaagtrtggacatggaaattaacaacactgtcatcctcactggacactcagttttttcattgttttgaaatagagcaataagtcccaaagtgaccttacaaaatatccagtgcaactcactattttacagatgaaaatgaagccccacagaggctgaatgtttcttccaaggaaaactcttgtaagcaagtcctggcgcattttgatgttctggatataacacgctccctttgacatgttatctgttcactctacttataaggacaaatacaaattaaaactagaggcttaattctaccttttgaagagagatttcccttccct

SEQ ID NO: 358154 - DNA, 533 bp, Homo sapiens
attatctgttgttacaatattctgtattataaaagtgagatccttcttttaaatacacagtcactcaggttggcaagctttttaaagatatgtgttaagtgcatactagaaaccctgtgattctcattttcttatggtttagaggtctacggctgttcaacaaatgtcatgattgcatgttagagagatcagagtaattaaagttcaaacaagtatggacatggaaawtaacaacactgtcatcctcactggacactcagttttttcattgttttgaaatagagcaataagtcccaaagtgaccttacaaaatatccagtgcaactcactattttacagatgaaaatgaagccccacagaggctgaatgtttcttccaaggaaaactcttgtaagcaagtcctggcgcattttgatgttctggatataacacgctccctttgacatgttatctgttcactctacttataaggacaaatacaaattaaaactagaggcttaattctaccttttgaagagagatttcccttccct

SEQ ID NO: 358155 - DNA, 381 bp, Homo sapiens
tagtgaatcttatttagacagacattagctcaattatttgtattataaggttattcactgcaaatgattaattgtaagtagatcaaaaaagttgcagtgtgtatctgtaaaatggaatcttttgcagccatataaagtacggacatttgcaacaacatggataatcttgagtgcattttgtcaagtgccataaataattcagagaaagacaaataagatatggtatcrcttatgtgtggaatctaaaaaagttatctaaaaaactcatagaaacagtagaattagaacgatggctgccaagggctgagtggagggcaaaatagggacatgttggttgtagggaataattttcagttaaaagatgagtaagtttgggtggtt

SEQ ID NO: 358156 - DNA, 481 bp, Homo sapiens
ggaattttgctcatatgaaggagcacatgatgtaatcccagcactttgggaggccgaggcgggaagatcatgaggtcaggagtttgagatgaatctggccaacacagtgaaaccccaaytctattaaaaagacaaaaattacctgggcatggtggagggcgcctgtaatcctggctactcgggaggctgaggcaggagaatcgcttgagcccgggaagcagaggttgctgtgagccgagatcacgtcactgcactccagcctgggagacagagctagactccgccaaaaaaaaaaaaaaaaaaaaaaaaaagaaagaaagagaaaaagaaaaagcgcatgaaaaccctagaccactgtcattattactctctaagattaactttaatagtcaattacaaatggttgaaactctagagagaaaatatgtttccattaatagtgcaattatattttgaaagtaaatatggtgttaggaagatc

SEQ ID NO: 358157 - DNA, 522 bp, Homo sapiens
ccacgctttactttcaatagtacaactgtcacctttctttctaatttaaagcaccacaaacctaaagttgttgcatataacagattttagggaaaaaatatttcacagcaatgaacwgggactaatgagttcgttacctgtgcctgcttaggcttatttcaatgaaagtaatccaaagccagttctcgaaattacgcagattgtgcctcttcatgaaaaatacgaaactccccaatataatacacctcaatttctactttattgaacaatttttcgcattgttttcaaggtaggcaaggaagcattaagaatatctcctttaggacgacgggcacactttaatttctataagcatggagatgcatggtgtagtgggtaagaggacagtctcaggagatagaagtctctccctccgaccagctatgtgactcaggaatgttactgcctctcccttggtttcatacctctagttgaaagtggtgataatgcagtacctatctcatagtgctgctgggagatttc

SEQ ID NO: 358158 - DNA, 522 bp, Homo sapiens
ccacgctttactttcaatagtacaactgtcacctttctttctaatttaaagcaccacaaacctaaagttgttgcatataacagattttagggaaaaaatatttcacagcaatgaactgggactaatgagttcrttacctgtgcctgcttaggcttatttcaatgaaagtaatccaaagccagttctcgaaattacgcagattgtgcctcttcatgaaaaatacgaaactccccaatataatacacctcaatttctactttattgaacaatttttcgcattgttttcaaggtaggcaaggaagcattaagaatatctcctttaggacgacgggcacactttaatttctataagcatggagatgcatggtgtagtgggtaagaggacagtctcaggagatagaagtctctccctccgaccagctatgtgactcaggaatgttactgcctctcccttggtttcatacctctagttgaaagtggtgataatgcagtacctatctcatagtgctgctgggagatttc

SEQ ID NO: 358159 - DNA, 522 bp, Homo sapiens
ccacgctttactttcaatagtacaactgtcacctttctttctaatttaaagcaccacaaacctaaagttgttgcatataacagattttagggaaaaaatatttcacagcaatgaactgggactaatgagttcgttacctgtgcctgcttaggcttatttcaatgaaagtaatccaaagccagttctcgaaattacgcagattgtgcctcttcatgaaaaatacgaaactccccaatataatacacctcaatttctactttattgaacaatttttcgcattgttttcaaggtaggcaaggaagcattaagaatatctcctttaggacgacgggcacactttaatttctatargcatggagatgcatggtgtagtgggtaagaggacagtctcaggagatagaagtctctccctccgaccagctatgtgactcaggaatgttactgcctctcccttggtttcatacctctagttgaaagtggtgataatgcagtacctatctcatagtgctgctgggagatttc

SEQ ID NO: 358160 - DNA, 595 bp, Homo sapiens
cgaaattacgcagattgtgcctcttcatgaaaaatacgaaactccccaatataatacacctcaatttctactttattgaacaatttttcgcattgttttcaaggtaggcaaggaagcattaagaatatctcctttaggacgacgggcacactttaatttctataagcatggagatgcatggtgtagtgggtaagaggacagtctcaggagatagaagtctctccctccgaccagctatgtgactcaggaatgttactgcctctcccttggtttcatacctctagttgaaagtggtgataatgcagtacctatctcatagtgctgctgggagatttcaatgacttagytgtaaagtgcttagagcagggtctggctcagagtaagccttacatatgaatttataaagtacatgaattggatggcgtcaggttacatcatctgaatacaatggaaaaatcatcatcttaagcaataggatatcaggaaggtatgaatataaaattgtttggtcacagaagtctccgtcccagggctaaattctttatatagtttgtgattcaacagtaaactcaaagaaagagaaacaaacaagaac

SEQ ID NO: 358161 - DNA, 595 bp, Homo sapiens
cgaaattacgcagattgtgcctcttcatgaaaaatacgaaactccccaatataatacacctcaatttctactttattgaacaatttttcgcattgttttcaaggtaggcaaggaagcattaagaatatctcctttaggacgacgggcacactttaatttctataagcatggagatgcatggtgtagtgggtaagaggacagtctcaggagatagaagtctctccctccgaccagctatgtgactcaggaatgttactgcctctcccttggtttcatacctctagttgaaagtggtgataatgcagtacctatctcatagtgctgctgggagatttcaatgacttagttgtaaagtgcttagagcagggtctggctcagagtaagccttacatatgaatttataaagtacatgaattggatggcgtcaggttacatcatytgaatacaatggaaaaatcatcatcttaagcaataggatatcaggaaggtatgaatataaaattgtttggtcacagaagtctccgtcccagggctaaattctttatatagtttgtgattcaacagtaaactcaaagaaagagaaacaaacaagaac

SEQ ID NO: 358162 - DNA, 513 bp, Homo sapiens
aaattacagaaatgaaaccatctctttttaaatagtaatttatgcttctgttatatttactggaaatattaaccatgtgtaataagcataggtatctcgtttgtatccaaataatgtatttgatctgaattttcaaggactttgagtatatattattataaacaacatawctatcactgagctcatcttatattttctgccttaaagaccccttactgtatgtgtcatttatttcagatagtcatgattccatcagtaacatacataggacctaaatttatgtttgggtcttccttttagtctcacacaaatctattgtcatggcatgcctaaactttagtggttatatgttttccaataattagttcttactagcattgacatcattcccatttcatctcaaatcaaagatgcacaaaggatgactaaaatagtcacacaattttttcttctttgtcttccaatcatctcctagacatatcatctattattctttcttattgacattaaatg

SEQ ID NO: 358163 - DNA, 558 bp, Homo sapiens
ggtctcacatggagatgaggaacttgtttggtactggagtaaaggtcactcttgctatgcaaagagactggcagcattttgcctctgccctagagatctgtggaactgtgaacttgagagaggtgatttagggtatctgactgaagatgtttgtaagtggaaaagtgttcaagaggaagcagagcatagaagtttggaaaatttgaagcctgacaatgcagtagaaaagaaaatcccattttctggggaggaatttaagccaactacagaaatttgcataagtaaaaaggagccaaatgcaatgtctccaagacatgtcagaggtcttcacagcagctcttcccatcacaagctgggaggtgtaggaggaaaaaatggttttgtaggccaggcccagggccttgctgctttgtgcagtctcaggacttggtgycctgtgtctgagcagtggctaaaaggggccaatgtggagttcaggctgttacttcagagggtgtgagctccaagccttggtggcttatgtgtagcgttgagcctgtgggtttacacagaagtcaa

SEQ ID NO: 358164 - DNA, 493 bp, Homo sapiens
aaccattgatattatttatattaattctggctattcatgctgtcttataattagcttctacatggttttaagattgttttcaataattgaacgggaagttggagttgatggagtcttgtatgataatcaaaaggttttatctataatcaaaattataggataatgacatcattgagatagtgataaatatatcacaattaaaaatacataatgataattctcattagaaaacaaatgtgcccactaagatttttgagagattactttatctccattaaaataacctggcatttgagtaggaatgattttgtttattgtggggatttaaatgataaaatagtcacttgggtttktgttatttacaatgttaataactgttaacagtataaacaatttaataaatctcagaatccacaatgaattgaatgatcaattacgtctattatcacttaatcaagtctggttttttgaattatagttattaacatgtaag

SEQ ID NO: 358165 - DNA, 493 bp, Homo sapiens
aaccattgatattatttatattaattctggctattcatgctgtcttataattagcttctacatggttttaagattgttttcaataattgaacgggaagttggagttgatggagtcttgtatgataatcaaaaggttttatctataatcaaaattataggataatgacatcattgagatagtgataaatatatcacaattaaaaatacataatgataattctcattagaaaacaaatgtgcccactaagatttttgagagattactttatctccattaaaataacctggcatttgagtaggaatgattttgtttattgtggggatttaaatgataaaatagtcacttgggtttttgttatttacaatgttaataactgttaacagtataaacaatttaataaatctcagaatccacaatgaattgaatgatcaattaygtctattatcacttaatcaagtctggttttttgaattatagttattaacatgtaag

SEQ ID NO: 358166 - DNA, 571 bp, Homo sapiens
gttcaggtagtccaatttagtaaatcaaacagatatatgtcaatatacaatgaggacatgacaagcagttagtactgttttaatcctcttctagaaatactgctatctaaatcagctagtctattagtatgtgcttgacatatttatgctcactctactttcaccagaaaacctgtggttattactaattgaagaggcaagtggtcttttatatagaggtcgatcctgagggctttgggcacattagtaaatgttatgtactttattaaggctyatactgatttctgtggtaactcttagaaccttttattctacatcactgtcatgtaaaagtcaatttatgcgtgggtggcttttgtttttttggtgagtctgtggtataaccagagtcctaattgtgtggagcattatgactacaatttataactccaggtgtgctagctgctgctgaatcattcttaggactctaccctaggtcatgctaggtgggttccttaatggatctgaggcagatctacagcagcacacataccatgggttaaggaatagatttaactgaggacagaagaaa

SEQ ID NO: 358167 - DNA, 639 bp, Homo sapiens
aaacattcccagagttcaaagaaccattctttcctaactttccacctgcttattcaaatgctactcatttttgcttacttttgctggtgtttaacccaaaatataacctgggaaggagtcctctcaatgtcagattcacctaattcctccttggagaaattccatttcttcctgcctggatttatacaatacctggtctcgcctcacaataatctaggccttgttaaccttagtagatgcatttttacccataaaaatcatgtttatttggcaacatacagtgattcacaccctctaaaagtttacagtcagaaagaataaatgttgatatagagcacatgaaagaagtgaaataattgtttattttaaactgagtaacgaaaaaggaagaatggaatgtgaagataaaacacgggagccgggagggcggaaacatggcaaacctgccaccamatgaaaattggacaggcaaaaaccttacaagacaataaggttgatgtgaacacaaatgagttttctttatccttttgcttgtttatatctgacttatgttctgcatttcattctgccgtgttctctcttattgtttatattgaaggttattttaaaaataatgtttattgtaaaagttacaaacag

SEQ ID NO: 358168 - DNA, 628 bp, Homo sapiens
caacttctttaaattaccttaattttatcccagtcatttagggtggataacttggattcctaattgatatcactcttcctatccagtaatgcagcaatcaagatttcttcacatgttttgtgggttcaattctttctatttccaaaacttctgccatatttaaagcacttattatttcacaccttaattaagaaataatctgctgattctgggccagtctttttaccaacccataatggattagttattattttattatttcccttctcaaattaagaaagctaacctcctagagacctccccagagaactctgacccacgatgtggaatctactccatatgctgatgtgtgtgtgtgtgtgtgtgtgtgtgtgtgtgtgtgtgtgtgtgtgtgtataaggctctggctgttgccaactgtgtaactcttggtaggttacttaacttctctgagcctcaggctctttgtctaaaaaatggggataagtccagtagaaagtgggcaaagaacgtggatagacaattcatagaatacaaatgaaragtgtatatatagatatatatacacacatatatatacgcacatacatacacacatgcatatatataatgccctttattacatgtt

SEQ ID NO: 358169 - DNA, 537 bp, Homo sapiens
atatctcattattgagatatactattttccaagttctaataaatattaaagcataaatgagcataggtagaaatgaatgaaaggtagcttgtggcctgaatacatctttcaactgtgacttaactaaaataagaggtaggatttagagggaattttaggtgcaggtaagaycctcaaattttccataaaaaataatacatacagtattttagggtctgctttactaggggttagatgcagaaaggagagaggggcaaaagaatgaagtcagagtggcagaaagaatgctcatctctccaagtgggctttggacaaagacttgaataccatggctacttggaggacaaagatgcatggtgtggggggaacaacatggtgtggggggaacagcagggtgtggtgagggaatgagtggtacaatcctaaagacaacagtgaatccctatggtggatagagtatttatacccatctgctttttgtataaagtgctttgagaagctgtctaatccctctgatgtctgatgggcagggatgcc

SEQ ID NO: 358170 - DNA, 528 bp, Homo sapiens
ctttggtaaaggattctagtttatatttaattctttaaacatgcactggaactgaaactaacattgtcttccagttttctctkggttaacccagagatctcgagtttagcctgcagaagtgctgaaccacccagagttgttagccaaaatgtgaggttgagggcatggtcttcaagactgccaggttggcccaaacttctgacaccaactgcaaggagtttgggtcttactacaaagtaaggagcccagtcaccaagacttccctcacttctgacatcaactgcaaatatgaggggttcccaaaaccatccttaggttcaataatttgctagaaggactgacagaactccctgaagactgtatactcacagcaaagaatgcagatggaaaggaagagtgtagggtaaggtctgggagggctgcaagtgtaaagcttctatgtcctctggatgtgttaccctttaaagcatccatgtgtgacaatatgcatggagtattaacaacctgggaagctctttcaagcttcag

SEQ ID NO: 358171 - DNA, 463 bp, Homo sapiens
taaaattactgggtgaaattatgataattaatgctatgtttgcatagtctcaaagaatcttataagatacttaytaactgtggagggagaaacagtaactttacagtggagaaatctggaagacaccattgtcaccaagtgatcaaagttaacatcaccagtattaagaaaaccctagaatggtactcatcaattacatcagattccaccacttatgggtaaagcccacttactaggctgcgtgctttatgtgttctccaaagtcctgatcttgggataatcaaaatactgaaatgtttacaaggaaatatgagttcttcatcacagaactacgtttaataacctagacaaaactttctgatcaatcttatttcagtggtttggtatatttcacataatttatctttgggaacaaagtgttttgttttctacacctttttccattgtctatgtgaccactaaa

SEQ ID NO: 358172 - DNA, 523 bp, Homo sapiens
acatatcattaagagaaatctaatttccacaattaaaataaaatgccacaccttatttatatactaaaattcctattaggacattcagctgagccatgatactatttggatttacaaactctgtggatagagactgacaagaaaaaatcttgaatcctcaattatcttaaaatgcatagatgatagtcacttatgccacctcggaaaastgtttcttgttcttcctaatcttatagatcaaaggttgcctaaccaatattcattttaaattgatactttcattttagcattcagttttatttgggaattgctctcatcactttttaacaattttcttaagatagaatttacatacaccatacaatctacccatttaaagtgtataaatcaatagtttttagtatattcccagagttacataaccatcaccacactccagtttaaaaatgtttttgatcataccaagaagaaacactgtacctattatcacttactctaatttgctgctctccttccccccagc

SEQ ID NO: 358173 - DNA, 622 bp, Homo sapiens
ggtgtctcacatttctctgaggtgctgggggttttcttattattatgctttcttttctctgttcttcagattgcataatcttcatcagtgtattttcagtttattgattctttttctgctgggctcaaatttatcattgaatttttcatatggttactctacttttcaactccaaaatttcaattagattcttttaaataatttctgtttatttatcaatattctctgtttgatgagtcattcccatcatacctccctttaaccattctttatagttcagagttgggcatgtgaaggaagctggttcaattagatatactagaaaattgtttggaaagttggggcagaggatgaccttcttccctctgaatgatttgggtatgaatatgagggctaaaactgctacagctctttytgctaccatgaggtaagttaacctgaggattaagccaatacatatgaaggaggagaataataaaatatctaaggaaactgaaacactggttgaaacactgatgatgtcttaacctctgaatcaaatagcattgaagttttacctaataatactttcagttatatgagctaggaagtactccttgttaagaaaatttaacttgtgaaa

SEQ ID NO: 358174 - DNA, 321 bp, Homo sapiens
cacctcttcctagtgggtgcgtcattatgggagattgtatctatctatataatcttctgtaatttagcatagagaagaaaactgggtgatgagttgccagctaatttatataaatgagatatgggaaaagatctaaccccttcctaaatccccyaccattaaaaaaaactgttgtaagtttagaatgcaaattctgtgtatccagtcatgaagtattttttaaaatgtaatttaagagttaaggccactgtccttgtgagttcttttttttttttttgaaaatatttcttttgtttaaatgcagccaggagctctatattt

SEQ ID NO: 358175 - DNA, 591 bp, Homo sapiens
aatgaacatccttatatatttattttaatctatttagagtatatacatatggtaaattttcagcagtgagactgctgaatcaaagggagtttgcattttaaatggaaaggtattgcccactagtcttctagaaaggccgtcagagtttatgtctctgctttctcacacgttattcctccacagcattgtgaacactggatgctataaaaatatttattaaagaaatctaaaaagtttaccattttcttgcaaaacattttttggtgacaaattgtttaaagacaaagctcaaggcctcaggcttctttgcatctattttgtaatatcagtgcgttatctaatctgccagcaaatggagttatcagaagcaaatgtttcccaagttttattatctcagttaaaaaattttggaggaggttgttgaagatgaaggaagctaaaaaagtrgaagaaattatcttggattggtcttaagttttctgctatggtagtttcatgtacctatgaggtggataaaaattatagcaacaggttgaaggtaagactccaaaagatagtgaggtagaaaacttgcctgaattcctttgttga

SEQ ID NO: 358176 - DNA, 529 bp, Homo sapiens
aatgtgtttcataatactgtattctaactaagtttgagagcttcagttagaaaaaaatttaaaaactgctaaaaaaaaatattccctgtggtttttgttcttagactttgggctcatgtatcacatgcttctggcatgtgttcccagttgctaaggctctgagcagttcagcccgaagaatcattctggtcactttgttcttttgtagcttcttcattggtttcagctccaatagagcctctttgttgtacataagaaagaacagaagaaaggctctatctacatcctgtagctctgagggagactcagagactagactctctgacatttcagagatgttcattctcagaggctttctagctttttgccagttggcagtagagggctttgctctccccctctgctcccactcagatattatttatcataggagaaaaagaatattacagttgaaatagscttcattttcttcctagtctctttacccgccttctgtctgtagaggcagctgccattcagaaactcatgc

SEQ ID NO: 358177 - DNA, 624 bp, Homo sapiens
gcttgggttcatatgctagccctgtatcatgtaaccctggcaagttccttaacctctaagcctcagttttctcttctccaagatggagataattgtagtatacaccttctagaattgcttcatgttttatatgagttaatacacacaacaggctagaacagtacctggtcctgttaacatgtggttagttaagcatactttaaaacagctttcaagtttcatcccaaataccgtgtgaactgtgaggttctatacaactgaagttaaaaaagttttcagaatgaaaaatatctaacttggaaaaagactaaactaggacgtagtctatttctgttaccatggggcattgaatgtaatgtccaagtttatttaaatatttgcttctgctggaaagcaggargtcatctaagaccagggatgaagatgtgacattggagaaatcataatgtaaattagtgggtaagcatttttttgctttataaatattgatttgcttccaacttttcagtacagcctgatgcccccatcaaatgatgtgaatgctggaagacctgaactttagcttcaggtttttcaataactcacactgtgaccatgaccaaattctttcaattgcctgtgctt

SEQ ID NO: 358178 - DNA, 474 bp, Homo sapiens
taaatatttgcttctgctggaaagcaggaggtcatctaagaccagggatgaagatgtgacattggagaaatcataatgtaaattagtgggtaagcatttttttgctttataaatattgatttgcttccaacttttcagtacagcctgatgcccccatcaaatgatgtgaatgctggaagacctgaactttagcttcaggtttttcartaactcacactgtgaccatgaccaaattctttcaattgcctgtgctttaactggactcttctaagggcaaatgagataataactatgacctagcttttagccagctttttaagtgcttaaaataactaaggtgatgctaatacattttagcaatgtagcaatattattactataatgcttcaaatgaaaatgtagagtttttatcatttcagattaaacttttagaatcaaacacgttggcttatatttaattatttcatggtttga

SEQ ID NO: 358179 - DNA, 474 bp, Homo sapiens
taaatatttgcttctgctggaaagcaggaggtcatctaagaccagggatgaagatgtgacattggagaaatcataatgtaaattagtgggtaagcatttttttgctttataaatattgatttgcttccaacttttcagtacagcctgatgcccccatcaaatgatgtgaatgctggaagacctgaactttagcttcaggtttttcaataactcacactgtgaccatgaccaaattctttcaattgcctgtgctttaactggactcttctaagggcaaatgagataataactatgacctagcttttagccagctttttaagtgcttaaaataactaaggtgatgctaatacattttagcaatgtagcaatattattactataatgcttcaaatgaaaatgtagagtttttatcatttcagattaaacttttagaatcaaacacgttrgcttatatttaattatttcatggtttga

SEQ ID NO: 358180 - DNA, 573 bp, Homo sapiens
aaatgttgacttcttcctcttggcacctttcttgtaacaataaaaacctgtcctgaggaaaaatcatgcccatggaagaatggaggcagaagagtcacataaaaggaattttagaaagataaaaaatgtagactacatttcaaaatctattatttacatttcagttagaataaatcaatcctttgcttatccagaagtggtgaaaggtcacacgtgcattgttatcatcartgacaacatcaagttaaatgtgtttaggcatcatgaaggcttatagatgagtaagaaaattaggtagattgcaaaacaagtttaagcatatgaaaataggaagaagagtgagtgtatttacagaatatatgagagatgttgtaataatctaaatattttggaaatgtaactacctgtttatatgctagaaaatattagagaaaacatactgaattataacccattgttaagtgttaaattcagcatatataacaattagattcacaaatgaacaatggattaaacataataaaattttactctgtgagaaaattataaagatgtctttcaaatgtggcatat

SEQ ID NO: 358181 - DNA, 605 bp, Homo sapiens
aactacctgtttatatgctagaaaatattagagaaaacatactgaattataacccattgttaagtgttaaattcagcatatataacaattagattcacaaatgaacaatggattaaacataataaaattttactctgtgagaaaattataaagatgtctttcaaatgtggcatatgttccctggaaaactgaaaaagtccaccgagcattatgactgttttttaaaaagtggtaaaagatggagcaacatggctttctttttcaaagcgcttctgtccatgaattatcccctccttcccattagtactttaattaagaaatgcatttcagttgtcttttacacaagaatagaactatgactgtatttgaagaataatcaacatagaagagaaatgaataatgactatcttccagaggtagaaactttgcttcatcttattttttgaggaaagggaagacatctttcttcatttgtatgaagaatagttgcattacattgggtgaaaattatggaatttcaaatgtttgttwtaaagctttatattgatgctgcatagtcaaaggtgaatttgctggttattatgctattctctctacccggcaaa

SEQ ID NO: 358182 - DNA, 593 bp, Homo sapiens
ctttgtcttagtctccaaaaagctatgttttgggaaacatttattttagtctcttttctatttagtgaattatgctgaaattacagagaaatatattctactatataactatattgcatttaatttttattatagcatgttatttttgcaccaggtatagctgttaatcaggcatttcagttaaaaaaattcattgaaattagaaacaaaatcagctgagttacatgagtcattatctgatattattgaaccacaaaaaagcytaagtaaactgaaaaattgaggagttgcagttcttcacaattctaatgttctcttaaatactgtcctaaccattaaacaacattctagttgaggcttaactacatataaatcggtttgagtcgtgatctgtgtttaaagatactctgtcttagaaagtgtataacacgtttctaaattaactgaatcaaaataatgtgtttaaaaaataagcaggcacaatttttgaagtaacagatgaacgaaatgcatttattaattttttgagatttaaaaagttttactcaacctttgtaattttgaaagctatgctaatcattcttcacagtcag

SEQ ID NO: 358183 - DNA, 593 bp, Homo sapiens
ctttgtcttagtctccaaaaagctatgttttgggaaacatttattttagtctcttttctatttagtgaattatgctgaaattacagagaaatatattctactatataactatattgcatttaatttttattatagcatgttatttttgcaccaggtatagctgttaatcaggcatttcagttaaaaaaattcattgaaattagaaacaaaatcagctgagttacatgagtcattatctgatattattgaaccacaaaaaagcctaagtaaactgaaaaattgaggagttgcagttcttcacaattctaatgttctcttaaatactgtcctaaccattaaacaacattctagttgaggcttaactacatataaatcggtttgagtcgtgatctgtgtttaaagatactctgtcttagaaagtgtataacacgtttytaaattaactgaatcaaaataatgtgtttaaaaaataagcaggcacaatttttgaagtaacagatgaacgaaatgcatttattaattttttgagatttaaaaagttttactcaacctttgtaattttgaaagctatgctaatcattcttcacagtcag

SEQ ID NO: 358184 - DNA, 415 bp, Homo sapiens
cttcaaattctagttctgttattttccatgtgcttgtgagaaattgcttccctcttagtttctcagttttgtttcttataagatatgggatattataatctttgcacagtttgaaaaattgtctgggataatgtatgtaaaagtaacaaacaacagcgtttgcccatattagcagttcaatcaatgttgcttagttaatttgcttcaatttaaataacagaataataagatagcaagatgaagatatttagcaaaascaaaatctgcaatataaatataagcaacattagaaggagttggagaatatggaaactagaaatggaccatgagataatgaatcagtaaactctgactgtgtggaaaagtcagactgatatgagattcattggaaagcacagcattcagccatttattc

SEQ ID NO: 358185 - DNA, 620 bp, Homo sapiens
acattctgtttctatgagaagacaaagtatatgctacaatcccttcattacactgaagaaaattgtggaccagagaggttaagtgtctctccaaagctacacaggaaatgatgtcaaagctcgatgggagaaaataccatttctcccactttgggtcaggagatgtaccctttaaacttaggataaagaagccaacagcaaggactgtccctcacaatcaataactcagctaagccattggcagtgagaacttggaaggagatggaaacccccagcctccaggtgttcaggttattactttgagcaaccattcaccacatagtttgacgagaggatgtaatcawatctctgaatgcttagactcttccaagtccaaaatggcacaaggatcagaattgtaaaattttctgctggggttacatccttctacactatgaattttggaaatcaaatatataagaaaccaattaggcattttgcagctatttttattatgtttcacagagaagtttgatatttcaccttattcatgggattaaaaatatagggcagcaagggggagtcttgacctcactgaacttcattttccacaagtgtacaatggaagcaataattcctgc

SEQ ID NO: 358186 - DNA, 417 bp, Homo sapiens
ccaaaatggcacaaggatcagaattgtaaaattttctgctggggttacatccttctacactatgaattttggaaatcaaatatataagaaaccaattaggcattttgcagctatttttattatgtttcacagagaagtttgatatttcaccttattcatgggattaaaaatatagggcagcaagggggagtcttgacctcactgaacttcattttccacaagtgtacaatggaagcaataattcctrcattgccagcagtggtgaagaatagatgaattcacatttctgcagccactaaccattcctaggacaggaaaaacactagaaggtagcaattatattgttactgtttgtattattttctcaattccaggcttcagaataatagaagggaagaatttaccaccttatgcctt

SEQ ID NO: 358187 - DNA, 569 bp, Homo sapiens
aattattttatgctatgataattttctycctccttctccctttccgccaacattaagtaagatattaaagaaatagtagtgtttagaaatgtaattttcaaatgacttactcttaagaattagtaaagacattgtccatttgatactgcttacctaaaatctagtccagggtctctagaattacaaatgggcttttcccaaagacaccaatctcttcccttttttaactttagtttcccagccaaaaataggtactgagtaaatgttaggggcaagacaacagcgtcagatgagtaaagggaaattcatgtcctaggcattacagcattctaaactactagaaatctataagtgagaattcacctgggcaccttccctccctccacctcccaatgttttgataagaccatgataatgcatcggatttagatttcacatgattagatatcctaccttgatagtcacccagcacaccctcagatcaaatcggggcccaatgcactaagcaaatcataaaagtggcatcagataatctgtatgacttgctagcattggaaaggtcatctttt

SEQ ID NO: 358188 - DNA, 569 bp, Homo sapiens
aattattttatgctatgataattttctccctccttctccctttccgccaacattaagtaagatattaaagaaatagtagtgtttagaaatgtaattttcaaatgacttactcttaagaattagtaaagacattgtccatttgatactgcttacctaaaawctagtccagggtctctagaattacaaatgggcttttcccaaagacaccaatctcttcccttttttaactttagtttcccagccaaaaataggtactgagtaaatgttaggggcaagacaacagcgtcagatgagtaaagggaaattcatgtcctaggcattacagcattctaaactactagaaatctataagtgagaattcacctgggcaccttccctccctccacctcccaatgttttgataagaccatgataatgcatcggatttagatttcacatgattagatatcctaccttgatagtcacccagcacaccctcagatcaaatcggggcccaatgcactaagcaaatcataaaagtggcatcagataatctgtatgacttgctagcattggaaaggtcatctttt

SEQ ID NO: 358189 - DNA, 569 bp, Homo sapiens
aattattttatgctatgataattttctccctccttctccctttccgccaacattaagtaagatattaaagaaatagtagtgtttagaaatgtaattttcaaatgacttactcttaagaattagtaaagacattgtccatttgatactgcttacctaaaatctagtccagggtctctagaattacaaatgggcttttcccaaagacaccaatctcttcccttttttaactttagtttcccagccaaaaataggtactgagtaaatgttaggggcaagacaacagcgtcagatgagtaaagggaaattcaygtcctaggcattacagcattctaaactactagaaatctataagtgagaattcacctgggcaccttccctccctccacctcccaatgttttgataagaccatgataatgcatcggatttagatttcacatgattagatatcctaccttgatagtcacccagcacaccctcagatcaaatcggggcccaatgcactaagcaaatcataaaagtggcatcagataatctgtatgacttgctagcattggaaaggtcatctttt

SEQ ID NO: 358190 - DNA, 569 bp, Homo sapiens
aattattttatgctatgataattttctccctccttctccctttccgccaacattaagtaagatattaaagaaatagtagtgtttagaaatgtaattttcaaatgacttactcttaagaattagtaaagacattgtccatttgatactgcttacctaaaatctagtccagggtctctagaattacaaatgggcttttcccaaagacaccaatctcttcccttttttaactttagtttcccagccaaaaataggtactgagtaaatgttaggggcaagacaacagcgtcagatgagtaaagggaaattcatgtcctaggcattacagcattctaaactactagaaatctataagtgagaattcacctgggcaccttccctccctccacctcccaatgttttgataagaccatgataatgcatcggatttagatttcacatgattagatatcctaccttgatagtcacccagcacaccctcagatcaaatcggggcccaatgcactaagcaaatcatraaagtggcatcagataatctgtatgacttgctagcattggaaaggtcatctttt

SEQ ID NO: 358191 - DNA, 454 bp, Homo sapiens
accctttcttcctgagtccctttctaaccccttgtctcatttattttatttcaatgcacttatctctacctgatatcataattgagacctgtgtatttgtttatcatatgcacgccctccatattataacaaaacattcatgaggacagtgaggctttctgtggttgacttttatacacccagaacctagaacagtgcctgcagaattttagggtccaataaacaatttttgatcgaacaagtgaatagcaatgagtgtatcaacattagactttttaatttatggatttgagtragaattttcatttagttttttctttcagtcctattcattaatagggatgatattgtgaaccaaatgaagatcacagaggctatagtattattacattctctcccagaacacaaacatttcagattcaggtgtgtgattgatcggcagctgctgaccatg

SEQ ID NO: 358192 - DNA, 454 bp, Homo sapiens
accctttcttcctgagtccctttctaaccccttgtctcatttattttatttcaatgcacttatctctacctgatatcataattgagacctgtgtatttgtttatcatatgcacgccctccatattataacaaaacattcatgaggacagtgaggctttctgtggttgacttttatacacccagaacctagaacagtgcctgcagaattttagggtccaataaacaatttttgatcgaacaagtgaatagcaatgagtgtatcaacattagactttttaatttatggatttgagtgagaattttcatttagttttttctttcagtcctattcattaatagggatgatattgtgaaccaaatgaagatcacagaggctatagtattattacrttctctcccagaacacaaacatttcagattcaggtgtgtgattgatcggcagctgctgaccatg

SEQ ID NO: 358193 - DNA, 481 bp, Homo sapiens
tggttgggctgtgtccccacccaaatctcrtcttggattacagttcccataatccccatgtgtcatgggagggacccagtgggaggtaattgaatcatgggggtggttgcccctatgttgctgttctcatgatagtgaatgagttctcacaagatctgatggctttatacggggtttttaccctttttgccctgcacttcttgcagccacgatgtgaaggtggacatgcttgcttccccttctgccataattataagtttcttgaggcctcagccctgtcaaactgtgagtcaattaaacctttcctttataaattacctagtctctggtatgtctttattagccacatgggaacggactaatacaccatctgcagtggaaagaatgcactggcattgctacataaggattgtaggagtttatggaaatcttgcagcaaaactttgctgggataacaggcgcttgcagtgcatggtacaga

SEQ ID NO: 358194 - DNA, 549 bp, Homo sapiens
tgagaaccactaatgttcatttgctaattcaaaatgttgtattgagcacctctatctggctagctctctataaagtctctggatctttgcacattcactaggatagcacttcctttactgcrtaggctttgctgtgtaatttctggccagcctaggtagattcctcctgcccattgctggctactaagtctgaaagccagacccctctgtgctgggaaaaaactgacccctaaaagctcttagacatgctcttgccaggaaagttgatttcagaccctcaactcagaggagatctgtaatcaaagagagaaataagatctataagaaaggggcaaaatttcattcaacaaatatttggtgaatgtataccatgtcccaggagctttctggctagaaaaaaaaaaaaagtggggtcaaacaaagcacctgttgttgtgtttgtgtttgtgttctggtaaggagccacagacaaaatcatgtgggcaaataaaaaataataatttcctgtatccttaatgctttaggggaaatataacagagtaagaaaca

SEQ ID NO: 358195 - DNA, 564 bp, Homo sapiens
atttaccattgaaaatgacagcagggagcagaacaagatggcagaatataagtgtacactttccaccttcccagctagaagatcaaattttaacaactatctgcacacagaaaaatatcatcacaagaacaaaaaatcaggtgagcaattacrgtatgtgtttttaacttcttatagtggaaagagacattgataggcggcaggggagacagtcttgaatcattgatgccacccctcccccattccccagcagtggtgttgcagcacagtgagagaatctgtgcactttggaaagggagagcacagagactggaggactttacattgatctcagtgctgccttgtgacagcggagaataaagctgtgctggtctgagccagcactcgtgcacagagggagcacttggatcagctctagccagaggaatcacctatcccagcagtcagaatttgagtttcttggcaagccttaccatcataagctgaagtgttctggggtcctaaataaattcaaaaggtagcctaggacatgaagactgcagttcctacgcaactcctagcgct

SEQ ID NO: 358196 - DNA, 564 bp, Homo sapiens
atttaccattgaaaatgacagcagggagcagaacaagatggcagaatataagtgtacactttccaccttcccagctagaagatcaaattttaacaactatctgcacacagaaaaatatcatcacaagaacaaaaaatcaggtgagcaattacggtatgtgtttttaacttcttatagtggaaagagacattgataggcggcaggggagacagtcttgaatcattgatgccacccctcccccattccccagcagtggtgttgcagcacagtgagagaatctgtgcactttggaaagggagagcacagagactggaggactttacattgatctcagtgctgccttgtgacagcggagaataaagctgtgctggtctgagccagcactcgtgcacagagggagcacttggatcagctctagccagaggaatcacctatcccagcagtcagaatttgagtttcttggcaagcctyaccatcataagctgaagtgttctggggtcctaaataaattcaaaaggtagcctaggacatgaagactgcagttcctacgcaactcctagcgct

SEQ ID NO: 358197 - DNA, 617 bp, Homo sapiens
tggttaatgggtacaaaaaattgaaaggaatgaataagacatactttttgataacaaaacagcattgtttgttttttgcttgttgatttaagttccttatagattctggatattagacctttgttggatacatagttggcagatattttctcccattctgtaggttggctgtttactctgttgacagtttctttttagtttactgggttccagttgtcaatttttatctttgttgcaattgcttttggagatgttatcataaaatctttgccaaggtctatgtccagaatgatatgtcctaggttttcttgtgggtatttatagttttatatcttacatttaagtctttgattcatcttcaattgggtcttatatatggtgaaatgaaggggtccagtttcaatcttctgcataaggctagccagttatcccagcaycatttattcaacaggaggtcctttccacattacttgtattgtagactttgtcaaagattagatggttgtatgcgtgcagctttccttttgggttctcttacctgttccattggtctacatgtccgtttttctaccagtaccttgctgttttggttcctgtagccttggagtatagtttga

SEQ ID NO: 358198 - DNA, 440 bp, Homo sapiens
agatccattttctcttctctacgttttaaattaccattaaacttacgttataccttttcttcatattctttgtgtttttcaccttgtatctccctccctttctctctctctccctctttctctccctctaccatttcccctgtcctcctctttctccctcttcccccgccccatatagattttttttttctgtacttgccacattctggatagtattttcrtccagtttttagttcattagttctttcttcagctatgtccagtatattgttaacatgaccattgcatttaaattttttgtgttttttccagttaaaagactttttaactgttccaaaccactatgacttgtttttatgagtttcaaggttttcttttgtctttaacatggcaatgacatttattatctatgcttgattattacccatatctgaagtctt

SEQ ID NO: 358199 - DNA, 599 bp, Homo sapiens
gccatctttcataaaacgtccccttttaagtgagggcagatgacttgctaattaggtgtttaaaattgtgccaaccctcaggaaggcacaactcagaaagaaaccctcccagggtgggtatcttaccatrtagctatattatggcaattatattattttctgtagatttaaaattttattaaagacatacactatcagagtaaaaaaaagtccaactaagcactatctgcagacaacagacttaagactaaatgatataataagatgaaggggaaagtgtaggaaaatatatatcaactaatcaccaagtacgcgaaagatggggatgctatactaatatcatgcaaaatatgtttttaccaaaaatattattagagataaagatagatatttttaaaggagaaaatgtaaatctaccaggaagctatcatgattggaatacacataagcctaaaaacagagcccccaaacacacaaagcaacaattctgaattgaagggatagatgcataataaaaaatagttgtaaatgtcaatacccctctttctataatgggtagaataacctggtagaagatcgataaggaaatggaagactca

SEQ ID NO: 358200 - DNA, 571 bp, Homo sapiens
aagtccagtcattctgtaaaaggttaaatgtagaagtcttctatgacccatcctatgacctacttttagttatatgcccaagagaaataaaaatatttgccaacacaaaatcgtgtacatgagtgttcatagcaacattattcataatagtgaaaaagtgaaaaatacctaagtgtytatcaactgataatcaatccatgaaatgtagtatatgcatacaatcaaatattattcagcaactcaatgaaatgaagtcctgacacatgctacacctgagtaacttgaaaacattatgctaaatgatagaagccagtatccagtcacaaaagaaaacataccatatgattccatataaatgaaatgtgcagcataggcaaatctgtagaagtagaaagaagagtgatgatgtctaggttgtgggagaattgggaataattgggagggattgctaacgggtatggggttctttttgcagtgatgaacatgttctaaacttgaatctggtggtagttgcacaactctataagtataataaaaatgtttccatatgcactttaaatgggtgatgtat

SEQ ID NO: 358201 - DNA, 635 bp, Homo sapiens
gcttctggtggtctttatttgcagggatggacataaatacatttgccagatcaatagcagcataccaggtacctcaggatgtgttaatttccttaagtagtgaaatcacatctgatacagaagctgcaattggagtcaacatctaattaagcttaaaataatccactgccattctccaagatctgtcttatgcactggccaaataggtgagttggagatgcagtgaaaattaatgcccctgcatttttgaagtccttgatggtggtgctaattatttaaattcctctagaatgtagtcttgcttttgctttactatttttctaggtagaaaccattctagtggcttccacttggccttcttcattataatttttccctcaccccataggtcaggtaacgaatgtgaggattttgccaactgatgagtgttacacttgtgtaaactagaactggaaaaatagctacaggatatgttcaagaactcagggattcaaaatttcaggtcaagttctgcatgaaatacttgaaagcatctatgtctgttctgatagtttatctcatgtarccgcaaggctgagattgctgaaaacgaaacccaaaatcttatcctgcaagtggctaattaacaatagaga

SEQ ID NO: 358202 - DNA, 589 bp, Homo sapiens
gattgtatccacccttgatacaatgtgatgaaatatcaatttacctctgcagtcttcctggcagaaaccaatgacccctaatataattatgagaaaaacaccagacaaatcccaatagatggaattttagcaaaatatctacaaagtattcctggtcaggtataaggtcatggaaggagtttaaaaagatattgcaggcaaatattacccaaatraaggctggggttgctgtcataatattaaaaaaagatattttactatgaaaatgtggtaaattgaagctttaataatagtgtttaaatgataagaattatacaataaataaaaacttttacatacctataaaatagttctatgtatatatagtgtatatttgacaggcctccaggggtaaaaggacaaatcactaatatagtgggatattttgacatatttattaattattaagaggtcaactaaacagagaattagtaagaatttaaaagatttggaccatacaattaccacccttgatttgatgaatagagaatatgtgtttctctcaagcacacataaatcatatttagaaaaatacatcaaacatatattg

SEQ ID NO: 358203 - DNA, 527 bp, Homo sapiens
ttgtgattggtgaaatgagtcatagtttatgaaagtggaagatattcaataaaaaggcagttttcaaaatgacaatctgggaagttgtaggaaactgttcagcctstaaagatctgggaaagagtctattaaaagtgtcataatagtgtctaaaaatggccaccttttttcctttctttaacaatttgcaaccttaaccatagtggttactctgaaaagaagttaagtgaaaggacagagatgatctatctgggtaacagaaaaatattgacgtctcatggatctgggagtgagagtgggggagttacaaaataagacggtgaagagcaatggaggagaggcagtgtcattaggcctgagattctgctgtggtgaatcagtacagtaaagatattgtggagcagaatctctttgtcctggtgacacctgagccaactggctgtcttgaccccttgtgactggtttccttcagctggaaaatgatgcttagggcccaggtctggcactggccagtccagcctagccca

SEQ ID NO: 358204 - DNA, 516 bp, Homo sapiens
agaaacacagacaagatcagtaattgatatatcaagtagacagaaaatcaattaagatataggtgacctgaagaatactagcaatcaacttgacctaattgacatttaaagagtactccatccaacaacagcacaatacacatttttctaagctcacatagaagattcccaagatagaccatattcaggatcataaaacatatcctaataaattttaaaggataatcataaaaaagaatgttctcagaccactttgaaatcaaactaaaaccaataacagaaagagagctggggaaaaaaacccagatacttgaagattaaaaaacatacttctgaataacacattgattaaagaagtctcggctgggagcggtggctcatgcctgtaattccagtactttgggaggccgaggcaggcggatcacgaggtcaggagttcragaccagcctggccgacatggcgaaaccccatcgctactaaaaatataaaaattagctgggtgtggtggcaggcac

SEQ ID NO: 358205 - DNA, 526 bp, Homo sapiens
tggagaaatattatttaattcctttgccaatttttaaattgtgttgtttgtttttgttgttgatacgtagagtattttcatttattctggacattaataccttaacagatataggatttacaaataamatctcccattccgtgtgctgcttttttactctgttaatagtgtgtattgatgcatgaaatatttaacatttgatgaagtccagtttatcaattttttatttcattgattgtgctttcggtgtcacacccaataaatcattgttgaatttaatgtcataaagattttctcctaagttttcattctaagagttttatagattcatctcctacatttaagtctttgatccatttcagctaacttttgtgtatgtcataaattaaggctccaacttctttcctttgcaggtggatatcccatttattttagcaatttttgttgaaaagactgtcctttctccattgaatagttgtgcaacctcgtaaaaaatcatttgaccatacattcaagggtttatttt

SEQ ID NO: 358206 - DNA, 526 bp, Homo sapiens
tggagaaatattatttaattcctttgccaatttttaaattgtgttgtttgtttttgttgttgatacgtagagtattttcatttattctggacattaataccttaacagatataggatttacaaataaaatctcccattccgtgtgctgcttttttactctgttaatagtgtgtattgatgcatgaaatatttaacatttgatgaagtccagtttatcaattttttatttcattgattgtgctttcggtgtcacaccmaataaatcattgttgaatttaatgtcataaagattttctcctaagttttcattctaagagttttatagattcatctcctacatttaagtctttgatccatttcagctaacttttgtgtatgtcataaattaaggctccaacttctttcctttgcaggtggatatcccatttattttagcaatttttgttgaaaagactgtcctttctccattgaatagttgtgcaacctcgtaaaaaatcatttgaccatacattcaagggtttatttt

SEQ ID NO: 358207 - DNA, 570 bp, Homo sapiens
cgtaaaaaatcatttgaccatacattcaagggtttatttttgagctctctagtcgattccattcatctataggtctgttttcatactagtactaccccttgggagtatttttctgcaaaagatgtccctggaattttgataggrattgcattgaatctgtagattgggtagtattaacattttaacaatattgagtcttctaattcttgaacacggaatgtcttttcatttgtttgtgtcttctttaatttctttcagcaacatttagttgttttcagtgtacaagctctttgcctccttgtgtttaatcctaagtattttattattttcaatattattgtggatgcaattgttttcttaatttcacttttggattgttcactggtagtgcatagaaacataactgaattttgtatgttgattttatataaagttgtgctactacatttttgctaaattgatttattagttctaacatttttctgtggaatatttacagttttctacatatgcaattaggtagtctgcaacagaaacagttgtacttcctttcacatttagatgccattt

SEQ ID NO: 358208 - DNA, 570 bp, Homo sapiens
cgtaaaaaatcatttgaccatacattcaagggtttatttttgagctctctagtcgattccattcatctataggtctgttttcatactagtactaccccttgggagtatttttctgcaaaagatgtccctggaattttgatagggattgcattgaatctgtagattgggtagtattaacattttaacaatattgagtcttctaattcttgaacacggaatgtcttttcatttgtttgtgtcttctttaatttctttcagcaacatttagttgttttcagtgtacaagytctttgcctccttgtgtttaatcctaagtattttattattttcaatattattgtggatgcaattgttttcttaatttcacttttggattgttcactggtagtgcatagaaacataactgaattttgtatgttgattttatataaagttgtgctactacatttttgctaaattgatttattagttctaacatttttctgtggaatatttacagttttctacatatgcaattaggtagtctgcaacagaaacagttgtacttcctttcacatttagatgccattt

SEQ ID NO: 358209 - DNA, 575 bp, Homo sapiens
gtcttatgtagatattctttattcaattgatggagttgtcatctattcctagtttaatgagagtttttatcatgaatggatgttggactttgtcgtgttttttctctaatgatgtaatcatgggattttttcttgtttaacttgttgatgtgatggattacattcattgatttttaaatgttgaaacaaactttgatattgagataaatctcacttacttacgctgtasaattctttttaaacattgttggattaaatttactaatagtttatcaaggttttgcttctatggttatgcaatgttggtctgtagctctcttttcttgtaatgtcttttggtattaatgtaatgctggtctcatagaatgagttaggaagtattgtcactgctttgatctcgaagagattgtagagaattggtatactttcttccttaaatgtttggtaaaattcaccagtgaacccatctgggcctggtgctttctgctttcaaaggttattaattactgatttcatttcattaatagatacagcctatttagattgtctatttgttcttatttgagtttttgcag

SEQ ID NO: 358210 - DNA, 575 bp, Homo sapiens
gtcttatgtagatattctttattcaattgatggagttgtcatctattcctagtttaatgagagtttttatcatgaatggatgttggactttgtcgtgttttttctctaatgatgtaatcatgggattttttcttgtttaacttgttgatgtgatggattacattcattgatttttaaatgttgaaacaaactttgatattgagataaatctcacttacttacgctgtacaattctttttaaacattgttggattaaatttactaatagtttatcaaggttttgcttctatggttatgcratgttggtctgtagctctcttttcttgtaatgtcttttggtattaatgtaatgctggtctcatagaatgagttaggaagtattgtcactgctttgatctcgaagagattgtagagaattggtatactttcttccttaaatgtttggtaaaattcaccagtgaacccatctgggcctggtgctttctgctttcaaaggttattaattactgatttcatttcattaatagatacagcctatttagattgtctatttgttcttatttgagtttttgcag

SEQ ID NO: 358211 - DNA, 575 bp, Homo sapiens
gtcttatgtagatattctttattcaattgatggagttgtcatctattcctagtttaatgagagtttttatcatgaatggatgttggactttgtcgtgttttttctctaatgatgtaatcatgggattttttcttgtttaacttgttgatgtgatggattacattcattgatttttaaatgttgaaacaaactttgatattgagataaatctcacttacttacgctgtacaattctttttaaacattgttggattaaatttactaatagtttatcaaggttttgcttctatggttatgcaatgttggtctgtagctctcttttcttgtaatgtcttttggtattaatgtaatgctggtctcatagaatgagttaggaagtattgtcactgctttgatctcgaagagattgtagagaattggtatactttcttccttaaatgtttggtaaaattcaccagtgaacccatctgggcctggtgctttctgctttcraaggttattaattactgatttcatttcattaatagatacagcctatttagattgtctatttgttcttatttgagtttttgcag

SEQ ID NO: 358212 - DNA, 561 bp, Homo sapiens
gtctatttgttcttatttgagtttttgcagtttatgtcttgcaaggaattgatccatttcatctaagttatcaacttcctaggcataaagttgttcatagtattctttttcaaaatctttttaatgccagtgggatttatagtgatggctcctccttcatttcacatatagaaatttgtatcctttcttgttttttatttgtttgcctcactgatgttattgatctcaaagacactgttttgagttgtattgatgttctctgttgaatttctgttttcaatttccttgatttctgctctaatatttacaattttcagtatktcttcttagtttgggtttagttttatctctctcttttttttttctcatttccaaagagggaagcatagatgattgattttaggtctttcttcttttctgatatatgcattcaacactataaatttcccctaagcactgctttcactgcatcacacgaatttcaataagttgtgttttcattttattttaaaatatctttcattttctcttgagatttcttctatgacacacgtatttaga

SEQ ID NO: 358213 - DNA, 561 bp, Homo sapiens
gtctatttgttcttatttgagtttttgcagtttatgtcttgcaaggaattgatccatttcatctaagttatcaacttcctaggcataaagttgttcatagtattctttttcaaaatctttttaatgccagtgggatttatagtgatggctcctccttcatttcacatatagaaatttgtatcctttcttgttttttatttgtttgcctcactgatgttattgatctcaaagacactgttttgagttgtattgatgttctctgttgaatttctgttttcaatttccttgatttctgctctaatatttacaattttcagtatttcttcttagtttgggtttagttttatctctctcttttttttttctcatttccaaagagggaagcatagrtgattgattttaggtctttcttcttttctgatatatgcattcaacactataaatttcccctaagcactgctttcactgcatcacacgaatttcaataagttgtgttttcattttattttaaaatatctttcattttctcttgagatttcttctatgacacacgtatttaga

SEQ ID NO: 358214 - DNA, 436 bp, Homo sapiens
cacacgtatttagaagtatgttcttcaatctgcaaatattttgagattttctaactatcttcccatttttgttttccagtgcaattcctttttggtgtgagagcagagatgacatgatttctattctgattttgtgaaggmatattttatggcttagaatgtggtctagcttggtgagtgtttcatgtgggcttcagaaggacatgcattctgttgttggatgaaatagtctatatgcagttggatgaagcagtattatatccagttgactcatggtgctgtggagctcaactatgcctttagtgcatttcttcctaaagattctatccatttctcacagtagtattgaagtctgcaactctaaaagtggattcatcttttccttcttggagttatgtcagtttttgcctcatgtgtcttgacattctgttgttaa

SEQ ID NO: 358215 - DNA, 525 bp, Homo sapiens
aagtcataaccttagttgaggcttgttggtttcacctgtgaggttacttttggtaaagttcaaaagccagaagtattagccagctgtttagcctgactaaagtgggttaataagaaatttagaaggacttttkttttctttaaagagtactatggttaaaagtcagcttaattaaaaattgatatccaagctatacctatatttaaaagccctttatggtttgtttttttctcttcttgaatcttgtttttctggaaaagggattttttctctttttttctcagttgactgaattatttttctctgtttttgtcttgccactcttgatgcacataggagaggacttaagagaacttctaacagcttggcactccttgggaaaaacagaggaagcaccatagatctgtactgggaaaaacgtgctttcctcaagaaaccccaggaattgaaagtggatggatctctctcaaaaatgtaaagctctgttctgctttgcattgtgttagctaaaggttttgagttttg

SEQ ID NO: 358216 - DNA, 525 bp, Homo sapiens
aagtcataaccttagttgaggcttgttggtttcacctgtgaggttacttttggtaaagttcaaaagccagaagtattagccagctgtttagcctgactaaagtgggttaataagaaatttagaaggactttttttttctttaaagagtactatggttaaaagtcagcttaattaaaaattgatatccaagctatacctatatttaaaagccctttatggtttgtttttttctcttcttgaatcttgtttttctggaaaarggattttttctctttttttctcagttgactgaattatttttctctgtttttgtcttgccactcttgatgcacataggagaggacttaagagaacttctaacagcttggcactccttgggaaaaacagaggaagcaccatagatctgtactgggaaaaacgtgctttcctcaagaaaccccaggaattgaaagtggatggatctctctcaaaaatgtaaagctctgttctgctttgcattgtgttagctaaaggttttgagttttg

SEQ ID NO: 358217 - DNA, 525 bp, Homo sapiens
aagtcataaccttagttgaggcttgttggtttcacctgtgaggttacttttggtaaagttcaaaagccagaagtattagccagctgtttagcctgactaaagtgggttaataagaaatttagaaggactttttttttctttaaagagtactatggttaaaagtcagcttaattaaaaattgatatccaagctatacctatatttaaaagccctttatggtttgtttttttctcttcttgaatcttgtttttctggaaaagggattttttctctttttttctcagttgaytgaattatttttctctgtttttgtcttgccactcttgatgcacataggagaggacttaagagaacttctaacagcttggcactccttgggaaaaacagaggaagcaccatagatctgtactgggaaaaacgtgctttcctcaagaaaccccaggaattgaaagtggatggatctctctcaaaaatgtaaagctctgttctgctttgcattgtgttagctaaaggttttgagttttg

SEQ ID NO: 358218 - DNA, 421 bp, Homo sapiens
gttgactgaattatttttctctgtttttgtcttgccactcttgatgcacataggagaggacttaagagaacttctaacagcttggcactccttgggaaaaacagaggaagcaccatagatctgtactgggaaaaacgtgctttcctcaagaaaccccaggaattgaaagtggatggatctctctcaaaaatgtaaagctctgttctgctttgcattgtgttagctaaaggttttgagttttgggctaatcacagaatgggctgattggmtttgggttgctttgcaataaaatgcattgcactgtcttctcccatagcatttccctcttttttgggatccatgatccatgatgcaaaataaaaacgggacccttaactttggagaactgtttttgccttacaggtgtgcctgcttattaggc

SEQ ID NO: 358219 - DNA, 421 bp, Homo sapiens
gttgactgaattatttttctctgtttttgtcttgccactcttgatgcacataggagaggacttaagagaacttctaacagcttggcactccttgggaaaaacagaggaagcaccatagatctgtactgggaaaaacgtgctttcctcaagaaaccccaggaattgaaagtggatggatctctctcaaaaatgtaaagctctgttctgctttgcattgtgttagctaaaggttttgagttttgggctaatcacagaatgggctgattggatttgggttgctttgcaataaaatgcattgcrctgtcttctcccatagcatttccctcttttttgggatccatgatccatgatgcaaaataaaaacgggacccttaactttggagaactgtttttgccttacaggtgtgcctgcttattaggc

SEQ ID NO: 358220 - DNA, 496 bp, Homo sapiens
gatattcttctgtctgtctgtgtagttacatatgtgttgtgtgtgtggtgcttatatagaagaactctgattaattggcttaaagaaaaataagcacttaaatattttgaaagaaaaaaactgtaacaccttttagttcatgtgacctcagtaatctttggtaaaataaagacatttggtctaaattaggcaggtcaggtactaggtttgctagacgctttaaggtcataaactgcttctttggcttttgaaaattgttcaagttgcctactttacagctaagtaaggcctaggaacatgtggagatagccatgctccctwgctatgctggaaagagtctttttatctgcacttctgtctggtgccctaggctccacacctagtacctaaataaaatcactaactagccagatttttcaccaaaagttgctgagaggtaacagtgtaacatatacttgaaactactgaagaaacagttttacatgcaaggtgtgta

SEQ ID NO: 358221 - DNA, 496 bp, Homo sapiens
gatattcttctgtctgtctgtgtagttacatatgtgttgtgtgtgtggtgcttatatagaagaactctgattaattggcttaaagaaaaataagcacttaaatattttgaaagaaaaaaactgtaacaccttttagttcatgtgacctcagtaatctttggtaaaataaagacatttggtctaaattaggcaggtcaggtactaggtttgctagacgctttaaggtcataaactgcttctttggcttttgaaaattgttcaagttgcctactttacagctaagtaaggcctaggaacatgtggagatagccatgctcccttgctatgctggraagagtctttttatctgcacttctgtctggtgccctaggctccacacctagtacctaaataaaatcactaactagccagatttttcaccaaaagttgctgagaggtaacagtgtaacatatacttgaaactactgaagaaacagttttacatgcaaggtgtgta

SEQ ID NO: 358222 - DNA, 560 bp, Homo sapiens
ttctgttatagtgtttttgatgtccagcatgtatttttgattctttcttaggatttccatctctctccttacacttcccggccactcttgcatgccaattgatttatccattacagctcttarcatattcattctagttgttttaaattctcagtctgctaattccaacacctctgctatatcagattatggttttgatgcttgctctatctcttcaaactgtgttttttacctcttaagatgtcttataatttttaattggtaaccataaataatatacttgataaaagggactgcagtaaacagacttttagccatgtggtggtcatatgcgaaggaaggccagcattctgtagtcttatggtcagatgatgaagtgtcagccttttagtgagtctgtgcctctgtatcgtgaacttcacttgtgcttctcaattccttccccctccattagatggtaccccatggctgctggggtattcccctttctccaggacacttaggctcttataaaacgtcatcacgttaggctctggttgaatagtttctcctgagggcag

SEQ ID NO: 358223 - DNA, 546 bp, Homo sapiens
gctctgtgtgttgtctcaggtgtcattgagggcataagagtgtcctgcttcaggagggcgtaagggtggcaccatatagggtctgaggttggtcccagtgggctgtgacatgagcatgaggcaggtgctgatattggtcctatgtgggtctgagatgagcctcagccagaccctgagaggggccccagatggccacaggacaggctgtggtggttggaccatttagggttgcacctgtcctctgggtcaccaactttggacaagtggaggtgggtgaggttggcacccccaggactgacatcttgctcaaactgttctaggatgctgagctctgagacctgtgtggagggaacaaaggtcagagaacaaggcagagagaggaaagttgtttgttgattttggaggggaagaggtgggaaggaagattagcaccagcttggcagatatcaatcgctctaatccygttcaccagtctgcacctgggcctggctcctccttttccttcgtgtttcttaaaaaggtgggagacagaaatctggggagttt

SEQ ID NO: 358224 - DNA, 546 bp, Homo sapiens
gctctgtgtgttgtctcaggtgtcattgagggcataagagtgtcctgcttcaggagggcgtaagggtggcaccatatagggtctgaggttggtcccagtgggctgtgacatgagcatgaggcaggtgctgatattggtcctatgtgggtctgagatgagcctcagccagaccctgagaggggccccagatggccacaggacaggctgtggtggttggaccatttagggttgcacctgtcctctgggtcaccaactttggacaagtggaggtgggtgaggttggcacccccaggactgacatcttgctcaaactgttctaggatgctgagctctgagacctgtgtggagggaacaaaggtcagagaacaaggcagagagaggaaagttgtttgttgattttggaggggaagaggtgggaaggaagattagcaccagcttggcagatatcaatcgctctaatcctgttcaccagyctgcacctgggcctggctcctccttttccttcgtgtttcttaaaaaggtgggagacagaaatctggggagttt

SEQ ID NO: 358225 - DNA, 593 bp, Homo sapiens
acattccttgcttttacattctctagtctaaagctcacaaatcttttcctttgggaaggaggaaagggacagagtctttgggaacctccttcgccatcccttcctcagcacagccaagctttaccccatggagctgtgaataggaaattaatccttcatggcctcctggagtgtggtgctgagttaggcagtatctgcggaaggacaggccagcattagactctcaggttattctggttggccctggagccctgcacaggactttgcccacctgtctgtctatgcttgtcttggatcccatctttctatctttctctttctccttccctgcaagtcagtgttcccctcaatcaccctgtgtgctcrtgcatctttgtgttttgtgccattttgtccagtgggttctcctggatgcctctgccatgtttatcctcatttatacaactgtgtgtgtgtcattctgggtgcatgcttttagtgtctacgtgtatgtatgtttcagcatgttcatgttgatacatgaatttatgtgtgcaccaggctttgtggtgtgtatgtttgtgcttgataatgggtatccattccaacttatg

SEQ ID NO: 358226 - DNA, 593 bp, Homo sapiens
acattccttgcttttacattctctagtctaaagctcacaaatcttttcctttgggaaggaggaaagggacagagtctttgggaacctccttcgccatcccttcctcagcacagccaagctttaccccatggagctgtgaataggaaattaatccttcatggcctcctggagtgtggtgctgagttaggcagtatctgcggaaggacaggccagcattagactctcaggttattctggttggccctggagccctgcacaggactttgcccacctgtctgtctatgcttgtcttggatcccatctttctatctttctctttctccttccctgcaagtcagtgttcccctcaatcaccctgtgtgctcatgcatctttgtgttttgtgccattttgtccagtgggttctcctggatgcctctgccatgtttatcctcatttatacaactgtgtgtgtgtcattctgggtgcatgcttttagtgtctacgtgyatgtatgtttcagcatgttcatgttgatacatgaatttatgtgtgcaccaggctttgtggtgtgtatgtttgtgcttgataatgggtatccattccaacttatg

SEQ ID NO: 358227 - DNA, 536 bp, Homo sapiens
tcacatcctcaccaagtcttatatgtgaaagttagggcattggttgggaaggagaggaaccctgatacttcgaatggggatatctgggtagcctcagatgaaactgagtcactctgagcawcctttctgaatgaatgtatcttcccctctcatggtcgaggacactagttttctctttcttataataacaggggagttatcttgaaatgggcagtatattctcctcaatactcaccttgtttatttatttatttatttatttttgaggtggagtctctgtcacctaggctggagtgcagtggtgcaatttcagctcactgcaacctccctcccaggttcaagcgattctcctgcttcagcctccgagtagctgggattacaggtacctgacaccatgcccagataatttttgtatttttagtagagacagggtttcaccatgttggccaagcttgtctcgaactcctgacctcaagtgatctgcctatttcagcctcccaaagtgctgggattacagatgtgagccaacatgccca

SEQ ID NO: 358228 - DNA, 580 bp, Homo sapiens
actgacatagccttagatagagggtcaggcacaggatctgtccaagcaccttcccgtctcattaggtggtggatctgcaggtgtagacacaagctgtctgctaagtatactacgaatggagcctcctctaagggggctgatctgggatgcagggacattgtgggaagtgaatttacacagatacagacacttctgcctttctttgacaccggaatgtggtagtaaaatgcattactttgtttaggaaagaatcccctaatgagtctrtaacaccttttatgatgccccattgactacattaccgttgcttgcaggttttttcttcttcttttttatgggtttattgagttataatgttcataccatacaattcattcactttaaatgtacagtgatatttagtaatagaaacttgttcaaccatcaccaccatcaagtttcagaacattttcatcatgccaaaaagttccttctcactcatttgcagccagtcctgctcccgcgggccactgtagctacagacaacgactcatctttctgtctataagttttaatcttttctagaaattttgatataaat

SEQ ID NO: 358229 - DNA, 564 bp, Homo sapiens
cctgcggatcctgctgagctgctctcaccctttggaaaccaaggattgagcattgttccctgagtgtatttctggttatgactttctcttttctccacagaaaggcatctctctgcaggtattgggttttctctgagctcagctgctgctcttggccttctttctccagtttctgtcctcctctaccagccttgagactgcagtgtggagatatgtcgcctctgttttgtctgggctgcttctgtctgggatgatggaatcctcactaaatgggaaatgtttatggaggaggagggagatggggaagtcattccctcctgttaacatttcggctyaagttagcttattcatatgaatgacacaaagtcgtaattgctcctaatcaaatctgtgcacacagtaaagcctcttttatgcaatgagtgtttacttaattgaatgttacatataaatgaaggttactccttcaagtgacaaacgtgagggatttcaatggaaaattctgaaaatgagccccctgaaggagggaagatgggagatgaaagatgctggaagagaacagaa

SEQ ID NO: 358230 - DNA, 511 bp, Homo sapiens
cagtagctatctgtacaagttcttcaactggtgaccaaaagaggcttcttggtgaatgacaatctacatcctaaaataagtaaagtctgcagtttaccctaattatcttgactatcttcaaacacggcatgctataagcaatggtgcattgacttccaatttctctttattatggagttagtgtaaatccctagttatctctttctggcccaacccacttcatatattgtctggttccactgattctctttcgtatcttgcacagctcttgtcccactctggtctataccaatgtcatgtcctcccatctggaatcttattgccattttcacaaaaatccagacttgcccaaagttctcttaaaatagattcagcccaactgcactgctccataaaatcacgtttgctcttcataacgttgtcagatgcctatcctggctgaacccttctctttgcacaaagttgcaggatccttygattctcatctgtgggtccccaccagatgcctcct

SEQ ID NO: 358231 - DNA, 564 bp, Homo sapiens
  misc_feature (1)...(564): n = A,T,C or G
aacatttatgtctcttgatttatgctctcaaaacagcagaatctggtatctttcttctttgttctgtcttgnntttcccttgcctgtgcgtccctctcttcrctttttttagtatttaagttttcaaaaatagaatataaagatagaaaagatatcccaaattcatcacttttttttcctatgaacaaagaaaaactcattcttcatcatctacttcattgtctacacaaagccacttgagtgtgaaacccattctacacctgcttgactattaataagcaactgccttttagtatagaataatcagagatgggactcacttaaatgatatgatttctgaaatccccactagtagtccaaggaaagatagaagctgcttttctttctaacatgcttttccctggttcccaggatcatgtgccaacccggtacttatagggaggttccttatggaatcccacaggagtccaatccttgagcacttttctcgctttggtttctgtgaacccctacctgtccatggtatattctctcatctgtctgcttgtaattttcccaggggga

SEQ ID NO: 358232 - DNA, 564 bp, Homo sapiens
  misc_feature (1)...(564): n = A,T,C or G
aacatttatgtctcttgatttatgctctcaaaacagcagaatctggtatctttcttctttgttctgtcttgnntttcccttgcctgtgcgtccctctcttcactttttttagtatttaagttttcaaaaatagaatataaagatagaaaagatatcccaaattcatcacttttttttcctatgaacaaagaaaaactcattcttcatcatctacttcattgtctacacaaagccacttgagtrtgaaacccattctacacctgcttgactattaataagcaactgccttttagtatagaataatcagagatgggactcacttaaatgatatgatttctgaaatccccactagtagtccaaggaaagatagaagctgcttttctttctaacatgcttttccctggttcccaggatcatgtgccaacccggtacttatagggaggttccttatggaatcccacaggagtccaatccttgagcacttttctcgctttggtttctgtgaacccctacctgtccatggtatattctctcatctgtctgcttgtaattttcccaggggga

SEQ ID NO: 358233 - DNA, 442 bp, Homo sapiens
tggaactgttgtcatgatagtgaattctcaggagatctggttgtttaaaagtgtgtggcacctcctccctccctctctttctcctactccagccatgtgagacgtctggctccccctttgccttccaccttgattgtttgattcctgaagcckccccagaagctgagcagatgccagcctcatcatccttcctgtacagcctgcggaattgtgagccaattacatttctctttttataaattaccccatctcaggcatttctttatagcaatgcgaaaatggactaatgcactgaacatgttgtcacaaaaggccccatgagaggtggacaacatgaaacaaaagcagagtttgatgaggctgaaagaagggtgaatgcctgaattcagagtcaggggcttaatgacagagttggggcactcttgaatttaaacttatgtgg

SEQ ID NO: 358234 - DNA, 572 bp, Homo sapiens
gcactcttgaatttaaacttatgtggtcttcaactaacagtccttggaggtcactttgagaagcaaagtccttgagactttaaggtgagcatcttgtgggcaaagaaaatactttacacttctctgggcatcaaaaccctccaacacaatgcccaaaagcatgtcccaagcttctctgatgacgaggatctccaggactgtgctttgtcaatgctgatgtaattcaaatccctaggtggaagaggggttttgttaaaacataggttcttctttggtaggtccagggggcagcctgcgagtcttcatccctaataaactcccaagtggcatccgtactgttgcagggaccatacttagaatagtcaaagcacggggattgtagcgtgggtcccaggtatttctcattatcgaggaaaaataaggactggacaccagcttaacacatagtaactgctaagtagatgcttattgaaggayggatagattgatggataaaatcaagtgagtaaataaactaataaatgaaatcatctgagaagctttctgaacttcggttctttggtaagttgggg

SEQ ID NO: 358235 - DNA, 605 bp, Homo sapiens
cttctctcagttccacacccagtgctaaccaatattaatggttatatttatatttgtataactgttattttttgggggtgaccttttcttttcagtgtggacagtaattatatgctgcatttctacagttctgggaagtgtgccatgttcgctttatctgatttacctgccttaggtcaccatctctggaatgagccacggagggtgaagatgggatgggatggataaatgggctggagatcagcaggccaagaagggtctgtagcccatcaaaattgagagggaaatctggctcccgcagtgtcctccagcgccctctgctgacaaaactcagcacygcaccagcgggtgaaggaggaacgtttgcagggcccagagccaggatcacaaacaggcattgaagggtgaatttgtggctataagacaatattttagtcaacaccacagagtgtaagagtgagcattcagtaagcagtaaagaagaccaaaatccttgccccccaagggcttgcattcttgccagaggagacatgtcaactcaacaaataagtgcaatgcacagatgtgggtggtgatgactgctaaggtgggaaatgaaacaaagg

SEQ ID NO: 358236 - DNA, 605 bp, Homo sapiens
cttctctcagttccacacccagtgctaaccaatattaatggttatatttatatttgtataactgttattttttgggggtgaccttttcttttcagtgtggacagtaattatatgctgcatttctacagttctgggaagtgtgccatgttcgctttatctgatttacctgccttaggtcaccatctctggaatgagccacggagggtgaagatgggatgggatggataaatgggctggagatcagcaggccaagaagggtctgtagcccatcaaaattgagagggaaatctggctcccgcagtgtcctccagcgccctctgctgacaaaactcagcactgcaccagcgggtgaaggaggaacgtttgcaggrcccagagccaggatcacaaacaggcattgaagggtgaatttgtggctataagacaatattttagtcaacaccacagagtgtaagagtgagcattcagtaagcagtaaagaagaccaaaatccttgccccccaagggcttgcattcttgccagaggagacatgtcaactcaacaaataagtgcaatgcacagatgtgggtggtgatgactgctaaggtgggaaatgaaacaaagg

SEQ ID NO: 358237 - DNA, 549 bp, Homo sapiens
aagaccacatgagtgatgtcgacagaagcatttgtccttttcctgactctttcaaatcatttggtgagaggtgtttcgtttctgttcagacgcaagcttcttcccggagtggaggcttagaggcaggctctgtggcatgcactccccgactctacatggtgcattttgactgaagtgaataccctgagaaggttttgcagaaaaatcaaggagataaatgaaaggtttccctcagtggtgaatgtgcagaggctccctaaaatgcaggtatgtragccataaacctctttgccctatgtaaatacccagccatcttctttcctgttctgttgtgagccctctgaatcaatatgtgagcattcagaactatgatgtcgcttgaaggccagggtttcagaagttgtccagcgtaggagaaaatgcaattcactttcaggatgctgtgtgagggcaggaaggatcctcaagctcttcgccctttgctcagcgctgttaaacactctcagaattaggacttgctcttaaccacatgtaaatgtaaattacttt

SEQ ID NO: 358238 - DNA, 503 bp, Homo sapiens
tgcactccccgactctacatggtgcattttgactgaagtgaataccctgagaaggttttgcagaaaaatcaaggagataaatgaaaggtttccctcagtggtgaatgtgcagaggctccctaaaatgcaggtatgtaagccataaacctctttgccctatgtaaatacccagccatcttctttcctgttctgttgtgagccctctgaatcaatatgtgagcattcaraactatgatgtcgcttgaaggccagggtttcagaagttgtccagcgtaggagaaaatgcaattcactttcaggatgctgtgtgagggcaggaaggatcctcaagctcttcgccctttgctcagcgctgttaaacactctcagaattaggacttgctcttaaccacatgtaaatgtaaattactttccagaccaaatacaaaccaccctttatcatcttcagttttgaattctttgtgcctctctacacaagcattagcagagatattgaaaatttg

SEQ ID NO: 358239 - DNA, 648 bp, Homo sapiens
tgagaggcttctgtgtcaccacaaatggccctccagtgttttccagtgatatctcactctctctacactgagagggcagataattaaagggcagaattctttgaggcactccaagaaaatgccttccttttgagcttcttcatttgcttcataatcaacactgtcactgttgttccaatttgcctccacactaattgccattactcaaccttaataagcccaagaactgtattgagaaacctctaaacggctctctgtatgactcatttccgctgccagagaccctagttctgtttttgtgtgcaacctgcacaatgtctgtgcccctcccacagggacaaccatctttgtgcaggtcggcctggcagccaggcccaaggtattcccactgtaccatcatgaccctccagtctggagaaaagaaggattaaagtcacaaaaattttactcttcaaccacaggtcctcacttacaagagcctgaacaggctcgctgtgctctgggactgatacaaaattggtcacagatccgctggagcaaagccaacattagatttgatcaccttggggtgatagccaatcttacattttttattccacascctttgtcccactttcttctcaatctttatattttggtgaggatgga

SEQ ID NO: 358240 - DNA, 541 bp, Homo sapiens
tcctttttttcaccttctctatattcccatttctgctgcataagatgcaggtgtgatggctggagctctcgcagcctcttggaccatgagttgtacttggtgatggaagccacgtgctgagagcagccaagcagaagactggtctctgaggacatccaggtgctgtcacaccagtctggactgcccaccacccaacattttagtgagacaataaaaccttatggtttcagtcaatatwatttgtgatcttctgttaagtgctgtcaatatcctccagtcaaggggcaccaggaacacacctgtggctgaacaagttttgtttattactcagtgcggtgagggggaatgcacagtatgggaaaccaagggtcctagtaagaggattcaagaaaggatatcattttggtctttgtgccttacaggaagttgatcctaccaaaatgtgtattgaataaataaaatttaaggccaaacaacaactagaatgtaataatgtagttcttttgtatttgacaaataaaaatttcagtttctagtttaa

SEQ ID NO: 358241 - DNA, 475 bp, Homo sapiens
tttgttaggagtgtcttgtgaacagcatatggctatttcttttaaatcaatctggcagtctgtctttcagtaggcagcttcagtcctggtatgggctgtagcaagtactgctgctgctgtccatcccttctgcccacgtgagttctcctgcatgcaggttctgacatctcttyctacagtggtggagtcagccctcctttttgcttggggacattctcaggtgctgcagaaacttgctgtgccatggacaagtttattgtgaaatcaggaggtttcatagggagccacacagaggcaaccatggtgagtcggtgcatgaatgcctccccaatctgatgggcgatgctgcagtttgtttctcacggtttcagagggaccctctggggactgagccacaggtgccccaagtgctaacccgctcattggtgcaccttaattaggttgatcacatttcccctttctcaccatgcttgtt

SEQ ID NO: 358242 - DNA, 450 bp, Homo sapiens
cctcagtttcccctttgtatttcttcccttttctggccactgaratgcttatctcacttttgcactgtgatatcccgcaaattttctcaactgcattttctctgtcattcctatgcatttggtggtgatggtggcgatgaatgagggaggggatatttgaagtatgaactcatcacaccatccagactataagttcattctttccctttccaaaagagttctaatgtaaactgaaacactattctaagggtctcagatttcaagtgagataaatcaaaattaatgaaagagtacagcatcatcatgtaatcctaaattcctggtttgaaaatggtgttttgaaggcagtggattttttatgatccctaaaaggatgaagggaagtctacagggagaaatgtgggttcagtattctaagaaattcatgggtctggcttacttaccaaggca

SEQ ID NO: 358243 - DNA, 563 bp, Homo sapiens
tatgcaaacccagaagcaactcatgtcatgacagyctatattttcctgtccaacctggaggatattgaatctgtctgttgaagcatgattttgcatttcagaggagggtttaatcccaaaggaattctggtgcaacaaggagaatttctcagacttaagtgaaaagccaggctcctgtaaatggcacctcctttcagatgatggggagatcagatgatgctcacattaactcttgggctcgaatcctggctgggccacttgttggctgtgtgacatcaagcaagttaatcactgttctgtacttggattttcacatctataaaatggagataatcatgggacctacttcgtagaggtgtcgtgaggattgaatgagtagaagtaaagcatttagaacaatgcttggcatacagtaagcacttaattagtatgacctattcttttttaaaattacttttattattatttgccaggacatgtagtccatgttttggtaggcacaggagaacagcacaatgatttatgtgaaatgtgctttattcccatttagatgcgttatcagg

SEQ ID NO: 358244 - DNA, 568 bp, Homo sapiens
ggtttctgattttgtgattaaaaaattatggtctggggggctggctggcaagatggccaaataggaacagctccagtctgtagctcccagcgagaccaatgcagaaggcaggtgatttctgcatttccaactgaggtaccctgtttgtcacattgggactggttaggcagtgggtgcagcccatggagggcaagcagaagcagggtggggcatcgtctcacctgggaagtgcagggagcaggggccctccctttcccagccaagggaagccttgagggactgtgctatccagcccagatattcctyacctatggtttttgtaactgcagaccaggagattccctcatgagcctacaccaccagggccctgggccctgtttggacggttgtttgggcaggcaccgagctagctccaggagttctttttttttcataccccagtggtgcctggaaccccagcaagacagaaccattcactcctctagaaagggggctgagccagagagaaaagtggtcttgctcagtggatcccactcctacagagcccagcaagctaagaaccactgat

SEQ ID NO: 358245 - DNA, 574 bp, Homo sapiens
ttctttgcaagggtctcattcttgatttaattctctgctattgctatcttacagtttagtgtaattgttttaacaatagtccttcatttttgtttttcactggatcctgcatgttatacagcctatccttcctctgactgagaaggtaacaacatgatctcccaagcaggtcttaagctttcctggacatgtggcaagcattctagcacaaattagaatgttcttttcacctactccatgcactcctagtttgttctgcatgcagatagaaacatgtggaaggyaatgatgtggtcagtattgaaagagatcacattctagaagtgtaatgattgtggcctaagagttctcctagtcaatgcatttggaatacatatagctctacatttctgttataaaatttcaaatgctaaatataacaagaccagaaagtgaatatggttcaaatgtttcattttctttcacactcttggtaagactagcatctttcatcatcattaacccatctttcagagagtaattggaagccaatatttaggagtgggttggtagatgatgtacggtcctgaacaag

SEQ ID NO: 358246 - DNA, 542 bp, Homo sapiens
tgtcggggagttgggggcaagcagagggagagcattaggacaaatatctaatgcatgctgggcttaaaacctagatgatggttgataggtgcagctaaccaccatggcacatgtatacctatgtaacaaacctgcacgttctgcacatgtattccagaacttacagtaaaattaaaaaaaaaatacagaaatcttttgctaagaatatactttttctgcaagtgtccttcctaacttccttcttagaaagagagaagsagaaatattccttggtgataaaatcaaataattaaagtattctcaatgaagggatatatgctttaaatttgtaggaattaaaatgaaatatcagatatggcccttgatctaaaggagatgaaaatctaggtgaaacaatctgttttatttacacatcaaataacaagatgattattataatttatgtacccaagtagtttccactaacagaatgtaagatagttgtccttggctttgaggaactcgggatcattccagaagcagacagtagatacactccaggg

SEQ ID NO: 358247 - DNA, 593 bp, Homo sapiens
tctttgtagcgaaatatgattttgtctctgtaagttgatatccaaggctaagggtaagcgtctgcattctttcctttcttttaaattttatttctgtcagcttatagggaatgcatatcatagcaacaccaatgtttaggcaagggaaaagtcgtagtttctgtaagtaatattagtttaccaggaaggagacaaaactattttgagaccagagaggaaacacaccaaaaagcaacagaaccaatgtgagtaaaaagcatctgccyatacccattctttctgtgtggggaatcttagtaatttaaatctggaaccataaggttgatacatttttagcaacctttataacacagcctccatgctatgaaatattgtgctaaaggacttgcattattgttttcagtgctacttaaatccttgtgtatgttaaatttatagttgaagtcaagacagatgcctcattcagtccaggttgctatagtaaaatacaatagatgtggtggcttaaacaataaacatttatttctcataactggaggttaagtccaagatcaaggtgtcaccagatccaatatctgatgaaggcacttctt

SEQ ID NO: 358248 - DNA, 593 bp, Homo sapiens
tctttgtagcgaaatatgattttgtctctgtaagttgatatccaaggctaagggtaagcgtctgcattctttcctttcttttaaattttatttctgtcagcttatagggaatgcatatcatagcaacaccaatgtttaggcaagggaaaagtcgtagtttctgtaagtaatattagtttaccaggaaggagacaaaactattttgagaccagagaggaaacacaccaaaaagcaacagaaccaatgtgagtaaaaagcatctgcccatacccattctttctgtgtggggaatcttagtaatttaaatctggaaccataaggttgatacatttttagcaacctttataacacagcctccatgctatgaaatattgtgctaaaggacttgcattattgttttcagtgctacttaaatccttgtgtatgttaaatttatagttgaagtcaagayagatgcctcattcagtccaggttgctatagtaaaatacaatagatgtggtggcttaaacaataaacatttatttctcataactggaggttaagtccaagatcaaggtgtcaccagatccaatatctgatgaaggcacttctt

SEQ ID NO: 358249 - DNA, 628 bp, Homo sapiens
ttggatccctacctttcactatatacaaaaaattaactcaaaatgtatcaaagatttaaatgaaaaacctcaaactatgacaattttaggcagcaactttgaaaatactcttcttgatatcagccttgcaatgaatttggagtaagtctgcaaaagcaattgtaacaaaaacaaaagtaacsaaaacaaaagtagacaagtgggacctaattaaactaattactaataaaattagtaattagttaattaaagagattctgcatagcaaaagaaactatcaacagagcaaacaaacagcctacataatgggagaagatattcataaacaatacatccaacaaagtcctaataacctgaatctattgggaacttaaatcaacaagcaaaaacaaaacaaaacaaaacaaaacaaaacaaaacaaaaaacaccaaataactccattaacaaaatgggcaaaaaatatgaacagaaacttctcaaaagaagacatgcaagtagctaacaaacagatgacaaaatgctcagcatcacgaatcatgcaagaaatgcaaatcaaaatcacaatgggataccactgcacaccagtcagaatagctactattaaaaagtcaataaacagatgctggt

SEQ ID NO: 358250 - DNA, 592 bp, Homo sapiens
tatgaacaggtagctcataagtctttaggtcctgtgttaaaattttagatgttractaaccccataattttaaaaagcttagaagttctcttgtataatcagttattagaggacttcctaacaggcagcattgctcaggatggagattccacattcagtccggaaggcatctatattgtgtcctgtgatcgctgcattttactgacgaagaaaaatatgtatcttctaaatgagcagaattatgagggtgtttccattgccttagaaaaaatacacaataacaataatagcaaggttaagggtttatacagtttcttaggtagtaactgagagactgacaatatggtaaggaaatgagccttggatgactggaggataaaagaaaccctactgtgatggttaagttgaggtgtcaaccttgctggactaaggggtacataaatagctagtaaagcattgtttctgggtatatctgtgggagtttccagaacagactgccatttgaaatcagtggactgagtaaggaagattcaccctcaatgtgggaggcagcatccaatcagctgaagaccaagtaaaataaaaaggtagg

SEQ ID NO: 358251 - DNA, 473 bp, Homo sapiens
ctcttcagtgatagaagtgtctttgttattcatggtggactctttagaccacatctgatggtttatgtagaggtgattcagggtgtacctttagataatttgtgctaaagacgtgatttaagatggggactggtcatgccagaaagatcaaccttgtaaagcttagagctttgagccacattatatcagccagacatctggagaggggaaggaagctggaggatgcgctcaatagcatgcacagtgatttagtctatcattcttaggtaatgaaaatycaataaaaactctagacatggaagcttgagtgaacttccttggttgacagtgccgtatattgtcatacatcgtggttctaagagggtaatgtgtactgactccgcagggaggaaacaatgaaacgcctgtagttacaatcttcccagaatttgccctacatgtctcttcccttggctgattttgatctgtatgat

SEQ ID NO: 358252 - DNA, 473 bp, Homo sapiens
ctcttcagtgatagaagtgtctttgttattcatggtggactctttagaccacatctgatggtttatgtagaggtgattcagggtgtacctttagataatttgtgctaaagacgtgatttaagatggggactggtcatgccagaaagatcaaccttgtaaagcttagagctttgagccacattatatcagccagacatctggagaggggaaggaagctggaggatgcgctcaatagcatgcacagtgatttagtctatcattcttaggtaatgaaaattcaayaaaaactctagacatggaagcttgagtgaacttccttggttgacagtgccgtatattgtcatacatcgtggttctaagagggtaatgtgtactgactccgcagggaggaaacaatgaaacgcctgtagttacaatcttcccagaatttgccctacatgtctcttcccttggctgattttgatctgtatgat

SEQ ID NO: 358253 - DNA, 569 bp, Homo sapiens
gggtggcttcaaattttaattttagtaaatacagtccaggcaaggttttgacagcagcagttcactgaagattactctcgttttatctcaatcatagagtttatttagtagggagaagactgatgtttaataggtcactggcaagcctggtaactaaaactatgatatcytttgcaactgaccattatcatttatataagtttatttttattaagctggcatggcagaagcaaggatatatagagaagaaaagagtcttttagaatactggtattttatatattgaggactagaagtatgcattgaaaatttagcctaattgtttaagaaggtctgaagacttaaatttactctgaaaagaactaagttccaaatggactgcaggacacgctgtgtgcactttttcctgtgcagtatttaatgacatgccttaaacttccttccactgagttttgttctgttttcagatcatgagggaaattgtagaaggttgtatcactactatttatgtaaactaccccttgacataattgcccattggaacctaattaaaagaagtcccaacattg

SEQ ID NO: 358254 - DNA, 569 bp, Homo sapiens
gggtggcttcaaattttaattttagtaaatacagtccaggcaaggttttgacagcagcagttcactgaagattactctcgttttatctcaatcatagagtttatttagtagggagaagactgatgtttaataggtcactggcaagcctggtaactaaaactatgatatcctttgcaactgaccattatcatttatataagtttatttttattaagctggcatggcagaagcaaggatatatagagaagaaaagagtcttttagaatactggtattttatatattgaggactagaagtatgcattgaaaatttagcctaattgtttaagaaggtctgaagacttaaatttactctgaaaagaactaagttccaaatggactgcaggacacgctgtgtgcactttttcctgtgcagtatttaatgacatgccttaaacttccttccaytgagttttgttctgttttcagatcatgagggaaattgtagaaggttgtatcactactatttatgtaaactaccccttgacataattgcccattggaacctaattaaaagaagtcccaacattg

SEQ ID NO: 358255 - DNA, 569 bp, Homo sapiens
cctcttccttgctgtttatctgcttaccaggagcaaaaccctacttaaatacaattctttacattttcatgcaactgaagaaactggaaaaaaaaatgcttttctgactgctctcatgaaattcttgaccatgtacctcaggtaggattttactgaacaaaaatcatacagcattattcaattctaaataaccatttcatattttttcttatcttctcaaatatctaatacattctccaattgtactatttactgttgcactggacactttaaagcaatcagaagaaaatttccacaatgaatttttgtgtggtcactgtgartactaaaatatacctctttaaggtttcacaatctatcgtcaaacacagtctaatgcttaaccaatctatcttcaaacatattctaatgcttaaccaacagataaaagtgttacaagggaaaacctttaatacattttctcttttctggcataacttctaaagtcatttatttgatttctgtatatataatataaatcccagatcacatcaaaaattattcttaaaatatcttttattttgcatata

SEQ ID NO: 358256 - DNA, 502 bp, Homo sapiens
ggtgggaaaaaaaagttttagtttagtttttctactaaatggctaaaaagttatagatgagtagatagaaagagatacatttcctcctttctaataacttcaattagggacagagtttatatgcactgtttttcatttcaggctatrtatgaaggaaaccaaaaatatgctcaaaatgtacttccttgacatatttcaagatggtcattcagagaagctaaaaacacaggaatagctgaaaagttgtcccacgtagaagagatttgcctgcagaagaaattaacaacagatacatacaggccttctctgaagtccctctttggtctaggaaagattatctcatagaaaaagaagacaaaaggtctgactgagaaactgttaccacagactgccatatttcctttctgagagctgctacatgtgaccttttctgtccataacaagaccacctttgctccatgcctttcctccacttctccatcctgtaacttctcttgtcatt

SEQ ID NO: 358257 - DNA, 502 bp, Homo sapiens
ggtgggaaaaaaaagttttagtttagtttttctactaaatggctaaaaagttatagatgagtagatagaaagagatacatttcctcctttctaataacttcaattagggacagagtttatatgcactgtttttcatttcaggctatgtatgaaggaaaccaaaaatatgctcaaaatgtacttccttgacatatttcaagatggtcattcagagaagctaaaaacacaggaatagctgaaaagytgtcccacgtagaagagatttgcctgcagaagaaattaacaacagatacatacaggccttctctgaagtccctctttggtctaggaaagattatctcatagaaaaagaagacaaaaggtctgactgagaaactgttaccacagactgccatatttcctttctgagagctgctacatgtgaccttttctgtccataacaagaccacctttgctccatgcctttcctccacttctccatcctgtaacttctcttgtcatt

SEQ ID NO: 358258 - DNA, 502 bp, Homo sapiens
ggtgggaaaaaaaagttttagtttagtttttctactaaatggctaaaaagttatagatgagtagatagaaagagatacatttcctcctttctaataacttcaattagggacagagtttatatgcactgtttttcatttcaggctatgtatgaaggaaaccaaaaatatgctcaaaatgtacttccttgacatatttcaagatggtcattcagagaagctaaaaacacaggaatagctgaaaagttgtcccacgtagaagagatttgcctgcagaagaaattaacaacagawacatacaggccttctctgaagtccctctttggtctaggaaagattatctcatagaaaaagaagacaaaaggtctgactgagaaactgttaccacagactgccatatttcctttctgagagctgctacatgtgaccttttctgtccataacaagaccacctttgctccatgcctttcctccacttctccatcctgtaacttctcttgtcatt

SEQ ID NO: 358259 - DNA, 502 bp, Homo sapiens
ggtgggaaaaaaaagttttagtttagtttttctactaaatggctaaaaagttatagatgagtagatagaaagagatacatttcctcctttctaataacttcaattagggacagagtttatatgcactgtttttcatttcaggctatgtatgaaggaaaccaaaaatatgctcaaaatgtacttccttgacatatttcaagatggtcattcagagaagctaaaaacacaggaatagctgaaaagttgtcccacgtagaagagatttgcctgcagaagaaattaacaacagatacatacaggcmttctctgaagtccctctttggtctaggaaagattatctcatagaaaaagaagacaaaaggtctgactgagaaactgttaccacagactgccatatttcctttctgagagctgctacatgtgaccttttctgtccataacaagaccacctttgctccatgcctttcctccacttctccatcctgtaacttctcttgtcatt

SEQ ID NO: 358260 - DNA, 545 bp, Homo sapiens
gaaatttaattttatatatctaatgttttgaatatatataaccaaatacacattgagatatattgaaaatttaaatgagatgaaaatagtttttaaaatattatgtttctgtatagaaatgttgcttactgcatatattttagacagtagttttaataggtcagatttaagataagattaggattcaagaataatctatgctaaagactgactctagactcaaattaagaaaggtgatagtttgtggggaaccagatttcttgtatcatatagagttttaaaatctctataatatcttgcttttcacgaaaatgttaagacaaatatttttcygagagaaaaatgctgtggtgacccacccaatttgttatcagccagtaatagttcctctatcacaacaaaatttatattgttgttcttactctcttcttgcattcaaagtccaataaactgttctgggaatggttatatcaaattatgtcattaagagagaaagatagactgtttaatggaagaaaaacacgagcaacagcaaatgcatgttc

SEQ ID NO: 358261 - DNA, 545 bp, Homo sapiens
gaaatttaattttatatatctaatgttttgaatatatataaccaaatacacattgagatatattgaaaatttaaatgagatgaaaatagtttttaaaatattatgtttctgtatagaaatgttgcttactgcatatattttagacagtagttttaataggtcagatttaagataagattaggattcaagaataatctatgctaaagactgactctagactcaaattaagaaaggtgatagtttgtggggaaccagatttcttgtatcatatagagttttaaaatctctataatatcttgcttttcacgaaaatgttaagacaaatatttttccgagagaaaaatgctrtggtgacccacccaatttgttatcagccagtaatagttcctctatcacaacaaaatttatattgttgttcttactctcttcttgcattcaaagtccaataaactgttctgggaatggttatatcaaattatgtcattaagagagaaagatagactgtttaatggaagaaaaacacgagcaacagcaaatgcatgttc

SEQ ID NO: 358262 - DNA, 558 bp, Homo sapiens
caaactcatcctaaaacttaatggcttagggttttatgggttggactgaacttagcaagactagttcatttgtgctacttagcctcacctagcatagcttgatttgggctggaaattatactttcataaaggttcactcacttaaatggcaagtgatgataattgttagttgggagctcagctgtggcaactgaccacaagtctctgttttctgcaggtgatatctcttgatgtgatagctctatttttcttataatatggcagttgaatcccaaagaaaaaacagtttcacaggacaatacctcaagtaagatctcttattttctcctgtgacgctctctaatgtcccattgaccaaagccagtcatatgaacargctcactgtgaaagtgtgacaggactgccccaagcatgaaatctgggagacatggatcatggtgagcatcgaaataacatcaatatgaaaatatttctacaattttggtgagaaagtgtaagaaaaagatatttattatttattcgtggatgaacattcaagagtagtaagaaacaaagtgc

SEQ ID NO: 358263 - DNA, 558 bp, Homo sapiens
caaactcatcctaaaacttaatggcttagggttttatgggttggactgaacttagcaagactagttcatttgtgctacttagcctcacctagcatagcttgatttgggctggaaattatactttcataaaggttcactcacttaaatggcaagtgatgataattgttagttgggagctcagctgtggcaactgaccacaagtctctgttttctgcaggtgatatctcttgatgtgatagctctatttttcttataatatggcagttgaatcccaaagaaaaaacagtttcacaggacaatacctcaagtaagatctcttattttctcctgtgacgctctctaatgtcccattgaccaaagccagtcatatgaacaagctcactgtgaaagtgtgacaggactgccccaagcatgaaatctgggagacatggatcatggtgagcatcraaataacatcaatatgaaaatatttctacaattttggtgagaaagtgtaagaaaaagatatttattatttattcgtggatgaacattcaagagtagtaagaaacaaagtgc

SEQ ID NO: 358264 - DNA, 487 bp, Homo sapiens
aaataattcagaagcaaaacaataacaagtaacagtgaaccttcagtacacttctctgcattaaaaattatttgtatattttaaagacataatttagaacttcctgacactgctgtaaaacatagtctactgatcagaaatataagttttccacacataatgctyatcttacttgaagaaaaatgtttcaagcaaagatgtcttttataacaaagacagccacctaagaaaaagtagaacacttctgtggtttgaatatgatcttcaaaaagcatgtgctggagacttaattcctaatacagcagtgttgggaggtagatcctaatgaagggtgattagactgtgagggcagagtgaatgaatcaatgtcattattgcaggggtaggttagttataagacgggaagttctgcaatctctctctctctctctctctctcctcttcccctctctttgccctttcatgatctgatacctccaatgtgtta

SEQ ID NO: 358265 - DNA, 487 bp, Homo sapiens
aaataattcagaagcaaaacaataacaagtaacagtgaaccttcagtacacttctctgcattaaaaattatttgtatattttaaagacataatttagaacttcctgacactgctgtaaaacatagtctactgatcagaaatataagttttccacacataatgctcatcttacttgaagaaaaatgtttcaagcaaagatgtcttttataacaaagacagccacctaagaaaaagtagaacacttctgtggtttgaatatgatcttcaaaaagcatgtgctggagacttaattcctaatacagcagtgttgggaggtagatcctaatgaagggtgattagactgtgagggcagagtgaatgaatcaatgtcattattgcaggggtaggttagttataagacgggaagttctgcaatctctctctctctctctctctctcctcttyccctctctttgccctttcatgatctgatacctccaatgtgtta

SEQ ID NO: 358266 - DNA, 533 bp, Homo sapiens
aatttcatgtttgtttgtatattttgttttggtatagatacaagtgattgttttctggtgaaaatgataagccccccaaatttatcaccctcaggtatattaatcacttttccactaagcaagcaatcttacctttttwaattaaattgctgattaacatgtaactccacaaatgctatagaacacgtattttgatgttagaaatagagggtaaaaagaaacttcaatctattgcattcaaaaagccaaaagacagagtaggataaacagaaattccaaaaacaaaccttcactgtataaaaatatattaagctttatttgaaacaaattgatttattttgtgaaaagaacaaaggagagaattgactaaatcaaaaagattaaatgttaattcccttggtacttaaaagggaattctacacaccacatttctcttgtggtcttattaacactactgcaggccaaatacaatatccatgtatcatcaaagaatttacaagcatattcagttctctctatttatcaaccacatt

SEQ ID NO: 358267 - DNA, 533 bp, Homo sapiens
aatttcatgtttgtttgtatattttgttttggtatagatacaagtgattgttttctggtgaaaatgataagccccccaaatttatcaccctcaggtatattaatcacttttccactaagcaagcaatcttacctttttaaattaaattgctgattaacatgtaactccacaaatgctatagaacacgtattttgatgttagaaatagagggtaaaaagaaacttcaatctattgcattcaaaaagccaaaagacagagtaggataaacagaaattccaaaaacaaaccttcactgtataaaaatatattaagctttatttgaaacaaattgatttattttgtgaaaagaacaaaggagagaattgactaaatcaaaaagattaaatgttaattcmcttggtacttaaaagggaattctacacaccacatttctcttgtggtcttattaacactactgcaggccaaatacaatatccatgtatcatcaaagaatttacaagcatattcagttctctctatttatcaaccacatt

SEQ ID NO: 358268 - DNA, 303 bp, Homo sapiens
tggaaaataatttatcttcaaaatagtaaaggcattaattctttattgttaattacttttggctttctattttgttgttcagaaatataaggttatttttatttatctttttatgtgatccatattttytctctctctctctctctgtctgtactttcctccttcattctctcaaattgcaggttattctttttctctccagtgtgctaaactttctttacttcctgccctagaaaaagtctatattcttgcccaggtttagggcctcagtggaccctgaattaggaaatgttctttagtcct

SEQ ID NO: 358269 - DNA, 520 bp, Homo sapiens
tcagatttaatggagtgggtctgttttctcagccaaagatgttttcagaaatttcaagattcagaattctcagtgtcattcatgtctacccgaatatcattcccccatgatacaaagtttcaatctcttcttaaaagtatctgtttttgggtactgaggcactcaaaaggtttacttctctctgctattaaaagctgatatcagccggtcgcagtggctcctgcctgcaatcccagtactttgggaggctgaggtgggagttcaggagttcaagaccagcctggcctacatggtgaaaccccatttctactaaaaatacaaaaattagctggaygttgtggcgtgtctatagtctcagctgctagggaggctgaggcaggagaacctgggaggtggaggttgcactcagccgagatcacgccactgcactccagcctaggtgaccagagtgagactctgtctcaaaaaaaaaaaaaaaaaaaaaaaaaaataaaacagctgatatctcggtggtatctat

SEQ ID NO: 358270 - DNA, 593 bp, Homo sapiens
aataaatcaaatatgtaaacatctgataaggggatttaaaatgacagtagttttgagattcaataaacattgccccagaatattatacctgagacaaaaggtcagtagagccaatagccaagatcttacaccaaattatattaaaatgcatttgcaacatacacctattataggttatatatttctctgtaactagaaaaccaaaatgtgtgtatgctcaggctaagtataacattgttttctaaagaacagagttagctttgcmcagtcataaattcacttccttcccagagcatcaaaatattaaaataagcaagaattatcaacttgaccttaaagatctctattagaatgtttctgaaatcaaaatcctagaaaatccagccaccaaattatagtaagcttcacaaagtttggtattatggacacccacacaaaattgtgtcctatttttcttgcccaatcccccctaagtttgctggccagtgtcccagaatatcttctgtgcatatctcagatgctggtacaattctggcttcaggttgtagctatggatgaccataagttccaaaaaccaagaataatagcagctt

SEQ ID NO: 358271 - DNA, 593 bp, Homo sapiens
aataaatcaaatatgtaaacatctgataaggggatttaaaatgacagtagttttgagattcaataaacattgccccagaatattatacctgagacaaaaggtcagtagagccaatagccaagatcttacaccaaattatattaaaatgcatttgcaacatacacctattataggttatatatttctctgtaactagaaaaccaaaatgtgtgtatgctcaggctaagtataacattgttttctaaagaacagagttagctttgcccagtcataaattcacttccttcccagagcatcaaaatattaaaataagcaagaattatcaacttgrccttaaagatctctattagaatgtttctgaaatcaaaatcctagaaaatccagccaccaaattatagtaagcttcacaaagtttggtattatggacacccacacaaaattgtgtcctatttttcttgcccaatcccccctaagtttgctggccagtgtcccagaatatcttctgtgcatatctcagatgctggtacaattctggcttcaggttgtagctatggatgaccataagttccaaaaaccaagaataatagcagctt

SEQ ID NO: 358272 - DNA, 597 bp, Homo sapiens
aatttgttttgaggactcaaatcagtcttttgttcactagacctagaattcggattatgcaaactagtgaagaattcattatagtatctgtctattttctaggaacagtaacatcaaacaaccattgctacaggtctctttatgggtcaaacgatcctgattactcttttggttctgatgtccatcatggtaacagcacccactgcatctttggtgattaagtgccaccatttgatgctaacaccctgcgattctattattccckttacaactggggattttagctcagtgggaacccagcagttctcactgtaacttcccacttacaaaggagattagaaacagaatgcttcaaaaaatttgggagcttctctcatgaatttaatactgactgccttggtgaaaagtgtcctggggactcctccaaagagaagcaagtcttaattgatatatccgttgtaacatttcatttccctaagcctttggttacattcttttacagaatacaaagacaattttaattttttaacttagagttgaccattttctttgtgttgctagaaagggatacctgtggctgaggctgggtaatttata

SEQ ID NO: 358273 - DNA, 617 bp, Homo sapiens
tcttagtttgtctcttactaacacaacatatattaytcattggtaaattcttaaacttaaaaaaaaaatctttcaaactttataccatcagctttatgccccacactagccaaacctaccattatcttttgcctgtgctgcaataaactacaatgagtacctcttcaactcttgcctccatcacatttcccaagcattaacgtgttttaagcagaaagaaaaaagtaaaatacactttaagcagtaaagaaaattacactttacttaaaagtaaaatacactttaagcagaaagaaaaaagtaaaatagtattaagctccctgttgtggaagtccgaattgagacaaatttggatgagggaaacaagatggagaacaatttacataggcaggcgaaagctgataaagattaaaattaatatccatgaaaagagacaggcagaaaagagaggatgttgctgtagtctgaagattgtgtcctcccaaagtttatattttaaaacctaatcctcaatgtggtagtattaaggggtggggctttggggaggtgattaggtcatgaaggctgagctccgtaaatgggattagttattttacaaaagaagctcagagggctct

SEQ ID NO: 358274 - DNA, 617 bp, Homo sapiens
tcttagtttgtctcttactaacacaacatatattactcattggtaaattcttaaacttaaaaaaaaaatctttcaaaytttataccatcagctttatgccccacactagccaaacctaccattatcttttgcctgtgctgcaataaactacaatgagtacctcttcaactcttgcctccatcacatttcccaagcattaacgtgttttaagcagaaagaaaaaagtaaaatacactttaagcagtaaagaaaattacactttacttaaaagtaaaatacactttaagcagaaagaaaaaagtaaaatagtattaagctccctgttgtggaagtccgaattgagacaaatttggatgagggaaacaagatggagaacaatttacataggcaggcgaaagctgataaagattaaaattaatatccatgaaaagagacaggcagaaaagagaggatgttgctgtagtctgaagattgtgtcctcccaaagtttatattttaaaacctaatcctcaatgtggtagtattaaggggtggggctttggggaggtgattaggtcatgaaggctgagctccgtaaatgggattagttattttacaaaagaagctcagagggctct

SEQ ID NO: 358275 - DNA, 545 bp, Homo sapiens
ttttaatggaactattcctccagcttatttatttgcacagtgtacttttgtttcagttttcctttctcctcctgggatttttcctttatttcagtcagttgctttttcagattttcagttttttctggtccttgcctctgctcttgcttytccttttccttttgtcctttccctttgacagctatcttggcgtctccagtggcctcactgttgtccttgaccagccactgacactcaggctggctttttctctaagaaaagctgcatttaaagtgagtaaatgttccctctgggtcattcccatgcataaagagtgcctctgcacctgacatggctggggcacaggggtaaggtagatcacaccagtgcaatgtatgtgcagtgagtatgcaagtggtacaggtgcctgagcctgcccagtataggtcacactgggtgggcagtcctgcttatcctttgagctttgaaaccagacattgacttctcctctctagctatttaagtcctagatggcatcgtctttcaatagaagactatttcatctc

SEQ ID NO: 358276 - DNA, 333 bp, Homo sapiens
ctagtctccagaactgtgagaaataattttgtttctcgtaaggtacccagtttatgacatttttgtaaagcaacctgaacagattaagacaaatggtgatgacaaaatataatcaacatatcttgataaataaataattggttataaacmctcagggtgaagaaagtaatataacgcatttctattttatgtaaatgcattgatgatagtataagagaggtattgcaggacatacaagtttgttgaaatagataaaaatatgaatataggtaactgcaacatattgaaaagatatttgaaagtaaggaaataaaatcagtaaataaagaatga

SEQ ID NO: 358277 - DNA, 333 bp, Homo sapiens
ctagtctccagaactgtgagaaataattttgtttctcgtaaggtacccagtttatgacatttttgtaaagcaacctgaacagattaagacaaatggtgatgacaaaatataatcaacatatcttgataaataaataattggttataaaccctcagggtgaagaaagtaatataacgcatttctattttatgtaaatgcattgawgatagtataagagaggtattgcaggacatacaagtttgttgaaatagataaaaatatgaatataggtaactgcaacatattgaaaagatatttgaaagtaaggaaataaaatcagtaaataaagaatga

SEQ ID NO: 358278 - DNA, 540 bp, Homo sapiens
tccttcttatgcctttgcatccaaatatcttagctcccacttccaagtgagaacaaataatgtttggttctcaattgctgagttactttacttagraaaatggtctccaactccatccaggttgcacgaatgccattattttatttctttttttggttgagtagtattttatggcatttatatatcacaaattctttatccactcattggttgatggacatttaggttggttccatatttttgcaattgtgaattgtgctgctataaacctgtgtgtgcaagtgtcttttttatatactgacatcttttcctctaggtagatattcactagtgggattgctggatcaactggtagttctacttttaattctttaaggaatctccacactcttttccatagcagttgtacaagtctacatttccaccaacagtgtaagaatgtttccatttcaccacatccatgccaacatctattactcttcgatttttaaattatagccattcttgcaggagtaaggtggtatcacattgtggttttga

SEQ ID NO: 358279 - DNA, 540 bp, Homo sapiens
tccttcttatgcctttgcatccaaatatcttagctcccacttccaagtgagaacaaataatgtttggttctcaattgctgagttactttacttagaaaaatggtctccaactccatccaggttgcacgaatgccattattttatttctttttttggttgagtagtattttatggcatttatatatcacaaattctttatccactcattggttgatggacatttaggttggttccatatttttgcaattgtgaattgtgctgctataaacctgtgtgtgcaagtgtcttttttatatactgacatcttttcctctaggtagatattcactagtgggattgctggatcaactggtagttctacttttaattctttaaggaatctccacactcttttccatagcagttgtacaagtctacatttccaccaacagtgtaagaatgtttccatttcaccacatccatgccaacatctattactcttygatttttaaattatagccattcttgcaggagtaaggtggtatcacattgtggttttga

SEQ ID NO: 358280 - DNA, 595 bp, Homo sapiens
  misc_feature (1)...(595): n = A,T,C or G
ctggtttggtagtggtgaattctctcatcatttctttgtctgaaaaaaattttatctctyaatgtataaagcttagtttcactggatacaaaattcttgtctgatgattattttgtttaaggaggctaaagataggactcaaatcccttctggcttgcaaggtttctgctgagaaatctgcttttaatatggtaggtttttctttataggttacctggtgctatttttttcctcacagctcttaagattccttcctttatcttgactttagataacctgatgactacgtgccatggtgatgatgttttaacaatgaatttcgtagtaactctttgagcttcttgtatttcaatgtctagatctctagcaagaccagagaagtttttctcaataatatcctcaaataagttttccagacttttagaattctcttattcncttgggaacatctattatttttatgtttgcttgtttaatataatcccaaatgttactggaggctttgttcatgtaattttttttctttttctttgttggattgggttaatttgaaagacttgtcttcaagccctgaagttctttcttctacttgttc

SEQ ID NO: 358281 - DNA, 595 bp, Homo sapiens
  misc_feature (1)...(595): n = A,T,C or G
ctggtttggtagtggtgaattctctcatcatttctttgtctgaaaaaaattttatctctcaatgtataaagcttagtttcactggatacaaaattcttgtctgatgattattttgtttaaggaggctaaagataggactcaaatcccttctggcttgcaaggtttctgctgagaaatctgcttttaatatggtaggtttttctttataggttacctggtgctwtttttttcctcacagctcttaagattccttcctttatcttgactttagataacctgatgactacgtgccatggtgatgatgttttaacaatgaatttcgtagtaactctttgagcttcttgtatttcaatgtctagatctctagcaagaccagagaagtttttctcaataatatcctcaaataagttttccagacttttagaattctcttattcncttgggaacatctattatttttatgtttgcttgtttaatataatcccaaatgttactggaggctttgttcatgtaattttttttctttttctttgttggattgggttaatttgaaagacttgtcttcaagccctgaagttctttcttctacttgttc

SEQ ID NO: 358282 - DNA, 496 bp, Homo sapiens
agctaggagcttctttcaccctgtggcccctccccagttttcctggctgccttccattccccgaggacctctgtaaaataaggccaggaatggcttccctgggttctagctggggactgggagtgcccacaaggttcttcccactgcttgttctacttttatatttcacttggctccctaaatccatttcagctctaggtaagtttaaacccttctcccttgatgtggattttcaggttccccagtggggatgtgttttcagaggctaacttttccccctctcacactttgaaaactcacagttttttggctgtcttgtggcacttgcagcagcaaactgtttctttcaaagcgtttgtgaattctttcagttttcctggtatgttcctgcagtggttcttagagcaaaakttcacaatgtgagtctccagatgttgctctgtccatccaagtgggagctgcacattagtgctgtctcccatctgccattttatcc

SEQ ID NO: 358283 - DNA, 427 bp, Homo sapiens
tctgcagtcacacatggataatttycaggaaagagagattagcagtgaacgtcactgtgtgtgtatgtgtgtaattttatattatatatatatatatatatatatatatatatatatatgtatgtatgtatatagttgtctgtatacagaagagcactctgacagggctccttctcatcttagagttctattcatcatttatgggaagaactaaatccaagcagaaaataaatagaaagaagcagtgattttaaacccgatcttctctttgattacattaaaattttaaacttctgtatggccaaaaataaagagagagagaaagaaagtcctaaacaaagtcagaaggcaagcagcaatgtgggaaacagcatcacataatagacaaagggctaatttttattatttacaaagagctcttacaaat

SEQ ID NO: 358284 - DNA, 427 bp, Homo sapiens
tctgcagtcacacatggataatttccaggaaagagagattagcagtgaacgtcactgtgtgtgtatgtgtgtaattttataytatatatatatatatatatatatatatatatatatatgtatgtatgtatatagttgtctgtatacagaagagcactctgacagggctccttctcatcttagagttctattcatcatttatgggaagaactaaatccaagcagaaaataaatagaaagaagcagtgattttaaacccgatcttctctttgattacattaaaattttaaacttctgtatggccaaaaataaagagagagagaaagaaagtcctaaacaaagtcagaaggcaagcagcaatgtgggaaacagcatcacataatagacaaagggctaatttttattatttacaaagagctcttacaaat

SEQ ID NO: 358285 - DNA, 427 bp, Homo sapiens
tctgcagtcacacatggataatttccaggaaagagagattagcagtgaacgtcactgtgtgtgtatgtgtgtaattttatattwtatatatatatatatatatatatatatatatatatgtatgtatgtatatagttgtctgtatacagaagagcactctgacagggctccttctcatcttagagttctattcatcatttatgggaagaactaaatccaagcagaaaataaatagaaagaagcagtgattttaaacccgatcttctctttgattacattaaaattttaaacttctgtatggccaaaaataaagagagagagaaagaaagtcctaaacaaagtcagaaggcaagcagcaatgtgggaaacagcatcacataatagacaaagggctaatttttattatttacaaagagctcttacaaat

SEQ ID NO: 358286 - DNA, 549 bp, Homo sapiens
gagtgagtagccaccaggggctggtgatgggtgctgcaatttatagaggattgcaatgatgatgatgccaaggaggaggaggaggacgtctgtgggcgcttttgctagattctcagtgtgcatttgaacactggcttctctgggctgtaaattttccatctgtaaaataaagaagttagagaagycagtgatttttttttcaaacattactttcagtgaaacttgaccctaggaaaaaaacccaaagtggaccataaaataacagcaatattagctatgtgccttccatggtcccaaccactgtatacttattaacttcactaagcttcacaacagccccgtgtccatattacagataggaaagctgatgagactgcagaggggtttaaggaacttgcccagaactacacatgaacagcctggttctggggccaggtttgggtgggcagcagagagccatgctctgcctgttcaacctccatccccttggtccccacagcacccatgtgctccccagaacacagctaggaaagtcactgccctaaatga

SEQ ID NO: 358287 - DNA, 549 bp, Homo sapiens
gagtgagtagccaccaggggctggtgatgggtgctgcaatttatagaggattgcaatgatgatgatgccaaggaggaggaggaggacgtctgtgggcgcttttgctagattctcagtgtgcatttgaacactggcttctctgggctgtaaattttccatctgtaaaataaagaagttagagaagtcagtgatttttttttcaaacattactttcagtgaaacttgaccctaggaaaaaaacccaaagtggaccataaaataacagcaatattagctatgtgccttccatggtcccaaccactgtatacttattaacttcactaagcttcacaacagccccgtgtccatattacagataggaaagctgatgagactgcagaggggtttaaggaacttgcccagaactacacatgaacagcctggttctggggccaggtttgggtgggcakcagagagccatgctctgcctgttcaacctccatccccttggtccccacagcacccatgtgctccccagaacacagctaggaaagtcactgccctaaatga

SEQ ID NO: 358288 - DNA, 538 bp, Homo sapiens
aactgaagatccactgacctcaattaatcagagtgatttttttaacaatatcaattgagcacccagacatacagaaaaaaaatccaactgtattaggagagctaaggcagagctggctaacccatatacaatagaaaaagatctgaaggtcagagtaaagccgacagagctctaataaaaataaaaaagaaagaaagaaaaaaaaccatcataaatgagattccctggaagcatggtttatcttgtttcctgagtccttggctccacagctcaaagggagaatcttgagaggagggatggagacttactctctgtgtatcaggtccaaacatagtactgagcacagaacaggtgggttttggacactatggtgttgtgtggtctcctgcttagactcaagccatcaactcctggcatggcaaacgtgacagtagaaagaattctaackgggcagaagcccactgcagactcacttaaacaaaaaaggttgatgtatggaactaaaatgccaaagttagatataaattcaggcatgatt

SEQ ID NO: 358289 - DNA, 620 bp, Homo sapiens
gattagctcagaaagttggttattggatcttggacttcccctctgtgttttggttctttgctcctcttgttggctctactttctggcagatcccgcatatggtagtgtctggcagctgtgggcttagatcctcccaacggcaagtctatcagagaaaaagagagatcccttttgcaataattcttgcaaatatccaggtctgagtgtttggtgtttcattgttgttgttgtttcttttgagacaaggtctcactctgttgctcaggctggagtgcagtggcatgatcacagctcactgcagtcttaatctcctgggctcaggtgatcctcctgcctccacctcctgagtagcacacctcaggtgtgcaccaccatacctggctaatttttttwtttttttttgtaaatacgagatcttactatgttgaccaggctagattcaaactcctgagctcaagcaatcctcccacctcagcctcccaaagtgctgggattacaggtgtgagccactgctccctacccaggtctgagtcatattgggacttgggtgatacatgctcatcccaaaagcacttactctggcacggggcaatagagccctctgattggcccagctgggt

SEQ ID NO: 358290 - DNA, 620 bp, Homo sapiens
gattagctcagaaagttggttattggatcttggacttcccctctgtgttttggttctttgctcctcttgttggctctactttctggcagatcccgcatatggtagtgtctggcagctgtgggcttagatcctcccaacggcaagtctatcagagaaaaagagagatcccttttgcaataattcttgcaaatatccaggtctgagtgtttggtgtttcattgttgttgttgtttcttttgagacaaggtctcactctgttgctcaggctggagtgcagtggcatgatcacagctcactgcagtcttaatctcctgggctcaggtgatcctcctgcctccacctcctgagtagcacacctcaggtgtgcaccaccatacctggctaatttttttawttttttttgtaaatacgagatcttactatgttgaccaggctagattcaaactcctgagctcaagcaatcctcccacctcagcctcccaaagtgctgggattacaggtgtgagccactgctccctacccaggtctgagtcatattgggacttgggtgatacatgctcatcccaaaagcacttactctggcacggggcaatagagccctctgattggcccagctgggt

SEQ ID NO: 358291 - DNA, 616 bp, Homo sapiens
tcaccaggtaaatccaagagatgagcagaaatgttggtatttggtttagactaaatttaacagaaggagccctagggtctagcctctctgctggctgaacacaacatygcaactgaacacaagatggaatgcccactcccaaaccctcttagcttcatttaccacctcaagcatccccatctgcaggccaactggtaagacattttaaaaaatatataagttaggccaggtgccgtggctcatgcctgcaatcccaacactacgggaggccaaggtgggcagatcacttgatctcagtagttcgagaccaacctgggcaacatggaaaaaccctgtctctgtaaaaaaatacaaaagaaaattagtcaaatgtggtggtgtatgcctgtagtcccagctactgaggaggctgaggtgggaggatcatttgagcccaggaagtggaggctgaggtgagccaagatcacaccactgcacttcagcctgggcaacagagtgagaccttgtctcaaataaataaataaaatgaaaaattaaaaaattaaaaataagttacattcactaaatatccatccagaagatatttgtgtggctgcttggtgcaaagcccaaagct

SEQ ID NO: 358292 - DNA, 616 bp, Homo sapiens
tcaccaggtaaatccaagagatgagcagaaatgttggtatttggtttagactaaatttaacagaaggagccctagggtctagcctctctgctggctgaacacaacatcgcaactgaacacaagatggaatgcccactcccaaaccctcttagcttcatttaccacctcaagcatccccatctgcaggccaactggtaagacattttaaaaaatatataagttaggccaggtgccgtggctcatgcctgcaatcccaacactacgggagkccaaggtgggcagatcacttgatctcagtagttcgagaccaacctgggcaacatggaaaaaccctgtctctgtaaaaaaatacaaaagaaaattagtcaaatgtggtggtgtatgcctgtagtcccagctactgaggaggctgaggtgggaggatcatttgagcccaggaagtggaggctgaggtgagccaagatcacaccactgcacttcagcctgggcaacagagtgagaccttgtctcaaataaataaataaaatgaaaaattaaaaaattaaaaataagttacattcactaaatatccatccagaagatatttgtgtggctgcttggtgcaaagcccaaagct

SEQ ID NO: 358293 - DNA, 577 bp, Homo sapiens
gacttacaattccacaggtttaataggaagcatgactagggggcctcaggaaacttacactcacggcagaagatataagggaatcaagcatctcttaccatggcacagcaggagagagagagggagagaagaaggggaagtgccatacattttcaaacaatcagatcttgtgagaactcattcactatcacaagaacagcaagggggaagcttgtttcccagaatgtcttgccagatttttgccaaggaaaactagtgtagactgctctgagctgagtgtcctcttggaaagggaatgtaatgagaaaaaggcaccaragacatgctacaaagctcctttttgtaatatggatatccaggagacacttagggttcccagcctgttgcttgaaacatatatggcagacagcatccatgaacttgtgagtgatttttcgtaagcaacatatgaccttagatgaccttgactttccctatgaggcatggccacctcaccactctggggagtgcccaacatgtaaatgagtggcatttacatatgcatagattggaatcgttctaaagcgtaagaattatt

SEQ ID NO: 358294 - DNA, 577 bp, Homo sapiens
gacttacaattccacaggtttaataggaagcatgactagggggcctcaggaaacttacactcacggcagaagatataagggaatcaagcatctcttaccatggcacagcaggagagagagagggagagaagaaggggaagtgccatacattttcaaacaatcagatcttgtgagaactcattcactatcacaagaacagcaagggggaagcttgtttcccagaatgtcttgccagatttttgccaaggaaaactagtgtagactgctctgagctgagtgtcctcttggaaagggaatgtaatgagaaaaaggcaccaaagacatgctacaaagctcctttttgtaatatggatatccaggagacacttagggttcccagcctgttgcttgaaacatatatggcagacagcatccatgaacttgtgagtgatttttcgtaagcaacatatgaccttagatgaccttgactttccctatgaggcatggccacctcaccactctggggagtgcccaacatgtaaatgagtggcatttacatatgcatagattggaatmgttctaaagcgtaagaattatt

SEQ ID NO: 358295 - DNA, 636 bp, Homo sapiens
caaggaagcccctgcagacatctgtgtctgaatatggcataaatgaaatatagcaacaaatattaggtggaaacattagatctaatttggtttccaaattgccgtattgcagtgaaaatctcaatacaggccatggtgggtatatcagagttctttagagaaacagaaccaataggtgatacatgaatgtagatatagatgtaaaaatagtttatttgttataaggaatttgttcacatgattatggaggctggcaagtccaaaatctgcagagctgatgctccagtccaagggctggaagcttctatagaacsaggaaggtctggtgtactttgaaggctgtcagaccagagaattttgtcttactcagcagagggtcagattttgttctattcaggccttcaattgattggatgaggcccacccatattatggacgggcaatctgcttgattcagtctacggatttaaatgttaatctcatccaaaaacagcctctcagaaacacccagaataatgtttgatcagatatctgggcatcacatgactcagtcagtacataaaattaactatcactgtggataaggtgttttacaaaacagaggttagaaaccacaaggattatcctacttatatg

SEQ ID NO: 358296 - DNA, 628 bp, Homo sapiens
aaatttcatctctacagctagcaggataatagatgagttaatggaactcagaccacatttaagagaatgtttattgggcaatcccaattacaccacaaaccaaacaacttctagcatttcctgtgtttgtactttcttcattttcacctttgcccaagtcatctggtttgtcatggacaccattgtgtgggcagtgatggaatagtgtcctgagagtgagaccagagaatcttcaacagacatgttggcgacacatctttgccagcggccacattwcccaggtctccaacctgcctctcttgatccttggcccactgtggtttttggttaaaggattaaagtaaggaactgccctggtacagcctggtgtattatctccaaactgatgaacatggaatctgtgctggcgttcagtcaatcctgtaatgcattctgacaccataaatggttcattttccttctgctcaaagtggatggtgccctgcaccgggctctggcccttcaacatgtacatgaccttcatcattatgactccaggggccacactctggtctgggctctgagaggtgtgagggacacaggagacactgcaggagatggcagcacatgctgactttcaaatgatgag

SEQ ID NO: 358297 - DNA, 537 bp, Homo sapiens
cagaccatggtaaagggcttgcatgttgtcccaacgcgattaattttttccttcagatccagctaccagaatttggtaccaacatctccattgcaggagaagtcagggcaaaaggtccaaacttgggagttatccacatttgaaacctagaacatcagagtttcaagsgttattagagattgtcttattcatcctaccaccacccactttaaaaatggagaagctgagttccaggaaggggaaggaccttatcaagattacaacagatctctgggatccttttccagatggtttcttccttttagtggaaggttttccatttgaatgatcaaataagggaactgactacgtaagcagaggagggttagcctaagtggagaaatgaatggcttacaacaacgatttctagacttcaggcattctcctcagcattcataaattttaccatgatcaatgacttgatatttttaactgactccattttttttgctttaatgcattattcaaaagaaaatgcttacatcacttccataaatg

SEQ ID NO: 358298 - DNA, 540 bp, Homo sapiens
acgtgggtcctgggacactgcaggtagaggagattagtcccgacgggccactcccaaccattccttrtactaccctaggtcttcaaaggtaatgcacatacacttacattattgaagatgaatgccaccctggttgtgctaagcacaaggaaacaggcatcaggcatttttttttaccaccccaataaacaacataaacccttctccctcaaaatccaaagggggcagctctgagaagcaggcatgctgagcacggagctgggtctcttcttctttcaaagggtgacaggggcgattcagaatcacgaaagtgatgaggatgctgtgaaagagaaccccactattgcctgccccgaagaatatctgcaagagacatgtacatttcttcaaggggcaaagaacttaagtttccacttctctatctgttttgattttaaatattctaggaggcatttctaacttgaaatccacgaatccgtctgattttcccaaccctgaagttcctgaagtggtactctctttcattagaagattttcggt

SEQ ID NO: 358299 - DNA, 540 bp, Homo sapiens
acgtgggtcctgggacactgcaggtagaggagattagtcccgacgggccactcccaaccattccttatactaccctaggtcttcaaaggtaatgcacatacacttacattattgaagatgaatgccaccctggttgtgctaagcacaaggaaacaggcatcaggcatttttttttaccaccccaataaacaacataaacccttctccctcaaaatccaaagggggcagctctgagaagcaggcatgctgagcacggagctgggtctcttcttctttcaaagggtgacagkggcgattcagaatcacgaaagtgatgaggatgctgtgaaagagaaccccactattgcctgccccgaagaatatctgcaagagacatgtacatttcttcaaggggcaaagaacttaagtttccacttctctatctgttttgattttaaatattctaggaggcatttctaacttgaaatccacgaatccgtctgattttcccaaccctgaagttcctgaagtggtactctctttcattagaagattttcggt

SEQ ID NO: 358300 - DNA, 631 bp, Homo sapiens
taaactcccttccacatatatcctattagttctgtcactctagagaaccatgactaacacaggattccaatgtatttatcatcaaatcactcctcaattaaaatccrtgagttatgacttggatccagaacactgctcccactgatcctcctaagcctgttccctgtcatccagaaacatgcagtaacatgtggtcactcaacaaaatggaccttctcagcatagcagtcccatcaataaggtaatggcatgaatcaatgggaaagacttggaagaactcttaattaaagaagcaactgttgataaaaatttcatttccaatgtattgccagaacaccagacatgctggtggagagggtgagcagttccccaaatcccaaccccttcatcaggaactgtgtttctccaactgcctcctgtttcttctcaaacagatacggagtctttcagtgatcaggtgagctcaaaacgccttactgcaactgcagcaccttccataaacttagaatcattttccccatttcttacctattaaagtgttagtcaaagactaaaattctcccttcttttttacactataatgttcttctgacctttctaatctatcaaaataaccagataataaattaga

SEQ ID NO: 358301 - DNA, 631 bp, Homo sapiens
taaactcccttccacatatatcctattagttctgtcactctagagaaccatgactaacacaggattccaatgtatttatcatcaaatcactcctcaattaaaatccgtgagttatgacttggatccagaacactgctcccactgatcctcctaagcctgttccctgtcatccagaaacatgcagtaacatgtggtcactcaacaaaatggaccttctcagcatagcagtcccatcaataaggtaatggcatgaatcaatgggaaagacttggaagaactcttaattaaagaagcaactgttgataaaaatttcatttccaatgtattgccagaacaccagacatgctggtggagagggtgagcagttccccaaatcccaaccccttcatcaggaactgtgtttctccaactgcctcctgtttcttctcaaacagatacggagtctttcagtgatcaggtgagctcaaaaygccttactgcaactgcagcaccttccataaacttagaatcattttccccatttcttacctattaaagtgttagtcaaagactaaaattctcccttcttttttacactataatgttcttctgacctttctaatctatcaaaataaccagataataaattaga

SEQ ID NO: 358302 - DNA, 631 bp, Homo sapiens
taaactcccttccacatatatcctattagttctgtcactctagagaaccatgactaacacaggattccaatgtatttatcatcaaatcactcctcaattaaaatccgtgagttatgacttggatccagaacactgctcccactgatcctcctaagcctgttccctgtcatccagaaacatgcagtaacatgtggtcactcaacaaaatggaccttctcagcatagcagtcccatcaataaggtaatggcatgaatcaatgggaaagacttggaagaactcttaattaaagaagcaactgttgataaaaatttcatttccaatgtattgccagaacaccagacatgctggtggagagggtgagcagttccccaaatcccaaccccttcatcaggaactgtgtttctccaactgcctcctgtttcttctcaaacagatacggagtctttcagtgatcaggtgagctcaaaacgccttactgcaactgcagcaccttccataaacttagaatcattttccccatttcttacctattaaagtgttagtcaaagactaaaattctcccttcttttttacactataaygttcttctgacctttctaatctatcaaaataaccagataataaattaga

SEQ ID NO: 358303 - DNA, 635 bp, Homo sapiens
ttggaaaatgctttgagcacaatttaatgagaagcatgaggcactctagaggatttcagaagaaaagtttatatttagaaatgcaaaatgtttcctttattttggagtgtagaagggactcagcaattacaatgggcgtttgaatgctgttgtcagccaactcctgtgtgttccatgaagaagacttggggctaatgagaacatttgttttcagaacagaatccactaaatggtttgaaagagccatttcccctgacagttgtgaaagtggaagctgattggtagaaattttcctctggcctcctacttatcacctagccagagcgtttaccgytatgtctgcctttactttcaacataaggagtttaggtttgttttctttttctgcatcagagacagaagctgtgagaggcaattgagcaacttcatgctcgacagcctgggctgccagggagctgcattggcacttctgcaaggaactggggcacacgcagctggacctcaacattaattcttcaataatccatgacacgcctatgaaactttaatggcgagttcgaaagtaatggcatggctgccatgtcccctgattgttcatagagcaagttgcctggaaatattgtggacgctccgtt

SEQ ID NO: 358304 - DNA, 635 bp, Homo sapiens
ttggaaaatgctttgagcacaatttaatgagaagcatgaggcactctagaggatttcagaagaaaagtttatatttagaaatgcaaaatgtttcctttattttggagtgtagaagggactcagcaattacaatgggcgtttgaatgctgttgtcagccaactcctgtgtgttccatgaagaagacttggggctaatgagaacatttgttttcagaacagaatccactaaatggtttgaaagagccatttcccctgacagttgtgaaagtggaagctgattggtagaaattttcctctggcctcctacttatcacctagccagagcgtttaccgttatgtctgcctttactttcaacataaggagtttaggtttgttttctttttctgcatcagagacagaagctgtgagaggcaattgagcaacttcatgctcsacagcctgggctgccagggagctgcattggcacttctgcaaggaactggggcacacgcagctggacctcaacattaattcttcaataatccatgacacgcctatgaaactttaatggcgagttcgaaagtaatggcatggctgccatgtcccctgattgttcatagagcaagttgcctggaaatattgtggacgctccgtt

SEQ ID NO: 358305 - DNA, 616 bp, Homo sapiens
tggggtgtttcctgctgaagctgccacaatgaatgcagataggcatgaggagagagcacaggcagcagaccttggcaggaatgggagctttgggcaggctctcgggcctgggcaggcaggggactgttgaggacccaaaggtgggcaccagaaggccgtggtccacagaagctgaacagcctcctagattttaccctccggccacctgaaatgacttgcccatcaaagacraggcgttggcatcaggtagaataaaggacacagagatttagggctgtagggctgcacgacttgaagagaagggcgtcctcaaaatgccctctatctggcttgggtggggttagggaacgtaggaccatccagactgggcctgggtgtcccagccctctctcagcctcatgctgagggagctcagcatagctttgcaggcgctgaacagcactggcagtggcactagaagtctgccaggactcttctgtgagcatcagaaccctggtcaaaagagagtgggagcccagagggaaaggtaataagcaggaatatttgggtactcagagagccctcaagcccccagccccagggaccccttctgcaggggaggcagcctcccccctgc

SEQ ID NO: 358306 - DNA, 616 bp, Homo sapiens
tggggtgtttcctgctgaagctgccacaatgaatgcagataggcatgaggagagagcacaggcagcagaccttggcaggaatgggagctttgggcaggctctcgggcctgggcaggcaggggactgttgaggacccaaaggtgggcaccagaaggccgtggtccacagaagctgaacagcctcctagattttaccctccggccacctgaaatgacttgcccatcaaagacaaggcsttggcatcaggtagaataaaggacacagagatttagggctgtagggctgcacgacttgaagagaagggcgtcctcaaaatgccctctatctggcttgggtggggttagggaacgtaggaccatccagactgggcctgggtgtcccagccctctctcagcctcatgctgagggagctcagcatagctttgcaggcgctgaacagcactggcagtggcactagaagtctgccaggactcttctgtgagcatcagaaccctggtcaaaagagagtgggagcccagagggaaaggtaataagcaggaatatttgggtactcagagagccctcaagcccccagccccagggaccccttctgcaggggaggcagcctcccccctgc

SEQ ID NO: 358307 - DNA, 616 bp, Homo sapiens
tggggtgtttcctgctgaagctgccacaatgaatgcagataggcatgaggagagagcacaggcagcagaccttggcaggaatgggagctttgggcaggctctcgggcctgggcaggcaggggactgttgaggacccaaaggtgggcaccagaaggccgtggtccacagaagctgaacagcctcctagattttaccctccggccacctgaaatgacttgcccatcaaagacaaggcgttggcatcaggtagaataaaggrcacagagatttagggctgtagggctgcacgacttgaagagaagggcgtcctcaaaatgccctctatctggcttgggtggggttagggaacgtaggaccatccagactgggcctgggtgtcccagccctctctcagcctcatgctgagggagctcagcatagctttgcaggcgctgaacagcactggcagtggcactagaagtctgccaggactcttctgtgagcatcagaaccctggtcaaaagagagtgggagcccagagggaaaggtaataagcaggaatatttgggtactcagagagccctcaagcccccagccccagggaccccttctgcaggggaggcagcctcccccctgc

SEQ ID NO: 358308 - DNA, 616 bp, Homo sapiens
tggggtgtttcctgctgaagctgccacaatgaatgcagataggcatgaggagagagcacaggcagcagaccttggcaggaatgggagctttgggcaggctctcgggcctgggcaggcaggggactgttgaggacccaaaggtgggcaccagaaggccgtggtccacagaagctgaacagcctcctagattttaccctccggccacctgaaatgacttgcccatcaaagacaaggcgttggcatcaggtagaataaaggacacagagatttagggctgtagggctgcacgacttgaagagaagggcgtcctcaaaatgccctctatctggcttgggtggggttagggaacgtaggaccatccagactgggcctgggtgtcccagccctctctcagcctcatgctgagggagctcagcatagctttgcaggcgctgaacagcactggcagtggcactagaagtctgccaggmctcttctgtgagcatcagaaccctggtcaaaagagagtgggagcccagagggaaaggtaataagcaggaatatttgggtactcagagagccctcaagcccccagccccagggaccccttctgcaggggaggcagcctcccccctgc

SEQ ID NO: 358309 - DNA, 522 bp, Homo sapiens
aatgtcagtagtagccaccagttgtgacaatgaaaaacgtctgccaaccgcaccaaatgtgccctggagcaaagccacctgggttgagattaggtgggtgccttctctcctctgctgatgtggcagctcttatctctgacccagggctcctccttcccagccctgacctttggcctggtcactagggcctcatgtaaccctgccttccttccactgtccccaaggggtggccaggccttcygggagccacagaagagctggtggggctgaagttctcaccaatgggagggttccagccagagtccactgggccagagactgcaccagtgatatgataattccaaagcattgagctttgtgggaaagaacagccaggaacatttggatcaatgatctgaacagagatacagaaccagcatgccttgaagtaggatggcttgttccctgacaaggtgctgggggacagagcccagccttcccccaaccccccagccagtagttgcttgcactgccctcaggggc

SEQ ID NO: 358310 - DNA, 592 bp, Homo sapiens
aggtcccctgagtcctacctatgtcacccaccaaaccttcatcctcatccctctacttatagcttttacaacatagtctacctttttctttcaaaaaacgtatagatctctgaagcatctgtaataagcctatgtcactcaaaatgccattacttccatctaactcccccaatttattgaagatgtctttatttggtaaactatctaaatctttcgttctagttccatcattagttatggcaaattcaggatccacaggcataacccatctcttatttgtctactatgtcagaaattttgatctgtgaaatgtcactctcctcattgcaataaatgttttataccattgcactatttctaggtcttgttgattctgccttgtgtattttgtctactcaaagacttatttctgaaaatatcgatcatccatatttatatgtctacatatgcttcattcattttcactattttatggaattttatcatacaaatatatgtacaatgttgtatgtgtcccttgtcccttaycctgatagtgtacctatgtattgtgaaaaagaaatcacttccaaattctttagttgggactatt

SEQ ID NO: 358311 - DNA, 571 bp, Homo sapiens
tatagactattatttctctctttttattaccaaaatcctttgcaaacgattaatatttggtgaccagtgatattttgagtttcttcactgtaattttgattttcatttatgcttcactaatttctatttcatctttccatcctcatcaccatatatgttacaactgaattaatgaaaccttgtaaactcttttttcagtaaatgttttaattctaaacagaaattgtaatgtataacacttaggtcattagaaattcccttggcatatagtattataataacaaaggcattgaaatagggttattctctttttaaactttatttgaatgatatttcacgagaataaatctagaatatgtgacatataccacccaaatggaaagtcacatcataacattttattttaaaatacttcattcttaaaatgtttttctctaataatatgtaatttaatttatagatcatttatagaaaaatttatagaatattaktgtctaataataatagaagctcttgtttagaccactaatgattactttctgtagttcgaccttcctatgctagatattta

SEQ ID NO: 358312 - DNA, 570 bp, Homo sapiens
attcatgagagaggagccctcatgatgtaagtaatcacttcttgaagaccacacttcttaatatttacattggcagcatataaaatttagagggaatgtattcaaaccatagcaatgtcccacactcaaatcatcctamaatttcaaggcctatcctctgagttcaatatctggtccatttgtggtagactacccaccagcaccatataggggaaagtgacactagacttctttgggactattaaaactgaagttaccttctcattttctcataggagggaggagaaaaattcccaccctatcctcacagctgcctaagtgaataaccactcaatcaaaaatggaatctggagtaaagaagttgtgaaacaaggcaaacagaaacgctttgcaccaatcccatgacccaaaagtgagggattttcttccttctcttcttctgcaatgttccttcatgaataatgtttagttcagtatttttcatccttatagaaaactagtgttcacaggtaattttactggaattatggcaggttagggtgcaaaatatacacatattatagaggtaca

SEQ ID NO: 358313 - DNA, 570 bp, Homo sapiens
attcatgagagaggagccctcatgatgtaagtaatcacttcttgaagaccacacttcttaatatttacattggcagcatataaaatttagagggaatgtattcaaaccatagcaatgtcccacactcaaatcatcctacaatttcaaggcctatcctctgagttcaatatctggtccatttgtggtagactacccaccagcaccatataggggaaagtgacactagacttctttgggactattaaaactgaagttaccttctcattttctcataggagggaggagaaaaattcccaccctatcctcacagctgcctaagtgaataaccactcaatcaaaaatggaatctggagtaaagaagttgtgaaacaaggcaaacagaaacgctttgcaccaatcccatgacccaaaagtgagggattttcttccttctcttcttctgcaatgttccttcatgaataatrtttagttcagtatttttcatccttatagaaaactagtgttcacaggtaattttactggaattatggcaggttagggtgcaaaatatacacatattatagaggtaca

SEQ ID NO: 358314 - DNA, 609 bp, Homo sapiens
ccttgtaaatggattatggaagtttaaacataacaaatcagctgtaatcatgtagttaatgaacttccacaatttaactgtgaacttttcaaatgttgggttatatttatattcaatgtcaagtacatacaagcccagggtacaaaagaaaccatttaaagaccttcataatttttggaggctcctaagatttccgctgaatttataaaattttctgtgaacgagtctagtaatcaaacttgtcttaatctatttcatttaaatttttattaagaacctgacttcctactacagaataagctttttaaaggcagagatttgtgctttgatattcatttctctttctactgttaggagttacacatagggtagtcaataaatgtccagtaaatcaaactatgtagtgcctcgaaccaaactactatttttcaatatgattactacagagaacatatggagcatgaactctgccctaaaaattctcatcagctctctcatcattacctgttaaarcattttatcatagtctgaatcctttatgttagaggttggctgaggcctggaataaagaatgaaaatgtgacaaatggccacttattggtcattaac

SEQ ID NO: 358315 - DNA, 564 bp, Homo sapiens
tgctaactaagcattttgtcaggcccygtgtaggccgtgcacatcaacacagtgcccagcaatcagtgtcctgctctactgcagccctccaggctagagcaaattcctgtagttctgctagcatggcatcctttttactgacaccaaaaaacaaggcagaattgaaagacaggtctatttctagcactgtttatttgaatatttgaatcctgtctgaaattggctatttgcaactaaaagtcctactaaaaatgttatatttaattgcttagcaatcactcagaaacatacatactttttaaaaaaagaccctactccctccttaatggaagaattatagacttggctttcttctagcagaaaaaattcagtgtaaagatttgtttagattaaaagaatacctgatttcctaaaacttccccgtactttgggagagtcaccaacattactgcgtaattactctatagtttccttcatacagtttcattcaggcacctaggacatgctgggctccatgccaggcagtggacacaaggatgaacaagatatcatctctgccttcaa

SEQ ID NO: 358316 - DNA, 564 bp, Homo sapiens
tgctaactaagcattttgtcaggccctgtgtaggccgtgcacatcaacacagtgcccagcaatcagtgtcctgctctactgcagccctccaggctagagcaaattcctgtagttctgctagcatggcatcctttttactgacaccaaaaaacaaggcagaattgaaagacaggtctatttctagcactgtttatttgaatatttgaatcctgtctgaaattggctatttgcaactaaaagtcctactaaaaatgttatatttaattgcttagcaatcactcagaaacatacatactttttaaaaaaagaccctactccctccttaatggaagaattatagacttggctttcttctagcagaaaaaattcagtgtaaagatttgtttagattaaaagaatacctgatttcctaaaacttccccgtactttgggagagtcaccaacattactgcgtaattactctatagtttccttcatacagtttcattcaggcacctaggacatgctgggctccatgccaggcagtggacacaargatgaacaagatatcatctctgccttcaa

SEQ ID NO: 358317 - DNA, 595 bp, Homo sapiens
tttttaaattgaggtataatttacataccataacattcatccattctaagtatayatataattcaatggttttggtaaatttatatagctatgcaacatcaccacaatctagttttagaatattttcattaccccccaaattcccttgagcccatttgcatttaatccctgcttccaccaagaaacccaggcaaccactcatctgctatctgtctctacacaaatttgccttttctagacatttcatataaatggaattatacaatatgtagtattttatatgtggcttttatcactcagcataatgttttcgaggttcatctgtgttacagcatgcattttgttcctttttattaatgaatagtattcagttgtatgtatataccacatttggtttacccactcaccagttaatggacatttagattgcttccagttttgtgctattatgattaatcctatgaacattcatatacaagtatttttgtagatatgttttcatttctaatgggtagatacctacaagtgggattgctaggtcatatggtaagttgatgcttaactttttaagaaattgccaaactgttttccaaag

SEQ ID NO: 358318 - DNA, 562 bp, Homo sapiens
tcttactctgtcacctagggtggagtccagtggtaggatcatagttcattgtaaccttgaactcttgggctcaggcaatcctctcacctcagcctcccaagtagctgtgactacaggcctgtgctaccattcctggctaattttttytttttttttttttggtagggacagagtctcactatgtttcctaggctggtctcaaactcctggactcaagcaatcctcctgcctcggcctcccaaagtgctgggattacacatataaaccaccatgcccagccaccacagaacttttaataaaagagggaaatcagtactacaggaaaataacacagctgtaactgcaagcatgactgacatttaggtttgggcaacacagccatcaggatcccagcaggaaacagatagcacccccaaactgggtaatttaaggagagtttaagaaagggactatttacaaggtgtgaagggtgtgggcacagtcaaaagatagtgcaacctcctgaagctgctatcatctacagacttggaaagacaaagagggccccatgatatgagccatg

SEQ ID NO: 358319 - DNA, 636 bp, Homo sapiens
agagatggtattttttttaagccagtcaaatttaacagtgggggctaaatagcagagatggtactaatacaaatcaatcagggagaaaacttattttctactgtatatacttccatgtttgaatattttataataaaacaaaagaccaaaatcatcacatttgaagttttattctgtgggtagcagggagacacacaatccaatctgtactctaactgagggggctgtgaaaagagctgtgtaaagaaaaaagcagtgtgaagacagaatagacggcaaggccagaggcaagaaataccagtgtatatgagagatgttaagggcctgaaacaaagaaataacggggggaacaggaaaaagaggtagattctaaaggtgtttgagatgctctatcacaataaaaacattttttgtttcttgaaattatgcctataacttacctgaaatcatccatactatccttttccttgtaattaatcataaatttatctgaaaaagtcctacctakattaagaagattgaaactagagcaaaggaaaagtctattttcttactctgttaaaacacaaagcaggccaggcatggtggctcacccctgtaaccccagcacgttgggaggccgaggcgggcggatca

SEQ ID NO: 358320 - DNA, 569 bp, Homo sapiens
ggcggtgggaatggcatcagcaaaggtcctggggcaggagagtgcctggacctgggtttctcaacctcagcayggttgatattttgggctgaaactcctttgttgggggctgtcgtgtgcattgtgggatgtttagctgaccccagtctctacccactagatgccagcagcaccccctactggttgtgacatccaaaaatatctctagatcttgccaaatgactcctgggggatgcagtcaccccctggtgagaaccactggccttttgtgttcaagaaacagcaaggaggtcagcaaggccagggccgagcagctgaggcacagagcggaaggaggcgggagatgtcattcctgatcgtcaggactttagctttgaccctgagtgaaatgggagtgctggcgggtttagctgggaagtgtcacgatctgacttgggttttaacagatccctctggtcactgggtggaggatgggctgtgggacgtggacaggagtggggcgggaccaagagtagcgggagggagggaggaaagagcctatttatcgcaagagccaaggcaggaggcca

SEQ ID NO: 358321 - DNA, 482 bp, Homo sapiens
ggatgagtcaatgaataaatgtattcatgaatgatcaataaaaaataaggcataaagtcctctgcagaaaacatgatggtgtttgttcaatttccagctgcatctaggttgatggcagctttgtctagctcttactcttgtctatgaattttatttttatcttctttttatatcattggtcttgatgtttgtattttgtttcccagtttttttactgtgttctcactcgagggcttatgtgcatatttgctttgccaaattatcctgctcagttttgctaggatgttttcctcaaattttatcctcagaaactaccctctgtgtgttgcctactgagtgattcttcatcsaagacttcctattcttctggatattgggaacctataggtgccatgtattcagttacttttctttacaccccacccatttatcagtataaaattcttagccagttgtattagttcattttcacactgctaata

SEQ ID NO: 358322 - DNA, 573 bp, Homo sapiens
gttactctcgtcatcaataaaagaagaagaagtaaagaaggtaaaggtaaagaggatgtaaaagttatcatttcaggaccttttccaaaagttttcacataacgccactgtttacatctgactttccattatgtggacacatgaacacatctagttgtaaaaaaatcctattatttgtcattgtcaccattacatgtgcccatgtacctaggaagaaatcaatgtccaaatgtagggggattggcactgggataggcaaacagcagcctttacccatagtctgctcctttggttaccaatatatccatggatatccattttcctgtatatagaacacatttgtctgctccccaaggagaagagttagtatgccatccattactcacatctatttgcagccaagtgttcacaatcactgagtaacacgcagttctttctactagatgcagataagagattgcagtatcctgaaactagatgcagataagaggttgcagtatcctgaaacctgcaaactgagacactagttactkgcaccatacacatgtaataaaatgatgatataagaataca

SEQ ID NO: 358323 - DNA, 629 bp, Homo sapiens
gatgcagataagagattgcagtatcctgaaactagatgcagataagaggttgcagtatcctgaaacctgcaaactgagacactagttacttgcaccatacacatgtaataaaatgatgatataagaatacatatttcattgagaaaacctgggaaacacattagctgatagccagttggaattagcaaataatgttcagcataaaaaatagasactctacttcagtagtagggcaagttttctgtttagactacactctaagcttttgattcttctctttgggaggatatcctttctccattgtactttgtgacctcttcatcatgtgttatacatttgcctttgggtgcacattcttgagggacatagagatttcatagcccatttcatgctgatgaaatctggacatgctataacatggatgtaccgtcatggggattccttaaggcttttaatgttgggtccaataattgggtccaattcagatttatttttcaataaaatttcttgaaaaatgtaataaatttctatttgcttctagtcaattatatacgcaaataatcacaatcaaagtctttgtctaaacagatttttttttaagtgtgaaatcttcctaaatacttatttta

SEQ ID NO: 358324 - DNA, 199 bp, Homo sapiens
tactcatgtgttctgaatttatcctgaaaccccaatcaccaccgtgacctttcrcttagtggggtgacatatggactcagctaattcacggagtcttgattcaggtccatctcagcacagttcactgaggccaggaactaacacagtggttatttttctgactgaaaataaaatcaaaacgggtatgtttagcagttaa

SEQ ID NO: 358325 - DNA, 541 bp, Homo sapiens
atgctcattgctgtagctgctatctctcaaaaaggcaaaatctgtatactcaggccagttgttcctctggttttaaacttttatttctattggtattgtctcastattggctctggaaggaacctgatgctaagttcggcatccagggaaaggcatggtagatcatgcttgagtcaggcatgatctgccacaggtggggcattgacctatcctctgtggtcacggaaatgagaaatgacagttaatcaggtgaagaccatgtgcaatggcaaaagggccatttcttaaatagaaaatagagttattcaaattagagaagagattgggaaggctgcaaacaaatgataactgcggtctaccagaattatagtctaacagaaattacagaggagttcatggtgtctcaaattcctgacagatactaattttaaggattcatggaggagatatcagaattcccaaattatcagagaatcacaaaatcataaattattcttaaatattttcagtgttctttatattctactcgttaacatggata

SEQ ID NO: 358326 - DNA, 541 bp, Homo sapiens
atgctcattgctgtagctgctatctctcaaaaaggcaaaatctgtatactcaggccagttgttcctctggttttaaacttttatttctattggtattgtctcagtattggctctggaaggaacctgatgctaagttcggcatccagggaaaggcatggtagatcatgcttgagtcaggcatgatctgccacaggtggggcattgacctatcctctgtggtcacrgaaatgagaaatgacagttaatcaggtgaagaccatgtgcaatggcaaaagggccatttcttaaatagaaaatagagttattcaaattagagaagagattgggaaggctgcaaacaaatgataactgcggtctaccagaattatagtctaacagaaattacagaggagttcatggtgtctcaaattcctgacagatactaattttaaggattcatggaggagatatcagaattcccaaattatcagagaatcacaaaatcataaattattcttaaatattttcagtgttctttatattctactcgttaacatggata

SEQ ID NO: 358327 - DNA, 557 bp, Homo sapiens
tttcagtgttctttatattctactcrttaacatggatatcaagaatgcttaataaattatatttaatagtatctacaaaaaattatagtctacaggtaatacccaaattcttgaaagttccaggaaacactcaagatagtgtttgattattgcaacattggcatctcttagcagcattagcctcctacacatactcatatgcagaattgcctaattaaggtcatattttgcttccaaaacttatttcttggaacaccactcataggtttttataaaaaatgctacctgcacaaatctattactattggttttattcacacacaaaaaaaattgactcgcttttagcagcaaagcgggcctggatcccactcttgtaatagtgcaaaggctgcaagcaaaactgactagattctgactgcgtctctgttaggtgatcctttccagcttcccagaaagggtgagcttagcctgttagtcctgcctgttagacttcctgtttttgctttttatttgatgtcagtgaatttcttggtccatcaacctctctatattgatag

SEQ ID NO: 358328 - DNA, 557 bp, Homo sapiens
tttcagtgttctttatattctactcgttaayatggatatcaagaatgcttaataaattatatttaatagtatctacaaaaaattatagtctacaggtaatacccaaattcttgaaagttccaggaaacactcaagatagtgtttgattattgcaacattggcatctcttagcagcattagcctcctacacatactcatatgcagaattgcctaattaaggtcatattttgcttccaaaacttatttcttggaacaccactcataggtttttataaaaaatgctacctgcacaaatctattactattggttttattcacacacaaaaaaaattgactcgcttttagcagcaaagcgggcctggatcccactcttgtaatagtgcaaaggctgcaagcaaaactgactagattctgactgcgtctctgttaggtgatcctttccagcttcccagaaagggtgagcttagcctgttagtcctgcctgttagacttcctgtttttgctttttatttgatgtcagtgaatttcttggtccatcaacctctctatattgatag

SEQ ID NO: 358329 - DNA, 557 bp, Homo sapiens
tttcagtgttctttatattctactcgttaacatggatatcaagaatgcttaataaattatatttaatagtatctacaaaaaattatagtctacaggtaatacccaaattcttgaaagttccaggaaacactcaagatagtgtttgattattgcaacattggcatctcttagcagcattagcctcctacacatactcrtatgcagaattgcctaattaaggtcatattttgcttccaaaacttatttcttggaacaccactcataggtttttataaaaaatgctacctgcacaaatctattactattggttttattcacacacaaaaaaaattgactcgcttttagcagcaaagcgggcctggatcccactcttgtaatagtgcaaaggctgcaagcaaaactgactagattctgactgcgtctctgttaggtgatcctttccagcttcccagaaagggtgagcttagcctgttagtcctgcctgttagacttcctgtttttgctttttatttgatgtcagtgaatttcttggtccatcaacctctctatattgatag

SEQ ID NO: 358330 - DNA, 557 bp, Homo sapiens
tttcagtgttctttatattctactcgttaacatggatatcaagaatgcttaataaattatatttaatagtatctacaaaaaattatagtctacaggtaatacccaaattcttgaaagttccaggaaacactcaagatagtgtttgattattgcaacattggcatctcttagcagcattagcctcctacacatactcatatgcagaattgcctaattaaggtcatattttgcttccaaaacttatttcttggaacaccactcataggtttttataaaraatgctacctgcacaaatctattactattggttttattcacacacaaaaaaaattgactcgcttttagcagcaaagcgggcctggatcccactcttgtaatagtgcaaaggctgcaagcaaaactgactagattctgactgcgtctctgttaggtgatcctttccagcttcccagaaagggtgagcttagcctgttagtcctgcctgttagacttcctgtttttgctttttatttgatgtcagtgaatttcttggtccatcaacctctctatattgatag

SEQ ID NO: 358331 - DNA, 605 bp, Homo sapiens
agcaacattctagtgagtctgctgtcagtagaactcatggtaactctgataattttaatgatcataaaagtgaggtaggaaacaaatatgaccattgtgtttagaaacyatgatccttcaaaacttgtatttcttcctaaataaatactaatagggactaaaaaattaaaattggtagtgaagtctttaccaatttatgtgatcagtggtattctcttaatattaacataaatctttattgattcattagacatttttagttttaaataaaatgatcagaaatgtcagcaagggctatgggaaaaaagggctgggtaagaaaatttgaagtctcacctaactggaatgtagcaattgcagatagattcggttgggatttatttcatatgaaatataaccatatataaaggccactctggtcacttacataaaatactcagcagaagccctaccactttataataattcagtaagtgttaacatcttataactaaggtatcattcaattctaaaatattctaaggaacttttgaaatggatgtagtgcgtatatttccaggttaaaaatgaagcatttttaaaaaaattacttttatttattttaa

SEQ ID NO: 358332 - DNA, 608 bp, Homo sapiens
cctattttgcacttagaaatttgtagtgagatggatgcatgtttattggagatttgaattttttaatttttaaactaacagagcatgcatggctttttcctatttttctactgagtgttagtacattttaattgttttctgaaccactttattgacgtgtgattaacatgcaaaacactgtacatattcacagtgtacatcataatgagtttggagataaacacacacccattaaatcaaaaccttatttatgccataagcatgatatttacttattcctttatgtgtacattttagaastatgtatcttcaaaataatttgacaaattatttaatttgtgggcattgagacattcatattataccattaagattacctaggaaatattcttctcaacatcagccttggcaaagttttggctgagtccccaaaaccaaatgcaacaaaaacaaaaatagacaagtgggacttaattaagtaaagagcttttgcacggcagaagaaattgtcaacagagcaaacagacaacctacagaatgaaataagttattcacaaattttgcatctgacaaaagcctaatatccagaatctatagagaacttaaat

SEQ ID NO: 358333 - DNA, 608 bp, Homo sapiens
cctattttgcacttagaaatttgtagtgagatggatgcatgtttattggagatttgaattttttaatttttaaactaacagagcatgcatggctttttcctatttttctactgagtgttagtacattttaattgttttctgaaccactttattgacgtgtgattaacatgcaaaacactgtacatattcacagtgtacatcataatgagtttggagataaacacacacccattaaatcaaaaccttatttatgccataagcatgatatttacttattcctttatgtgtacattttagaagtatgtatcttcaaaataatttgacaaattatttaatttgtgggcattgagacattcatattataccattaagattacctaggaaatattcttctcaacatcagccttggcaaagttttggctgagtccccaaaaccaaatgcaacaaaaacaaaaatagacaagtgggacttaattaagtaaagagcttttgcacggcagaagaaattgtcaacagagcaaacagacaacctacagaatgaaataagwtattcacaaattttgcatctgacaaaagcctaatatccagaatctatagagaacttaaat

SEQ ID NO: 358334 - DNA, 290 bp, Homo sapiens
tatcacctgtgtttatttctaacctaccttattcaaaaacagaatatattcacttttaacaaaaatagaaggctgtcacttgtagaatgtgtactgttctgactgatgagaactgtctctcaccagaggacacttgcaacttacttgaaagagtaaaacatttttgataatcttctatcacagtttatgtcataattgaagactcaacttgtaacatagtcatccgtggccattgtgttcattctctgcaatatattytcgttattttgctcttttttatttttggtgtt

SEQ ID NO: 358335 - DNA, 290 bp, Homo sapiens
tatcacctgtgtttatttctaacctaccttattcaaaaacagaatatattcacttttaacaaaaatagaaggctgtcacttgtagaatgtgtactgttctgactgatgagaactgtctctcaccagaggacacttgcaacttacttgaaagagtaaaacatttttgataatcttctatcacagtttatgtcataattgaagactcaacttgtaacatagtcatccgtggccattgtgttcattctctgcaatatattttcrttattttgctcttttttatttttggtgtt

SEQ ID NO: 358336 - DNA, 623 bp, Homo sapiens
aagttcactaactcttctgcaatttctaatctgccattaattctgtctattgtatttttatcacagatttagtttccatccttagaaagttaacttctaawatatttgttatgtctcaactttttgaacatatagaatatagttctaataattgtcttgatttatttgtctgctaattctaacaaccttgtcccctatggatctgttttaattgattgcttcttcacatgcctattatttgtattgaatatcatatattgtgaattttattttttagggtggtagatttttgtatccttataaatatttttaggtttgttctgggatgaagttgtgtttctggaaatagttgaatgctttctgctctagcttttagatttgttaggtgggactggagcagtgctcagattagggctaattcttcccctccaccaaagaattacccttctgatactcaattttccctgaactaggaagctttccagtattcctaatgggaacaagctttattcccatcctggtaacagcatcagggactgttactctaatcccattgggtatttctttcttgagctcaggtagtttactcacacagatgtgtaatcaggccttggttgaatacc

SEQ ID NO: 358337 - DNA, 593 bp, Homo sapiens
gggagctgaacaatgagaacatacggacacagggaggggaacattacacaccagggcctgttgggatgggtgagggccaaggggagggagagccttaggacaaatacctaatgcatgtggggcttaaaaagtagatgatgggctgacaggcgcaacaaaccaccatgatacgtgtatacctatctaacaaacctgcatgttctgcacatgtattccagaacttaaagtaaaataatttttaaaaagaatatattggtggagttcgggaaatttaagcctttcagttttagagaagttaagaagaatattctargaatgtggtgtatgtttaagagtcctcaatttctactttataattatactttgaggggttgagttaattggatttgcttttcttggtggagatgaaagaggcaaactgactggtttctggttttgatgtggtttgcagaaaaagaacaaaagccccttactgcagtaggggctgtagtttacttaatctccagccaatcagtatcaaagccccaagatgctattaactacaagttactgctttcagggtctaaggacctcctcaaggccctgcatgtgta

SEQ ID NO: 358338 - DNA, 464 bp, Homo sapiens
cctgagaatgggtttttgaattataataccatttaacatttgaatttaaattgtagaatttctaataaatgggttgaaattccatatgtgcaagcctttatgaaattacatcaggatcccaaactttgggactcctgctgagtttgtgtggcatctcttaaacatcaattgacagaggagtccacttctgcctgagatcttgacactctagatcactgggtacttttcctctcctaggccccccttcctcccactctgagcctgctccatatsaggctaggtcagggaagcattctttttccatttcccaacaacctctggtgatatccccaatggggctccaatcaggttccaagttaatgctttccttcactgtcccatcagaccagagctgctttccccactgggatatgatggaaaggactggagggacagctcagctacatgtacccttttcaatgtca

SEQ ID NO: 358339 - DNA, 513 bp, Homo sapiens
  misc_feature (1)...(513): n = A,T,C or G
aatggtgttaggcaaaactgttttcttctaagattgaaaataagaagaagaaagaaggatgtcatctcccatcactcttatgcaatgtcatgtagaaatactgtctagggcaataaagcatggaaaaaagtatacagattagacaggaaaaaataaaattatacaggtatagctattgtatatatagaaaactctaaagaagctactaactagttagtattcttatttttttccacgcaggatactgattagcagttctgtagctcctgtgtgtgttcactgggttaaacaaataagtaagtgtagagaatgagattcaggtttctcactacagaagaaagaaataacacatcaagaatgtaaaaggcgagaataactctgtggtgttgaattakaattaaagttagtatgaattcaagatttttaaactatataaacagataaatagatatagactaaactttgtgtgtatgtgtattacatacatatatgttagaggggattccnctagag

SEQ ID NO: 358340 - DNA, 513 bp, Homo sapiens
  misc_feature (1)...(513): n = A,T,C or G
aatggtgttaggcaaaactgttttcttctaagattgaaaataagaagaagaaagaaggatgtcatctcccatcactcttatgcaatgtcatgtagaaatactgtctagggcaataaagcatggaaaaaagtatacagattagacaggaaaaaataaaattatacaggtatagctattgtatatatagaaaactctaaagaagctactaactagttagtattcttatttttttccacgcaggatactgattagcagttctgtagctcctgtgtgtgttcactgggttaaacaaataagtaagtgtagagaatgagattcaggtttctcactacagaagaaagaaataacacatcaagaatgtaaaaggcgagaataactctgtggtgttgaattagaattaaagttagtatgaattcaagatttttaaactatataaacagataaatagatatagactaaactttgtgtgtatgtgtattacatayatatatgttagaggggattccnctagag

SEQ ID NO: 358341 - DNA, 585 bp, Homo sapiens
tctatttttgagtccttgtggatgaactgcaacctaacttaatagatagacaagattgaaaacctaatttaggagtatgtgcctgtaacaatcgctgagtcttacccaatcccagcaaccttacttcaaccagtcatacactgctgagggttcacagcgttcaaataagtcaaatgtggagctataacaaatccaactgtttctttacctcacttccagtttcagtacatcaatttactttttttttttttttttttttttkggcctataaatttgttctgaccatgaggcaaccctggaatccttctgaatctgctgtgattctgggggctgcgtgattcacaaattattcattgctcaataaaactcttttaaatttaatttggctgtttttcttttaaaaataataacaatggattaaagctggaaagctgcaagacacagactctttctgaggagcaatacaaacagaagtcccaaagactagacaggagacaaaaatgaagacactagaggaatttcttctgattcctagagctataacaatttataaaaacagccaaaatcctagccagattgacttaa

SEQ ID NO: 358342 - DNA, 585 bp, Homo sapiens
tctatttttgagtccttgtggatgaactgcaacctaacttaatagatagacaagattgaaaacctaatttaggagtatgtgcctgtaacaatcgctgagtcttacccaatcccagcaaccttacttcaaccagtcatacactgctgagggttcacagcgttcaaataagtcaaatgtggagctataacaaatccaactgtttctttacctcacttccagtttcagtacatcaatttactttttttttttttttttttttttgggyctataaatttgttctgaccatgaggcaaccctggaatccttctgaatctgctgtgattctgggggctgcgtgattcacaaattattcattgctcaataaaactcttttaaatttaatttggctgtttttcttttaaaaataataacaatggattaaagctggaaagctgcaagacacagactctttctgaggagcaatacaaacagaagtcccaaagactagacaggagacaaaaatgaagacactagaggaatttcttctgattcctagagctataacaatttataaaaacagccaaaatcctagccagattgacttaa

SEQ ID NO: 358343 - DNA, 524 bp, Homo sapiens
actgcatttgttgtcaggccgcatatcctctgggctgccccagcccatgactgagcatgtagtgatgctaaggcagatctttctccggtagtcatggtacttctctcaaggtcaaactttgttcaaatattccctggagctctgtagtccaggatgctcccattcaccttcttttcttttctatttccctcaggatcccagttcatcacagtctgacgtctgttcagtcttctgccatttccttctcattttctctcatagatattttttcaaataaaatccttgcatgtttaatcttatttcaatgtgctcagaaaatcatacccaggctaaaataaatagctaatatttcaacgttatttcagtgtgatctccatagtagctctctaaaaaagtcaaaataagcattattgtcatttgatgaaggaaaataagagatgattcwatggcattctggattacatgtgaccaacatgacaggtcattggtgaaaagcaaatctcaaccaaaaataacattttctt

SEQ ID NO: 358344 - DNA, 529 bp, Homo sapiens
tttttcaaaaaacttaaaatataactaccacacgatctagcaataccattactacgtatttatccacaggaaaggcaaccagtatatcaaagaaatacatgcactcccatatttttgcagtgctattaatagccaagatatggaatcaacctgagtatccaccagcagattaacagataaagaaaatttggtgtatayatacccaatggaatactgttcagccatagaaaataatgaaatcctgtcatttctagtaacatggatgaaagtggaggtcattatgttaagcaaaataagctaggcacaaaaacacaaatataacatgttctcattcatatgtggggctaaaaatattaatttcatgaggtagagagtacagcaatagttatcataggttggaaagtgtggagtgggggaatgaagagagtttgggtaatgggcacaaacaaacagttagatgacaaaataaattctagtgtttgatagcacagtgtgactactatagttagcaaaaatatattgtaaactt

SEQ ID NO: 358345 - DNA, 684 bp, Homo sapiens
tggtgagaatataaatcagttaaggccctgtggaaagcagtttggagcttctcaaagaacgtagcacagaactaacatttgacccagcaatttcatcactgggtatatactcacaggaaaataaatcattctaccaaaaagatacatgcactcaggtgtttatcccaacactgttcacgataacaaaggcaagaatccaatccagatacccattaatggtggactggataaagaaaatatggaacatatacatcacagaggactatgcagctgtaaaaaagagtgaaatcctgtcttttgcagcaacatggatgcaatgggaggccataatcctcagtgaattaaggcgggaacagaaaaccaaatatcaaatgttctcatttataagtgtgagctaatcactgggtactcatgaatataaagatggtaacagtagacactggggactactagagaggggatcaagggctgaaaaactatctgttaggagctatgctcacttgctagctcttgggttcaagtgtaccccaaacctcagcatcacacaatatacccatgtaagtaamctgcacgtgcactccctacatctaaaataaaagttaaaattattttaaaagtatttccctcttcactacttaaaaataaaaagcacagtttcacttatctagaatgtgttaaatgtgg

SEQ ID NO: 358346 - DNA, 415 bp, Homo sapiens
actgtaaaactatgccagaaagtcagaagaagagattcagttataatcataggtttaaaccaataagtagaaaattagaattttttgttatctttgagagatactcaggaaacctaacataaaaaaagcctgccatagtctcataatatttaaaatagagggtggagccatacttacccttaaaataaaaagagtgaattttgagggatagcgtttgacagaaattggcaatagaatatgatatttggcacaaaatacartaataacctggaacaaaaaaaggaaattttaatatgtaaaatattggagtaggtaaagaggaaacctaaggaaaaggcaggttgggggtgatgtataagacaaaggcaaaactgaagtattattcagtcccaaagtggagggattattattaaag

SEQ ID NO: 358347 - DNA, 582 bp, Homo sapiens
atgtatacatatgtaacaaacctgtgcattgtgaacatgtacccaagaacttaaagtataataaaaaaattwaaaaaaaatgtttcattaatggagccagtctgatatcttgagtttattcacagctaactgttctacctggttagtgtgaacagagaacaagtttctgtacattttgactcctggctctgtgaacatgtttttttgaacatgcatccttaattttctttgttgtcttattgttgctactcactgactgttcaatgtacctttaaagaagtcactgttcagagaatgtaactttcactttagatgaaaagctacttactcattctcttccttccccttcctccccatcccctcagctcctgaatttgagtaaaattatgcccaatgtaatttattgtggtgttttccccttcttctaaacaatatctgtgttggagaattgaacacctgtaaaacgtttgttattctcacttgtcctaatcaggaattcaataaaaaggcattctgaaatcttggaaatactgaggtttttctgaacttaaactgatctcttaaaccagttagttgagcaag

SEQ ID NO: 358348 - DNA, 580 bp, Homo sapiens
ggaaggggaacatcacactctgggaactgttgtggtgtggctggaggrgggagggatagcattatgagatatacctaatgctaaatgacgagttcatgggtgcagcacaccagcatggcacatgtatacatatataactaacctgcacattgtgcacatgtgccttaaaacttaaagtataataataataataaaaaaagaatggggtcatttttgaactgcttaatattaattaaaccttaaaataaactaaaattatctgtaacaaaaatgttgctcattgaaaaaaaaattaaaaataaaaataaaatgatggagattgacacctattcacattggatatttccatggcagaaggctccagggatggatttgtagaaggcaaaatacatgaaacttgacagctaatggctagtctgaacagtcttacctagatgatatgctgtatttcaggtatttctgggcctttcattgttgggagattcagatctccagtaggctttgagggatgaaaaggagatagtttccagctaagaatacagtagacattgagtataattaaggtgaaacagagatgaat

SEQ ID NO: 358349 - DNA, 549 bp, Homo sapiens
aactgcttaatattaattaaaccttaaaataaactaaaattatctgtaacaaaaatgttgctcattgaaaaaaaaattaaaaataaaaataaaatgatrgagattgacacctattcacattggatatttccatggcagaaggctccagggatggatttgtagaaggcaaaatacatgaaacttgacagctaatggctagtctgaacagtcttacctagatgatatgctgtatttcaggtatttctgggcctttcattgttgggagattcagatctccagtaggctttgagggatgaaaaggagatagtttccagctaagaatacagtagacattgagtataattaaggtgaaacagagatgaatggtactatacatatggtaaaatcatctcaggatgaaatatggtgaaacactcagaagcagaaaaatgagcagaaatggacaaattattcagtaacacagtcaataaggacttggccaacaggcatcaaaatattagaggatcaaaaaaaaaccttaaggaattagaatatgtgttttggtaatat

SEQ ID NO: 358350 - DNA, 563 bp, Homo sapiens
gtaatatctattccttatattttagggatagatacatgggtgtgtatgtattccattaagtatatgggaagttatgactgacaacacaactgcaggagttttcatgtaaagatagattagatttgatagcttcaaattcatttttaataattgttttattcattagtaaatagaaggacccaatttaaactccttatttgtagtattacaaggaaaaaagtagccctctctaatatgrcaacaagggtttaaagatcatgtatagtagggtcagttgtagggaaaggaattataagtaattgaaaatattgtgctagaaagggcctttgatattacaatgatgtaaagtcttaagagttaaactggaatgtagcagtcacacagtcatgtttggatgggtagtttggatagtgtagttgtcatcgaatccaatctaatagtcatcaaatgaagtccaattcagattgatgaatacacgtatgatgctcactgtgtaccatgtactgtgttagttgtggtgaagtcaaaaatgaatgttagagcacctgtttctaagaaactta

SEQ ID NO: 358351 - DNA, 584 bp, Homo sapiens
ggtactatacatatggtaaaatcatctcaggatgaaatatggtgaaacactcagaagcagaaaaatgagcagaaatggacaaattattcagtaacacagtcaataaggacttggccaacaggcatcaaaatattagaggatcaaaaaaaaaccttaaggaattagaatatgtgttttggtaatatctattccttatattttagggatagatacatgggtgtgtatgtattccattaagtatatgggaagttatgactgacaacacaactgcaggagttttcatgtaaagatagattagatttgatagcttcaaattcatttttaataattgttttattcattagtaaatagaaggacccaatttaaactccttatttgtagtattacaaggaaaaaagtagccctctctaatatgacaacaagggtttaaagatcatgtatagtagggtcagttgtagggaaaggaattataagtaattgaaaatattgtgctagaaagggcctytgatattacaatgatgtaaagtcttaagagttaaactggaatgtagcagtcacacagtcatgtttggatgggtagtttg

SEQ ID NO: 358352 - DNA, 469 bp, Homo sapiens
acaattattataagcaatgtttgaatatttactatgaggtgtcttacgtggaatcttttatttaattctaagcacaaaacaaacaagactctatgggtaggtactcttcatattcattttagagaggagaaagcagagctagagaactgaataacttgcccaaagtaagaaaatttgcaagtggcagtatcaggattagaacmcaggcagctggcctccagaccatgcaccatcccaaccaccatactttacccctctcagtgcacagatgggtttagcccatcatctgacaatagtgagaactcaataaatggaaactattgtgatgccatatattattgcagtgggaattcaatacctgctgggtaatcaatgaatctgtgagtcatctacactgaggcattgaggtgataatttgaaatcaggaagaaatgagctcatgcaggggagagggcagagaagggttgag

SEQ ID NO: 358353 - DNA, 469 bp, Homo sapiens
acaattattataagcaatgtttgaatatttactatgaggtgtcttacgtggaatcttttatttaattctaagcacaaaacaaacaagactctatgggtaggtactcttcatattcattttagagaggagaaagcagagctagagaactgaataacttgcccaaagtaagaaaatttgcaagtggcagtatcaggattagaacacaggcagctggcctccagaccatgcaycatcccaaccaccatactttacccctctcagtgcacagatgggtttagcccatcatctgacaatagtgagaactcaataaatggaaactattgtgatgccatatattattgcagtgggaattcaatacctgctgggtaatcaatgaatctgtgagtcatctacactgaggcattgaggtgataatttgaaatcaggaagaaatgagctcatgcaggggagagggcagagaagggttgag

SEQ ID NO: 358354 - DNA, 469 bp, Homo sapiens
acaattattataagcaatgtttgaatatttactatgaggtgtcttacgtggaatcttttatttaattctaagcacaaaacaaacaagactctatgggtaggtactcttcatattcattttagagaggagaaagcagagctagagaactgaataacttgcccaaagtaagaaaatttgcaagtggcagtatcaggattagaacacaggcagctggcctccagaccatgcaccatcccaaccaccatactttacccctctcagtgcacagatrggtttagcccatcatctgacaatagtgagaactcaataaatggaaactattgtgatgccatatattattgcagtgggaattcaatacctgctgggtaatcaatgaatctgtgagtcatctacactgaggcattgaggtgataatttgaaatcaggaagaaatgagctcatgcaggggagagggcagagaagggttgag

SEQ ID NO: 358355 - DNA, 469 bp, Homo sapiens
acaattattataagcaatgtttgaatatttactatgaggtgtcttacgtggaatcttttatttaattctaagcacaaaacaaacaagactctatgggtaggtactcttcatattcattttagagaggagaaagcagagctagagaactgaataacttgcccaaagtaagaaaatttgcaagtggcagtatcaggattagaacacaggcagctggcctccagaccatgcaccatcccaaccaccatactttacccctctcagtgcacagatgggkttagcccatcatctgacaatagtgagaactcaataaatggaaactattgtgatgccatatattattgcagtgggaattcaatacctgctgggtaatcaatgaatctgtgagtcatctacactgaggcattgaggtgataatttgaaatcaggaagaaatgagctcatgcaggggagagggcagagaagggttgag

SEQ ID NO: 358356 - DNA, 554 bp, Homo sapiens
aagaacactaagtatctgatataatttgaaagtttgtcccctccaaatctcatgtcaaaatatgatccccaatgttagaggtgtgtggtcatggagtggatccttcatgaatggcttggtgcttgccccaaggtaatcagtgagttcttgctctgttacttcactgaagagcaggttggttatttatttatttatttatttatttatttatttatttatatttmtatttatttattttgagacagagtctcactctgtcacccaggcaggagtgcagtggtgcgatctctgctccctccaacctccacttcctgggttcaagcaattcacctgcctcgaccttatgagtagctggggttacaggcgcttgccaccatgcctggctatttttttatatttttagtagagatgggatttcactgtgttagccaggatggtctcaatctcctgaccttgtgatccatgcacctcggccccccagagtgtaggaattacaggcatgaagagctggttgtttaaaggagcctggaacctcctcctctctctcttgcttc

SEQ ID NO: 358357 - DNA, 551 bp, Homo sapiens
aaacacttactggcagagctagggatgaataatcacaatttacagaacacccaccactcaccccttgaacagccttaggaaaaatgttgcayttcctattacattctttttgttgttgttgtttatttttgagatggagtctcactctgtcaccccagctggagtgcagtggtgtgatctcggttcactgcaaactctgcctacttgtttcaagcaattctcctgtgtcagcctcccaagtagctgggattacaggcacccaccaccacaccgggctaatttttatatttttagtagagatggggtttcaccatgttggtcaggctggtctcgaactcctgacctcaagtgattcacctgcctcacttcccaaagtgctgggattacgggacctattacattcttgcagatgagaagagtgagacttggaggcattaaacaactgtcctaagatcacccagtaagaagaagcagagcagagcaggcagaacacccaggatacgtttgtaatttttattttttatgacatttcataaaataatgttaaaatg

SEQ ID NO: 358358 - DNA, 551 bp, Homo sapiens
aaacacttactggcagagctagggatgaataatcacaatttacagaacacccaccactcaccccttgaacagccttaggaaaaatgttgcacttcctattacattctttttgttgttgttgtttatttttgagatggagtctcactctgtcaccccagctggagtgcagtggtgtgatctcggttcactgcaaactctgcctacttgtttcaagcaattctcctgtgtcagcctcccaagtagctgggattacaggcacccaccaccacaccgggctaatttttatatttttagtagagatggggtttcaccatgttggtcaggctggtctcgaactcctgacctcaagtgattcacctgcctcacttcccaaagtgctgggattacrggacctattacattcttgcagatgagaagagtgagacttggaggcattaaacaactgtcctaagatcacccagtaagaagaagcagagcagagcaggcagaacacccaggatacgtttgtaatttttattttttatgacatttcataaaataatgttaaaatg

SEQ ID NO: 358359 - DNA, 551 bp, Homo sapiens
aaacacttactggcagagctagggatgaataatcacaatttacagaacacccaccactcaccccttgaacagccttaggaaaaatgttgcacttcctattacattctttttgttgttgttgtttatttttgagatggagtctcactctgtcaccccagctggagtgcagtggtgtgatctcggttcactgcaaactctgcctacttgtttcaagcaattctcctgtgtcagcctcccaagtagctgggattacaggcacccaccaccacaccgggctaatttttatatttttagtagagatggggtttcaccatgttggtcaggctggtctcgaactcctgacctcaagtgattcacctgcctcacttcccaaagtgctgggattacgggacctattacattcttgcagatgagaagagtgagacttggaggcattaaacaactgtcctaagatcacccagtaagamgaagcagagcagagcaggcagaacacccaggatacgtttgtaatttttattttttatgacatttcataaaataatgttaaaatg

SEQ ID NO: 358360 - DNA, 616 bp, Homo sapiens
tcctctgggaacaaattcctaactccaatccactctatatgataaacctacccaagctcctgtcatggaagtgatcagacagttgaattttgtacttctgatggtaaacagtgcatagtgtattactctgttttcatgctgctgataaagacacacccgagactgggtactttataaagaaaaagaggtttattrgagtcacagttccatgtgtctggggaagccttacaatcatggtgcaaggccaaaggcatgtcttacatggtggcatacaagagagaatgagagccaaacaaaaggggaaaccccttataaaaccatcagatctcatgacacttattcactaccacaagaacagtatgggggaagccaacccatgattcaattatctccaccaggcccctcccacaacatgtgggaattatgggagctacaattcaagatgagatttaggtggggacacagcaaaactatttcacgtggccaacaaatgctttatattataattattcttgtttgagtactggtatgatatgaggctggaaaccagatggaaatcaaacattttagaaattcatcccaaaaatcatttagtggaagggaggtgtagtcatga

SEQ ID NO: 358361 - DNA, 616 bp, Homo sapiens
tcctctgggaacaaattcctaactccaatccactctatatgataaacctacccaagctcctgtcatggaagtgatcagacagttgaattttgtacttctgatggtaaacagtgcatagtgtattactctgttttcatgctgctgataaagacacacccgagactgggtactttataaagaaaaagaggtttattagagtcacagttccatgtgtctggggaagccttacaatcatggtgcaaggccaaaggcatgtmttacatggtggcatacaagagagaatgagagccaaacaaaaggggaaaccccttataaaaccatcagatctcatgacacttattcactaccacaagaacagtatgggggaagccaacccatgattcaattatctccaccaggcccctcccacaacatgtgggaattatgggagctacaattcaagatgagatttaggtggggacacagcaaaactatttcacgtggccaacaaatgctttatattataattattcttgtttgagtactggtatgatatgaggctggaaaccagatggaaatcaaacattttagaaattcatcccaaaaatcatttagtggaagggaggtgtagtcatga

SEQ ID NO: 358362 - DNA, 616 bp, Homo sapiens
tcctctgggaacaaattcctaactccaatccactctatatgataaacctacccaagctcctgtcatggaagtgatcagacagttgaattttgtacttctgatggtaaacagtgcatagtgtattactctgttttcatgctgctgataaagacacacccgagactgggtactttataaagaaaaagaggtttattagagtcacagttccatgtgtctggggaagccttacaatcatggtgcaaggccaaaggcatgtcttacatggtggcatacaagagagaatgagagccaaacaaaaggggaaaccccttataaaaccatcagatctcatgacacttattcactaccacaagaacagtatgggggaagccaacccatgattcaattatctccaccaggcccctcccacaacatgtgggaattatgggagctacaattcaagatgagatttaggtggggacacagcaaaactatttcacgtggccaacaaatgcttkatattataattattcttgtttgagtactggtatgatatgaggctggaaaccagatggaaatcaaacattttagaaattcatcccaaaaatcatttagtggaagggaggtgtagtcatga

SEQ ID NO: 358363 - DNA, 619 bp, Homo sapiens
tactgcaacctccacctcccaggttcaaccaattctcctgtctcagcctcccaagtagctgggattacaggcacgagccaccacacctggctaatttttgcatttttagtagagttaaagtttcactatgttggccaggctggtcttgaaagcttggcttcaggtgatccacctgcctaggcctcccaaagtgctgggattacagrtatgagccacgacgaccagacaaagaggtcaaaagtgtctatgaaagtataaacactttgcttattgataaatgaagttccttccacaaaatagccttatcttttcacgttagagttctgcaggtgtcatcacctcacaacacataaaataacaccaaccattgtctattgattgtgacaatgcttgttcctgtctcctgggacacatatgtgagcactttaagttgaactttgcaaatggctttctgagactgagcttgaccagagctgaccttagttggatcaaagcagaaaaaagcaatagatcagttcactgcaaggccaagaggagaggaggtttttacttccccaagtggaggtgagtcagaggaacaaattctagtcccacttctaacactatctagccaggtcag

SEQ ID NO: 358364 - DNA, 618 bp, Homo sapiens
tataaaataagtattatatatataaaatactttctacacatatagaaagtattttatactttgaattataattgaatattattatatttttgttcaaattcttccagctccagccattggaagctcttagtgttgggccctaagttmtttttaaaaatcctcaacaaaaatacccatgtttgtacatgtgcacccatgtgctgtcttatttttttcctagcaaggagcacttccttactttctggctctccaagatgctctgggttcatcttctatatttcctgctgcagtcctagaatcagccatttctccaaggagctcggttctttttatggtagtttgcatggtcttaaaatccaaaatgtagatactacacgtgttccttgctactgggctaaggttgattcatggccctcgtggttgatagggaaaagaaatgtatgtgtgtatattaacaagtgcacatacacacattgttctatttttctatatttaacccatctttatctattaatatattgaggcaataatgagttcttgctgatgtcttcaactctaattcattatcacatcaatattcaagcctcctcacctatagatctacacatttccactcca

SEQ ID NO: 358365 - DNA, 610 bp, Homo sapiens
aatattaaggaaagttctcaagactcatgcctgtaatctcagcactttgggaggtggaggctggaagatccttaagtatgatagctcgagacctgcctgggcaacatagagagaccccatctctacaaaaaaattagccaggtatagtggtgcatgcctgtagtcccagctacttgggaggctggggtgggatgattgcttgagcccaggagttcgaggcttcattgagctatgattgcatcacygcactccaggctgagcaacagagcaagacaccgtctttaaaaaatatataatatataaattaattaaggaaagggaaactttccgcaacacacacacacacacacacacacacacaccctgaatcatctttgaaatagccttctttaacctgaaaatatccttagagaagtgatcctttacttgtttgtttattataaggtaacaccttaaaaggaataatctccaagctgactcttgctgcctcaagggccaaactgtgacttttgcgacaagcccgtgtgatttgtatgttggacattcagggatatggaatatgatgttgaaatgaagtgtttgtttttctcattgaggttgtaaataagca

SEQ ID NO: 358366 - DNA, 610 bp, Homo sapiens
aatattaaggaaagttctcaagactcatgcctgtaatctcagcactttgggaggtggaggctggaagatccttaagtatgatagctcgagacctgcctgggcaacatagagagaccccatctctacaaaaaaattagccaggtatagtggtgcatgcctgtagtcccagctacttgggaggctggggtgggatgattgcttgagcccaggagttcgaggcttcattgagctatgattgcatcactgcactccaggctgagcaacagagcaagacaccgtctttaaaaaatatataatatataaattaattaaggaaagggaaactttccgcaacacacacacacacacacacacacacacaccctgaatcatctttgaaatagccttctttaacctgaaaatatccttagagaagtgatcctttacttgtttgtttattataaggtaacaccttaaaaggaataatctccaagctgactcttgctgcctcaagggccaaactgtgacttttgcgacaagcccgtgtgatttgtatgttggacattcrgggatatggaatatgatgttgaaatgaagtgtttgtttttctcattgaggttgtaaataagca

SEQ ID NO: 358367 - DNA, 576 bp, Homo sapiens
aagttcaactacaaagaccagtgatatttctattatatctttagaatcgatgtcttccttttttttgagacagagtttcctctgttgcccaggctggagtgcagtggcacgatctcagcacactgcaatctccacttctcagkttcaagcaattctcctgcctcagcctcccgagtagctgggattacaggcacctgccaccgtgcccagctaatttttgtgtttttagtagagatgggatttcaccatcttggccaggctagggatctatttcttgaggtagaatttaaaggtggaaggaaatcacattgaaccttttatgaacattgccaaattgctgtctcagcagattattcatatttcctcacccagcagcaatgtacatgactgcccacttcagcacactcctatcaaacatatattttctcaaaaaaaaaaagaaaaaaaaaaaacacccaagcatcttagctactttaaaaggtacagcatatcgttaatgtttagtgactttgcaagtttgtcatgtattttagtagatatttataatccctccctggaagatagttctcctccctt

SEQ ID NO: 358368 - DNA, 567 bp, Homo sapiens
aatcttgaactctgtatcagggttatttttgtagagctagggctgtaagaattctgagattttgtgtgaatttcaggattgggaaaatgagtgtgtgtgagcaggtgtgttgttggaacaagactgtcactgtaagagaaagaaggtaaagaatagtcctgttggtgttgatgggaattggaggcatcaatatgaaattatacatatgtaattttataggctgggcatggtggctcacgcttgtaatcccaacactttgggaggctgagacgggcagctcccttgaggtcaggagttcgagaacagcctggccaacatggtgaaaccccgtctctactaaaaatacaaaaattagccagatgtggtggtgtgtgcctgtagtcccagctacttggaagcctgaggcaggagaatcgcttgaacttgggaggcrgatgttgcagtgagccaagatcccaccaccgaactctggcctgggcgacttagccttttctcaaaaaacaaaaaaaagtaaaatttccctgcagatctgtctgctaactaggtctagaagaaatacctcagaaa

SEQ ID NO: 358369 - DNA, 451 bp, Homo sapiens
tacaaccaatcggccttggatacaattctttccatctcttttggtcatggtgtgactttggataaatcatgttgcccctctaagcttgcttcattatttctgaagtggaaataatacttcctacctcatattatcttcataaaaactaaatgtgacaatacaggtaaagtgtggtgcctcaaacatagtaagaattctattattgatatgattgtactttctgtggtgcataagaataaagccaatgcagaagaaagcagagttgacaggtaaggaagctaatcaatctctgaagtcattgtttgagcctttggatccagctgtgcctgaagcctattctcctcrttgagcttctcagttactaaggttgatggattccttttttggtttaagccagctgggattagatatctgtcacctataatggagaagttcttgcatatgtaggacc

SEQ ID NO: 358370 - DNA, 517 bp, Homo sapiens
gttgtggaatgaagaaagtagcctaattagcatattcttyagctcaaatatttattttttgtttgtcgagaacattcaaaattatttttttcttagctatttggaactatacagtaattattcttgacaggaggattgcatgaagttggccagacagccaaaaagaatcagattatctccagaaatttctatgtacctttgggtatgactgcatcttgcggtagctaccttaaattaatgtagcacaggttttaaatgccatttagttttacctttctagttttaaagttttggttatgactcattcatcctatgaccttggacctgtttcctgacataattgaattctgcgctttattgtttgtttcaaattaagacctctttgctacatataaagatttcctgttagggttgccctttatgataaattatattaccactgagtgattgtttaataaaaatttcaatctcattccaaacacatcaaggagttcccagggaccagtttcatatactc

SEQ ID NO: 358371 - DNA, 517 bp, Homo sapiens
gttgtggaatgaagaaagtagcctaattagcatattctttagctcaaatatttattttttgtttgtcgagaacattcaaaattatttttttcttagctatttggaactatacagtaattattcttgacaggaggattgcatgaagttggccagacagccaaaaagaatcagattatctccagaaatttctatgtacctttgggtatgactgcatcttgyggtagctaccttaaattaatgtagcacaggttttaaatgccatttagttttacctttctagttttaaagttttggttatgactcattcatcctatgaccttggacctgtttcctgacataattgaattctgcgctttattgtttgtttcaaattaagacctctttgctacatataaagatttcctgttagggttgccctttatgataaattatattaccactgagtgattgtttaataaaaatttcaatctcattccaaacacatcaaggagttcccagggaccagtttcatatactc

SEQ ID NO: 358372 - DNA, 620 bp, Homo sapiens
ttaggtttctgggtcatatgtttctgttgaaactactcaactctgctcttgtaacattaaaaacagccctggacaatatgtaaacccatgggtgagactgtgttccaatatggtttattcattaaaataggcagcaggacagattagacccatgggccgtagtttgccaacccctgatttaattgcaatgcttcttactccattggatttaatccagattcctttccatggcctagaaggtgctccatcctcatctgaatattacttgctcctctaggctccactatgctccagccaccctgaccagctttatggtgcttaaacactatgycaagtctgtttacatctcaggtcgctgcacttgacattctacccagcaggaccagaccagatcttgaccagatcttcttcaagctgcctcagctcaaatgtcagagaggtcttcactgcccaccccaataggtcagtacccattccaatgcccaaacattctaactcccatagctctatttattttcttcaaattacttatcaccatctgaaaaaaatatcatttgttgcatgtatatagcctgcttccccaccaccacaccaccacaagaatggaacctccccgagaa

SEQ ID NO: 358373 - DNA, 620 bp, Homo sapiens
ttaggtttctgggtcatatgtttctgttgaaactactcaactctgctcttgtaacattaaaaacagccctggacaatatgtaaacccatgggtgagactgtgttccaatatggtttattcattaaaataggcagcaggacagattagacccatgggccgtagtttgccaacccctgatttaattgcaatgcttcttactccattggatttaatccagattcctttccatggcctagaaggtgctccatcctcatctgaatattacttgctcctctaggctccactatgctccagccaccctgaccagctttatggtgcttaaacactatgtcaagtctgtttacatctcaggtcgctgcacttgacattctacccagcaggaccagaccagatcttgaccagatcttcttcaagctgcctcagctcaaatgtcagagaggtcttcactgcccaccccaataggtcagtacccattccaatgcccaaacattctaactcccatagctctatttattttcttcaaattacttatcaccatctgaaaaaaatatcatttgttgcatgtatatagcctgyttccccaccaccacaccaccacaagaatggaacctccccgagaa

SEQ ID NO: 358374 - DNA, 500 bp, Homo sapiens
ggtggtacacacctgtagtccctgctacttgagtggctgaggcaagaggatcactgagcccaagagtctgaggttacagtgagctatgattgtgacactgcattcatgcctgggcaacagaacaagactctgtctcaaaaaaagagaaaaaagtrggctgggagtggtagctcatgcctgtaatcccaacactttaggaggccgaggcaggtggatcacctgacatcaggagttgagaccagactggccaatatagggaaaccccatctctaccaaacatacaaaaattagctaaatatggtggtacatgcctgtagtcccaagtacttcagaggctgaggcaggagaatcacttgaactcaggaggcagagattgcagtgagccgagattgtgtcactatactccagcctgggagcctgggtggcagattgagactccatctgaaaagaaaaataaaagaaaaagtaaaatacaaatgaatcattgaatcatgtcactc

SEQ ID NO: 358375 - DNA, 508 bp, Homo sapiens
agataaatccacacatcacaaatcagtttcacagatagcttcattcaagtttctatctggggatatttgattttttcccacaggcatcaatggactccaaaatgtcccttcacagattctacaaaaaaatatttccaaactgctgagtcaaaaggaagttttaactctgtgacatgaatccacacatcacctagcagtttcacagatagcttccttctagtttttatctggggatatttgkttttttttttccataagcatgaatgggctcccaaatgttccttcacaaattctacaaaaagagtgttttcaacctagtgaaccaaaggaaaggttaaactctgtgagatgaatccacacatcaccaaggagtttcacatatagcttctttctagtgtttatctgcagatattcggtttttcactataggcctcaattggctcccaaatgtttcttcacatattctacaaagagagtgtttccaacctgctaaatcaaaaggaaggtt

SEQ ID NO: 358376 - DNA, 583 bp, Homo sapiens
tttctagtttttagctgggcattttccatttttccccataggcctcaatgggttcccaaatgtctcttcgcagatcctacaaaatgtctgttacyaacctgctgaatcaaaagaaaggtttaattatgtgagatgaatccacacatcacaaagcagtttcacagataacttctttccaatttttattttgggatatttggtttttctccataggcctaaattgtcccccaaatccctttcagagattctacaaaaaaaagtgcctacaatcttctgaatcaaaataaaggtataactctgtgagatgaaatgacaaatcacaaagcactttcacagatagctttttttctagtttttatctggggcattcagtttttccccataagcctcgtcaggctcctaaaaatcccttcacacaatctacaaaaagagtgttcccaatctactaatcaatagaaagttttaactctgtgtgatgaatccactcattgctaagcagtttcacagataacttctttcttgtttttatctgaaaatattcagtttttcctcataggttttgatgggttttgaaaatttcctt

SEQ ID NO: 358377 - DNA, 523 bp, Homo sapiens
gtttccaacctgttgaatcaaaataaaggtttaactctgtgggctgaatccacatatcaccaagcagtttcacagatagcttctttctactttttatctgggcctattcggtttttccctgtaggtttcaatgggctcccaaatgacccttcacagattctacaaaaagaatgtttccacgctgctgagtaaaaagaaggatgtaattctgtgaggtgaatccacaagtcacccagcagttttacagatagcttccttctagtttttatctggggacatttgggtttttcccataggtctcaatgggctcccaaatgccattttgcaaattctacaaaaaaactgtttccaatctgcygaattcaaagaaaagtttaactctctaagattaatccacacaccaaaaagcagtttcactaatagcttcattatagcttttatctgggaatattcagtttttttccattggacacaatgaactcccaaatgtaccttcacagattctacaaaaagagtgttccaa

SEQ ID NO: 358378 - DNA, 528 bp, Homo sapiens
aaatctgaagagtagctgaacttgtccagtcagctataatttatctcaaggttagatctggagaagtggatgctgttcttaacagctatccagtaattacctgtttctgacaaagaaagtatggagccatctaaatacttcttatatgcttacagaatgtatcttgcatccctgtatggagggtagtgagtggttgaaagccacagaaagagyaacctctcatatcaaagaaaattcagcaagggtttgtaaaggaaagaggagaagagttggtcatatccagattgctgatctcttaaaggaagtgatccccggtaagaggagagccatcttttttttttttttttttttttttgctaaacttccttcttaaagttttgtctgcctcctttttccttgatcttccttgtaccctttacttaaagtcacatttgattggtgactctttttcaaaactgatgtctatcattggtaccaattgtgacaatagatatcttgctccctagtctctctttcccttatgttaac

SEQ ID NO: 358379 - DNA, 528 bp, Homo sapiens
aaatctgaagagtagctgaacttgtccagtcagctataatttatctcaaggttagatctggagaagtggatgctgttcttaacagctatccagtaattacctgtttctgacaaagaaagtatggagccatctaaatacttcttatatgcttacagaatgtatcttgcatccctgtatggagggtagtgagtggttgaaagccacagaaagagtaacctctcatatcaaagaaaattcagcaagggtttgtaaaggaaagaggagaagagttggtcatatccagattgctgatctcttaaaggaagtgatccccggtaagaggagagccatcttttttttttttttttttttttttgctaaacttccttcttaaagttttgtctgcctcctttttccttgatcttccttgtaccctttacttaaagtcrcatttgattggtgactctttttcaaaactgatgtctatcattggtaccaattgtgacaatagatatcttgctccctagtctctctttcccttatgttaac

SEQ ID NO: 358380 - DNA, 528 bp, Homo sapiens
aaatctgaagagtagctgaacttgtccagtcagctataatttatctcaaggttagatctggagaagtggatgctgttcttaacagctatccagtaattacctgtttctgacaaagaaagtatggagccatctaaatacttcttatatgcttacagaatgtatcttgcatccctgtatggagggtagtgagtggttgaaagccacagaaagagtaacctctcatatcaaagaaaattcagcaagggtttgtaaaggaaagaggagaagagttggtcatatccagattgctgatctcttaaaggaagtgatccccggtaagaggagagccatcttttttttttttttttttttttttgctaaacttccttcttaaagttttgtctgcctcctttttccttgatcttccttgtaccctttacttaaagtcacatttgattggtgactctttttcaraactgatgtctatcattggtaccaattgtgacaatagatatcttgctccctagtctctctttcccttatgttaac

SEQ ID NO: 358381 - DNA, 498 bp, Homo sapiens
tacttaaagtcacatttgattggtgactctttttcaaaactgatgtctatcattggtaccaattgtgacaatagatatcttgctccctagtctctctttcccttatgttaacttatttttctgttctctatagccttctccatcagtcatcttgggcaaactttataagtaaatgactaaaaatacaggtttcaaaggcagatcctcaraattcttgatacatgacaagagttttcatcgatctaaatagaaataaagacaattttctgaaaatttcaagttgtttcaaaaaattaaacttattgaggggtatcttttactctttattcaagtgtcctttcatgaaattataatgatagtagttggagttttgtttatctttggttttaatactcttacttggcaaaacaagatgttggcaaccattataactaaaaatttttggaaatttttattgatctttgaaattatttaagtgaaattcctttggaaaatttt

SEQ ID NO: 358382 - DNA, 498 bp, Homo sapiens
tacttaaagtcacatttgattggtgactctttttcaaaactgatgtctatcattggtaccaattgtgacaatagatatcttgctccctagtctctctttcccttatgttaacttatttttctgttctctatagccttctccatcagtcatcttgggcaaactttataagtaaatgactaaaaatacaggtttcaaaggcagatcctcaaaattcttgatacatgacaagagttttcatcgatctaaatagaaataaagacaattttctgaaaatttcaagttgtttcaaaaaattaaacttattgaggkgtatcttttactctttattcaagtgtcctttcatgaaattataatgatagtagttggagttttgtttatctttggttttaatactcttacttggcaaaacaagatgttggcaaccattataactaaaaatttttggaaatttttattgatctttgaaattatttaagtgaaattcctttggaaaatttt

SEQ ID NO: 358383 - DNA, 602 bp, Homo sapiens
ttcaaaaaattcattttaaatatgcatgaacatttttcacagtatttgagtgtatttggtcagattatttttacaaggctaaaaaacttatagtatcttaactgttaaatattgcaaatttctttgcgaaagtacacacatttggcaggtttagaactttgaacagactttcagaagataattgcacagcatattttatagtgatttactgtaatgattatgaacataatttgggaaataaattagctttagcgaattttactttaaattttttatttagggcacataccttaataatttaattgtgaaagctatgcatttgcctttaattgaaattttagcatgctttactttaaatgtgctaaatcactaatttctgttcctttagatgtgatacagttgaaggyatgtaaagcgggggattgtttttccaaagacatagcagttttactatacagggattttaatacttaaatttcgaatttaaaaaattcttttttttctttgagatggggtcctgctctgtcacccaggctgaagtgtagtggcacgatcttggctcactgtaacctctgcctcctgggttcaagcaattccactgt

SEQ ID NO: 358384 - DNA, 602 bp, Homo sapiens
ttcaaaaaattcattttaaatatgcatgaacatttttcacagtatttgagtgtatttggtcagattatttttacaaggctaaaaaacttatagtatcttaactgttaaatattgcaaatttctttgcgaaagtacacacatttggcaggtttagaactttgaacagactttcagaagataattgcacagcatattttatagtgatttactgtaatgattatgaacataatttgggaaataaattagctttagcgaattttactttaaattttttatttagggcacataccttaataatttaattgtgaaagctatgcatttgcctttaattgaaattttagcatgctttactttaaatgtgctaaatcactaatttctgttcctttagatgtgatacagttgaaggtatgtaaagcgggggattgtttttccaaagacatagcagttttactatacagggattttaatacttaaatttcgaatttaaaaaattcttttttttctttgagatggggtcctgctctgtcacccaggctgaagtgyagtggcacgatcttggctcactgtaacctctgcctcctgggttcaagcaattccactgt

SEQ ID NO: 358385 - DNA, 546 bp, Homo sapiens
gccacacaagctatgcttcccaccctccagaaggctcctctgctgattgcagccaacattgattccttcccttcctcgccraccctattccatattagggtgaccagctcatcccaggttgcctgggactttcctggttttcatactgaaagtccagtgtcccgagaaactcctcaatacctggtaagcagagctagtgggtcaccttacccatactgtctagacgaagcatttttgtcattgactatatctggttacaagtgtagccacactaacatcaaacacttactgggtgtctagtgagtacactgtgctcaacttagagcacacactgccctcatctgatttttttctctattttccacaatgtgttacaaaatgctttttatatacctagcattcagatcttgttttctatgtgccattgtccaaaaaacaaaaacaaaaacaaaaacaaaacaaacccagtgcttcttgggaaaatggttgattccaggactggggcaagaaaagtaataatatgagcccggaacattttatgatggc

SEQ ID NO: 358386 - DNA, 542 bp, Homo sapiens
acaaacaaacaacaacaacaaaaagaaacaaagaaaactattgaactagtcatcttaatattttaaaaaatgcttatttatattttatcatgcttttaaaaaatgcttttggatactttgttgctatcctattttgattacatataggaatggagccataaacttctcactgcctcatcattcgaaggatattcctttacctcaggtttcctcttctctctctagtctatatctgggagaggtacacatatactcaaccattttattacattgggcatacccaaacattttaatatatttgtgctgatatacktaggagctagcttttgacttatagcaaatttttcccttgaaataatttaaggccataagtatctatgtctgttgtgttggtttattttttatctgtgtcctttcagccatttttctatattgttctatgtattatcaagttcacagaccctgaggacttttgggcttttctggcatgttgtttgaaaaaaaaaacaaaaaaacaacaaaaacacgactcaaaaaaagta

SEQ ID NO: 358387 - DNA, 600 bp, Homo sapiens
tttctcttttttaaatttaattaaattaatttatttgtttattatactgggatacaggtgcagaacgtgcatgtttgttgcataggtatacacatgacatggaggtttgctgcacccatcaacccgtcatctatattaggtatttctcctaawgctacccctcctctagccccccagcccttgataggacttggtgtgtgatgttcccctccctgtgtccatgtgttcttattgttcaactcccacttatgagtgagaacatgcagtgtttggttttctattcctgtgttagtttgctgagaatgatggtttccagcttcattcatgtccttgcaaaggacatgaactcatccttttttacagcctgttatttttttctccagacatttaataagcacttcctatcaccaaaggagtctatgggcagagtatttcctggagtttgcttccacaacccagtatttaagtgatttttttatagtagctttatctttaaaaagaaaaaaactgggtttatagtcacctgaaaactaagtactgagtagccctcaaatattttcaagtctgtaattccattagtttgccattactgtaatttat

SEQ ID NO: 358388 - DNA, 600 bp, Homo sapiens
tttctcttttttaaatttaattaaattaatttatttgtttattatactgggatacaggtgcagaacgtgcatgtttgttgcataggtatacacatgacatggaggtttgctgcacccatcaacccgtcatctatattaggtatttctcctaaagctacccctcctctagccccccagcccttgataggacttggtgtgtgatgttcccctccctgtgtccatgtgttcttattgttcaactcccacttatgagtgagaacatgcagtgtttggttttctattcctgtgttagtttgctgagaatgatggtttccagcttcattcatgtccttgcaaaggacatgaactcatccttttttacagcctgttatttttttctccagacatttaataagcacttcctatcaccaaaggagtctatgggcaragtatttcctggagtttgcttccacaacccagtatttaagtgatttttttatagtagctttatctttaaaaagaaaaaaactgggtttatagtcacctgaaaactaagtactgagtagccctcaaatattttcaagtctgtaattccattagtttgccattactgtaatttat

SEQ ID NO: 358389 - DNA, 552 bp, Homo sapiens
atatgtgcctttggaaaacaagcctggacttaagygcaagacttttaggagtttattaaagcaaacatgggaaaatataaataattatttatcaagtacctgaggttatgaagatgagagtctagaaaaaaagtagcacactcaagacctcccttgaagagcttccaatttcccgtgggaggagagtcacatgcagaatataataatatgtggttagctcctacgtttgagggaacagtctacagggatttaaatatttcagagaaggatctctgcatgctagctggatagaaaatgatttttgggagaattgagagagaagatggagctttaaaggaagtgtagaatctggatttgcagaagggaaaggaagagcattttaggcagtggtagaggaacataacaggagtggcaatgaacaaggcctcccagctagtaagccagggtggggagggggtggggagatctgaactaggttcatcttatttaacagctcatacatttcttcatttattataatcagaatcctaattccctggatctatcaatctg

SEQ ID NO: 358390 - DNA, 552 bp, Homo sapiens
atatgtgcctttggaaaacaagcctggacttaagcgcaagacttttaggagtttattaaagcaaacatgggaaaatataaataattatttatcaagtacctgaggttatgaagatgagagtctagaaaaaaagtagcacactcaagacctcccttgaagagcttccaatttcccrtgggaggagagtcacatgcagaatataataatatgtggttagctcctacgtttgagggaacagtctacagggatttaaatatttcagagaaggatctctgcatgctagctggatagaaaatgatttttgggagaattgagagagaagatggagctttaaaggaagtgtagaatctggatttgcagaagggaaaggaagagcattttaggcagtggtagaggaacataacaggagtggcaatgaacaaggcctcccagctagtaagccagggtggggagggggtggggagatctgaactaggttcatcttatttaacagctcatacatttcttcatttattataatcagaatcctaattccctggatctatcaatctg

SEQ ID NO: 358391 - DNA, 567 bp, Homo sapiens
agcctgggcccttctttttgctgccttagggagattgaatttctgtacctgttaatgctactgcttattgtaccttgagcaattgtttatcttaatgtcctttttgactctctttttcttgcttttatctcttcaatctcttcttattttttatttttttaaagatggagtctagctctgtctcccaggctggagcacagtggcgcgatcttggctcactgcaatctctgcctcctggcttcaaacggttctcctacctcagcctcccgagtagctaggattacaggtgcgcaccaccacacccagctaatttttgtatttttagtagagatggagttttgccatgttggccaggctggtctggaactcctggcttcaggtgatctgcccgccttggcctcccaaattgctgggatgacaggcgtgagccaccacgcctggcsttcaatctcttaatctttttatatctttctcttttctgtcccattttctccttccctcttcccttttccctttttcttaacattttctttttttctcttcctctgcctatccctgttacttctc

SEQ ID NO: 358392 - DNA, 622 bp, Homo sapiens
tagttgagctctgaggtaccacgctgagctttggggattaaagatgagtgggacatggttcctcctacaaggaatgcagaaaatggtagaaaagcgaatgagtgaaaatacgttaagtgcagtgacctagaaaaggaacacgtgacctgggttagggttggtcagagcaggtttgctaaagcagcagtgcttctcaaaactttagtgtgcaaatggaagtactaggggttttaattaaaatacagattctgatttttggtcctttggttggtctgacagtcttcatttctaacaagcttccaggtggtgccgacgtcactggtccgcaygcttcgttttgagtaggaatattctagaggatgtaggacttgaataaataccaattaactgggtcgagaggtgggaaaaggtattctagacagagaagacagagtggggaatgacataaagcataaggaaaatatggtaagagggtaaactacttataatctatggcaagtggtggcaaactacagcttgctggctgaatccagcccacagcctatatttgtgtggcacatgtgctaaggaatagtttttatatttctaaagggttgtaaaaaaacaaaatcaaggaagaaca

SEQ ID NO: 358393 - DNA, 622 bp, Homo sapiens
tagttgagctctgaggtaccacgctgagctttggggattaaagatgagtgggacatggttcctcctacaaggaatgcagaaaatggtagaaaagcgaatgagtgaaaatacgttaagtgcagtgacctagaaaaggaacacgtgacctgggttagggttggtcagagcaggtttgctaaagcagcagtgcttctcaaaactttagtgtgcaaatggaagtactaggggttttaattaaaatacagattctgatttttggtcctttggttggtctgacagtcttcatttctaacaagcttccaggtggtgccgacgtcactggtccgcacgcttcgttttgagtaggaatattctagaggatgtaggacttgaataaataccaattaactgggtcgagaggtgggaaaaggtattctagacagagaagacagagtggggaatgacataaagcataaggaaaatatggtaagagggtaaactacttataatctatggcaagtggtggcaaactacagcttgctggctgaatccagcccacagcctatatttgygtggcacatgtgctaaggaatagtttttatatttctaaagggttgtaaaaaaacaaaatcaaggaagaaca

SEQ ID NO: 358394 - DNA, 287 bp, Homo sapiens
gaacaaactacacgtgagtacaaataacacggatggatctcataaacataatattgagcaaaagaagccaaacatgaaagaataaactctgttgattccctttatctagaattcaaaaagaagcaaaattcatccmcattgttagtcaggatagtagtaatctttttttttttttttttttttttgagacaaggtcttgctctgtctcccaggctggagtgcagtgatgtgattccaactcactgcagcctcaacctccctggctcaggcgatccttccacctcagc

SEQ ID NO: 358395 - DNA, 597 bp, Homo sapiens
catttaatctttcacagggttacatgatgaaaaagggccacagacggaaaaactggactgaacgatggtttgtactaaaacccaacataatttcttactatgtgagtgaggatctgaaggataagaaaggagacattctcttggatgaaaattgctgtgtagaggtgagtctactcttacttctttgcatgattaccccgtgctgccccctgatgctgaagtagcttctcaccttcttccacctagactctagaaccttaaaataatccccaaatttacatttccaaaataatataggcatgcagttgccakggtttctgaaccaaaaattaaacatagctgacaaaatttttttctaatgtgaatttattttcaaccttctactcgtgaataaagtataaggattaaatcatttattggaacatttaaggaatcatttattgaataaaatggagtcataaaagagataataaagtaaaaaaaagttcagtaagacaatatttggaataaagaatatgccagaaaatctgggacattttgagtgcaagaaataaaagaagatgtaagcattgtctttgaatactttgggtgactttc

SEQ ID NO: 358396 - DNA, 583 bp, Homo sapiens
ggcttgagcaacaatattatggtaacaaagtcaagtcacatgactggtcagttactactacctgccagcatctgctcttataaaactaacaacaaaggaataaagtaacagactataccaacaccaatttccaaattccctctacaacttcctgcaaggttgttattcaactcagctccaatactctaggtgatgggctaccactcgttgcctcacaaattgggccagtttatttatgggcagcttcaattcttacgaagttttttcttatactaagatgagttctcccatcyactaccctagttccacaaaggaagtatctactccctcttccctgtgatagccctttcgcaactggaaggcagctttgttgcctgttgagaacatccttctccaagaagaccacctccagccttaactaatgggacccagcttccagactcaatatccttctttggagacactgaggtctcctcagatgtctcttggagtttgatgtacacaacagaacacgacactacagatgtggtctgaccagtgcagagtttattcactcagttgatgtgtattttttatgtgcctt

SEQ ID NO: 358397 - DNA, 583 bp, Homo sapiens
ggcttgagcaacaatattatggtaacaaagtcaagtcacatgactggtcagttactactacctgccagcatctgctcttataaaactaacaacaaaggaataaagtaacagactataccaacaccaatttccaaattccctctacaacttcctgcaaggttgttattcaactcagctccaatactctaggtgatgggctaccactcgttgcctcacaaattgggccagtttatttatgggcagcttcaattcttacgaagttttttcttatactaagatgagttctcccatccactaccctagttccacaaaggaagtatctactccctcttccctgtgatagccctttcgcaactggaaggcagctttgttgcctgttgagaacatccttctccaagaagaccacctccagccttaactaatgggacccagcttccagactcaatatccttctttggagacactgaggtctcctcagatgtctcttggagtktgatgtacacaacagaacacgacactacagatgtggtctgaccagtgcagagtttattcactcagttgatgtgtattttttatgtgcctt

SEQ ID NO: 358398 - DNA, 641 bp, Homo sapiens
gagcaagtacaattatgattggaacttacttcagccaaacaaaattttctagctggtcatgagagattgtttgagcaatatagaggtgagattgcgaggcagactagggagtgtcacagggtcatcagcctaccctctgccaatgtaagatggctccacagtctgtatacggtttgcctaaagcatgctatagctcaatgaccattccaagctttgcccagccttctgcctcccatgtcattcactcattcctattcctgtgcccaatgacctcactgcctaatttactgatgaaaaattagggctaaaaggcattagctcctgccctttcccttggcacttgaactatctttctcttgcttacctttcatccctccctgtttccaaagctgttccctaaatctaggcccgagcctcattcattcttgctttcccaggatcttattctcttagttattagctaacaaatttttctaaaatttgttttctctaytggctccttctggattgccttcagacacacacacatttcttttgaccagaaaacatctcttgctgtccccttaagcagccaccttctcttctcaatccttttcattgccaaacttctgtaagaacagtttttcttgttgtatgtcaca

SEQ ID NO: 358399 - DNA, 641 bp, Homo sapiens
gagcaagtacaattatgattggaacttacttcagccaaacaaaattttctagctggtcatgagagattgtttgagcaatatagaggtgagattgcgaggcagactagggagtgtcacagggtcatcagcctaccctctgccaatgtaagatggctccacagtctgtatacggtttgcctaaagcatgctatagctcaatgaccattccaagctttgcccagccttctgcctcccatgtcattcactcattcctattcctgtgcccaatgacctcactgcctaatttactgatgaaaaattagggctaaaaggcattagctcctgccctttcccttggcacttgaactatctttctcttgcttacctttcatccctccctgtttccaaagctgttccctaaatctaggcccgagcctcattcattcttgctttcccaggatcttattctcttagttattagctaacaaatttttctaaaatttgttttctctattggctccttctggattgccttcagacacacacacatttcttttgaccagaaaacatctcttgctgtccccttaagcagccaccttctcttctcaatccttttcattgccaaacttctgtaagaacartttttcttgttgtatgtcaca

SEQ ID NO: 358400 - DNA, 585 bp, Homo sapiens
tgctgtggaatatgtcttccttttacacctcatttctagtcagcaggttaatgtagaagaaaaagtataggctatgaagataaatagattgatctatgtgatcttaggctggccacttaaaatatatatatatatatatttaattttaaaaatatgtactacatttttgagtaggttaattttttttaaaaaaacttaatacaaagaagagctacagtgaagtctttttctaaccttggtctcatcaaacttgtcttcctttcacagttactagtttcttatatatccctccagaatttcttttcttcctcccttttcttttttatacaaaagatggcatacatattcttaggtaccttgtttttttcacttaatttatgttggagatcttttcatatccgtacwtagcaagctttctcatggtttttatgttttatggatataccttaatttaaccagtagttgggaattgttaacttgggtaaagttccaaatgattttaaaatttgaatgacatttgaacctgatctgagaagtgtgcatttctttaatacttgtatttccatagcattttacagttattaa

SEQ ID NO: 358401 - DNA, 587 bp, Homo sapiens
gaatagtatttactcacacaaaacagccctgaaaacaacattctggatctcatgtgtttcccatgtataccagcactcagccagttacgttttgtcaatatgcaagtagtatgaaaattatgttgtgacttgtacagaatactctttggacatgaggatagattcacttatcatcatagccatttagagaagaagagacccactttccctgtaaatctccaggggtattacatgccccaaattactatatttggagcttttctatactcaggctgctttgcctctgatccaaaaacactagccaaggatctccttccatatctatgctgaattaacagaaaaaataccaagccaggtctattaaatgctaaaatgaccaagtaaaaactccccaagccacamcttacctcttctgacacaataattaatggatacttgtcctcagataaaaagttgaaaataacccatattttaaatgcatcttcttctgtaatgagcaggggattctttgtgaggttttttttgacacagagggtccaacacatcctattgaattcaatcttgtcaaagttgtcttggacctaaaa

SEQ ID NO: 358402 - DNA, 574 bp, Homo sapiens
ccagaactgtgagaatcaatttctgttgttttaagccacccaatgggtggtaatttgttatggcagccacaggacactgatacaggggcaagagcactgagggagaaaactgtcccagtcggccctgactgctgtctcccagcatggctcagttggtggcagctctgaacctggtgggtgtgggaaagccctttatcctgggatgggactcatggccccaacttacattgcctacagtcctgagcagcagcccatgtaacgtggaggagtatgaactgtctttccttcttcccccaggccacaggggcagagtgctgcacctggctttgagtccagaccagaccygggtgttttctgctgcagctgatgggacggcctctgtatggaattgctactagcacccagcccctctaggtttcagtttccttatttctgagtgaagatgatgatgttggctatgtcttctccatggggtttttatgagtatcaaacaagttgaaatactcttcttgatgtgaatgcctgttctcctgttcttcttttgcagattgctttacttgctctgcttcccaga

SEQ ID NO: 358403 - DNA, 447 bp, Homo sapiens
ttcccttttgagatactttcctgtctttagctcaatctcaacacattgaaaacacaactcattcacttgaaaaacacttaytaaaatctcactatatgctaggcagtatgttaagcatgcatattgctctctctaaaaatcagttctgtaggaatccctttcccctcctgatggtctcatccttatcctggtctcccactcagggaacctcctgattattctgctctgtgcttcctcagttcaccctttgctctcttttcttttgcttcacctagtcacatcctgtgtgcctgacagccagtctgctgtaattgtcttagaactgatcctcttgactccacaccactgctaggttgaacatctaaaagtcctgtgctgatcctctcagtcccctgctcatcaactctcaaggacaacctattaccaaacacctttgacctcaacctc

SEQ ID NO: 358404 - DNA, 602 bp, Homo sapiens
agtgttttgaaatgatgttacctgggtttgagttcttggcattagcctgtatcatctatttggtattattatactattatagctgtttaaaaaaatcttttattactgtttgaatcgttggttgttttgttttaacatcctgaggagtttgaattgagggcttgagggagcatgcgttatattttttggtgctccttcatatgttctgcatatgccagatatcaaatattggttgattatttttttttgctttgacatgaattttttttactaatacatacctattccctatgcccccaaaatcaacacaacaaaacaaaaactttaagaattcaaaagtagaatattatataccaggggagtttaggactcttctgttaaattagtgttaatttgtcaatatayatttttatttttcctgttttttaaatttagatctgtttggtaatgttagtaattcttgccttagaaaattttaggccactgaaagccacagatgtgatagttttctgcaatgcacactcttctttaatggttttaatttgatcttcctaatatgccaggtattacctgtaagaaaatgtttagaagaaaatgagcaa

SEQ ID NO: 358405 - DNA, 604 bp, Homo sapiens
ctgtaataatgatcaaaaatagagaattcttgcaatttctgattccttatgaatatagttaaactggttacaggcagtatgcactgtccatgacccaacctccagtacagctggggtaggatgttaaagaaattacaaccattctaggaaagtttatcccaaggcaacaaaggatcaagtatacaaataggcttaggtgcaataaattgaagaatttaagtgaactgtgatcattggccaggaagagccagattactctcaaagttcatggtcaaagcagtgatggggaaagaaaggaaatgtgaaaaaaagaaaacacaaattatattaactttgaactcacaaatgaagaggtttttacaataaaaagaaactcttgagaactcaaattccttatggactcaatagagaaagagagcttrttgggggcataggctctgttgtaaactattttcacaagattccagaagatcaaaatgaagatgaagcccagaggagatattaacctgtgagtttgtgcttggggtctggatgctcttcccagcatttatatccaagatgtgtaagcgtccatccttcattcctcctccaatggcaaggaccc

SEQ ID NO: 358406 - DNA, 279 bp, Homo sapiens
aatatgcgccctcttgcccctttgcttctttgtagcatagagctgtgggaagaacacaggctttagagtcagagaacctgttggaatcctggcttttccatctactagctgtgtgaacttagccaagtcattaacactcccttycagagcctcagcttcctcatctgcaaaatactaataatatctatttcatatgttgctgtgaagaccagatggaaaagaaattgaggccaggagcggtggcttacgcctgtaatcttagcactttgggaggccaag

SEQ ID NO: 358407 - DNA, 617 bp, Homo sapiens
atcttagcactttgggaggccaaggccggcagatcacctgaggtcaggaattcgaaaccagcctggccaacatggcaaaatcccttctctactgaaaatacaaaaagtagccaggcrtggtggtgcacacctataatcccagctactcgggaggctgaggcacaagaatcacttgaacccaggaggtggaggttgcagtaagccgagattgtgccactgcactccatcctaggtgagagcaagtctccatctcaaaaaaataaaaagtaaaaagaaattgagagaaaactttgtaaaaggcaagaagcaatcactaaaaactggaaacaacccatatccaccaaaatgcctttcgtctgttgaatgaacaagcaaactatagtaaatccacacaatggattcaacaacacaaaagaatgaactattcatacaagcaacatcatggatgtattgggaatgcaatatgctcattgaaagaaccagactcaaaaggctacatattatatggttcaacttataggacaatctggaatagacaaaactatggggacaggaaatagataaatgattgccagggaggagctaactacaaaggagcatagggaatttttttaaat

SEQ ID NO: 358408 - DNA, 552 bp, Homo sapiens
gatgcaggatgtgccctaaacatctgtgtgactggctccttttaaaagttttccaaagatttagcccggcccagtggcttgttcctgtaatcccagcccctcccaaggtttagattagaggtcccctttaggccmcgatgtttagactagccggggcaacatagcaagaccattgtttgtaaaaaaaaaaaaaaaaaaaaaaaaggtttcaaaagatttaatattgtgtttagagaaattagcttggctgaaataagaataaaaccacattcaccagttttctttcttcttcctttctgatctttatgacttttatttcttttccttgccttattaaactggctagaattccagtatactgttggctagaaatggtgagcatgggtatcctttcaccattagccaccgtgttagctgtattttttttgtaaatgctgttcatcagagtgaggaagttcccttctataaatagttttctgagaatttgtatgggggggataccctggattgttgggtttataacttacaatgatgaaatatatatgacaacgg

SEQ ID NO: 358409 - DNA, 590 bp, Homo sapiens
ttagtgatccctctaactttctatacaaagagaacatctaaggtatttaaaaatggattttaacttatttattctaattttatcctctctctctctctctttttttttttttttttttttttaagatggagtcttgctgtcacccaggctggagtgcagcggcatgatctcggctcactacaacctgtgcctcctaggttcaagcgattctyttgcctcagccttcctagtagctgggattacaggcatgcgccaccatgcccggcttattttcgtatttttagtagagaccgggtttctccatgtaggccaggctggtcttgaactcctgacctcatgtgatctgtccccctcaacctcccaaagtgtagggattaatggcgtgagccaccacgccctgccctaattttatcttttaaataaaagtatagaatatctctattattactatagcccagggcatcttcaacttgtaaaatgaattcatgtgcagaaacaggtgggcatttggtcattttcagattcaaaaatggaattgggcaaagaactgtaaaaaacagaattagattaggacagctgatgcaaaccag

SEQ ID NO: 358410 - DNA, 574 bp, Homo sapiens
tgaattcatgtgcagaaacaggtgggcatttggtcattttcagattcaaaaatggaattgggcaaagaactgtaaaaaacagaattagattaggacagctgatgcaaaccagggaagtctcctgccctactcctatgtcttcccccaaatcttttcatttcacttagatacatggtctgaccttcctttgattagagaataatttgggttaataagtagcctcatttacaatatgtttttttcctattatatcagttgtaagtgttcattaatttagttgtagaaaatgagaattacctgtagttttaccttccaaatattccattgttcatactttggtggatttattctgcttttttataacctttggtttaatttttctcatagttataatcatccagttcatagcatttgactcctttaytccacttattcaacatgaactccctccccatgaataagcagcttctttgatgatttctgggatgaatataggacagtgtagcattcaggattcagtgcaattttgatatgctgggttgctttcctgcttctacctacccaaggtcatatg

SEQ ID NO: 358411 - DNA, 609 bp, Homo sapiens
tctattgttgtgtaagcagattacccccaaacttagaagacattgagacaacaaatatttattattgtagtgtctgcgggtcagaaatcaggctgtagcttactgagtgcctttggctcaaggtttctcataaggttgcattgaagcctgtcagtcagggctacaggctcctataaagggtcatttacatgtagagggattgccttctagtttcactcatgtggttgctggtaagccttagcttctcatcacagggctgccttacaacatggcagctagatcctcccaggttaagtgatctcagagtgagaaagagagaaagcggagagagagagagagagaggagacagagagtgtgtrtgtatatgtgtgtctgtgtgtgtgtgtgtgtctgggtttgtgttctggaaagcatgcccagagagaagctatcacatttttataaccagctctcagagtggcatgtatttcatcaaatttgccatattctattcattaaaagcaaggtaattagtccagcccacatctaagaagagagaattacataaggacatgaatatcaggatgcagggatcattggcaaccaacttagaggctgcctatgacaag

SEQ ID NO: 358412 - DNA, 630 bp, Homo sapiens
tcttggaagagagttcgggcctagagaaaaagatcctttcgtcccccagattgaaaagatacattaagtatcttctttgtttcatactctctcaatcatacgtgatcctctatacakgtatacaattctacatgcctttgagactcatgatgaaaactttcccttttttattcccaaccaccgacattttagtcattctttctacatttatttttaaaaaatcaacttattgactataactttcactataggaatggatgagttaaatgctaatatccataagaggggggtgggtctaaaaatataagtgatggaataaatgcagagttccattgagatcaacaattttaacagcattcagaaacgtatttttatattttgctactttattaagcacaaatatatttagtatttgtttaaaagatgtgtatatcttgagacaaataaatgaaaaatttaatcttagttattgccaatggtgctatatatctttccactactagatttcacgaatagagagacaggctacatgatgtgtatatttgtaacaaggagtaagggctacatgagcataggatcatatccctcattatgttagtacctattgatacaactttaaattgaatttag

SEQ ID NO: 358413 - DNA, 596 bp, Homo sapiens
ttaatttatgttacttgaactgcatcttatgagaaaacatatctatataggaaatatttaataaaaacttgataattataattaattgagaacatgttccaaatatgaaatttactcagaagacatatgtgatattttttgggtagtaaaatggtattacccaattttctttccctgaatctggcaaaaattgtcatactgttagttttgtactatacaaccttctaagattagattcactctgtagggaaagtrgtaaaatgaaatatagatccataacatataatatattggccaatgagaagtaatatgtaagtctaggtaacacatttacttgaacaccctagaagaaattgccctgaaatgtatgaatatagtagcccactctgagccttttgctggtgccagtcattaaagaagaaattgatataatttgtaaccaaaaatatatgaatatatttaaaaaactgttttgtgaactgtctgaaataggttagtggaagttaaaagcaatattatccatacacatatacctacacctgaagagatgtctgattttaaaaccccaaatttccatcctagaaatccaagatagc

SEQ ID NO: 358414 - DNA, 624 bp, Homo sapiens
acaaatatttaaaaagaaaatgtattgctcaaagaggcccatttkctagttgtcagagcaaaatcattgttttcagtaaggcaaagaaatttatgttttagtttcctcagaagtagatatatttttttaatgctacaaaaccatggcataaatttaaatggtaataacagattcaactacctaatgtaaaagatgcagtatgctctaagtaaatattaaaaaagccaatataaaaaattctgttacctgttctttcacataacacatttaatttttattctaagagactaaagtacataacttttttttaaatttctacatctgaagtactaaaacaatgcctaccattaattttcttcttcactaattcaatcaataatgatttatcaaatacctacagtatgcctggcagtttcaggtcctggcactgctaaatgcatataatatagtcaacagatgttggttatgcacatgattgaataaagggattcatgtgcatggttgacctaggctgaaaagctaagcacagaacttcaaagtgtacagccgtagtaaacacttttattgatggctacagtaccctctaacctcatactgtagctcaatgtaaactgaagagttttt

SEQ ID NO: 358415 - DNA, 587 bp, Homo sapiens
aaagattttgttaactaaatgactcaacacttatcacatggtagtcactgtagctttaccatatacaagtaaatgtggaacttttcttttggtctcaaatgggaaacagatcatgtaagcttcttactctcttagagmattctgagacttactgtaccatacccacctcacctcccactgagaaaataaacccaggatctacctatcatacaccggtgtcaatttcacagcttttcttctgctgctcgtgaagcctggggatagtatttggatgaatgtagagaaaaatggaatattttggaatagctcaaagtctttttagagactactggaagcagggaggagaatgaggatattacatacttcatgattttcccagtgttgaccttgcttcatatataaaatgaaagacagcaatgagacaatggccataatttaatgactaaagtaaatggtttactgaaggtcagatggattatttttagccttcataataagcaaatcaaatcactgcctgattcatatggtcaaatgatgcacagttgaatataaaaataactaaacatgacagataatttgaactgtgc

SEQ ID NO: 358416 - DNA, 558 bp, Homo sapiens
taaatttaaaaaaaaaagaattataaatggaaaaggagaattctgccagctaaaaaagttaactcattccaaaaataaaaaagtcacatttttataatttgttccaaggatacctaaaggcagtaccatgatacaggtagagacttcccattataggtaaccttatattagaagaggtttccagcctaaagaaaattcaattatcaagattaccttctctttaaacttgttctttgccctaaatgtgagaagtcacatatttcagacagtaagagacatagaggaaaacatacagagaaaatatatactgatggtttaaagaaaactttgagtagttatctgataaataacaatgaccttgtgacaataatactttgtaaatgcttcactgaatattcagtgagkctatgtatgtgtgtgtgtgtgccctcatttgcttaaagacaaataccccctgccattttaaatgatgcttccagaatgggattaagttcatgaactttctgaaaaaaaatccttccacaggacctcattataaatcatactggatcattacca

SEQ ID NO: 358417 - DNA, 602 bp, Homo sapiens
aatagggagggtgatagttttagaaaggcagctgacatctaagtcccatagaaaaaaaaaagtggggctagggtattgggattctgggtcatcaaataaatgctcaatctgccatgggctctaatttttggtctcatttgccttttccctaacaatgtgaatttgcagacatacttgctttagtctctgaatttttcaacatagtgtttttccaactgcaggtcatttttgtagcgtttctcaatctttttgaaaaattgccttctagggagactttttagacatttttcccctaatattttaccctcctgaaatgttaatacctatttatgtactgtgaccttttggaaggccacaaaccattttactgtctaagttttctttgtccctaagaaaccatttttcccctttggggacaatatcacccccattgagaatgcatgatttagaggattgctatcaaatttttttagatgacactaaagaaaaaggaaggtagtaaatgtcagtgtgtatmacaagcagtataacagtaggtattattttataaaaatgttttccaaaattatataatttattgcatgtgtatttatatacactca

SEQ ID NO: 358418 - DNA, 446 bp, Homo sapiens
ggtgataattcatttcatttcttctccaaaaaacacttgtattagcattattaaaaaacaattataaaactggaggattatgtgaacattatgtgaacattaggtgattattaataatacatttactcataaaagagcttrtctttggaataatcacacttgatagatactgtaagtgaatgcagtgaactggaggtatcaataatgccccatagccagaattttaaaagcatgaagcaggaattggacatgacttgtgttcattttatttgatatggtttgtataatttgggcatcactcttatttttaggcagtaataaaaccttaagataaaatgggttgacatctcggttcttagagatgtcctggtagcattaggacagagttatgatctaggtagttgtataaaattaaacctggtggcctatacagaagacagctgcaa

SEQ ID NO: 358419 - DNA, 600 bp, Homo sapiens
gataaaattcaacatctcttcatgataaaaattctcaagaaattcaatgtagaagaaatgtgcctcaatatgataaaggcagtataagacaaatgcacagttaacatcatactgaatgaggawaagctgaaagcttttcctctaaaactggaataagacaaagctgcacattttcatcacccttattcagaatagtactcgaagtccctgcaagaccaattaggcaagagaaagaaacaaagggcatccaaattgaaaaagaggaagtcaaattgtccctctgcagattacatgatctcatatctaggaaagctaaaagctgcatcaaaaacacttagaacttataaataaaacaaataaagtttctggatacaaaatcaacataaaatatcagtaatgttcctgtacactagcagtgaattagctgaaagaaaacaaaaagaaagcaaccttatttataatagctatcaaaaaatacctagatataaatttaatcaaggaggtgaaagatctctacaatgactactacaaaatagtgatgaaagaaattgaagaagacaacatgagaaaaaaatgaaaagacttttcatgttcattgat

SEQ ID NO: 358420 - DNA, 600 bp, Homo sapiens
gataaaattcaacatctcttcatgataaaaattctcaagaaattcaatgtagaagaaatgtgcctcaatatgataaaggcagtataagacaaatgcacagttaacatcatactgaatgaggaaaagctgaaagcttttcctctaaaactggaataagacaaagctgcacattttcatcacycttattcagaatagtactcgaagtccctgcaagaccaattaggcaagagaaagaaacaaagggcatccaaattgaaaaagaggaagtcaaattgtccctctgcagattacatgatctcatatctaggaaagctaaaagctgcatcaaaaacacttagaacttataaataaaacaaataaagtttctggatacaaaatcaacataaaatatcagtaatgttcctgtacactagcagtgaattagctgaaagaaaacaaaaagaaagcaaccttatttataatagctatcaaaaaatacctagatataaatttaatcaaggaggtgaaagatctctacaatgactactacaaaatagtgatgaaagaaattgaagaagacaacatgagaaaaaaatgaaaagacttttcatgttcattgat

SEQ ID NO: 358421 - DNA, 600 bp, Homo sapiens
gataaaattcaacatctcttcatgataaaaattctcaagaaattcaatgtagaagaaatgtgcctcaatatgataaaggcagtataagacaaatgcacagttaacatcatactgaatgaggaaaagctgaaagcttttcctctaaaactggaataagacaaagctgcacattttcatcacccttattcagaatagtactcgaagtccstgcaagaccaattaggcaagagaaagaaacaaagggcatccaaattgaaaaagaggaagtcaaattgtccctctgcagattacatgatctcatatctaggaaagctaaaagctgcatcaaaaacacttagaacttataaataaaacaaataaagtttctggatacaaaatcaacataaaatatcagtaatgttcctgtacactagcagtgaattagctgaaagaaaacaaaaagaaagcaaccttatttataatagctatcaaaaaatacctagatataaatttaatcaaggaggtgaaagatctctacaatgactactacaaaatagtgatgaaagaaattgaagaagacaacatgagaaaaaaatgaaaagacttttcatgttcattgat

SEQ ID NO: 358422 - DNA, 600 bp, Homo sapiens
gataaaattcaacatctcttcatgataaaaattctcaagaaattcaatgtagaagaaatgtgcctcaatatgataaaggcagtataagacaaatgcacagttaacatcatactgaatgaggaaaagctgaaagcttttcctctaaaactggaataagacaaagctgcacattttcatcacccttattcagaatagtactcgaagtccctgcaagaccaattaggcaagagaaagaaacaaagggcatccaaattgaaaaagaggaagtcaaattgtccctctgcagattacatgatctcatatctaggaaagctaaaagctgcatcaaaaacacttagaacttataaataaaacaaataaagtttctggatacaaaatcaacataaaatatcagtaatgttcctgtacactagcagtgaattagctgaaaraaaacaaaaagaaagcaaccttatttataatagctatcaaaaaatacctagatataaatttaatcaaggaggtgaaagatctctacaatgactactacaaaatagtgatgaaagaaattgaagaagacaacatgagaaaaaaatgaaaagacttttcatgttcattgat

SEQ ID NO: 358423 - DNA, 637 bp, Homo sapiens
ctaaattttggtaaaagtgacaagatcatacattgaatacaggacaccttcttcaagaaatgttgctaagtaaacgggttatccatataaagaagaatgaaagtagacccttatctctcaacatataaaaaaacagctgaaaatggattaaatatttaaatatattttctgaaactatgaaatactagaagaaaacatgggggaaaagttccgtgactttagtctggggaaatattttataggtaaggtttcaaaaacacaggcaataaatacaaaaatacataaaggagattctatcaaactaaaagtgttatgcacagcaaagaaaacaatcaacagagtgaaaagacaacctcttgaataggtgaaaatatttgcaaatatccatttacaagtgattaatttccagaacatayagggaactcaaataacttatcaaaaaaaaaaaacccaaatcacccaatttaaaatggccaaaggatctgactaggcaattctcaaaagaaggcatacaaatagccaacaagtatataaaaattatcatcatcactaattataaggaaaattcaaatcaaaaccgcaatgagatatcatctcaacatagttagaatgattattttcaaaaacacaaaaaata

SEQ ID NO: 358424 - DNA, 570 bp, Homo sapiens
attgccaattaccaaataataaattaggcaataattttataattatcatattttctttcctgaatcttaaccatcatttactcagcatgtgcaaagttcaagaagacaagtgcattatctgaaatatcattttccagattacaattgaaaaatatattaattccttatgactgtgaggtatctcactgtcttgtgggcaatctattctgaatattgactggaaatactcttatttgtttctattgaataatacaattaaaacactctgatttgtaaaatttcaatattagcacaccctcttgaatatgttacttaggcatttactgaagttgttccttagaccattaaatcctatagcattctttrtgctgggtgtgtgtggggggcggggacttatttccaagatcaaaaaaattagcaaactctgcaaagtgtttcacttttgaagaataagtacgaacataagaatactgaaagtttttaagagtcctgtagtaaagagatttatataaactaccatttaccaatttagtgtggctacaatttttcataacaaatataaatgtggtt

SEQ ID NO: 358425 - DNA, 608 bp, Homo sapiens
ctgttgtgtagttggaccagttttgaaaggacggcaaaattcttcaggtcctagctgcttagaatctagaatctagaatcacaataatcttttatgagcyttagaaaataaaattttactcagaataattatttctttgagaaaagttacataaaactatgatctgctgtttgtccctctgagataaattttgtgtaatggttaaaatataaggaccatcaccaaaagctgtctaggcttatatctcaaccattataacttggacaaagtatttaacttccctgagcctccaaaagcctagggcttgggagctacgaatatgagattttcccccagcatttaattcctaatataatttttttaaagtttaggtttttttaagtttaaaacaaaagtagaaaaaaaaatttttagctttgatgtatgcaactttaaacatctgtctactcaaacttatttaagattccagggcactttttataattctgagcacagtcaaacactctgaataattgtttccctcccactgaactccctttagaatgtcagttgaaagagatatttctgttgtaaaacattacagttattgttcctattaggcaattgat

SEQ ID NO: 358426 - DNA, 608 bp, Homo sapiens
ctgttgtgtagttggaccagttttgaaaggacggcaaaattcttcaggtcctagctgcttagaatctagaatctagaatcacaataatcttttatgagccttagaaaataaaattttactcagaataattatttctttgagaaaagttacataaaactatgatctgctgtttgtccctctgagataaattttgtgtaatggttaaaatataaggaccatcaccaaaagctgtctaggcttatatctcaaccattataacttggacaaagtatttaacttccctgagcctccaaaagcctagggcttgggagctacgaatatgagattttcccccagcatttaattcctaatataatttttttaaagtttagrtttttttaagtttaaaacaaaagtagaaaaaaaaatttttagctttgatgtatgcaactttaaacatctgtctactcaaacttatttaagattccagggcactttttataattctgagcacagtcaaacactctgaataattgtttccctcccactgaactccctttagaatgtcagttgaaagagatatttctgttgtaaaacattacagttattgttcctattaggcaattgat

SEQ ID NO: 358427 - DNA, 585 bp, Homo sapiens
caccctcaccaaatgctgccgccatgctcttggactccagttttcagaacagtgaaaaataaatttcttttctttatacatttgctagtgtcaggtattccgttatygcaacagaaaatggattaggacaaagagtaatgcctacttttgaataaggtgtgaagggacaaatgagcaaatgcatgcaaaatgccatgataactagtatatgttaattaacaaatgttagcttttattgatattcatctaggccctgttaatactaatgcattaacatatgcactaaaataggtgctcatgaaacaataaatattaaaattacataattatcagtgaatcttggtttttcatttctctcaaactgtcccccttacagtataaatatttttcatcaagtaaacatacaatacaagcctgagctgagaaattttttgaaaatatagcactgcattccttcctcaaaccataacatatagacagttaagagtagagatgtttaggcatttctaactcttcataagtagtccaaatgtaagttgattaaagaacctacagagaaaaatacaattacaataaagtataatc

SEQ ID NO: 358428 - DNA, 542 bp, Homo sapiens
atgatgagtatgaatgagtttccctcacaatggaaaacccagtcaattaatgtgttcactcaatggacataaacccaaatctgctacttagtagttttgtcttgtgcagattatttatattttaggccttggtattcttataagaaaaatgagattgctaattcacacttcatagagcttttctaagaattataatgagaattggtacaattaaggcacccaataaatggtagaaaatataattactaatagtaaaaaataatccctttgagtctcatttcaaataaacmcagcatacatatttcctaaaattgttgggaaattatataagatagcatgtatcatatgaaatgcctgatacttaacacaatttttattttaaaatatccttgtctttagtccaagaatagaaaaagatcaaatctgtcttccatgatcctacctcccctctttgttctcccccttttttttcttagctgccaatgtgggatctgttgtcctctccacattttccccagcccagagatatgggacccttgtga

SEQ ID NO: 358429 - DNA, 542 bp, Homo sapiens
atgatgagtatgaatgagtttccctcacaatggaaaacccagtcaattaatgtgttcactcaatggacataaacccaaatctgctacttagtagttttgtcttgtgcagattatttatattttaggccttggtattcttataagaaaaatgagattgctaattcacacttcatagagcttttctaagaattataatgagaattggtacaattaaggcacccaataaatggtagaaaatataattactaatagtaaaaaataatccctttgagtctcatttcaaataaacacagcatacatatttcctaaaattgttgggaaattatataagatagcatgtatcatatgaaatgcctgatacttaacacaatttttattttaaaatatccttgtctttagtccaagaatagaaaaagaycaaatctgtcttccatgatcctacctcccctctttgttctcccccttttttttcttagctgccaatgtgggatctgttgtcctctccacattttccccagcccagagatatgggacccttgtga

SEQ ID NO: 358430 - DNA, 542 bp, Homo sapiens
atgatgagtatgaatgagtttccctcacaatggaaaacccagtcaattaatgtgttcactcaatggacataaacccaaatctgctacttagtagttttgtcttgtgcagattatttatattttaggccttggtattcttataagaaaaatgagattgctaattcacacttcatagagcttttctaagaattataatgagaattggtacaattaaggcacccaataaatggtagaaaatataattactaatagtaaaaaataatccctttgagtctcatttcaaataaacacagcatacatatttcctaaaattgttgggaaattatataagatagcatgtatcatatgaaatgcctgatacttaacacaatttttattttaaaatatccttgtctttagtccaagaatagaaaaagatcaaatctgtcttccatgatcctacctcccctctttgttctcccccttttttttcttagctgccartgtgggatctgttgtcctctccacattttccccagcccagagatatgggacccttgtga

SEQ ID NO: 358431 - DNA, 621 bp, Homo sapiens
aatatattctatctaaagatcaaaatgtaaatttgagtgcatgcatatttcccattataattcttttccccggcctttttttttttttttttttttttttttgagatgggatcctgctctctcacccaggctggagtgcagtggcatgatctcggcttaccgcaacctccgccttctgggttcaaggggttctcgtccctcagcctcccaaggagctgagattayaggcacctgccaccacgcctggctaacttttgtattttttccagagatgcgttttcaccatgttggccatactggtctgaaactcctggcctcaagtgatctgtccccctcagcctcctagagtcctgggattacaagtgtgagccaccatgcccagccttcccatcataattctttagtagtgaactctaagtttctgtttgtttttattaaaaaaaatcagtgatcataaaacatgaagaagaaattatttaagggttatttatataacacaatattacattttaaaagacatgtgcaattttaaaacaatgaagttttgaacctgtaaaaaaatacatagaaaagatttgaggagttcccaaaaggccatttttagttcctttgaaatcatat

SEQ ID NO: 358432 - DNA, 473 bp, Homo sapiens
gtggctcatgcctgtaatccagcactttgggaggccaaggcgggcagatcacttgaggccaggagttggagaccagcctggccaacatggcaaaactccacctctactgaaaatacaaaaattggccaagtgtggtggtgcacacctgtagtcccagctactcaggaggctgaggcacaaaaattgcttgaacccagarggcagatgttacattgagctgagatcacgccactgcactcaagcctgggcaacagagcaagaccctatctcaaaaaaaagaaaaaaaaattgaggtgacagaaagtggcatctgcttttgaggagtattctgcatattttttccttagggtgagtcccacacttttagtcagcttgtcatcaattgggtggaaagttagtaaaaactttctggatattgtttattgctttaacccagcttctggggaagaatggagttacaaaatattcccaat

SEQ ID NO: 358433 - DNA, 541 bp, Homo sapiens
aacagaggccattagagactcaggttcagaagtgagctccgccgcctgaatttacctgtctgttccaacaactctcattccccttacagtcaatggaaaatatttgatgactggtggtatatttgcaagggtattaaaattatctttggtccttctttagtcttcttgagagcttcagtgattccatatagttctccatttttcatcagcaactttaatacatgatcgctaattcaggtttggcatggccaaaatggagttcttaattttcactgcacttcctctctccgtagacacacaccaaacctgttctttttcttcccccattttagtaaattgcaacatttggtccaaaacaaaacccaaggagtcaccttgartgctccctttgcatcattttctgtggtgaggttagtatcatgtggtatgacctaaagcatgcagtgtgttagtgacttttaaatacaaaggccaacaaaatttcctgttttctcatcatctcactaagaaacatacagtgctatgactctgctggcacacc

SEQ ID NO: 358434 - DNA, 541 bp, Homo sapiens
aacagaggccattagagactcaggttcagaagtgagctccgccgcctgaatttacctgtctgttccaacaactctcattccccttacagtcaatggaaaatatttgatgactggtggtatatttgcaagggtattaaaattatctttggtccttctttagtcttcttgagagcttcagtgattccatatagttctccatttttcatcagcaactttaatacatgatcgctaattcaggtttggcatggccaaaatggagttcttaattttcactgcacttcctctctccgtagacacacaccaaacctgttctttttcttcccccattttagtaaattgcaacatttggtccaaaacaaaacccaaggagtcaccttgagtgctccctttgcatcattttctgtggtgaggttagtatcatgtggtatgacctaaagcatgcagtgtgttagtgacttttaaatacaaaggccaacaaaakttcctgttttctcatcatctcactaagaaacatacagtgctatgactctgctggcacacc

SEQ ID NO: 358435 - DNA, 563 bp, Homo sapiens
aaattcaagcaacctgggaaattgtgtcagggtaatctgatattttccttttagtatgggtcaaatatgcatttaayggacaattcaagtaaaaccgtttgagatctcacttcctttagttttctcgaagtgtcaccttcatggttgtctgttctgatgcttgaggtttctgtgtttaaggggaaaggtgctaacagaatatagaattttctgaagtgtttttccctcattctgttgctgctgcttgtgtttcaggggagttggcagctgccttttagttccctgatagcttaggaaaacctgctctgtaagcatgttaattttcttccctctagaaaaagcttgctaatctcatgaggtattgcaaagtttaaattgaagtaaatagaaaaattgctaagttgaagaaaaaaagttccacagagctttttatgagtgggaacacatctgccacacaatagaatatgacatccttcagcttactgctttcctaggacatgtgaaggaattgtttagtatgcattggtttggagcactagcaggtaaaagtttaattactgatc

SEQ ID NO: 358436 - DNA, 616 bp, Homo sapiens
tgtgatgaacatttatcagataacatattaagcatccttctacccacttccctgcacaaatagggaagaaagaacaaattaactgagtctgaagctttacwgaggctgttctccaaatctgtcctattccttccccaataacacccatattctccttccatatcttatctttgcaaaggctgcaaaaagttttctcttgcttgaaacttgttcagactggaaaagctaggaataaggcttcctttacatttagctgtttgaaatgatgtgtcattacactcacgtgtgagttctcttcagagtaatctgtacacttcccacacagtcatcatgaagaaacagacagctggtaaaccaggaatacagggaaagaaactccttgatgacaatttacactatggtgtagcagaattctctgaggaagaaatcaatggaagcttgtcttgtgaatgaagtggaatttgtgctgaatcttaaaggatcaggggatttgtataaataggctggaggtttatggtcattttagaaaagaaaacaacttgtgcaaagggtgctaagattgaaactgcatttgggagcttagtgggaagaagtaccttgcaggaacagattgtct

SEQ ID NO: 358437 - DNA, 519 bp, Homo sapiens
gaaaacattcataagagtaacttgaaagaaaatttctgatcctagaaaatcagtgataataaggtttgtctgttttcttctccttcgaaatgtatgattcagtcaccttttctcaaatgttctggttttaaatagctatccctgaataataaataaccacaaaaactcagtggtgtaaaaataaagcatttatttctcagtcatttgtctgcaaattggctgtggttttgtagaactaagctgagctggactgggtttggcttggggctatagaatgaattcaggtctgttccaaatgtctttcaatattctgggaccagccagctatcaggaatatattctttccatagcaattatggaagtgtaagagagtaagatgaatcatgcaarctcatttcaatcttgttaatatcctgtcagcaaaaacaagtcatatgacccagcctgaagtcaagaagcctgatagtatggagagataagggtgtgtgggtggagtaagcatttattcgtagtgatcta

SEQ ID NO: 358438 - DNA, 570 bp, Homo sapiens
atctaaataatatatgagtgtaaggaaagaacacactggataataatgttcagtgtagaccagacaagcatctgtaacctggcatttatcttttaatgtagatattgaaagagttaaaaaggcttccaatactttatttcaaaatatgcattttatttatatgtcacaaatactkggcagttaatgaaatgtttttgaactccatcagtaagaatcatagttcagtgaatggagaaaacaaaacaaaacaaatagtatgtgtgataatccccagttcaaacttggctttggttctaaaattatagagattatatataataagacagtgctcccttctttttgaagggctttatatataatgactcacaatttcctcttaggaaaagcttacaggtgttttatctgattgaggaatttcaaactgttcgtaactacttagtttttgatacgtttctgctctcagtataatatgtattatgcaaattctatatattatacatatataatacatatttttcagtctgattaataagaatttaaatgaagtaattcagtttaaggtactaagag

SEQ ID NO: 358439 - DNA, 640 bp, Homo sapiens
ttaaaaaaaaaaaatagggatttacttaaatgaattaatctaaaagaatgaactcttcagagtgtgattgatgggtaaaacgtccattttaggttagggccacctcctcatggcttttrtgtcacaccctctatgtgatcacacatcgtattcgtaagacagccagcactgcagctgaggcggcatgcatcctgtctcatggctcactgatggaaaagctactgtctcgtcaattttgttttgccactgaccatcattgctgtgatctaacacatgtactgttttcaagtttcctatgagccacagaaatattcaccaagtgtcacctaaattattggaaaattacttaattccttaatctaatgaagatttgcgttaaaaaaaacaaaagcccaaagaatccaaatacacatctggcagcaatttaattcatttagaatttattgcctacagtatcttgagatttgtagatggaatgattcttataaaatcaaaatataattttataaatatgtttgtgtctaactgcattttattcagagtgtatatttacatttacttaaaaaatcattgagggcaagaatttactcatataaaagctttatatgttagaagcaggtaacagcgaagtgagtgatac

SEQ ID NO: 358440 - DNA, 640 bp, Homo sapiens
ttaaaaaaaaaaaatagggatttacttaaatgaattaatctaaaagaatgaactcttcagagtgtgattgatgggtaaaacgtccattttaggttagggccacctcctcatggcttttgtgtcacaccctctatgtgatcacacatcgtattcgtaagacagccagcactgcagctgaggcggcatgcatcctgtctcatggctcactgatggaaaagctactgtctcgtcaattttgttttgccactgaccatcattgctgtgatctaacacatgtactgttttcaagtttcctatgagccacagaaatattcaccaagtgtcacctaaattattggaaaattacttaattccttaatctaatgaagatttgcgttaaaaaaaacaaaagcccaaagaatccaaatacacatctggcagcaatttaattcatttagaatttattgcctacagtatcttgagatttgtagatggaatgattcttataaaatcaaaatrtaattttataaatatgtttgtgtctaactgcattttattcagagtgtatatttacatttacttaaaaaatcattgagggcaagaatttactcatataaaagctttatatgttagaagcaggtaacagcgaagtgagtgatac

SEQ ID NO: 358441 - DNA, 345 bp, Homo sapiens
tcaaaatataattttataaatatgtttgtgtctaactgcattttattcagagtgtatatttacatttacttaaaaaatcattgagggcaagaatttactcatrtaaaagctttatatgttagaagcaggtaacagcgaagtgagtgatacaagtcagatttccccagtaaagggaaaatgccttgctaggtgaggagattaatgtaatttcaattttgtcatggtaataatctggttgtatccatatttacaagagcaggaggaaatgaaagaaaatcgtcaatttgtattttaaagatatgtcaattgtgttttgtgccagtgagggaaaaaatgaatcttcat

SEQ ID NO: 358442 - DNA, 596 bp, Homo sapiens
aggtaacagcgaagtgagtgatacaagtcagatttccccagtaaagggaaaatgmcttgctaggtgaggagattaatgtaatttcaattttgtcatggtaataatctggttgtatccatatttacaagagcaggaggaaatgaaagaaaatcgtcaatttgtattttaaagatatgtcaattgtgttttgtgccagtgagggaaaaaatgaatcttcatctgattaaaataacttttgatccctcagaataagtcttgaaaaaaggcaatgctatttgaaagcatcaatacaaaccacaaactgcctctacagctgtgtttatgattaggtaaagtgcataacatatcacatctcagccaatggaaatgcagaggtctaaaaaggataacttaccacctcactcaactagcacctataagggaaagtgattagttccacatcagccattgtatataaaagcatcaccagtagtagatgaggccacataatcaattaatctgagtctgcaaagaaaaatcaaggttttcgtttaagatgtatgtggagcaacaactacaaaaaactttatgatagcaaatgttaggcctactggcaa

SEQ ID NO: 358443 - DNA, 551 bp, Homo sapiens
gatacaagtcagatttccccagtaaagggaaaatgccttgctaggtgaggagattaatgtaatttcaattttgtcatggtrataatctggttgtatccatatttacaagagcaggaggaaatgaaagaaaatcgtcaatttgtattttaaagatatgtcaattgtgttttgtgccagtgagggaaaaaatgaatcttcatctgattaaaataacttttgatccctcagaataagtcttgaaaaaaggcaatgctatttgaaagcatcaatacaaaccacaaactgcctctacagctgtgtttatgattaggtaaagtgcataacatatcacatctcagccaatggaaatgcagaggtctaaaaaggataacttaccacctcactcaactagcacctataagggaaagtgattagttccacatcagccattgtatataaaagcatcaccagtagtagatgaggccacataatcaattaatctgagtctgcaaagaaaaatcaaggttttcgtttaagatgtatgtggagcaacaactacaaaaaactttatg

SEQ ID NO: 358444 - DNA, 648 bp, Homo sapiens
aaccggagggggctcagggaagacaggacagcttgaggtgtgaccacatgtggaagaattcactgatcaccttattaacatttaccacgcctttaatgtgtgccaaaggctgtgtaaaatgtgttaacttgcactgtgtagttccatcttcacatgaccctataaaggtaatactgtcactacccctattttattgagggagaaatgtaggcacagaaaagttaggtaacttactcaagttcacacagtaagtagcagaggcaggactagaacaaagcagtctgactccagaggtgcgctcttttttttttttttttttaattaaaaaaagttcaatgggtttttggggaacaggtggtgwttggttacgtaagttctttagtggtgatttctgagattttggtgcactcatcacccaagcagtgtacactgtacccaatgtgtagtcttttattcctcaccaccccccagcgctttcctccgagttcccaaagtccaattgtatcattcctatacctttgcctccgaggtgcactcttaaccattggactctgctgccttccaagtggacaaatgaggatgagaggaactgcattttgggcagagggaatagcatatgcaaaggcatggtggcacgaaaacatggtg

SEQ ID NO: 358445 - DNA, 553 bp, Homo sapiens
cttatgtgaagatgaagattaagtgcattatccatccccttccttgaagtcctgcctcatctagatamcccaaatgaacacacatttccaggtaacaagaacctggataaaggcctacttgtggtgaggacttaaagatggaatacagtatgccaggtcaccacaaatcaacctttccttgccacctgcacccttagtcctctttctgggccttcaaaagctgaatttcctgaacaaacagaatagagcaaattaattatggcacaaggaaggtaaaggctgtcaacctgaagtttcattttcccttaactagtacaaacaaatgtcaaaacagtcatgacaagaagaattcaacatattttaatacagttagttattctaataatttcctactttccagcagatttttgtccccagctccatgtagaagggtccagcactgccaaatctgttttttgggtttttttgagatgaaatctcactctattgcccaggctggagcacagtggtgcaatctcggcttgctacaacttccacatcccaggttcaagca

SEQ ID NO: 358446 - DNA, 466 bp, Homo sapiens
ataactactccccactccttatgtgtgggctgtgcatagtgacttccttccaaaaagtacaatatggtggggggtggggggtggaagagtaatttagagtggagaaacctgacaatatctcagccaggtgatcaagttgaacatcaatagtgttaagttgtgataagagtgtgttcgcttgataggttgagaaaggtattttatctctatggtcttcytccgaaaaacaaactacccaagtctcaccatgagaaaacatcagacaaatttcaatggagggacatccaacaatatacatgaccaatacacttcaaaactgtcaagggtatcaaaaagaaagaaagacgcagaaactatcacagccaagaagagcctgagaaggcgtgactaaatgtaacatggtaaaaaggccattaggtaaaaactaaaaaaatcggaataaagtatggaattttattaatgataa

SEQ ID NO: 358447 - DNA, 528 bp, Homo sapiens
cttccctaacactactatataaacaccaacatctatttacagcagataaacggtactatcccaagtgctggccctatcaaaacaatatcaaaagagttcagatctaaaaggcaaagtatcaagctgattctctgttactgttgttgttttaacttcctaaacatctargtgaaagcttgtgtctagaaagggacctgccctaaacttctctttgaacgcccattctaagatgttaatgttaaatcaagcaaaacttaaagatactaaatattcctaacacagctaagaactagtagtatctctgtataggatctaacaagccacagtcagaaaatggtagcctttgagacgatgtgaatcaaactaccagaatggcttttggctagtccctgaaatctatttccatatgtcttgtggtttcagcaatcagtggtcagggagaggagaaaaggcagcctctttctaaaggttccagaaatcaaaggccagtgaccagatatgaaccgccaaaccaccgcagcaacaacc

SEQ ID NO: 358448 - DNA, 581 bp, Homo sapiens
tagtcacctaatgtctatgagtctcactttgttcattggtagcaacatttaactcataggattgttagccgaattcaattcagtgagattatacatgttcatgtgcccattcttgtacactcctagtaaacattagtttcctccacaatccttgttcttctcaaattacgtgtgggtctgtctcttctactagacccttagctctttttttaggaaagaactataattcattcatctatctccccagaattagcatcaaataactatttttcaagtaaaatatttcttgactttgcaaaaaaatggtctgtcagtcctggtttgtggccaactatgtgctaggtatgctcatagaagatgaaaggcaggaayatacttcctatcctcaggttagttactggctaggtggaacaaagaatctatgcatatgaaacatgcaggaagaatgtataaatagtacagaataattcaagttctaaaatacataatttataaactatggattctgtatgatcatgaaggagacagtgctgtgggaaggaggtaagtaagggggttacttaggaggcaatgtcagatat

SEQ ID NO: 358449 - DNA, 405 bp, Homo sapiens
agttaattgagttttaaaaatgaataatggactcattctcttaaaggaagaaaccatcacctacacaatcttcatttcttgtagcctgtattttatatctttattttaatcagagatttttaaacctgggtatccagggatgccattttttttaatagaattcagagagtcactaaaattttattcaaaatgttgtgtgtgtgtgtgtgtgtgtgtgtgwgagagagagagagagagagagagagagagagagagagagagagaaatggtccacagctagctttatactcctgaaaaaattaagaaaccctagatcaatttcctcattttatcttgattcagatattcactgaatgctgagctatgtgctaaatactatcctaaatattttaactaaagatttct

SEQ ID NO: 358450 - DNA, 504 bp, Homo sapiens
tgttctggtgctttttacatgttaacacatttagtctaaacaagaatcctaggaggtagatattctccccactttacagataaggaaactggccagagtagatgagtaggtggaagggaggaattgaccaagatgctcctccagacttgcaatgtggttgagaaattggtggcaccactgactatacttggaaagagtcgatatctattggaagaaaagctgttttagacaggcttagtttctgatgaaagaggggtatacaaatggaagacattctttggcatttagagataaggaatgtawtcaataaaagtgtattgggtactgatatggtttggatatgtgtctcctctaaatctcatgttgaagtatgatccctggtcttggaggtgggaggtatttgggccataggggtgaatccgtcaggatggtttggtgccattgtcacagtaatgaatgagttctcactctgagttcaccaagatctgattgtttaaaagagcg

SEQ ID NO: 358451 - DNA, 635 bp, Homo sapiens
gatacacaatcccttccccaaatatttgtttgctgccccatagctacgagttgacagttgttagacatggaacaggttaccaaatgaggttgcagaaatctctttctctggaaattctttagaagagcaatgtgctttctctctagctagggaaattctcttgattccaagctgttacaatgagattactgggctgctttcttcttccattaataagaatataaaaaagaattcttaggtcaccaggtcaagccccagaggccttctgggtagtgtgactctgacagtcatctttctgggatggtttagatggtgtggggtgaggggttgggaatggcgatgttcctcagctgtggatgagcatgatcataaggcatttccttrtaaggctggggaaatagtagtggctacctagctagatcaggtttaaatgcatgccacagttactcttccagtttcttgtgagaggtctctgtttgaaagatagagacgctgagtctttgtgactgaaggccatgattgtaatattgagcactctgtaggtctgttgaggggattcataacatacattgaagaaaatattttccttgctcctactaggttactcccgccatgattcttagaaagatttgagt

SEQ ID NO: 358452 - DNA, 609 bp, Homo sapiens
taggtcatccgtaagctagggaatgccagtagtgtggctcagttcaagtccaaaagccttgaaaccagggaagccgacaatgcagtcctgartaagtctgagggtgaaggcctgagagccccaggcaggctgctagtgcaagacctagagtccaaaggaagatgaacctggagtctgatgtctaagggcaggaggagaaaaggtgcctcactgcaaaagggagagagggaggaaggtaagcaatctgagtatcccccttgttccacctgctttgttctaatcacacccattactgattagatggtgcccactcacatcaagggtggctcttcctctcccagtccactgactccacatgtcaatctcctctggaaacaccctcacagacacacccagaaacagtgcttcactaaccagctaggcatccctcaatccagtccagttgatatctaatattgagcatcacactgagtatttcactttttgatgctattgtgaatgggattattttcttaattttattttttatcttttagttgctattaagtagaaatccagttgatatttatatgttagtcttgcatcctctcatcttactaaaattactta

SEQ ID NO: 358453 - DNA, 559 bp, Homo sapiens
ctgtccgcacacttgaagggaggcagtgtaggactaggctggaaatgtgtgcattctttttaggaagtagaaagcaagctttttagagtggatgatgcaaacatttatatgaataaactctagctctgtatttagtaaccataacatgtccacacaaacaggtcttgctgagatgcctgtacttgggagaattgatgctgactttgggttaaactgaagctacctggacatctctttcttcttccttacaatatgtattaccttcrtattattgatcacctgggtgggaccctgatgttaagcagggagcacagcgttggagagtgtagggggttggcccatgtaactgttaaaggttaagttcctctagccctacacactcaacaaacacagccagcactctcagatttccagaatgccttccaggtgagaatcacggttttggggctttcctagagtggcatttcaggctcactaggatacctaccctgcccctgataccaggtgtggtgactcctggagacttctcagccatgcagtgtgggtggactggcctctg

SEQ ID NO: 358454 - DNA, 572 bp, Homo sapiens
gtggtttccttttctttgcagcacagagaatttgcaatgcggcaggaggtctcctggtccccggtttaatacccttttttgctcagttgattgaatacaaattccatgtctagcactgaaagctttccacacttaccccaaacaactgttcatccctgcctcccaaaatatgctcccagttgcccctgcacatacagacatttttggccctagcctacataaaatgcctgtatggtatggcaggaagggtaaaggctttgattcrggtgaagaaggggcttcatctccagctggtggtgatgagacctactggcaactttggcatgtgtggcttggcatgaggtatgcccagtatagtaaacgtttatgaaacactagctcccccacccctccctgctcttggtgctctgattccaggtgtcctgtgaaattggattcatagttctttatcaaatgggcatggggcacctattggtgcctgtgtggtgctggacagaaggacatctatgtgcttgtcccctgttcactaaaccaggtgagacacacacacaccccaacacacacacacacac

SEQ ID NO: 358455 - DNA, 576 bp, Homo sapiens
ctatatacatagtcacccagatccttgcctcttacaagtatttgagaatatccagtggtaatattttgcatatctctgctgcaacattatgctgtggactatcagtattctctttgttactggaaatagagttattagtgtctttaaatataatcaaaacaggtagccaattccagaaatcccagaaccaattcagaaaactgacccttaagattgagttcctgcaaataccattatttcattcctttttgttgttgagcagtatttcatgcatacatataccacattttctttatytactcattgactgaagtgctgtaaactcagcactcagactcatcatttgggctggttccatatttttgcaattgtgaattgtgctgctataacttagatgaaattggagaacattattataagtgaagtaactcaggaatggaaaaccaaatattgtatgttctcacttataagtgggagctaagctatgaggacataaaggcataagaatgatataatggactttgggaacttaggggaaagggaaggaggggagcgagggataaaagactacacatt

SEQ ID NO: 358456 - DNA, 669 bp, Homo sapiens
cagggtaaatcagcaggctggagacctagcaggcagccactgctgtggttagaatgcaaaggcagtttgccagcagaattccttcttgcttggtcagtcttttgttctatttaggactccaattgattggatgatgcccatccccattatggagggctatctgtcttactcaaaatccaccaatctgaatgttaccctcatccaagaacaccctcacagaaacatccagaataaygtttgaccccatttttgtcattgtggtgcaaccaagttgacacataaaattaactatcacaaccagttataatttctactaaataaatacaattgatatgtaagagaggacagaaaattaaattatgtgaaatgctcaattaaaaccatagtagaaaaagaggaggaaaaataaacaaataataattcaatgagtagaagacatttacaaatgtggctggctttaacaaaatatatcagcactccctttaaacatactagatgtcccaacgaaaataaagaggttgtcagtatgctttagaaaatgaaaaacaaaatcaacatatatattgttcataagattcctacttaaaatataatgacgctataggttaagagcaaagagatggagaaatatatatcaccctaactctaattacaacagtagaattagct

SEQ ID NO: 358457 - DNA, 581 bp, Homo sapiens
attgttctcttgaaacccagcttgtcaaatctgaactcctggtcccctaaccagcttcttctccaaatttccatacttcatgtcttcagcacaacccttcttctgtgtgagaagatgttgaagtatggtgttgttttgcaagacagcaagtaagatggacagacattggcaagcttttgggcgaggtaaacgtgttcaaatccagaattatccacacatcatggctatagagagagtgaaaaattatccatggtgcatccctggccttaatgtttccttgtagtctccctctactctaaaactgagacaaaatcttgctgattttgctctttaatgactcttactttgtctttttatcctctgatttgaactcttaccatgtcacaactgggctgttgcagcagttccttcttggtttgccctgtatttacccaatctcrtttatgcatgcatgcatgcattcatttaaaaataattaatgaacgttattcatgacataggtgctagggaggtgacaacatcaaacagagaagaatctttcttctaaaggatttggtagttgtaggggaaggaggtgggta

SEQ ID NO: 358458 - DNA, 640 bp, Homo sapiens
ttttatcctctgatttgaactcttaccatgtcacaactgggctgttgcagcagttccttcttggtttgccctgtatttacccaatctcatttatgcatgcatgcatgcattcatttaaaaataattaatgaacgttattcatgacataggtgctagggaggtgacaacatcaaacagagaagaatctttcttctaaaggatttggtagttgtaggggaaggaggtgggkaagataataacaacaaaagtaagtcaagtccattaaaatatactgagatagtgctggggttttcagaggagagagagaaactactctgtatgcagtggataagagggcttctcagaggaatggccttcaggccatgactttgaagaatgggcagataggatggctcgcctgagcaagatggaggaaggactagtttcaacaaaggaaaatacaagaaccagagagtacattgtgcatgctgggtttagtaagctgtttggtgtagtgagaacacagggtatgtttatgggcattaatgagaggtgaggtgtgctaggagtttccagtgtgggctgtaaatgtcaggctcagagttttgatttagttggaaggcaatggggaacttttaagatttggaggcagcatgacagt

SEQ ID NO: 358459 - DNA, 513 bp, Homo sapiens
ctagttcccttgctcacgcggggaatggcaggcattaaagccccactgagttaccacaattcatcgagtcctgttttagaagatgtctaaggcygggcaaggtagctgacacctggtaatcctagcactttgggaggccaaggtgggtggatcatgaggtcaggagatggagaccatcctggccaacatggtgaaaccctgtctctactaagaatacaaaaaaaaaaaaaaaaaagttagctgggcatggtggcacttgcctgtaatctcagctacttgagaccctgaggcaagaggattgcttgaaccagggagtcagaggttgcagtgagccgagatcacaccactgcactccagtctggcaacagagcaactcagtctcaaaataaaaaaagaagatgtctggaacttgcatgaatatctctttctttccttgtctatgtcccctaggccttggggttaggactctgagctgggattcctctgtaggctaagaccaatcctcattcttat

SEQ ID NO: 358460 - DNA, 513 bp, Homo sapiens
ctagttcccttgctcacgcggggaatggcaggcattaaagccccactgagttaccacaattcatcgagtcctgttttagaagatgtctaaggctgggcaaggtagctgacacctggtaatcctagcactttgggaggccaaggtgggtggatcatgaggtcaggagatggagaccatcctggccaacatggtgaaaccctgtctctactaagaatacaaaaaaaaaaaaaaaaaagttagctgggcatggtggcacttgcctgtaatctcagctacttgrgaccctgaggcaagaggattgcttgaaccagggagtcagaggttgcagtgagccgagatcacaccactgcactccagtctggcaacagagcaactcagtctcaaaataaaaaaagaagatgtctggaacttgcatgaatatctctttctttccttgtctatgtcccctaggccttggggttaggactctgagctgggattcctctgtaggctaagaccaatcctcattcttat

SEQ ID NO: 358461 - DNA, 513 bp, Homo sapiens
ctagttcccttgctcacgcggggaatggcaggcattaaagccccactgagttaccacaattcatcgagtcctgttttagaagatgtctaaggctgggcaaggtagctgacacctggtaatcctagcactttgggaggccaaggtgggtggatcatgaggtcaggagatggagaccatcctggccaacatggtgaaaccctgtctctactaagaatacaaaaaaaaaaaaaaaaaagttagctgggcatggtggcacttgcctgtaatctcagctacttgagaccctgaggcaagaggattgcttgaaccagggagtcagaggttgcartgagccgagatcacaccactgcactccagtctggcaacagagcaactcagtctcaaaataaaaaaagaagatgtctggaacttgcatgaatatctctttctttccttgtctatgtcccctaggccttggggttaggactctgagctgggattcctctgtaggctaagaccaatcctcattcttat

SEQ ID NO: 358462 - DNA, 513 bp, Homo sapiens
ctagttcccttgctcacgcggggaatggcaggcattaaagccccactgagttaccacaattcatcgagtcctgttttagaagatgtctaaggctgggcaaggtagctgacacctggtaatcctagcactttgggaggccaaggtgggtggatcatgaggtcaggagatggagaccatcctggccaacatggtgaaaccctgtctctactaagaatacaaaaaaaaaaaaaaaaaagttagctgggcatggtggcacttgcctgtaatctcagctacttgagaccctgaggcaagaggattgcttgaaccagggagtcagaggttgcagtgagccgagatcrcaccactgcactccagtctggcaacagagcaactcagtctcaaaataaaaaaagaagatgtctggaacttgcatgaatatctctttctttccttgtctatgtcccctaggccttggggttaggactctgagctgggattcctctgtaggctaagaccaatcctcattcttat

SEQ ID NO: 358463 - DNA, 450 bp, Homo sapiens
ttctgtgtataccaaaatccatgcatattcaagttttcgaagtcagtcctgtggaatccacatataacacaaatgggaaaattagtgaggtgtggtgacaagcacctgtagtcccagctacttgtgaggctgaggcaggaggattgcttgagcccaggaggttgaggctgcagtgagccataattgcaccactgcactccagtctgggcamcagagtgagacagaaggttgactttttaatagaatttttctgttcacttgaagatatggtcaggattgtggcatatgaaaattcttcataaaataactatctaatccaattaatgctggaattgggaacagcagaagtgtcatctcagagctactcacaatgaaaggtgatgtctggggctcaggtgtgttgaggtccccatgcctggactatgggtgatgagtgggatttacttgtcc

SEQ ID NO: 358464 - DNA, 575 bp, Homo sapiens
gcaagcttgtttacagacttttcctcatcctctgcttagttttccaagaaccctcacagtggaaatggagtctctgggaaaatgacctaaatctttgggttaccaggggagaaatatgcctcctttgtcaattaataaatggaacacstgccttaaaatccagggagttctgctagaatgaatcactccctaagaccctgacctatgcatggaacatgaaaaactgaagtttaactgggcgcagtggatcacgcctgtaatcccagcactttgggaggctgaggtgggcggatcacctgaggtcaaaagttctagaccagcctggccaacacggtgaaaccccgtctctactaaaaatacaaaaattagttgggcatgatggtggacacctgtaatcccagctactcgggaggctgaagcaggaaaatcgcttgaacccggaaggcggacgttgcagttacttctagaagaatttccattagccctttgaaatccttcaacattcatgaaggccaaagagttttcacttaatttaatctgatgggtatgtgaccagagtctttctagggaataga

SEQ ID NO: 358465 - DNA, 575 bp, Homo sapiens
gcaagcttgtttacagacttttcctcatcctctgcttagttttccaagaaccctcacagtggaaatggagtctctgggaaaatgacctaaatctttgggttaccaggggagaaatatgcctcctttgtcaattaataaatggaacacgtgccttaaaatccagggagttctgctagaatgaatcactccctaagaccctgacctatgcatggaacatgaaaaactgaagtttaactgggcgcagtggatcacgcctgtaatcccagcactttgggaggctgaggtgggcggatcacctgaggtcaaaagttctagaccagcctggccaacacggtgaaaccccgtctctactaaaaatacaaaaattagttgggcatgatggtggacacctgtaatcccagctactcgggaggctgaagcaggaaaatcgcttgaacccggaaggcggacgttgcagttacttctagaagaatttccattagccctttgaaatccttcaacattcatgaaggccaaagagttttcacytaatttaatctgatgggtatgtgaccagagtctttctagggaataga

SEQ ID NO: 358466 - DNA, 470 bp, Homo sapiens
ccctgggtgtgatgctctgaccaggcgccccgggtgtaagtactcaggcttctcgtgcttcctcttcatactacaccttttggaacccaagaacctcgcggctgctccttctggcaatggaaatgtcagaaagcaaaggaaatttaagctccactcagagaaaagagaagataccaaaaagtctagggcaacagactgtggtaagatgaatgkgtcatatatgctgatggggctgaaagaatgatctggaaagccagggcatggtaatcagagagtggggtccatgatgagaccctgtcagggcagggctggagttactgctcatggaagtctgggagtggaaggccgaggtgggtgcaggacaaggtcctgggagaaaagaaggtcaagaagaaaaggaggtcggataggacagacttgtagacaagaattaaggtagccagagttttggagaaaatggcagaggcact

SEQ ID NO: 358467 - DNA, 454 bp, Homo sapiens
tcccagcactttggcagcagaggcaggcggatcgctttgagctcagggcaacatagccaaaaccccctccctagccccacccccaccccgtccctaccaaaaatacaaaacagcagggcatatagcctgtagycccagctactcaagaggctgaggcaagagaatcacttgaacccaggaggcagacgttgcagtgagccaagaccacgccactgccggcctggatgacagagcaagactccacctcaaaaaaacaaaaacaaacacaaggttaagagggaccccagaccttacagatataagtttaagagggacccctaagcaaaaaatgccaaccctttttctcccaatcattgaaacaccaggagggtgtaatagttttgcagcctagctgtagcaggctgatgtccccaagatgcccatatcctaatcccgggaactggtgaacatgacc

SEQ ID NO: 358468 - DNA, 454 bp, Homo sapiens
tcccagcactttggcagcagaggcaggcggatcgctttgagctcagggcaacatagccaaaaccccctccctagccccacccccaccccgtccctaccaaaaatacaaaacagcagggcatatagcctgtagccccagctactcaagaggctgaggcargagaatcacttgaacccaggaggcagacgttgcagtgagccaagaccacgccactgccggcctggatgacagagcaagactccacctcaaaaaaacaaaaacaaacacaaggttaagagggaccccagaccttacagatataagtttaagagggacccctaagcaaaaaatgccaaccctttttctcccaatcattgaaacaccaggagggtgtaatagttttgcagcctagctgtagcaggctgatgtccccaagatgcccatatcctaatcccgggaactggtgaacatgacc

SEQ ID NO: 358469 - DNA, 454 bp, Homo sapiens
tcccagcactttggcagcagaggcaggcggatcgctttgagctcagggcaacatagccaaaaccccctccctagccccacccccaccccgtccctaccaaaaatacaaaacagcagggcatatagcctgtagccccagctactcaagaggctgaggcaagagaatcacttgaacccaggaggcagacgttgcagtgagccaagaccacgccactgccrgcctggatgacagagcaagactccacctcaaaaaaacaaaaacaaacacaaggttaagagggaccccagaccttacagatataagtttaagagggacccctaagcaaaaaatgccaaccctttttctcccaatcattgaaacaccaggagggtgtaatagttttgcagcctagctgtagcaggctgatgtccccaagatgcccatatcctaatcccgggaactggtgaacatgacc

SEQ ID NO: 358470 - DNA, 465 bp, Homo sapiens
atatggaactagcagaggccaggcattgtggctcatgcctgtaatcccagcaatttgggaagcctaggcaggaggatcgcttgaggccaggagttggagaccaatcagygctaaatagtgagactctgtgtctaccaaaaaaagaaacattagccaggtgtggtggtggtgcacacccgtagttccagctacttgggagtctggggtgggagaatcccttgagcctgggaagtctacactacagtgagccaagattgtgtcactgcactccagcctgggcgacagagtgagaccctgtcttagaaagaaaaaagaaaagaaagtgttaatccccctatgggaatctcctcttctcctgccctctctggaacctcacttgtcagttcttcctcccactttcctgtatctttaacctatcccccacttttagctccttcccatcataatttaaattactcaaacttc

SEQ ID NO: 358471 - DNA, 560 bp, Homo sapiens
gattatagttgtgagccttaccaagaattccagacacagccaataatatagcaccttatttggtgtcgggggatgggggggttgggggtgtcagtcagggaagtagggggatgtaaaaggtytgaaaaaagggatacaactagaaatgatttaaatgacctctttggctcaaaattcataattatttatttaccattcataccttttattagccctcaaatgttaaacctcaaccttccttttgcctcatcagatttcatagatatattttcaggtactcagaaaaatagctaagctatcaagagtaaaagtttgtattttttttttaaaaaaaaaaaaaaaaaaaaaaaagaatttctcaaagctatgagtaatctgtaccaagtgaattaaaaaaataagttttattctagtatttttatcaaaaccatagaacagagaatactgtgaactatacatggggtattctacattctaaattctatacttagctttttaaaatcctttttgacttgtcttaggctgaatgaagtatttgagtcctaacatgaacattgcat

SEQ ID NO: 358472 - DNA, 560 bp, Homo sapiens
gattatagttgtgagccttaccaagaattccagacacagccaataatatagcaccttatttggtgtcgggggatgggggggttgggggtgtcagtcagggaagtagggggatgtaaaaggtttgaaaaaagggatacaactagaaatgatttaaatgacctctttggctcaaaattcataattatttatttaccattcataccttttattagccctcaaatgttaaacctcaaccttccttttgcctcatcagatttcatagatatattytcaggtactcagaaaaatagctaagctatcaagagtaaaagtttgtattttttttttaaaaaaaaaaaaaaaaaaaaaaaagaatttctcaaagctatgagtaatctgtaccaagtgaattaaaaaaataagttttattctagtatttttatcaaaaccatagaacagagaatactgtgaactatacatggggtattctacattctaaattctatacttagctttttaaaatcctttttgacttgtcttaggctgaatgaagtatttgagtcctaacatgaacattgcat

SEQ ID NO: 358473 - DNA, 560 bp, Homo sapiens
gattatagttgtgagccttaccaagaattccagacacagccaataatatagcaccttatttggtgtcgggggatgggggggttgggggtgtcagtcagggaagtagggggatgtaaaaggtttgaaaaaagggatacaactagaaatgatttaaatgacctctttggctcaaaattcataattatttatttaccattcataccttttattagccctcaaatgttaaacctcaaccttccttttgcctcatcagatttcatagatatattttcaggtactcagaaaaatagctaagctatcaagagtaaaagtttgtattytttttttaaaaaaaaaaaaaaaaaaaaaaaagaatttctcaaagctatgagtaatctgtaccaagtgaattaaaaaaataagttttattctagtatttttatcaaaaccatagaacagagaatactgtgaactatacatggggtattctacattctaaattctatacttagctttttaaaatcctttttgacttgtcttaggctgaatgaagtatttgagtcctaacatgaacattgcat

SEQ ID NO: 358474 - DNA, 549 bp, Homo sapiens
acccatcaactcagaagtaaaaagctgtgtttcttggccccctgtgaggttgcagatctagttacctgggagattattgcctttcttatgctgcacctcaggactttcaaaaatcatccagagagctaacagcagtggtyttcagtctgagccttttgaaaggaaaaaaaaaaaaaaatcaagagcagaggcagtttggaatatcctcccttaggcttcttttaggtgtgactctattggtatgctcagcagcttatgctattctgctctatatgagtgatttgtggatgtcttttatgatggtttaaaaatcatctcagacttctttttctttgtcacatgggtagcaatttaagtagattaaataagagttaacccatctcaaactgggtatctatttcatgtagagagtaacagcagtccattccaattaaggtgttgcctaaggtggaagttaggagccttaaacagagatgtgtaacaaaatggaatatttgagtcacactctgaagactagtgattctgaaatttagtttgttggaaatataa

SEQ ID NO: 358475 - DNA, 549 bp, Homo sapiens
acccatcaactcagaagtaaaaagctgtgtttcttggccccctgtgaggttgcagatctagttacctgggagattattgcctttcttatgctgcacctcaggactttcaaaaatcatccagagagctaacagcagtggtcttcagtytgagccttttgaaaggaaaaaaaaaaaaaaatcaagagcagaggcagtttggaatatcctcccttaggcttcttttaggtgtgactctattggtatgctcagcagcttatgctattctgctctatatgagtgatttgtggatgtcttttatgatggtttaaaaatcatctcagacttctttttctttgtcacatgggtagcaatttaagtagattaaataagagttaacccatctcaaactgggtatctatttcatgtagagagtaacagcagtccattccaattaaggtgttgcctaaggtggaagttaggagccttaaacagagatgtgtaacaaaatggaatatttgagtcacactctgaagactagtgattctgaaatttagtttgttggaaatataa

SEQ ID NO: 358476 - DNA, 541 bp, Homo sapiens
cttcagaattatgtaaatgctatgcatacctggtattgattgtctgccctaaagctacctggcayatctaaaaggcaagccttctttagttaattgcaaggcccgcatcagcgtttatagtgaaaataaagagattatattatattatgttatttatattatattatagaggtgaaaacaaagagattatcaatgggctggcaggaacaggcaaagagaaaagccactgatgctataaagccttacacaagtgggtttcatagcactggttctggcttgcatttccttaaatttccagtttcatagacatccccaaatgccaaaaaataggacaagtaattcagaatgagatgctaggtcacctttgcagggcattctaatgggctgcattagagctgcttcacttacaggatgagattggacagcaaagcggaggctgaggattctcctggagcatcaggggcatgaaggggaggaggtgttttccctccgcctccaggtaaagggaaagggggtgctaaggccgctcttcaaaaaactt

SEQ ID NO: 358477 - DNA, 541 bp, Homo sapiens
cttcagaattatgtaaatgctatgcatacctggtattgattgtctgccctaaagctacctggcacatctaaaaggcaagccttctttagttaattgcaaggcccgcatcagcgtttatagtgaaaataaagagattatattatattatgttatttatattatattatagaggtgaaaacaaagagattatcaatgggctggcaggaacaggcaaagagaaaagccactgatgctataaagccttacacaagtgggtttcatagcactggttctggcttgcatttccttaaatttccagtttcatagacatccccaaatgccaaaaaataggacaagtarttcagaatgagatgctaggtcacctttgcagggcattctaatgggctgcattagagctgcttcacttacaggatgagattggacagcaaagcggaggctgaggattctcctggagcatcaggggcatgaaggggaggaggtgttttccctccgcctccaggtaaagggaaagggggtgctaaggccgctcttcaaaaaactt

SEQ ID NO: 358478 - DNA, 541 bp, Homo sapiens
cttcagaattatgtaaatgctatgcatacctggtattgattgtctgccctaaagctacctggcacatctaaaaggcaagccttctttagttaattgcaaggcccgcatcagcgtttatagtgaaaataaagagattatattatattatgttatttatattatattatagaggtgaaaacaaagagattatcaatgggctggcaggaacaggcaaagagaaaagccactgatgctataaagccttacacaagtgggtttcatagcactggttctggcttgcatttccttaaatttccagtttcatagacatccccaaatgccaaaaaataggacaagtaawtcagaatgagatgctaggtcacctttgcagggcattctaatgggctgcattagagctgcttcacttacaggatgagattggacagcaaagcggaggctgaggattctcctggagcatcaggggcatgaaggggaggaggtgttttccctccgcctccaggtaaagggaaagggggtgctaaggccgctcttcaaaaaactt

SEQ ID NO: 358479 - DNA, 642 bp, Homo sapiens
gtacttcttttacattgaagatataagcacaattagatatgtagagtcatgggttcagggcctgtgagagcctctgttttcaggaaagcccagaatgcagtcagtaatggccactgtaagggtatgtatggtatagccaaagaggacaatttcttacacaaagaggtcaatttcttatggtagaagttcatggacaatttgtggstattttgggtggtccaaagaccccagaaaactggatgttaatagagcctctagagtgaaagagtctctaataggccttaatggaaatgcctgttgccttgcaatttagatggattttggagcatttcagtgtaggatgctacaatcaaggtttgctgatttgtcagcaacagtataaaaggcttaagtaaaatttgtaactgaggaatatgttgcctccagaccccaaaaaggcctaaaagatgtttgccttctttaaaaaaaattgtgggtgctgtgtgttgacagtggtgggggtagccatttgttgacagtgttagggatagagtggaccttagtttaccaaataatttttggaaatttgtggagtcttggaggttgtggactctggtactatttgtgtggccctggcctgttccctttcttcatgctcctttg

SEQ ID NO: 358480 - DNA, 642 bp, Homo sapiens
gtacttcttttacattgaagatataagcacaattagatatgtagagtcatgggttcagggcctgtgagagcctctgttttcaggaaagcccagaatgcagtcagtaatggccactgtaagggtatgtatggtatagccaaagaggacaatttcttacacaaagaggtcaatttcttatggtagaagttcatggacaatttgtgggtattttgggtggtccaaagaccccagaaaactggatgttaatagagcctctagagtgaaagagtctctaataggccttaatggaaatgcctgttgycttgcaatttagatggattttggagcatttcagtgtaggatgctacaatcaaggtttgctgatttgtcagcaacagtataaaaggcttaagtaaaatttgtaactgaggaatatgttgcctccagaccccaaaaaggcctaaaagatgtttgccttctttaaaaaaaattgtgggtgctgtgtgttgacagtggtgggggtagccatttgttgacagtgttagggatagagtggaccttagtttaccaaataatttttggaaatttgtggagtcttggaggttgtggactctggtactatttgtgtggccctggcctgttccctttcttcatgctcctttg

SEQ ID NO: 358481 - DNA, 641 bp, Homo sapiens
tgctattggttggtaggtagaccgtgtgctgcaatgtcttattcatttgctctgtggyagcaaaggcaacaaactcacgactatgaactcctctaacttgctgttttcttcaatttgcaacggacttttttttcttttcttttttttttttttttgatatgaggtctcgctctgtcacccaggctggagtgcagtggtgccatcacagctcactgcagcctcgacctcccaggctcaagttaccctcctgctttagccttccaagtagctggaactacaggagtatgccactatgcctggcttatgtcttttaaactttttgttgagacaggatcttactatgttgtccaggctggtctcaaactcatgggctcaagcaatgcacccacctcagtctcccaaagtgctgggattataggcatgggccaccacacccagccttacaaaggccatttttagcactgcaggtgatgtgttgctgccccaactgtatcccgtttactatataattactgtggacacaggctaattccaactctaatatttgcttcactgtacctgatgatgctctctaaattcagagaccactctactcacatgccagacatgcttgaaatgccaagatttaatatccaccaggg

SEQ ID NO: 358482 - DNA, 641 bp, Homo sapiens
tgctattggttggtaggtagaccgtgtgctgcaatgtcttattcatttgctctgtggtagcaaaggcaacaaactcacgactatgaactcctctaacttgctgttttcttcaatttgcaacggacttttttttcttttcttttttttttttttttgatatgaggtctcgctctgtcacccaggctggagtgcagtggtgccatcacagctcactgcagcctcgamctcccaggctcaagttaccctcctgctttagccttccaagtagctggaactacaggagtatgccactatgcctggcttatgtcttttaaactttttgttgagacaggatcttactatgttgtccaggctggtctcaaactcatgggctcaagcaatgcacccacctcagtctcccaaagtgctgggattataggcatgggccaccacacccagccttacaaaggccatttttagcactgcaggtgatgtgttgctgccccaactgtatcccgtttactatataattactgtggacacaggctaattccaactctaatatttgcttcactgtacctgatgatgctctctaaattcagagaccactctactcacatgccagacatgcttgaaatgccaagatttaatatccaccaggg

SEQ ID NO: 358483 - DNA, 641 bp, Homo sapiens
tgctattggttggtaggtagaccgtgtgctgcaatgtcttattcatttgctctgtggtagcaaaggcaacaaactcacgactatgaactcctctaacttgctgttttcttcaatttgcaacggacttttttttcttttcttttttttttttttttgatatgaggtctcgctctgtcacccaggctggagtgcagtggtgccatcacagctcactgcagcctcgacctcccaggctcaagttaccctcctgctttagccttccaagtagctggaactacaggagtatgccactatgcctggcttatgtcttttaaactttttgttgagacaggatcttactatgttgtccaggctggtctcaaactcatgggctcaagcaatgcacccacctcagtctcccaaagtgctgggattataggcatgggccaccacacccagccttacaaaggccatttttagcactgcaggtgatgtgttgctgccccaactgtatcccgtttactatataattactgtggacacaggctaattccaactctaatatttgcytcactgtacctgatgatgctctctaaattcagagaccactctactcacatgccagacatgcttgaaatgccaagatttaatatccaccaggg

SEQ ID NO: 358484 - DNA, 615 bp, Homo sapiens
tcatactgaggaaaaccacaagtgaatccattaactacttcagtgacacacatccatttcaaacaatgaagaccttccatccaaatttactagtgtgtcacagccgcactttaatccttccttctttatctagaatatagcaacttcctctaatactttaaaagaaccttggtcaacatactccatcaacactctctttgtccttcctaatactctttattttgtgttatttaaagatttttgtaaaagtatcttcccccctttaaaatgtcaagttttacttgtttaaaatatatgtgctactgtacctccataaaccactggctgggcctagtgrcaagaatatgagttggctcctctttaggaaagatgtcataattccccaacaccatcttcactctgtagaatatggcctccaattcttcatttaacaaagcgattctgttgaaaagaacaaccatctaacacaaacattcataaaatagttaaaatggttaattacctttatgtttttcagccaagcattgctttatttcagcattgtcagcataattttattcaccataatatgtaatgtagattgtcatgttgttgctaaaatttaataaattgagc

SEQ ID NO: 358485 - DNA, 615 bp, Homo sapiens
tcatactgaggaaaaccacaagtgaatccattaactacttcagtgacacacatccatttcaaacaatgaagaccttccatccaaatttactagtgtgtcacagccgcactttaatccttccttctttatctagaatatagcaacttcctctaatactttaaaagaaccttggtcaacatactccatcaacactctctttgtccttcctaatactctttattttgtgttatttaaagatttttgtaaaagtatcttcccccctttaaaatgtcaagttttacttgtttaaaatatatgtgctactgtacctccataaaccactggctgggcctagtggcaagaatatgagttggctcctctttaggaaagatgtcataattccccaacaccatcttcactctgtagaatatggcctccaattcttcatttaacaaagcgattctgttgaaaagaacaaccatctaacacaaacattcataaaatagttaaaatggttaattacctttatgtttttcagccaagcattgctttatttcagcattgtcagcataattttattcacyataatatgtaatgtagattgtcatgttgttgctaaaatttaataaattgagc

SEQ ID NO: 358486 - DNA, 595 bp, Homo sapiens
tcagatgaagtcctttctgcctgagctaaaaagcagcatttggaaaagttcatgttacaatttcctatgatcctaaaatagaaaccttactgagattagttttttgaaaaagaaaaacacatatcaatagcatcagaaatacaaaaaaaatttattaatttaaatgccactttacaatgtgagattatgaattactcgtttcaaaaatgcaactgaactcgatgatttaagggaatgccgaactgtattttgtaattgcaaaattctgtagtggcacaatacagtgtaaagtacaaagaaaagaacgkaaaaactcacgtcttaaaccgcatcttggatatgaggcagctattagaaatatcttactttatgaaatacaacctatattgtattcaaataataataattacatttccattgatataccttataacttatatttttaaaatttagttttatcccaaaacacatttcagtggtgcccttttctctgtcactaaagaggatggagaaggttacccatgatggaataaaaaaatcattaaataaaaatgacgcttggtgtcaatagccttttctacttaccatattgttt

SEQ ID NO: 358487 - DNA, 595 bp, Homo sapiens
tcagatgaagtcctttctgcctgagctaaaaagcagcatttggaaaagttcatgttacaatttcctatgatcctaaaatagaaaccttactgagattagttttttgaaaaagaaaaacacatatcaatagcatcagaaatacaaaaaaaatttattaatttaaatgccactttacaatgtgagattatgaattactcgtttcaaaaatgcaactgaactcgatgatttaagggaatgccgaactgtattttgtaattgcaaaattctgtagtggcacaatacagtgtaaagtacaaagaaaagaacggaaaaactcacgtcttaaaccgcatcttggatatgaggcagctattagaaatatcttactttatgaaatacaacctatattgtattcaaataataataattacatttccattgatataccttataacttatatttttaaaatttagttttatcccaaaacacatttcagtggtgcccttttctctgtcactaaagaggatggagaagrttacccatgatggaataaaaaaatcattaaataaaaatgacgcttggtgtcaatagccttttctacttaccatattgttt

SEQ ID NO: 358488 - DNA, 424 bp, Homo sapiens
catgtgttactcgagcaatactaaaaattgtatttaaaatataaactgaaagatctggtaaagaccttagaaaaggtctattattacaaattagaaaaggcttatttattttggaatattaacttttcccacttccaatagtagcccattgttttcacaaagttcactctctgattaactaaaatatacttcataaatattttttgtcktataaaaaatgatgatgattaaaattaagtcttttctggtggtgaagccatattcacaggtaagatacttgaaattatctatgaatattttgttttcttagtatacatatatgtatgtgtgtatatatatatgcatacatgtacaaaatatttgttactttctcctgttttatttgattaagaatatagaaaacaaagtctacaaacatacaatt

SEQ ID NO: 358489 - DNA, 604 bp, Homo sapiens
tccataaaacatgaatttagcttgaaattggcaaggtagaaaaataatctactactcagaattagttaataaatgtgtaatattgatgtctttcctctatgttacctaagcaactactcgaaaaggatccccttgttaatccactttatattcaaatatttcattcaatttttgatataaaatagaatatttttacctggccgtttatacctggtttatgtgattgtataaaatgaggcatttaaaaaggattctttccactaagaacattcaaaatacttgcatatgtgcttcatgttctgagaagcagcatgcaatgtcagtgattgatgagctagttatttcagaattccattttgtgatagtatttcagaaatgttaagtcttgtggcagttttgccagatcaaaaagccataattcagtgtcgaccataatgctgagcagttagttctggccctgcagtttgatgccatctttacattcaaagatctatmccccatacaccactgtcacataaaaaacaccccatcgcactgtacaatttggcatgattgtctaagaggcttggactgaactggcattaattagctatgtcacactatt

SEQ ID NO: 358490 - DNA, 628 bp, Homo sapiens
ttgtaacatgattgttcatcagttggatgtttcagagatgacacaaagaaaagtagccaaattcgatgcaacgaaaattttcatctcatatcatttcaactgctccctgtcctaattaaatcatccacataggtcgagtcagtggttttcaaacactaagatctcctttagcaaaccacacaatgtagattaatagatggcttcaaaaatctatactattaattattatttttataattgtgatgttaagctcaggaggtgcttttatatatataataaaatattgacaataataagaataataattgctgctattttcagagttcactatctcaattggcaaacaggatgtgttacattacaggaactcaacaaataagcataatgaataactccttctaatgatgagatgaggctggaataataacaaaccaacagctcactgagttagcatgtagaagtatgcctctgtataggattcaatgaagaggtttgctgttacgaatgatgaaaaaatatagagaaccttatattcatggatgctatcttatccagctcctygtcattcagattattttcatctcttaaagctttgacaagcaattcatccgtcaagtagggatcaact

SEQ ID NO: 358491 - DNA, 556 bp, Homo sapiens
tgacatagcttaagactaacctagaagagcagcaggtgactgaatcactcagaagcaaaaaagaatatgaatcagaatggcccactgrcattatggagcagtgcgtggctaccaaagaaggactgcctgactcacgacacaaaattggtgaaggtaatggaaaacttcctttggttctagtagtgatgacaatataggatagagaatccttgtaatcacatctgccacacttaggtgctacagagcaaggggacataacacagatagatgacagccaacagaaagtcaaaagctgattcacacgtctgtacagaactcaaagcctaagtgtcagagctgtaggtagcctagagggctaaacttgcgcgatgtctaacgtgagtgttacctaaatcagcgtgccatctctatgatcatagcccaatctcacctgatcccatggaggaaatactggagccatgaaacaacctcataagtccttgggcatatgttgaacccataactgtgggaaagggttgaagaggactcagagaaactagaccaaagcccatgtggg

SEQ ID NO: 358492 - DNA, 556 bp, Homo sapiens
tgacatagcttaagactaacctagaagagcagcaggtgactgaatcactcagaagcaaaaaagaatatgaatcagaatggcccactgacattatggagcagtgcgtggctaccaawgaaggactgcctgactcacgacacaaaattggtgaaggtaatggaaaacttcctttggttctagtagtgatgacaatataggatagagaatccttgtaatcacatctgccacacttaggtgctacagagcaaggggacataacacagatagatgacagccaacagaaagtcaaaagctgattcacacgtctgtacagaactcaaagcctaagtgtcagagctgtaggtagcctagagggctaaacttgcgcgatgtctaacgtgagtgttacctaaatcagcgtgccatctctatgatcatagcccaatctcacctgatcccatggaggaaatactggagccatgaaacaacctcataagtccttgggcatatgttgaacccataactgtgggaaagggttgaagaggactcagagaaactagaccaaagcccatgtggg

SEQ ID NO: 358493 - DNA, 530 bp, Homo sapiens
attatagccctaaatcttaaaaggttttgcattccttccctatctttcttgtttcctctttggaccctgctacctccacaagaacaagactggactagctactagaatacaagaaaccatatggaacacagcccagttatctcagtcaaagccatcctggactattctatggcaagatgatctcaaacatatgtgatagactagaaaatccatctacatctctcttaactgtctctagacatgacatatgagggagcacagttgagaacaaaactattgtgcagctgacctatagacatatgaacattaaaaataattgtcatttttagtcattaatatttggagtggcttgttacatagcaatagacaactaayaccaacggctttcttgagttatttttaatgactagtgttaatgtcccatgagaaccaacactgctttagcttctcaggacctggcaattccgagtgcatcagtagaccatattcttaatatagatctggcaaacccatcaagggaatgagagcat

SEQ ID NO: 358494 - DNA, 544 bp, Homo sapiens
atactcatggaaacatgaaaacatttttaaaaacataatgttgactgaaataaagccaaaatgaaataaataagcaatatagctcaatacayttaatgtaaatgaaaataacacatctgacttaataaaaaacttttccaaaaaaaaaaaaaaattggagaggcaaagcaagatggccaaataaaaggctccagtagtcatctgtcccacaggagcacctaatttaacaactatctacctacacaaaaacaccttcatgaggaccaaaaatcaaatgagcactcacagtaccttgttttaactccatatctgaaagaggcactgaagaaggtaggaaagacagtcttgaattactgatgccatcccttccccattcacccacagaagtgccttgccacagagaaaatctgtgcactcaggagaggagaacacagtgactgtgagtctttgcattgatctcattgctgtcttgtcatagcagaaagcaaaactaggttggaactaagctcacatcaatctacggagggcacatttagaatagcac

SEQ ID NO: 358495 - DNA, 514 bp, Homo sapiens
taacattttcaacaggttttgtggaacagccaatataatgaaaatacaaactgaaattgtaaaatatgctgcacatgtattgacttgggtctggatgattaaccttgattgatactatagtctagttaacataattagttagccatagtacgtatacctcatgttgtctttagcacaagagataataattttgtggaaaactaagttttatttggaaaattaccactttcaatacaaatactcagagaaactttcaactcyacctaagtaaatcatcttgagaataatatcttagtgataatacaaattaataattgcagtgggtcaagtgggagttttaaaaattcaagaagcaaaccaaaaaattatcacagtctgggcaacatggagagaccttatctctacaaaaaggaaaaataaataaatatgctgggcatggtagtgctcacctgtgatacaagatgctcagaagattgaggtaggaagatcctttgagacaaggaggtagaagctg

SEQ ID NO: 358496 - DNA, 595 bp, Homo sapiens
gatgtgactgaacttctaaatcgctgtggtaaaacttgaacagatgagttgcatcttacgaataacctaaagaagtggtttcttcagagatgaaatttattcctagggaagatgctatgaacattatcaaaattacaacaaaaattacataacccgggccatgtcctttaaatatggctttcccaggtgcacacaacaatgtgaggagtggggtggagcgtgtgtggtgtgtggmtgccacctgggcaagagccatggtggaccatgagttgagtaaattctggagggattctgcctctattggagcctttgcagccaggcagttgtgaactatgagctagagtgaagcagaaatctaggaagacgagctgcaagttggtcataagtgaaccaggactgaattgggatattttccccaaaaatggccttaagacatttttctcttgagaaaattataaagattatcccatggctccaagtttaaaagaactatgtgttttattgaacagagagagcagaggagttatgtggacttgttggttaaatatacaaagatttctgcaaattccaaaactatcagaataaagaaaaaatg

SEQ ID NO: 358497 - DNA, 558 bp, Homo sapiens
ttggagaaattttaaaaatgcaggatgagctcttaaagccaatttccagaaaagtacccaaactgtccttgatgaatttaggaaattctaaacagtcttctgtttctgagcaattgtctgttccttcagatggctctagttgaccgaaatctggatggccttctgcatttcagaagcccaaaggacaattgccatatgaacttcaggactatgttgaagatacatcagaatacctagcttctcaggaaggaaattttgtttataakttatttagacttcaagatctgttgtttctcatgtgctgcagtgtccagaggatagagacaagaccacattctcaaagaacagaagaaaatcagaagacaatttccagttgatgtactaccaaaagtagagtatcaagcttgttatggagttgaagctctgattgaaagtgaattttgtcacttaaggactgaaagtttattacattccaacagctcattttatgttgggcatattgatgcatttacttcaaagcattttctactggaagaaactacctcagaagaattaaac

SEQ ID NO: 358498 - DNA, 441 bp, Homo sapiens
gtaactgtgaagtgtatactactcttaagtagaaagactatgatgaccaaacaaaaaaaataactacaacaactttttaagatgcagacaatacaataaaatataaataaaaacaacaaaatgtaacaaaagctggggatgacattgaggtatagggtttttttagttgactttgcttctttgtttatgcaagcagtgttaagctgttatcagctcaaaakaatgggttataagatagcatttgtaagaatcatgttaacatcaaatcagaaaatcatgcagtggatacataagaaataaaaagcaagaaattaaattataccaccctagaaagtcactgttcactaataggaagacaggaaggaaagaaaggagaggggaccacaaactaaccagaaaacaaataacaaaatgacagaagtaagtcctgactcatgaata

SEQ ID NO: 358499 - DNA, 594 bp, Homo sapiens
tttcagcttctgattcttcaagaagttagattcaccttgagctcaagactccatctctaccaacatgccttgacaagtctgagctggctggaggtataggttagacaggctttctgaggactgattatatgaaagaacagagtaaggaagagctggagcgctggacaatccagctgtgatctaggggtgtttctgtgttgagagtgtttccctgtgaacagatatcacatcccttttaaaacaaaaccaaaccaaacaaaacagcttcaatttccgtaatagagttcttccaggtaatttggacaaaataagtatttttctacaactgtcaactcagtctttattgtcttttctgtggaaaagcacattctgtataacacatcccttgtactatttgtaggtcatgttgtttttcatatttgcccagcaaatccacctgcatttaacgggcagttctgatgtttgtttaatcatgatgtcccaataaggaaaactaaaaactcataaagaaaatagcaaagtgacagaaartgaggataaagggattcttagactgacctgtaataacccatgaaggagcatttaacatggtgc

SEQ ID NO: 358500 - DNA, 486 bp, Homo sapiens
tttatgtcatggattaaattagttgggaagaaaatcaacttgacattttcctgatgatgtttaattgtctgcttcccattaccacctttattttataaaatcattgtgtgtgctacagtaatttctgttaaattctagatatcacggttgaggacttcattatttgttgagatgawtataccaaatcacataccatacacaagattggctgataagaaagcatctcaaatacaaaataataattaaaagtagattgagcttgtatatggaatattcaatttaaaacatgacctatctgagcaaattagaatttttaaagagaaacattacctaaaataactactgttatttttcggggttccatatgtattcttatatgtttcttcctaattgcttcttgaaacttaattttgtcttttattgcaatcttagagataacctggactgctttgggaggcaagcaaagagtgatactttttttgtgtt

SEQ ID NO: 358501 - DNA, 520 bp, Homo sapiens
ggaccaattcagtgaagtctatttactgcacactgtgcagtttctcacattgctcttcagaggggacaggcttgggtatgtgcagagtattcacctaaccttcacacagatgactgtgattttatctggggttttagctccttgtctctttcactgatcttcctattaaactttggatgatctgttgcgaatggcatcaaatctagttacctttcactaattactagctggttgttgtattgtttttaacaatgctctggggcataaaattttccatagtcacatccaaatagagtgtggccccttttgcaggattaaacggaaacgttttcrtcaggccggactttgaggcttgctttgaaccctcaaaagtcaatgtcttttgagagagtgatagcaatttctattcttacagcatgcatctcccccctggacagaaactcttccactgcttctgaccaggaggcaagaatagtggcccagttctcttagaatgaaaattctgtcctacgtttggaca

SEQ ID NO: 358502 - DNA, 591 bp, Homo sapiens
ctacctgaatgctaaatatgtttcttcttgccaccactrtgtgacaacagacccactggatattcctgatcagatttgatgaactctgccaaaatggtgactttccttcttgtctcctttttccctccaaccctgtcccttgaacaagaatccttagattctcatcccacgcataatcatggtgagtaggtcctacagctcctgtgaagtattctcaatttccctccttattaggccctgcttgtctttagctgggttatatcatgacttaaccctagagaccagtaggagaactggggacaaatcttgaggtgcacgaaggaagccttttcaccatcttcaaaagaagggtagactgttagccttaaataagaagcagtaagccacttcaccctcaaggcttaggggaatttagggaattctaggtccaataaatctagatgtccccatcgcatgtgtcaaggtcacattctttcctaactggagtcttggtcctagcatagcaaacctacttatattgagagttaaaccatctttgaagctctgccactcctgtgattaagtcctgcacctagtccccaactttctctg

SEQ ID NO: 358503 - DNA, 591 bp, Homo sapiens
ctacctgaatgctaaatatgtttcttcttgccaccactatgtgacaacagacccactggatattcctgatcagatttgatgaactctgccaaaatggtgactttccttcttgtctcctttttccctccaaccctgtcccttgaacaagaatccttagattctcatcccacgcataatcatggtgagtaggtcctacagctcctktgaagtattctcaatttccctccttattaggccctgcttgtctttagctgggttatatcatgacttaaccctagagaccagtaggagaactggggacaaatcttgaggtgcacgaaggaagccttttcaccatcttcaaaagaagggtagactgttagccttaaataagaagcagtaagccacttcaccctcaaggcttaggggaatttagggaattctaggtccaataaatctagatgtccccatcgcatgtgtcaaggtcacattctttcctaactggagtcttggtcctagcatagcaaacctacttatattgagagttaaaccatctttgaagctctgccactcctgtgattaagtcctgcacctagtccccaactttctctg

SEQ ID NO: 358504 - DNA, 569 bp, Homo sapiens
aaatcttctagttatttgaagtcagatgttatacaagttcaacatttatatctatattgccaggagacaacactttcaaccaagtttgcatggcactatcttctcatgttggtttattcacctgaaaatgtagggcaggtcttgttatctctcctttcctgctgcatttttaacccccaaactaaaagtcaaaatgcagtgacagttctctgaaatgcaaagaagttagaggatgaactccagcagggaaaaataatgttttaccaatgttgctgccacataccaagtgggtagagtgggacwttatataaaagtcatgctcaaaagtcagtagaaaagaagataatggaatgactagacttagtgagatctacacaataaaactcttcatggcacacacaattttcagttgtgacagtcgaattgaattagtactctttatattgtttaaaaaaaatggtcacttagttcatccattttgggacatgtccaggaaaatcatgaacttatacaattctacaatagaaatcattaagacccatagcaggtttcctatgtatggaattatc

SEQ ID NO: 358505 - DNA, 571 bp, Homo sapiens
aatgaacattattttagatgcacctgggtagtcacagcttggataacaataacttgaagaaattcaatcattatagattgtacgcaataagacaccactacttttctctggaaagtttcattatttcctgttctgttatatcttttcaaatttaaatggaatatcatttgcagttttaatgatgtgatataacacactaaatacgcatgtagatatggagtattttagaagtgtcacttgagagttattctgcagccctctattaagtatataaacagacattacaaataaaaatataatttttgagtgcttattgccaagtactttacagatattaattaccaagttacttgatccagcaaatttaagcttcctgagaaccctggcctaacaaaaaccctaggagatagggcacaatgattgcacagagttttatacacaaaggtaagatwtgatgttaaatatcttgcctgtttcaaacagaggacataatagtaggtgtaggatttgaactgagtagtatggggtgaaactgtcatttttaaacatgatgctatatatgctgaatata

SEQ ID NO: 358506 - DNA, 564 bp, Homo sapiens
gaatcacttgagccagaagttcaaggccagcctgagcaacatagtgagagattttgtctctacaaaaaatacaaaaattggccaggtgtagtggctcacacctgtagtcccggttaactagggaggctcagttgggaggattgtttgagcccagaagatcaaggctgcagtgagccaagatcatgccactgcattctagcctgggtgacagagggagaccctgtctcaaaaaaaaaagtaaagaagaagtgtaaaatgcaatctcattgtgcgtaatgcrcatacatggccctgacacagttgaaagcttttctcattttctttattgtggttgaatccaatttaaattaaaatatgaaatgcttaacaatcataaaatcagtatttgctgtggtaaacaaaagagatctacactagtatttacaactctttaatttgtttaaaaaggaggcaatataaccattttaacacatttaaaccttttgcctctagaagatatatcaattaacacacaatattcaaggaaatcagtgctgtatagatatttttggtctattaaggtgc

SEQ ID NO: 358507 - DNA, 575 bp, Homo sapiens
taaacttttgatgatttgtttcagcagcagtagaaaactactatattacctctctgtatggtctgccataaactcaataccataaagatgtggattgcctgcccagagaaggtaacttgcatgatcaatgggtaccttcagatgatagtagctggtgaattggtgctaatagcgctggtccagtgaagaaagggtgaggggcaatccacatggagtttccacatagtaagccccactgagtgttagacatcaagctcaatacttcatgtctgttattttattttattttattttttgacagagtcttgctctgtcacytagagggcatctcacattgcacccagggaatgcagtggtgtgatggctcactgcaacctccaccccctgggttcaagtgattctcctgtctcggcctcccaagtaggtgggattacaggtggctgccaccatgcccggctaacttgtgtatttttagtagacagagggtttcgacatgttggccaggctggtctcaaacttccggcatcaagcaatcatcccgcttcggcttcccaaagtgctgagattacaggtgt

SEQ ID NO: 358508 - DNA, 575 bp, Homo sapiens
taaacttttgatgatttgtttcagcagcagtagaaaactactatattacctctctgtatggtctgccataaactcaataccataaagatgtggattgcctgcccagagaaggtaacttgcatgatcaatgggtaccttcagatgatagtagctggtgaattggtgctaatagcgctggtccagtgaagaaagggtgaggggcaatccacatggagtttccacatagtaagccccactgagtgttagacatcaagctcaatacttcatgtctgttattttattttattttattttttgacagagtcttgctctgtcacctagagggcatctcacattgcacccagggaatgcagtggtgtgatggctcactgcaacctccaccccctgggttcaagtgattctcctgtctcggcctcccaagtaggtgggattacaggtggctgccaccatgcccggctaacttgtgtatttttagtagacagagggtttcgacatgttggccaggctggtctcaaacttcyggcatcaagcaatcatcccgcttcggcttcccaaagtgctgagattacaggtgt

SEQ ID NO: 358509 - DNA, 566 bp, Homo sapiens
gttggttttacctggacttactcactgagtgaatttcagctgggtggctgaatttcagctgggacagctggaatgccagcaccttgctctccaagcagtatttcctcttgagggagaccagaccaggcaggactttctcacatggctcatctgtgttctaaacaagcacttatcaagccttcgctcgtgttgttcgctgatgtcccattggccaaataagtcatgtggccatgccctgagtcagtaagggaggagactacaaaagggtatggataccagaaggcaggattcattggaggccattagcatcaacaagacccaaatgccttgttttatttactagaatgcatcgggctcttttttgctttaaggtctttgcatagtcttccttttaatcattcaacaaatatttaggcaccctcagacactggacaaaatcctcagagatctcaagaatctttccttctaaagaggggaagcatayaataaatacatgcaaaactagaaaagataatttcagacggttataaaagctccgaaaaaataaactgggataatgggtagaa

SEQ ID NO: 358510 - DNA, 554 bp, Homo sapiens
ttttgattcagtagtgttataattatacatcacttcagtataaataacttttgttcatataatccaatgcctaataggaatgcttgatagtgtcctaatcaggaccygccctcttcagaggtggctacttagctatttgtagtgaaatcaacacctaaagttttgttatttactataaaagatgtcagaaagaattttgtacaattagtggtatcaagagtagtaactgagaaggaaaaattttctggacccagaaaatgtcttgtatgaacaagacataggagtggagaagcccagcactcaaatgtcattgatggagtatgtgaggtctaagccccactgaactcagctgcctgacccaaaagaggtcttgatgtcattgatgtctgtttggagtgaacttttcatgcaaggtgctggttggtgagcctcacttgcggccagcccacctgaaattacaggcaaggcatatgactattttctggctgtttgtttataacacatgtacacttgggaaatttgattgttgaagacttgctttcactgaaatacac

SEQ ID NO: 358511 - DNA, 564 bp, Homo sapiens
  misc_feature (1)...(564): n = A,T,C or G
nnnnnnnnnnnnnnnnnnnnnnnnnaattttctgccagtacaataacacaccctgggtacataatgaaataaaaggtgataatagttagggtccagtgtcattctgtgcctaaaactttaaataaattgccattccatatggatgttaaagcattcatgtgacaaatcatcacatartcgtgtaatgaaagggggttgctgtttttcaaatttgttgattaatagagtagttcaagctaaagttgctttttacaaagtatacaatattaggaggcaaattacctggcagggggtagcctgctcctgtcactccatgagcttccggagtgaagtaagcccaaggatgaagcctgactcttggtcatcttgagccaaaccaagctacatcacctaatccaatcctccagaaaatagaatcaactggaggtcagtggacaattgttgacagtggaaggctaagcaaatgtattagctttggaattacacagatctaggtttaaaccctaggcttatgggatataagcagccacttgcaagttttgtaactctgaggaggtgtcttca

SEQ ID NO: 358512 - DNA, 571 bp, Homo sapiens
tgttataataagaattaaataagttaatgtacgtaaagtttttagcacagcagttgatccctgttgggccttcaataaacagtactttggaaaaaaaaaaagaattctcttttaagcaatatcttcttatgcttactaaagccatagaatgggagcttgggcctcttcccactctgtgaatgttcatgaccacagcccactctgcatatgagacaacgaaccatcactaactgcaaaggagcaaacaacgtgtctccagtcagccttagtgaaaattsctcctgatccctctcttctttcaggggttgcagcagctcagacaatccttaccatgtgaaaggaggaatgactgtcatggcatgaaaaaagcatcactatggtagcttatttttccggttttcttttctttgagcatgtttagagctttgaacatgtagaactggccagagtctggcacatcctaatcagttttctttgccatcctgaaaagtcctgtgtaccttctcatcattcagttggcatcagttctcatcttggtccaggcttaacttgcacttaagagtattgtgag

SEQ ID NO: 358513 - DNA, 575 bp, Homo sapiens
aaaatctaaagaattacatattataatattaagccatatcttctactaacatgagtgaaacaggacttggctttataaaatctaggatctgataattctcttttacaatataagaaaattaagcaattgaaactaacatagcccttgtagawttttttacaacaccttttttttagatatgtgtacttcctgataagcagagatgatgaaataatggcctattaaaagcaagtaagtttctataaaaacgcccaagcagggatttaaggcatctcctgcatgcacagttgcagttagttattccaggtattatttttgttttcagaaaaagaaaactcagtagaagataatggcaagtccagactggggatatgatgacaaaaatggtaagagttctcctgtttatatagatcaaaatgataacttgttcccatttccaacagaaaagatattaagtatttaaaataattgtacagctataggttaattgttgaactgtctgctttaaataattatactatctttgcatgtattcttagcattgtcttttggggcatggctgactacaaaatatg

SEQ ID NO: 358514 - DNA, 575 bp, Homo sapiens
aaaatctaaagaattacatattataatattaagccatatcttctactaacatgagtgaaacaggacttggctttataaaatctaggatctgataattctcttttacaatataagaaaattaagcaattgaaactaacatagcccttgtagaattttttacaacaccttttttttagatatgtgtacttcctgataagcagagatgatgaaataatggcctattaaaagcaartaagtttctataaaaacgcccaagcagggatttaaggcatctcctgcatgcacagttgcagttagttattccaggtattatttttgttttcagaaaaagaaaactcagtagaagataatggcaagtccagactggggatatgatgacaaaaatggtaagagttctcctgtttatatagatcaaaatgataacttgttcccatttccaacagaaaagatattaagtatttaaaataattgtacagctataggttaattgttgaactgtctgctttaaataattatactatctttgcatgtattcttagcattgtcttttggggcatggctgactacaaaatatg

SEQ ID NO: 358515 - DNA, 635 bp, Homo sapiens
ttaagggtcctaggattttcagaatgttaaatgagtgttggcttcaacttaaagtcaacagttgcatttgaccctaacaaaagagtcaggctgtttttaaaactttgaaaccatgcattgacttctcctctctagctatgaaagtcctagatgctatctccttccaaaagaaggctgttttgtctgctctgaaaatctgttgtttagtgtagtcaccttcattggttatcttagctagatcttctgtataactgtctgcggcttctgtatcagcacttgccacatcacctcacactttcatgttatggagatggcatctttctttaaatctcataaaccaacctcgactagcttctaacttttcttctgcagcttctttgcctttctcaggcttcacagaattaaaaagagctatagccttgctctcattaggattyggcttaagggaatgtggttgttggtttttgatcttctatccagactatgcaaactttctccatatcagcaataatgctgctttgctttcttatcatttgtgtgtgcactggtgtagcacctttaattttctccaagaacttttcttttgcattcacggcttgactaactggcacaagaggtctagtttttggcctgtc

SEQ ID NO: 358516 - DNA, 666 bp, Homo sapiens
tctctgaacagcagggctatacagggcatctaaactctacagctcagtaaccatgagaacatgaagaaaaattgcacttgcctgataacttagctctgtcytgcctaggcgactcaaaaaccaaattattttcacgtgaatagtattgattgagtcatataattcactttcatctcatggtaaagttgggtgttagtaatatttaatcatattaaacttgaagcttattatgctttgttctttaaccaaaggattaaaaaaagtagagcattttttaatccagatcctgcacagagtattattagtgaatacaattataaggaaaaaggagtagaaacaactcaatgaatgctttattgtgttatgatttaccaataaactgaataacagatttttattttatacctgtaaatatagagataaagtagagtttagaagagtttgtctttttttttttcctcagtgaaactttgccatttacctatttaaatattacctatttaatgtggtctttacatattagtggatatttgtatctggatgaaatatgaccacatttggactaagacaaatgtttctttctctctcttctcactggcctttcagtagatagaaacaatttgtaatttgatatcagacagatctagatttaaacctgtctcaatg

SEQ ID NO: 358517 - DNA, 666 bp, Homo sapiens
tctctgaacagcagggctatacagggcatctaaactctacagctcagtaaccatgagaacatgaagaaaaattgcacttgcctgataacttagctctgtcctgcctaggcgactcaraaaccaaattattttcacgtgaatagtattgattgagtcatataattcactttcatctcatggtaaagttgggtgttagtaatatttaatcatattaaacttgaagcttattatgctttgttctttaaccaaaggattaaaaaaagtagagcattttttaatccagatcctgcacagagtattattagtgaatacaattataaggaaaaaggagtagaaacaactcaatgaatgctttattgtgttatgatttaccaataaactgaataacagatttttattttatacctgtaaatatagagataaagtagagtttagaagagtttgtctttttttttttcctcagtgaaactttgccatttacctatttaaatattacctatttaatgtggtctttacatattagtggatatttgtatctggatgaaatatgaccacatttggactaagacaaatgtttctttctctctcttctcactggcctttcagtagatagaaacaatttgtaatttgatatcagacagatctagatttaaacctgtctcaatg

SEQ ID NO: 358518 - DNA, 725 bp, Homo sapiens
tttccaggaaaataaatccctatactaatcagaaaattaactgtgttagtcagaaaatcaactcaaaaagaaatctaagctttcaggtggaacacggattaaacagcagcatttgttacttctgcagaaatgaagagtctcagaaagctctgcagcttaaataacatgtaaaagaatataaatggaagttcctggaaacatttattgcttccttagatagctaagattcaatgatagataaagagagaagtcgtacctagagaartattttagagttgagagatctctcaggaatttattttctttctaaaattgggaaacgatttttttttgtatttttgtacattggcaatgttcaagaagggtatataaactttaaattccttatttcagcagaaatataattttctgttgcactgaaggagaagttaacaaagactcaattccagagaccacagccccaagccaagcattaagtgcttgggaaatggcaccaattttattaaaaacttgggaaatccatagttctgccaaaaggatagctcacattttgctttactttctgatgattttccttgacatatttttccccttaattttactggacaaagcaaacagaaacagaagctcatccatctcccccttcattctcgtccctatttcaagtcattatttcactctgaattacttacagtgactctcaaatctttcacctaactgagccc

SEQ ID NO: 358519 - DNA, 633 bp, Homo sapiens
cagtcttgtgctgacacagtgttcccttccagaggaggaaggtagccaatctcatggctggcccatagcttgttaggatacctgatgtgggaaggcttagccaaatgtgaaatagctatgccatcatgttattctcttagcaattagaatttagaaacatgcaaggaatcagtactctaacacaagagcagaagttgatcagccacagtgagagagggcatgaggcaggctgggccaaagtcatgagacttctaatttaggtgtaarcagagaccttgaggcagggaggaagagaggaagtaatggtgggtggaaccacaggggtggaccagagctgagttaatggcatatgaattcctgttgctgatgacaaatcatataagttgtcacctttctagttctcttccctgtgatacatctgtcctatggttcctttcctcagatttattcaagtaaggtcctgtcagccttagactgagaattcttataattcccctgtcacttgagctatcctgatagagtctttattccacacatccaaaataacctgcctagcatggttatcataaaaaagaagagagtacattgtaatattaaaacaaatttaatccactttatgaatttagcaagtca

SEQ ID NO: 358520 - DNA, 426 bp, Homo sapiens
aagtcaaacaaattagccagaaaaaaaaaccaacaatcccatcaaaaagtagaataaggacatgaagagacaattctcaaaagaaaatatacaaatggccaacaaatatgtgaaaaaatgctcaatgtcactaatgatcagggaagtrcaaatcaaaaccacaatgcaatacccccttactcctgcaagaatggccataaagaaaaaaaaatcaaaaaatactttggattttaaatcccactgttttgataaaaggatgttggacttaaccagtactttttaaatagggatctatatcaggatctcttgttcaagctttcaaataatatgtagattgatattccaactcaatagatttccttgaaacaactaagtcaagtaattgtcttataagattcagtcattctttgacaagtgtttcaggta

SEQ ID NO: 358521 - DNA, 582 bp, Homo sapiens
aggcataaacacctgtcacgtaagtctctgctaccaaaaaagtcaatatgtatctctctagttgtggagggatttatggtagaacagattttcattttctccttgaattttgctttatcctgagttttckaatgaatctcatttttttgtaaattcaatcttatacaagtgaatgtctgatgctgggaaaaactaagatgattttgttcaaaaacagaaaatgtagaaaatgggaaaagggggtgtgagccatctactctgttcttccatttgagatgtccaatttacaaatcccagaactcatgaatttcattgatatggtacatacttatttatagaaatttcttcacacctaacttgtgagctctcttctagataccatagaggatgtcacacattgcctgacttaaagttaaattttaattggaataataagatagccatataaaaattgcatggcaaaataagacctaaagaattttatgtcagaataataaagaggatttcctaaggttgtagttgttcccaaaccataggagataggagattaaggaaccatttagaaggagaaattgggtaagt

SEQ ID NO: 358522 - DNA, 582 bp, Homo sapiens
aggcataaacacctgtcacgtaagtctctgctaccaaaaaagtcaatatgtatctctctagttgtggagggatttatggtagaacagattttcattttctccttgaattttgctttatcctgagttttcgaatgaatctcatttttttgtaaattcaatcttatacaagtgaatgtctgatgctgggaaaaactaagatgattttgttcaaaaacagaaaatgtagaaaatgggaaaagggggtgtgagccatctactctgttcttccatttgagatgtccaatttacaaatcccagaactcatgaatttcattgatatggtacatacttatttatagaaatttcttcacaccyaacttgtgagctctcttctagataccatagaggatgtcacacattgcctgacttaaagttaaattttaattggaataataagatagccatataaaaattgcatggcaaaataagacctaaagaattttatgtcagaataataaagaggatttcctaaggttgtagttgttcccaaaccataggagataggagattaaggaaccatttagaaggagaaattgggtaagt

SEQ ID NO: 358523 - DNA, 582 bp, Homo sapiens
aggcataaacacctgtcacgtaagtctctgctaccaaaaaagtcaatatgtatctctctagttgtggagggatttatggtagaacagattttcattttctccttgaattttgctttatcctgagttttcgaatgaatctcatttttttgtaaattcaatcttatacaagtgaatgtctgatgctgggaaaaactaagatgattttgttcaaaaacagaaaatgtagaaaatgggaaaagggggtgtgagccatctactctgttcttccatttgagatgtccaatttacaaatcccagaactcatgaatttcattgatatggtacatacttatttatagaaatttcttcacacctarcttgtgagctctcttctagataccatagaggatgtcacacattgcctgacttaaagttaaattttaattggaataataagatagccatataaaaattgcatggcaaaataagacctaaagaattttatgtcagaataataaagaggatttcctaaggttgtagttgttcccaaaccataggagataggagattaaggaaccatttagaaggagaaattgggtaagt

SEQ ID NO: 358524 - DNA, 529 bp, Homo sapiens
agagggttcagaaaatagccctatctactaataaaaaaacaaaatcaagaaactttggtgttaaataaagtacaggaataattaatatgtttcattgtagaggatatcactggtgtatatgtgtrtttatgtgtgtgtatatgtgtatatatagagaggggggaaacatggataatgttaacagttatgcaaattcaaactcattcatacttcacccattcatacttcacccattcatacttcacccattcatacttcacccattatatactttctgggactatgaaagaaattatttctaatttaaaaattctaactaaaggtttcttaataatattctgctttacttgatttcctggaaaacataaaataattattggattattttagtattctagtcaagaagggtagaaagtgtcacactgttacggtagcacacatagcccacaggtcagctacatttttctctaaagggttatagtaaatattttaggctttgggccatatttaactctgctgtgtgtgttcc

SEQ ID NO: 358525 - DNA, 561 bp, Homo sapiens
gttgtagaaattgacaaactgattctagagtttatatggggatgcaaaagacccagaacatttaacaaaatgttgaaggagaagaacaaagttgaagctttsatattatctgactttcagatttactgtgaagctacagtaaataagactgtaaataagtttagtgtttagtgttggtgaaggaataggcaaatagataaatggaacataacagagagtctagaaatagacccacaatcatctttgacaaagaagcaaaggctatacgatggagcaaagaaagtcttaacaaatgatgctttactactggacatccacacagaaaatagtgaacctctacatagaccttatatccttcacaaaaattaactcaaagtggatcacagacctaaaggtaatatacaaagctagaaagctcctagaaattaacacatgagaaaatctgcatgaccttaggtttggcaataatttttagatatgacacccaaggcactattcatgaaagaaacagttggtgaactagactgcattaaaactaaaaatttctgctttgccaaaaga

SEQ ID NO: 358526 - DNA, 561 bp, Homo sapiens
gttgtagaaattgacaaactgattctagagtttatatggggatgcaaaagacccagaacatttaacaaaatgttgaaggagaagaacaaagttgaagctttgatattatctgactttcagatttactgtgaagctacagtaaataagactgtaaataagtttagtgtttagtgttggtgaaggaataggcaaatagataaatggaacataacagagagtctagaaatagacccacaatcatctttgacaaagaagcaaaggctatacratggagcaaagaaagtcttaacaaatgatgctttactactggacatccacacagaaaatagtgaacctctacatagaccttatatccttcacaaaaattaactcaaagtggatcacagacctaaaggtaatatacaaagctagaaagctcctagaaattaacacatgagaaaatctgcatgaccttaggtttggcaataatttttagatatgacacccaaggcactattcatgaaagaaacagttggtgaactagactgcattaaaactaaaaatttctgctttgccaaaaga

SEQ ID NO: 358527 - DNA, 561 bp, Homo sapiens
gttgtagaaattgacaaactgattctagagtttatatggggatgcaaaagacccagaacatttaacaaaatgttgaaggagaagaacaaagttgaagctttgatattatctgactttcagatttactgtgaagctacagtaaataagactgtaaataagtttagtgtttagtgttggtgaaggaataggcaaatagataaatggaacataacagagagtctagaaatagacccacaatcatctttgacaaagaagcaaaggctatacgatggagcaaagaaagtcttaacaaatgatgctttactactggacatccacacagaaaatagtgaacctctacatagaccttatatccttcacaaaaattaactcaaagtggatcacagacctaaaggtaatatacaaagctagaaagctcctagaaattaacacatgagaaaatctrcatgaccttaggtttggcaataatttttagatatgacacccaaggcactattcatgaaagaaacagttggtgaactagactgcattaaaactaaaaatttctgctttgccaaaaga

SEQ ID NO: 358528 - DNA, 612 bp, Homo sapiens
aattcctttgaactcctacgtatggtgtttttatgtgagtgggtaaaggtaaacgcaaattgttcaaagttatatgtttctgatggttaattttaggtgttgacttgactggattaagaattaccaagagarccggtaagggattatttctgggtttttctgtgaaggtgcttccagaggagattggcaggtgagttggtggactaagtggggaagatctgccctcagtgtgtctgggcaccattcaatcatctgaggacgaggataagcacaaaaaggtgatgccctctttctcttggagctgggatatactcttctcctgtcctgggacatcagaaatctaggatcttctacacagacactccaggatttacaccagtggccccctgagttctcaggccttcagactcagactgagagttatgtcataggtttccctagttcctggggctttggacttaaactgagtcatgctgccagcatctcagggtttccagcctgcagacaacctatcacgggactttgcctccataaccatgtgagctagtatccctaataaatctctttaaaatatctgtattcacatatatctttttgattctatctctctga

SEQ ID NO: 358529 - DNA, 491 bp, Homo sapiens
tatgttttcttttggatatatatccagtaatgggattgttgtgctggataacaattctaagttctttgagaaatctccaaactgctttccatggtggatgggctaatttatattcctaccaacagcatgtaagcattcccttttctctgcagcctcaccagtatgtgttgttttatgactttttaatattagccattctgacttgtgtgagatgatatctcattgcagttttgatttgcatttctctgatgattagtgatgtcgagaatttttgcacacatttgttagctgcttgtgtatcttattttgatcagcatctgttcatgtcttttgtccactttttaatggggttgtttttaggatgcatagtttgcaaatattgtctcccattytgtaggttgtgtttactttgttaacagtttcttttgctgtacacattttctttagtttaattggatcccacctgtcaatttttgtttttgttgcaattg

SEQ ID NO: 358530 - DNA, 491 bp, Homo sapiens
tatgttttcttttggatatatatccagtaatgggattgttgtgctggataacaattctaagttctttgagaaatctccaaactgctttccatggtggatgggctaatttatattcctaccaacagcatgtaagcattcccttttctctgcagcctcaccagtatgtgttgttttatgactttttaatattagccattctgacttgtgtgagatgatatctcattgcagttttgatttgcatttctctgatgattagtgatgtcgagaatttttgcacacatttgttagctgcttgtgtatcttattttgatcagcatctgttcatgtcttttgtccactttttaatggggttgtttttaggatgcatagtttgcaaatattgtctcccattttgtaggttgtgtttactttgttaacagtttcttttgctgtacacawtttctttagtttaattggatcccacctgtcaatttttgtttttgttgcaattg

SEQ ID NO: 358531 - DNA, 491 bp, Homo sapiens
tatgttttcttttggatatatatccagtaatgggattgttgtgctggataacaattctaagttctttgagaaatctccaaactgctttccatggtggatgggctaatttatattcctaccaacagcatgtaagcattcccttttctctgcagcctcaccagtatgtgttgttttatgactttttaatattagccattctgacttgtgtgagatgatatctcattgcagttttgatttgcatttctctgatgattagtgatgtcgagaatttttgcacacatttgttagctgcttgtgtatcttattttgatcagcatctgttcatgtcttttgtccactttttaatggggttgtttttaggatgcatagtttgcaaatattgtctcccattttgtaggttgtgtttactttgttaacagtttcttttgctgtacacattttctttagtttaattggatsccacctgtcaatttttgtttttgttgcaattg

SEQ ID NO: 358532 - DNA, 582 bp, Homo sapiens
gatgcatagtttgcaaatattgtctcccattttgtaggttgtgtttactttgttaacagtttcttttgctgtacacattttctttagtttaattggatcccacctgtcaatttttgtttttgttgcaattgtgtttgaggacttagttataatttttttcccaaggctggagtccagaatgttgtttcttaggtcttcttctaggattcttatagtttgaggtcttacatttaaacctttaatctatctttagttaacttttgtatatggtgaaaggcagaggtctagtttctcatacggttagtctatcccagcaccgtgtgttgaatagggagttgtttctccattcctaattttttggtgacttgtcaaagaccatattattggaggtgtgtggctttatttctgggttatctgttctcttctrttggtctatgtgcctgtttttgtgccagtgctatgctgttttggttactttagctttatagtatagtttgatgttgagctatggcaaagaagagcattacataatgataaagagttcaattcaatgagaagacgtaactgtcataaacatatatg

SEQ ID NO: 358533 - DNA, 582 bp, Homo sapiens
gatgcatagtttgcaaatattgtctcccattttgtaggttgtgtttactttgttaacagtttcttttgctgtacacattttctttagtttaattggatcccacctgtcaatttttgtttttgttgcaattgtgtttgaggacttagttataatttttttcccaaggctggagtccagaatgttgtttcttaggtcttcttctaggattcttatagtttgaggtcttacatttaaacctttaatctatctttagttaacttttgtatatggtgaaaggcagaggtctagtttctcatacggttagtctatcccagcaccgtgtgttgaatagggagttgtttctccattcctaattttttggtgacttgtcaaagaccatattattggaggtgtgtggctttatttctgggttatctgttctcttctattggtctatgtgcctgtttttgtgycagtgctatgctgttttggttactttagctttatagtatagtttgatgttgagctatggcaaagaagagcattacataatgataaagagttcaattcaatgagaagacgtaactgtcataaacatatatg

SEQ ID NO: 358534 - DNA, 509 bp, Homo sapiens
ttacattaagctaaaaaaacttatagaactttgttttccaggtattctacatataccttaacagaacttcattttctttccatagacttttaaaaatggaattttagaactatgtctagaaaattgaattttggatttagaaaatctttagttttactataaagttgaacttgaatagaatgatgctatattatataataaagtaggtttgtactctactgctttatgaactacattttcatccaattaatagtaaaaatgttctcattttattaaaacataatgatacatgatttatcatgtattgcagaataggatatttaatgactgcatacaatctcatcaaatgaatactccaatgtagtaaactattccccactgargagtattggcatttaaattgctgacttattttttccattcttgcattttttgttaacaatacagtgccactaccaccacttgcccatacacatttatattttcctctttattaaaaggctgggagc

SEQ ID NO: 358535 - DNA, 615 bp, Homo sapiens
tggcatttaaattgctgacttattttttccattcttgcattttttgttaacaatacagtgccactaccaccacttgcccatacacatttatattttcctctttattaaaaggctgggagccaaaaaactatgttttccaaaattcctgacaacagtttttcacattaaattctgccaacgagaggcatttcagcagaattttgaaggtggagtgaaggaagtcactattgctctagggactgcagtgggcaggygtattaactcacttccttggtgcaaatatgagatcagtaacagttttctgtaacttccccagtttctgatttactgaaatgagcagtaatttccgtcacctttgctccaccagtagttctgatgattttgtaagcttctgattctctgtattgtatctcattctatttaaaatatctagaggggtttgtggtcttctgagaaaatccgaagcaaaataaatagtcataaataaaaccatctaagttaagtcctgttttgtttttatgattgttttaatgaggtagattacaaaaatgagtgagtcaaaaaataggaatctttttaaggtttctgatatatattgccaaagaggctttcaga

SEQ ID NO: 358536 - DNA, 615 bp, Homo sapiens
tggcatttaaattgctgacttattttttccattcttgcattttttgttaacaatacagtgccactaccaccacttgcccatacacatttatattttcctctttattaaaaggctgggagccaaaaaactatgttttccaaaattcctgacaacagtttttcacattaaattctgccaacgagaggcatttcagcagaattttgaaggtggagtgaaggaagtcactattgctctagggactgcagtgggcaggtgtattaactcacttccttggtgcaaatatgagatcagtaacagttttctgtaacttccccagtttctgatttactgaaatgagcagtaatttccgtcacctttgctccaccagtagttctgatgattttgtaagcttctgattctctgtattgtatctcattctatttaaaatatctagaggggtttgtggtcttcygagaaaatccgaagcaaaataaatagtcataaataaaaccatctaagttaagtcctgttttgtttttatgattgttttaatgaggtagattacaaaaatgagtgagtcaaaaaataggaatctttttaaggtttctgatatatattgccaaagaggctttcaga

SEQ ID NO: 358537 - DNA, 596 bp, Homo sapiens
atgtgaaattttgatgtaagtatataatgtgtaatgattaaatcagggtaatagggatatccatcatgtcaagcatttattatttctttgttttaggaactttccagttccactcttttaggtactttgaaatatgcaataaattaattgtggactatagtcaacctattgtgctaccaaacactagtttttattccttctaactgtatgtttgactcattaagcaactcttcttaatcaccttctcctcyttcccttcccagctgctggtaagtatcatcttactatcaccctgagttcctttttttttttaaaattttattttttttagctcccacataagagtgagaacatgctactttatctttttctgtctgccttattttacttaacataatgttcaccacttcccatccactttgttaaaaatgacaggattttattctttttcatagttgaataatattatattagaaattgaagaggacacaaaaatgtaaagatattccatgtttttagattgaaagaatcaaattgttaaaatatccatactcaaagcaatctacagatctaatgcaatccgtttcaaagtacca

SEQ ID NO: 358538 - DNA, 596 bp, Homo sapiens
atgtgaaattttgatgtaagtatataatgtgtaatgattaaatcagggtaatagggatatccatcatgtcaagcatttattatttctttgttttaggaactttccagttccactcttttaggtactttgaaatatgcaataaattaattgtggactatagtcaacctattgtgctaccaaacactagtttttattccttctaactgtatgtttgactcattaagcaactcttcttaatcaccttctcctctttcccttcccagctgctggtaagtatcatcttactatcaccctgagttcctttttttttttwaaattttattttttttagctcccacataagagtgagaacatgctactttatctttttctgtctgccttattttacttaacataatgttcaccacttcccatccactttgttaaaaatgacaggattttattctttttcatagttgaataatattatattagaaattgaagaggacacaaaaatgtaaagatattccatgtttttagattgaaagaatcaaattgttaaaatatccatactcaaagcaatctacagatctaatgcaatccgtttcaaagtacca

SEQ ID NO: 358539 - DNA, 594 bp, Homo sapiens
atatttgaacataagagttgttcatatttctctacagtctggaaatgtgtccataacaatattgatctattccttgaaagattgactatatatatatatatttttttttaattatactttaggtatttctcctaatgctatcactaccccagccccctacccccctacaggccctggtgtgttatgttccctgccytgtgtccatgtgttctcattgttcaactcccacctatgagtgagaacatgcggtgtttggttttctgtccttgggacagtttgcttagaatgatggtttccagcttcatccatgtccctgcaaaggatgtgaactcatccgtttttttatggctgtattccatggtgtatatgtgccacattttcctactccagtctatcattcttggggcctctcctaatatctcttagaggacattaatttttgatcaatggttaatggacagtttgatactgtacctttcttcatctataaatgtttttttattttattttggcaacctatattcccttcagaataacttgtttcacacattttcagatttgtaaaagaatcatgcataatctcattgtgcatga

SEQ ID NO: 358540 - DNA, 583 bp, Homo sapiens
ttagtttgaaaaaacaaaaaccgttgattaaggcagtagttattatttttaaattttttagtcactgtttgttagcatattccatctgttttggcaagttcattgtggaaagatgactctgttaggattaaggactccagataaagcaggggtctttcattttcatcagaagactgatcagggtgctggagttcaggggctagctgagcactcatcccaactgcagtgctgtggccttgtgattgtcatctaacctttctgagactccatatccttactttttaactaagcatactctgttaagtgccgtcttaagagtcttctagatttctatgcctgtaattccaataaattcattaattctttcaacaattatatagtgaacaattatatatcaaacttggaataacagcaaarggttcttcaattttaagaaacaaaatattaagactagaagcttagttggatattgtggtatatgcgataaagaaaagtaaagaggatgttatgttcaagattattgaaagtggttagggaagtcctctctgaggagacaatattataatgaaacaagcctacagaa

SEQ ID NO: 358541 - DNA, 658 bp, Homo sapiens
ctcactcgtttctgcctgaggtggaggtggggactccattcttgacttaataaatctaaattcttcaactgtcattctctcccaagacacttcaccctttggggactatgctgcattttcccattcttgctctttgtacatttcatcctgggtctggcaagacctatttcaaatatacaaagttatctgatacacacaggaacccaacctactctccacagagtgtggaagggttaaagaaaagccacttctgaacatctcygctttatcagctcccgttgggagatcaggggccagcagccttcattagccaataaaaagaaaatgacgtttctttgcaaggagtagactttactaagcaccctatatgttaaaaaaatatatattaaatgttagtttttgtctccaaaatagatatataattctcagatttccttgtaattttctcttaatggctgattaaatcttgacaatataaagcagtccagtcatccacccattcactggacaaatatttcttccatgtaaatgccaggcaccagtttaggtcctgatgatacaccaatgaacaagaaagatgaagtgatgatccaccaggaacttacattttagtgggagagatacacataacaaataggtagatgatatgataagcagg

SEQ ID NO: 358542 - DNA, 481 bp, Homo sapiens
ctgttttctcatatagaagatacttatttcttagattcttagtactactcattttaataagctatatgagtccacaacattaaaaaatttactctagaaagtaaagctgggtaaagtgacctcagtgtagaaaacttttattatatggccacaaaaggcactgaaaacgaaatttctagagggccttaggggattaaaagggaaatgtttagaagacattaaacctctggaggtttaattttgcaacttccccaaatacttagacgacttcaaaaataattttgcttttgtctaaactcagaaattatattgttcttttttgcccttgctggccctcaraagagtattaattctcattttgggaaggaattattttaatcatgccattaaatgagaggaaaatatcccttttctaaaaaaataaaaaattaaaaataaaaacctcggtgtaaagtggaattctctagagaatgcattgtgc

SEQ ID NO: 358543 - DNA, 595 bp, Homo sapiens
tttactaaaaatcagcaacttaaatgtaaatctcatcctaaaataacctcacagaaatatccagagtgatgtctgaccaccatggcctaaccaagttacaagataaaatcaaacatcatgctgtttctgtatagtgacactaaaaatagttgctaaaaacttgtatgacaaaatagaaaaatgaaagaaaggcaaattattttggaaagttacagtaaagaacataatctaaacccaacaaaaaagtttctgagactcaatcactgaasagagttggaagaagcttttattcacttcattccactgtatttaacaagtctctacttcagtccctgtggggtttctaatattataaaaagtaatatcataggttataaagatttagaaagagtgcttctatttttgaaatcaataatccagctaggacatattttctagatattattataacatttttacattaaagataatttcttgttatttgaattttatttcccctctcctcggggttcttagtaatacaaatgagtaaaattgctttcagtaggatgctagacacattgtactgtttgcaggtctgctaaacaacagaatc

SEQ ID NO: 358544 - DNA, 352 bp, Homo sapiens
tgcctcttttggagattttcccagaactatcctcttcactctgcacacagcaagaaattagccttcygctcttttactattccgttcctttacaattcatgctacttcagtatacttaacccagaatttattcaagttttatgtgttaatttaacaaatatttatttagtgactacctttattgtaccagttaaacatataacaggaaacaaaactcaaaaacagttctgtcctcactgagcttatattttggtggaaagatacagacaattaattgaaccaaataaattatagtgtatattagaaaaggataagggctgtgaaaacaaataaagtaaggaaggggagtgaa

SEQ ID NO: 358545 - DNA, 484 bp, Homo sapiens
taaaagaacaagagacttaggaatacatttatccaagaaggtgaagatctgtacactgaaaactatcagacatttatgaaagaaattgaagaaggcacagataaatgaaaagatagcccatatacatggattggaagaatcaatattatttaaatgtacatataaaccacagcgatctacaaattcaaactagtcatcaaaattccaatggcgtttttcacggaaatgccgtttcacaraaatgccacagaaaagacaatcctaaagttttaatgaaaccacaagactgcaaacagccaaaacgctcctgggaaataacaaagctggaggcatcacagtccttgctttcaaattatgttacaagactatggtagtaaaacagtatggtctggcataagcacagacacagaaatacaacaaaagagagagcctagaaataaatttacacacacattatcaactaatctttgacatggcaccaaaa

SEQ ID NO: 358546 - DNA, 552 bp, Homo sapiens
ttttgtttattgtttgtactcactctcacttgtcgtattccttcaatttttttttctttttggttggttttttttttcttttttaaatcttaacctgtaaaaatcccaattgtctaaattgagagtgctttctctaraaaaaaatttctattttattctgctcggagctgggggcactgccaacaatctagtcaactcctgtatgacttattttgatttgatagcaaaaacctgggactcaccttaaagttctcctatccccttatctcccacatccaattactcaattcatccaactccacttcctaaaatcctcccatccagtaacctaaagcaaccctctattgctcaccttccacaatgctaaagactgatgtaaaaataaaccttaccctgtgattgccatgcccaaaattcttaaaaggctttaggtaaaatttataccctttggattgtcaaaaacatgatgacttaatcttttcttgtctgcgtatctagccacctatcatgccacttcctttagccttcacctcctctttttttttttttttt

SEQ ID NO: 358547 - DNA, 552 bp, Homo sapiens
ttttgtttattgtttgtactcactctcacttgtcgtattccttcaatttttttttctttttggttggttttttttttcttttttaaatcttaacctgtaaaaatcccaattgtctaaattgagagtgctttctctaaaaaraaatttctattttattctgctcggagctgggggcactgccaacaatctagtcaactcctgtatgacttattttgatttgatagcaaaaacctgggactcaccttaaagttctcctatccccttatctcccacatccaattactcaattcatccaactccacttcctaaaatcctcccatccagtaacctaaagcaaccctctattgctcaccttccacaatgctaaagactgatgtaaaaataaaccttaccctgtgattgccatgcccaaaattcttaaaaggctttaggtaaaatttataccctttggattgtcaaaaacatgatgacttaatcttttcttgtctgcgtatctagccacctatcatgccacttcctttagccttcacctcctctttttttttttttttt

SEQ ID NO: 358548 - DNA, 641 bp, Homo sapiens
cactgcaacctctgctttctgggttcaagggattctcattcctcagccaccagaatagctaagattacaggtgcacaccaccctgcccagctaactttttttgtatttttagtagagacaggatttcactacattggccaggctggtctcgaactcctcacctcaaggaatccccctgccttggcctcctgaagtgctgggattacaggtgtaagccaccacagctagcccatattttagtaaggaaaatgatgggtggcatgggactttgaaaactaagacgatatacttagtgttttaaaataagattttgttaytgatataaaccacattgaagtgaggaagactgggtcatagtccagcaaagattgcaccttattttcttaacacgctaaagtgacaggccctatggttggtggggaagaaaggccttgtgacctagagggagaaaatgagatctttcgattcccagagtgagagagaaagatggacactgtctttagattataaaattcaaaaagcctaccgaaggggtgttgagagctacacttgaagggggctctgtattcatttagggacatttaacattacagctttctgtcatgttagcataggtcactaggtgtaaaaatggcatgata

SEQ ID NO: 358549 - DNA, 541 bp, Homo sapiens
gggctctgtattcatttagggacatttaacattacagctttctgtcatgttagcataggtcactaggtgtaaaaatggcatgataagcaatatgcgggtgttaaatgtaggagcagtatgcaagagtatacaggatagaaaaagccccttgagtccagaaagcaggcttgagtcaagagtgatagcctggactaagtggtattaaagagaataaagaggtagaacaatagaaaatagctcccaaagaaaaactaggcatactycataaaattacagaagcagggaacaggatgacaaatgtgatctacatttgaaacctgaggactaacatgtgaagttgcctctgaagagatggtaagggaacctgtctgtgtgaggggagtggtggggaacaggacagttaatggacgcattgaacttggtgtcatctgcgtaattcaaagaaaacatgtagtggtgggtggaggaagatttggatataataagttgagtcacaggactgacgttgagtgaaggctccaggaaaaaaaaaatactagga

SEQ ID NO: 358550 - DNA, 552 bp, Homo sapiens
ttttgtttattgtttgtactcactctcacttgtcgtattccttcaatttttttttctttttggttggttttttttttcttttttaaatcttaacctgtaaaaatcccaattgtctaaattgagagtgctttctctaaaaaaaaatttctattttattctgctcggagctgggggcactgccaacaatctagtcaactcctgtatgacttattttgatttgatagcaraaacctgggactcaccttaaagttctcctatccccttatctcccacatccaattactcaattcatccaactccacttcctaaaatcctcccatccagtaacctaaagcaaccctctattgctcaccttccacaatgctaaagactgatgtaaaaataaaccttaccctgtgattgccatgcccaaaattcttaaaaggctttaggtaaaatttataccctttggattgtcaaaaacatgatgacttaatcttttcttgtctgcgtatctagccacctatcatgccacttcctttagccttcacctcctctttttttttttttttt

SEQ ID NO: 358551 - DNA, 577 bp, Homo sapiens
gtgtatcaacagatgactaggaaaagaagatgtttgtgtctctgtgyttgtgtgtgtgtctgtgtgtgtatatattatatatatgtgtgtatatatgtaatatgtaatatatactacataacatacatgtaatatatgttatgtaatatattacataaaatagatattacatatatatgaaatatataaaatacgtaatatataattacacatataaatatataatatacatatattacatatatatttatatatgtttaaatattacatttttatacataaaatatatatgtatagatataaaaatatatataaaatagatataaatatatatgtataaaatatatattacatatataaaatatatattacatatataaaatgatgaaatactatgtagccataaaaaaggattaaataatgtattttgcaacatggattgagctggaggccattatcctaagacaaataactcagaaatagaaaatcaaatacttcatgttcttacttataagtgagagttcaacaatagacacacatgaacatatagatggaaattatagataccggggactcc

SEQ ID NO: 358552 - DNA, 577 bp, Homo sapiens
gtgtatcaacagatgactaggaaaagaagatgtttgtgtctctgtgtttgtgtgtgtgtctgtgtgtgtatatattatatayatgtgtgtatatatgtaatatgtaatatatactacataacatacatgtaatatatgttatgtaatatattacataaaatagatattacatatatatgaaatatataaaatacgtaatatataattacacatataaatatataatatacatatattacatatatatttatatatgtttaaatattacatttttatacataaaatatatatgtatagatataaaaatatatataaaatagatataaatatatatgtataaaatatatattacatatataaaatatatattacatatataaaatgatgaaatactatgtagccataaaaaaggattaaataatgtattttgcaacatggattgagctggaggccattatcctaagacaaataactcagaaatagaaaatcaaatacttcatgttcttacttataagtgagagttcaacaatagacacacatgaacatatagatggaaattatagataccggggactcc

SEQ ID NO: 358553 - DNA, 575 bp, Homo sapiens
tccttttataaattgtgttaatacacacttcttttttaggggctagcatcacaaaattaccagaagcattgtkttgttttgccaattaaaggaatccaaataactccaaaatgattaattaccactttctgtaaatcctcaggtgaactcatttgcacagaattccctgcagttgtaaagaaaacagaacacttgacaacttgtcaggcacctacattcttttttccttttatttattaaattcttttactattacatgttattttccacagatgttatgtgaaatttctctcctaagcaaaataaataacttttttaagaattagaaaatctaaaggacaaaattttatattataaaactatacatagtattttattttgctggcataaatgcaaataatcatcttacagaaaaacattaatattacgttttgacttctttccacatgacatctacaaggcaaataacattacaaatcctcagtactttctaactgatatatggaaatagtgtggaaaatcacatgtagaattacatgtagtatgcttgtaatactgatttcctacaatgtaca

SEQ ID NO: 358554 - DNA, 575 bp, Homo sapiens
tccttttataaattgtgttaatacacacttcttttttaggggctagcatcacaaaattaccagaagcattgtgttgttttgccaattaaaggaatccaaataactccaaaatgattaattaccactttctgtaaatcctcaggtgaactcatttgcacagaattccctgcagttgtaaagaaaacagaacacttgacaacttgtcaggcacctacattcttttttccttttatttattaaattcttttactattacatgttattttccacagatgttatgtgaaatttctctcctaagcaaaataaataayttttttaagaattagaaaatctaaaggacaaaattttatattataaaactatacatagtattttattttgctggcataaatgcaaataatcatcttacagaaaaacattaatattacgttttgacttctttccacatgacatctacaaggcaaataacattacaaatcctcagtactttctaactgatatatggaaatagtgtggaaaatcacatgtagaattacatgtagtatgcttgtaatactgatttcctacaatgtaca

SEQ ID NO: 358555 - DNA, 575 bp, Homo sapiens
tccttttataaattgtgttaatacacacttcttttttaggggctagcatcacaaaattaccagaagcattgtgttgttttgccaattaaaggaatccaaataactccaaaatgattaattaccactttctgtaaatcctcaggtgaactcatttgcacagaattccctgcagttgtaaagaaaacagaacacttgacaacttgtcaggcacctacattcttttttccttttatttattaaattcttttactattacatgttattttccacagatgttatgtgaaatttctctcctaagcaaaataaataacttttttaagaattagaaaatctaaaggacaaaattttatattataaaactatacatagtattttattttgctggcataaatgcaaataatcatcttacagaaaaacattaatattacgttttgacttctttccacatgacatctacaaggcwaataacattacaaatcctcagtactttctaactgatatatggaaatagtgtggaaaatcacatgtagaattacatgtagtatgcttgtaatactgatttcctacaatgtaca

SEQ ID NO: 358556 - DNA, 627 bp, Homo sapiens
gtttaatataaatcatgaataagaaattataccactgcataataataccaagacattaggagaaaatataggcaaatgatatacaagataactcataaaagaaaaaaatattatataaacacccaatgcttaatttttatcaagtaagtaaatacattttaaagtgatactttcagtgttggtatttgacaaaatggatcctttgtattgttctgcaagtcagaaaatactttcaggaaaatagctagacagtatgtcttcggacacttgaaatctcttacaatacagtattttggtccaaaaatcataaggcaaaaaaagaaatgaccactaggatttaagtccaaatatgtaatttgcaacattaattacaatgtcaaaaattgggaaaaaattaaacacatagaaatatgttgatagcatttaaaatgtgctaacttttaattgtatggggaaatatataatattaastaaaacttgtaggatacaaaatgtatcaatctatcgatctaattaaatatatgcagtcatgtgtcactttaaaatggggatgcgttctgagaaattctgtgtgagtttcaacactttgtaaatacaagagtctgcaaagacaaacgtaaattgtat

SEQ ID NO: 358557 - DNA, 634 bp, Homo sapiens
tgtctgtgtagctgccagagccgctgggccctgtgacagagccgccgggccctggggatgacgctgcggggcaccagccctgccggggccaggcgggtgccgttccagccaggygggtgtggggcaggcccctcatcttgctcctgatcctctgggggtgctgtgctgagcagcagtggcccctcgaggactgagactcgggcctgggggcctggccaaggtccggggctccctgcggctgctgtcctcagggttctcctcacctccactgcattcccacgagctgttctgaagctttcctggggaggacaggccaggagccaccctgccacagctgtcctgggctctcagatagacagaggcctcgcggagccttggaagcagcttcacagggtggcaggaggacgcacagccgcagaggccagctttcccggggactggctgcctccccaggcttctaaacaccatggcacccgcctctggcttggggtttggacttcttttagcaaaacgatgaacaatccacggccccattcttccggaagagaatggaggaaaccgtggtcccatgtctgctgggcgggattcccgtaggcctcccctgctgccagctgtgggggtgactgaggcggga

SEQ ID NO: 358558 - DNA, 577 bp, Homo sapiens
ggaaggggagagtgggtcttggtgctccatcccaaacctgctgcagccgtgggtgaggtcacccggaatggcaggacaaggtccactctgttctctcggagatgacttgtccctcagcacagcctccacgtgcctgttgcgcgtggcctaagggcctttatgcaaagtgracttggtctcctggggggtgccctggaatctgccttctgcgccactcagggtcgtttgtggccggagtgcatggggctctgactgccatgtgccagccacggggctggtggagggaccctgccctgggaaccacaggtgccaacaaaacctttcattgatcgcaggtctcctctgagcctccggcctccataagacccaaaacagatgacacctcttcccagtcccccgcgccttccgaaaaggacaagccgtccagctggctgcggaccttggccggctcttccaataaggtgctgtggggcctgtcggggtccttggggtggtgggtactgggcccttctccttgggcagacccagcggctggcagctccacctgcccgctactgagggctggcacccggcgcag

SEQ ID NO: 358559 - DNA, 511 bp, Homo sapiens
agagtgctggttaggactcattcctgtgtgaccagcagaactctacctcatattggctgaaaccctaggaaaatttgtttttcatgtgactgaagcatgtagggccagcgcagtcttcagaggtggtttgatcctaaaaatcataatgtcaacatagctgaggccttgcattctctgagggtcccttgcctctgccctyctccttgtgtcagcttcatccttcaaattgccaccagggctatagtcgtttattcaacaaataggtattaaatatctttgcgatggtctgaatgtgtccccccacaaacccagcattcacatgttgaaatctaatcttcagtttgatggtgttatgaggcagggcccttcagaggtgttcaagtcaggaggctggagccctcagggatgggatgagtgccatataaaaggatttgagaggaaaagtccattccttctatttcttccaccatgtgagaatgtactgtttttccactccagggaaccagcaaca

SEQ ID NO: 358560 - DNA, 511 bp, Homo sapiens
agagtgctggttaggactcattcctgtgtgaccagcagaactctacctcatattggctgaaaccctaggaaaatttgtttttcatgtgactgaagcatgtagggccagcgcagtcttcagaggtggtttgatcctaaaaatcataatgtcaacatagctgaggccttgcattctctgagggtcccttgcctctgcccttctccttgtgtcagcttcatccttcaaattgccaccagggctatagtcgtttattcaacaaataggtattaaatatctttgcgatggtctgaatgtgtccccccacaaacccagcattcacatgttgaaatctaatcttcagtttgatggtrttatgaggcagggcccttcagaggtgttcaagtcaggaggctggagccctcagggatgggatgagtgccatataaaaggatttgagaggaaaagtccattccttctatttcttccaccatgtgagaatgtactgtttttccactccagggaaccagcaaca

SEQ ID NO: 358561 - DNA, 546 bp, Homo sapiens
caacatttgttcagaactgtgatgcaattactacctgactactagaatgatggctgcatggaccacagaaagaagaaaggccactgatagaggactgaatcaaggtcttagatttcaattatatctcagtaatactgtcatgtatactgagtggagggcattggctagaaatgactactaggctaaagattaattgtaattcaaaaaattttccacagaattaacraactatccaattttagctatgatttctaagacagtttccttctgtgacaccacattcaaagatccataaagcagccttttttggatttatttcacattcctctagcagatcccacagtgttcaaaggagccacagccagaattggcacagtggtttgcagtattttccttgtatctgaggagaaacaggttgtaaaggactaatcaaatgctgtccttgcaagagcaggggacggaaacgcggggaaggaaggcacttcctgccagtcttcactccccctccactggccctcatgcacctgcagtgacccccaaacccca

SEQ ID NO: 358562 - DNA, 605 bp, Homo sapiens
ttggtcatgttacagtctcccaaagctaaaatagaaawtataatacctcctagtgtttttaaagaattattcaataaggagtaattagaggtacaggtatagatttaaattctatttttaaagggaatacattggagatgctctcaacacaaggcttcgtgtctgtctttcttgttgctccattgagttaattctccatataaacaaacagcaaggtgattcttgcctacaatttcattttgtctattaatgtttggaagagtatttttgttatgcactacttcaaagacataaaatatcaaatacagggtattacagcaggtacatatcttcctgataatgactcctcacttcaagtcagtcatttgctgtttgggataactgcctacctagggtcatttttgaactttaatcaaaaaacttctcccacataattttactaggatgactaaagcttccagaattataaccattcatcaactacacaaaagatttcttaagcagctaaaatgctctagggaatagagatttgataataaatgacatggtttgttcctgccttcaaggactgtacaatctagtgatagagacagacatataaattg

SEQ ID NO: 358563 - DNA, 605 bp, Homo sapiens
ttggtcatgttacagtctcccaaagctaaaatagaaattataatacctcctagtgtttttaaagaattattcaataaggagtaattagaggtacaggtatagatttaaattctatttttaaagggaatacattggagatgctctcaacacaaggcttcgtgtctgtctttcttgttgctccattgagttaattctccatataaacaaacagcaaggtgattcttgcctacaatttcattttgtctattaatgtttggaagagtatttttgttatgcactacttcaaagacataaaatatcaaatacagggtattacagcaggtacatatcttcctgataatgactcctcacttcaagtcagtcatttgctgtttgggataactgcctacctagggtcatttttgaactttaatcaaaaaacttctcccacataattttactaggatgactaaagcttccagaattataaccattcatcaactacacaaaagatttcttaagcagctaaaatgytctagggaatagagatttgataataaatgacatggtttgttcctgccttcaaggactgtacaatctagtgatagagacagacatataaattg

SEQ ID NO: 358564 - DNA, 611 bp, Homo sapiens
attttgaatcctttgaaaagcaagttcctggaaaatagagttgtcaaattaaggccttatttctcattttcacatgaaaggaaatgagacgcactcattaatatttacaatgtaagttcagggacaagagattttatggctgcaggaatcttcaatccttttaaggaatgttgtcttttgtcagtcatggctctgtgcctcgccttcacagtctctgtactcattcatgaaaaatgagatcatttagattaaaatgagtggtttgcaactggctgctcattaggatcatcgggggagtttgaaacaaacaggcaccggaccccaccccagaccagttaaagcagaaatctttgggggtggggagttcttatttcaaacctctcccaggtgattctaatggtcattgccatggttgagaaccaccagttggactataaattcttagtttcacagaaaggagaagagagacccacacccctacytaccatgttctataattccacagctctacatgactaattttcagcctgttaggtttggatacactctttctttgaaggtgcacttcattttacattagtgagctgttcattcctagaaggcaacatgag

SEQ ID NO: 358565 - DNA, 575 bp, Homo sapiens
aacagtttcctcttcctttaaaagccaattataagtattttccatcatggaattgatgggaggatcaaatgagattaggtacataaaagtgatytgaaaagtaaaaagcaaagaacttcttactattggatcttgctattagcagattattggtttgaaggatgtatcctctcttaggcagtaaactctgggtatcagggactgtcttgtgcaacgtcctcattgcctagaacagagaagagcccatagttaaggagagcgtatactttatcatccaagtaggaatacttttaagggtgaagaggacatttttaataattgtgctatagaacagaaggtataaaacagatgtatggaatcctatcctagtagacaataaacatttgttgaatataaatattatttgtattacttatttttatttttgtatcttcctcattgtaaatttcttgtcattctctcttatctcatccttccttcactctcatccaagtttatctttatttccaaagtcagaagtgaaagttgatcccatatctactagcaaggtggccctttcattaatagattttcac

SEQ ID NO: 358566 - DNA, 627 bp, Homo sapiens
tacaaattcaatgcaattcacatcaaaataacaccatcattcttcatagaactagataaaaaatcctaaaattcatatggaacaaaaaaatagcccacatagtcaaagcaagcctaagcaaaaggaacaaatctggaagcatcacattacctgacctcaaactatactataaggccatagtcaccaaaacagcatgatactggtataaaaataggcatatagaccaatggaacagaacagagaacccagaaataaagccaaatacttaacagtcaactcatctttgacaaagcaaacaaaaacataaagtggggaaaggacactctattcagcaaatggtgctgsgataattggcaagccacatgtagaagaatgaaactagatccttttctgtcaccttacacaaaaatcaactcaagattgatcaaggacttaaatctaagacctgaaaccataaaaaatctagaagataacttggaatgatagtgcttttgtaaactgccctgtttagcataataaagcttgtcaatcctttgtgaaaccctcagatttaaaaatatttcactggcccaaatgaaaatttctgggaccctcagaaagtattcctatcacctcttaattgggatg

SEQ ID NO: 358567 - DNA, 627 bp, Homo sapiens
tacaaattcaatgcaattcacatcaaaataacaccatcattcttcatagaactagataaaaaatcctaaaattcatatggaacaaaaaaatagcccacatagtcaaagcaagcctaagcaaaaggaacaaatctggaagcatcacattacctgacctcaaactatactataaggccatagtcaccaaaacagcatgatactggtataaaaataggcatatagaccaatggaacagaacagagaacccagaaataaagccaaatacttaacagtcaactcatctttgacaaagcaaacaaaaacataaagtggggaaaggacactctattcagcaaatggtgctgcgataattggcaagccacatgtagaagaatgaaactagatccttwtctgtcaccttacacaaaaatcaactcaagattgatcaaggacttaaatctaagacctgaaaccataaaaaatctagaagataacttggaatgatagtgcttttgtaaactgccctgtttagcataataaagcttgtcaatcctttgtgaaaccctcagatttaaaaatatttcactggcccaaatgaaaatttctgggaccctcagaaagtattcctatcacctcttaattgggatg

SEQ ID NO: 358568 - DNA, 491 bp, Homo sapiens
aaaaacatttggaaaaaaacaattaaaacttacaatagaataataaataatacaaattttaagaaaacaatacagtgtaacaactatttacatagcatttacaatgtattagctayaagtaatctaaagatgatttaaagcatgcagaaggatatacataagctacatgcacatactatgccattttacataagagacttgaacaatcacagattttggtatccctggggggtcctgaaacaaaacccccgtggatatggaaggatgactgtacttccctcataatcttaccatgccctatcttaaatgtcttactagaatacagctcgttgagtgcagaagctatttgaatttgtacaaccataaaaacattaatgattataataatagttaacatttgttgagtactaacaatgaatatagactgttctaattgttttattggtatcaacttattcttaagcacagtgtctagcacagaaacaataggt

SEQ ID NO: 358569 - DNA, 483 bp, Homo sapiens
tacatcacttacatggtgtctcaatccattttctcttactataacagaataccacagactgggtagtttgtaaagaaaataaatctatttcttacagttctggaggctacaaagtccaaggttgagggccacatctggtgagggccttcttactgmcttataacatggcagacggcaagagtatgccagctcagttgtctcttgctctttttataaagccactaggttccattatgggtgccctaacctgatgccttttctaattctaattacacgccaaaggctccaccttcaaatgtcatcaacagatgaatttgggaattaagtctgcaacccatgaaatttggggtacacattcaaaccttagtattctacccccgcttccaaagtttatgtttttatcacatgcaaaatacacatatttcatcctaatagtcctaaagtcttaacttgctccagcgccgactcaaaagtccaaagtcc

SEQ ID NO: 358570 - DNA, 539 bp, Homo sapiens
tagaggccatcagtattcttcagctttggcaagcagtgtagcatcttcaaatctaaatctctctctctctctatctctckctctctctgtctctctctctctctctctctctctgaacttgcctcgtcatcatatctcctcctatgactccaactctcttgcttccctcttttccttataaggactcttatgattacattgggcccacgcagataattcaagataatctcccaatctcaagatccttaaattagtcatatctgtaaagtctcttctgccatgcaagatagcatattcacaggttcttgagattgaaatatgggcatctctcctagtccatttgggctgctataacaaaatacctgagactggataatttataaacaacagaaatttattgcctacagttctgaaggctgggaaggccaagatcaaggtgccagcagatttggtggctggtgaggactctttgctttgtagatgttgcctttttgctgcatcctgacatggtgaagggcaaaaggggcaaacacatttcc

SEQ ID NO: 358571 - DNA, 539 bp, Homo sapiens
tagaggccatcagtattcttcagctttggcaagcagtgtagcatcttcaaatctaaatctctctctctctctatctctctctctctctgtctctctctctctctctctctctctgaacttgcctcrtcatcatatctcctcctatgactccaactctcttgcttccctcttttccttataaggactcttatgattacattgggcccacgcagataattcaagataatctcccaatctcaagatccttaaattagtcatatctgtaaagtctcttctgccatgcaagatagcatattcacaggttcttgagattgaaatatgggcatctctcctagtccatttgggctgctataacaaaatacctgagactggataatttataaacaacagaaatttattgcctacagttctgaaggctgggaaggccaagatcaaggtgccagcagatttggtggctggtgaggactctttgctttgtagatgttgcctttttgctgcatcctgacatggtgaagggcaaaaggggcaaacacatttcc

SEQ ID NO: 358572 - DNA, 618 bp, Homo sapiens
ctcgtattcttattcccttacagattcagttcatgattggtggcttccaagtgccagcctctatacttctttgacttgggactatctctggtcayaggagcctttgtgggcaggataaaaattctgggaaataaatgtgcttcacttctctttatgcagcccataactaatgaatgacagaacccttggccctcaggagaatactctgaggcatgattctacaccatttctcagtgattcccagtgggattaagctatagttgcccacagttgtaaattgcttgataatgcacattttaatgttttccttctctttcatatcttatatccccactttactgatatttcttaggatcacttcaaaaataaaatgcttgcacttatatcctttcacgaatgtctgcttccggggaagactaactaagacagttgataatggaagtggaattctagaattgcatcactgttgaccacatggtgataattcacatctctgatgaaaataggtaatgatagtgcttgatattctgtaacatcacaattacctttggttagttgtcttgagaatatatggaaggaaatgcactgcttatacaatttttctgttagttgacaaat

SEQ ID NO: 358573 - DNA, 632 bp, Homo sapiens
tgtggccagtggcacctttgcccaagttttgcttgggcatccaggagccggcataggtgtctgctccctgcaagactgcagctggaccaggtgtactgtaagcaggcagcttccacagctggcactggggaacatggtggtggccagaagcttggagacaccaggaactgcagagctccaaagagggtgtcacaggcctgtatcaggaatctcctargtctgggctccctgaagggccacagctcttccctccttctctcttctctccttcttgtcacccgcaatgtggcaagcaaggggtgtgtttcagccctgtttgtgttatagctcctttagccccaccacttggcaggtcctgagttcttgtcctgtatccaggaagaatgaggtatgtggacatgttgaggatgagcaaggtgaagaggagctttatcaaacaacagaacagctcagaggagacccaggagggagctacaggcaaggtgtcccaacaagtgttcagctctcagcagagaggagaccctggagtgcttagctcctctccgcaggcaggtcttcccattgagtgttcagctcttagcagaaaggagaccctagagtgagtagctcctttccacagctggtcgtcccaa

SEQ ID NO: 358574 - DNA, 572 bp, Homo sapiens
tttgtctctatgtaccaagcacagcaccaaacacaagatagacactaataagttaattaccgaattgaattgagcagagtgttcttaactactgtgggcgctatcaaagttgctagctttgccctttcatcctgcccacttgcattcaatttactcttaccataacaaaatactggtcggcatgggtggaagtaggggtaactggttgtgattgttaattttaggtgtccacttgactgggttaaggggtacttagctggtaaaacatttctgtgaggggtgggtagcatttttagagattagcatttgaatcagtagactcagtaaaaatgatccattctcactcatgtaggcaagcatcatccaatatgttgagagcccagattgaacaaaaatgagaaggaagggkgaatttgctttctctttttgagatgtagggcatcctttttctcctacccttggagataagaactccaggttcttgggccttcagactccagtggtcctacaggttctcaggcctttggactcagatgaattacatcactggcttccctggttctcagcttgca

SEQ ID NO: 358575 - DNA, 612 bp, Homo sapiens
tctctatgattacgagtcaattcctataataaaaaccctctttacctatctatctgtctttctgccaatctgtttgtctatcctattggttctatttcactagagaactctaatatgggtaaaatttaaaatcagataatgttatttcttgctataattttgggttgaaagggtactttactatgatgcatatgtattttcttgcctttagatttatctgtacattcctttcccagttcttcaacccactcccatcatatcttctttctatcactgcctctctatcactttctgtctaggttcaaagtcaagtccataattagatcagaactttatgtctcgatttagtgatgtgtcatcagaagctcagaatatttcacattttggggttaggcacatttaagtgctatcattcacctccataaattcatgctacatttaatcttctgactattagctttctccaccgtccaaccctmccagcaattctgccttagggcacctaagagtaagtgattgctatgacaagaagataagtaattaattagattgatgttcaaagagtcccccgcaagttgtcaatacccatatttatatcataatgctacaatt

SEQ ID NO: 358576 - DNA, 612 bp, Homo sapiens
tctctatgattacgagtcaattcctataataaaaaccctctttacctatctatctgtctttctgccaatctgtttgtctatcctattggttctatttcactagagaactctaatatgggtaaaatttaaaatcagataatgttatttcttgctataattttgggttgaaagggtactttactatgatgcatatgtattttcttgcctttagatttatctgtacattcctttcccagttcttcaacccactcccatcatatcttctttctatcactgcctctctatcactttctgtctaggttcaaagtcaagtccataattagatcagaactttatgtctcgatttagtgatgtgtcatcagaagctcagaatatttcacattttggggttaggcacatttaagtgctatcattcacctccataaattcatgctacatttaatcttctgactattagctttctccaccgtccaaccctcccagcaattctgccytagggcacctaagagtaagtgattgctatgacaagaagataagtaattaattagattgatgttcaaagagtcccccgcaagttgtcaatacccatatttatatcataatgctacaatt

SEQ ID NO: 358577 - DNA, 606 bp, Homo sapiens
aaattgtatttttttaatgaaaaacaccttctaaccattaagcaaagaaaacagtagaggaaaaggcagaagctatacaagagaaaaatattgacaaaaatataattttaaaaagtttttaaagcacaaaatttaataaaatgtaggttagtagaatggtgcttttcttttttctttttttttttttttaaatatattaacaagaggacctaagaaatgtctggcagtagttcaaagtcaaaggccaacatcaatcrctcataaagcaacttattaaagggcccttaatgtaacggactgcacatgtccaagtctcctccttcaactatcctcccaaggctgggactccccgaaggttcccttaatggaccttgggtcaatattgttaggacagaaagccgtgggcattggtcattttcttttatatctaatctactagaaattattttccttcaggtcgagaatttcttatctgctatttgaaggcaagactgttgttcttttattactgttattattgacaggttatggttagtaatgtgaattttgttattattagtggtggtgatggtattcttgcttttagatgagaaactgaagctggaa

SEQ ID NO: 358578 - DNA, 606 bp, Homo sapiens
aaattgtatttttttaatgaaaaacaccttctaaccattaagcaaagaaaacagtagaggaaaaggcagaagctatacaagagaaaaatattgacaaaaatataattttaaaaagtttttaaagcacaaaatttaataaaatgtaggttagtagaatggtgcttttcttttttctttttttttttttttaaatatattaacaagaggacctaagaaatgtctggcagtagttcaaagtcaaaggccaacatcaatcgctcataaagcaacttattaaagggcccttaatgtaacggactgcasatgtccaagtctcctccttcaactatcctcccaaggctgggactccccgaaggttcccttaatggaccttgggtcaatattgttaggacagaaagccgtgggcattggtcattttcttttatatctaatctactagaaattattttccttcaggtcgagaatttcttatctgctatttgaaggcaagactgttgttcttttattactgttattattgacaggttatggttagtaatgtgaattttgttattattagtggtggtgatggtattcttgcttttagatgagaaactgaagctggaa

SEQ ID NO: 358579 - DNA, 584 bp, Homo sapiens
aattttaaaaagtttttaaagcacaaaatttaataaaatgtaggttagtagaatggtgcttttcttttttctttttttttttttttaaatatattaacaagaggacctaagaaatgtctggcagtagttcaaagtcaaaggccaacatcaatcgctcataaagcaacttattaaagggcccttaatgtaacggactgcacatgtccaagtctcctccttcaactatcctcccaaggctgggactccccgaaggttcccttaatggaccttgggtcaatattgttaggacagaaagccgtgggcattggtcattttcttttatatctaatctactagaaattattttccttcaggtcgagaatttcttatctgctatttgaaggcaagactgttgttcttttattactgttattattgacaggttatggttaktaatgtgaattttgttattattagtggtggtgatggtattcttgcttttagatgagaaactgaagctggaaggagttaagtgattgacatcagataatacagcaagcaaggggcagggcagagttggtgcactgggaaccctggacgcgaca

SEQ ID NO: 358580 - DNA, 530 bp, Homo sapiens
actatgatgctaatttaaaaatttatttttgtagagatgaggtctcactttgctgcccaggctagtagggccaattcttaaggatatttaagggaaaagaaaactaattaaaataagcttatttaaaaattacatatcaagtttttagtacctagtgtatgtgtataagtcattgagtgaggcactgagkagctaaacagaataaagtgactccagcctagttgtgtgggtttgacagacaagcagatttataactacaagaaatatccatggaatattatttaaccacaaaaagaatgaaatcatgtcatttgcagcaacatgaatagaactggaggtcattatgtgaaatgaaataagccatgctcaaaaagacaaatattgcgtgttctcactcatatgtggaagcttaaaaagctgatctcatgaagttagaaagtagaatgatagaggccaggaagggtgggtgggtggggatagagaggttgagggggataaagagaggccaggatgggtgggtgggtggggga

SEQ ID NO: 358581 - DNA, 424 bp, Homo sapiens
atttcctgcccattgtaatttaacgtgggtgctcccttgccctctggttcctttttcatgtgagaagcattccccaatgataatgaaattttctttccttaaggtttttatttccatggatgacccatatttcaaacaggaagcacatactctttctattagtgttcagttttctgtatatttcttttaaacaaatgtaatgagcaactaaagtatattacgtaccactggaagaaactgcagagaacagaaagctgcctaagacagaaaccttgtgccctcaaggagacacaaaacatgtacacaagtctgttatcagccaggcaagtcctaagaggrcagaggtgataaggaccaaagagatgagggactgtaccttggcagtgagtggtttatgggatatgtccttactttttagagtaat

SEQ ID NO: 358582 - DNA, 603 bp, Homo sapiens
gggcctaagtggcatttactattcctatgtatatggagccagaaccatccttgtaaatttttttttgaacaaatagtttctactaatattactactaccattatttctatcactattattactattactatyaattattacttctattgcagctgctacttaacatttatggagtgtttagctgttctaaattttttttgtatattaacccacttagtccttataaatatcctctgaggcagggactataattggggaaactgaggcacagttagtaagtggcagggctgtgattcagatacaagcagtttgattcccaagtctctgctgttagtgaaaaaagtctaagactttgagtttggagatccagattccaacctgaatcctttacctaaatagctatgtaaccctatcaatcttcccatttctctgagccttttatatttcaactgaaaagtgagagtaagaactattaacttaaacacctttggtccccacatgatgtggtaaagaaaaaaaaaggagtgagaaggttactccagttgttattgcatctctcagataatgttgggtggaatttaagttataacccacagctgtatt

SEQ ID NO: 358583 - DNA, 603 bp, Homo sapiens
gggcctaagtggcatttactattcctatgtatatggagccagaaccatccttgtaaatttttttttgaacaaatagtttctactaatattactactaccattatttctatcactattattactattactatcaattattacttctattgcagctgctacttaacatttatggagtgtttagctgttctaaattttttttgtatattaacccacttagtccttataaatatcctctgaggcagggactataattggggaaactgaggcacagttagtaagtggcagggctgtgattcagatacaagcagtttgattcccaagtctctgctgttagtgaaaaaagtctaagactttgagtttggagatccagattccaacctgaatcctttacctaaatagctatgtaaccctatmaatcttcccatttctctgagccttttatatttcaactgaaaagtgagagtaagaactattaacttaaacacctttggtccccacatgatgtggtaaagaaaaaaaaaggagtgagaaggttactccagttgttattgcatctctcagataatgttgggtggaatttaagttataacccacagctgtatt

SEQ ID NO: 358584 - DNA, 612 bp, Homo sapiens
aaagatgtctgaggagagggaacaaagtcctttattatcgaggaagatgatcttggggtctcagccaagagtctttttatctggatggtgataatgataatgattctctccgtaaataatgtaggcaaaagasggatttttgctggtttgtttctctctttatagtcaattgcactctattttccctcatgcctgactcacccccaagctgccacgattaggacacatttgtacctctgataacccaggcatcaactttttaaaatgttgagctagtgagttaggtcttaacggaaaaattttctcctagtatagaacctctttgggccatgaataattaatgtcaatttatagctcaagggatgtctctgaggaatcaatatagtgaattaacttcccccacccccttcacaacaaaatcttttttaggtataattaagccttaggaagacctatactctctttaaaagaaaatcttaaatataattaacattagttttgttttcactgtattttacattttattaaatatttctaaaagctagaagctgcacagaggtggcctaggctgtaatggacatacaaattgaatgattaggaagttacagctct

SEQ ID NO: 358585 - DNA, 612 bp, Homo sapiens
aaagatgtctgaggagagggaacaaagtcctttattatcgaggaagatgatcttggggtctcagccaagagtctttttatctggatggtgataatgataatgattctctccgtaaataatgtaggcaaaagagggatttttgctggtttgtttctctctttatagtcaattgcactctattttccctcatgcctgactcacccccaagctgccacgattaggacacatttgtacctctgataacccaggcatcaactttttaaaatgttgagctagtgagttaggtcttaayggaaaaattttctcctagtatagaacctctttgggccatgaataattaatgtcaatttatagctcaagggatgtctctgaggaatcaatatagtgaattaacttcccccacccccttcacaacaaaatcttttttaggtataattaagccttaggaagacctatactctctttaaaagaaaatcttaaatataattaacattagttttgttttcactgtattttacattttattaaatatttctaaaagctagaagctgcacagaggtggcctaggctgtaatggacatacaaattgaatgattaggaagttacagctct

SEQ ID NO: 358586 - DNA, 596 bp, Homo sapiens
cgttcttggtgtttcctcacctggtagaagggaaaaggcagctttctgaggtctcttctataagaacactaatcccaatcgtgagtgttccaccctcatgacctaatcacctcctacaggtgccacctctagcaccatcacattggtgatttggttttaacatatgaaatttggggtaacacagacattcagaccttagcatatatctaaaactttctgttagaattgatgcttgccaggttggatagcccacatctgcataatagtgggacattcccctctttcttcagagtaccccctccttgttcctgagagtttccaaaggaggccacaaaccttcttatgcaactgcctgccagcttcagtgccacatgaatcyactcccctccccaggctgtccacctttccctgggaccatgggttctagaggcagactgactgcactcaatcctggctccaacacgtaccagctgtatggcctatgcaagttacttagccatcttgagctttcatttcatcatctgtgaaacctggaacaatatgctgattttgaagatacaatgaaataatatttataagacagctagcatgatacc

SEQ ID NO: 358587 - DNA, 567 bp, Homo sapiens
cattgatagagcaacattaaccaataatcattcaagtcaagatgagcacgcattttttacagttctactgtataccaacaacagtaaaccaaggaaagtttgtttggtgcaagtacataggagataggatttcattcaaggaaaactgtttcaaccgtcctaggcaaatatatgaagcaccttggtaaggtgaaactgctttctcacacaagctaagaaaacaaaaccccatgcataaatcctttagggtcaaatgatttagtcttaaaaasaaccaaaaaaaaaaaaagaaagaaaaatgaaagtaaattaaaaaaccctttttctgcacttaccagcaaagcatttggaacagagattcatagtcttgctggacctggggcaaacaaaaagaaaagaaagaaagaagagctaaaaactccatatcactctaatcaaaacataagatgtcagaaacgtaggcaaagaactttctggtcaggcaactgaactaataaactgataaattaataacaagtccctagctagccaccactcccccctcaacaaaataaaaattaaaaaaaa

SEQ ID NO: 358588 - DNA, 483 bp, Homo sapiens
taaatattgcacccctgcccctcttccagtccagactcatccgagaggatcagcacaattccattagtaaatgaagtcacaacttggggattgatggggataattaataaaaagggccacaagtggttccaagtgctcctgcagtcatacacacacatactctgtttagcatcccgagttctcaragaaggaagaggtgtggagaagttatttgaatttgttagttctcagatttttttatcagggtaagcagtttttaaaaattaaagagtgaagagaaagtgatggacatacacttgccaacttttattcatttggacatttaaaaggaaaatcatcaccatagagttataaataaattataacaaatgtaacaatatagcatatatttagctttatgaaaaactgatattgtccttctcatttaactataaaaatttcatcactggctggatgcttggtggctcatgcctgtaatcctaa

SEQ ID NO: 358589 - DNA, 534 bp, Homo sapiens
attattggctctcacaagaaacataygcaagaaaggaaggtaagaaaaagaagagtatcttttcagtgccattcaggactaatagttcacaactatctgaatggttgaactaggtttatagggtgtattttcaagaatagatggttaacaaaatagatcatttatattaagtaataaaaacctacttgagaaagtcatagattagcgttcatggtgggagacgtttcccttttcaaatcagacatttctgtatgtttctcacttgagctcctgccaaggatgcccaggacaggttgatatcttcccttctgtgcctcactttgctcggataaaaaaataatgtattagatcattggtattataatctttttgactacagcctacattaagaaatatattttttattgtgatctaatatacacataagtgtgcataataaatatatattacaaagtcagaagttttataagagacagtttaaccttactgtgtgtagtgcatgctgatatttccttttctgttgtttctctcatc

SEQ ID NO: 358590 - DNA, 589 bp, Homo sapiens
gaggacatgatacagactagcctccacaacgatagaaaactagtgaggaatgaggattatgagtgggctgaggatgcatgcacaactgaagaggtttaactatcctgcagctcacacatccctggaggcagcctggactctagggttgtctgatttatggaggtggctgagtcaaagcccaggacattacctggaagttctcgctttgacctctctctctctaactgtgtattccctaaggacaatattatctgtccaagccacaygggctgtcatgatgctgtccctccattttgaaatctggttgagatgatattatggcttctggacaaaatgtccacttccctgagaactttcagaagtgagcttaaaaggctaattagggtaaggaagggaagagatgcttgtttgaaaggtggcttaccttttttggagctttaatttagctccttcaagaaatgagaacttggcagtgagtacaaagaagaaagtggaaaatttgtgagcgacaccttgataagttaactcttagcaagaaagggttccctgaagagttttgtaacagccaaagggtttaaggatttaagac

SEQ ID NO: 358591 - DNA, 589 bp, Homo sapiens
gaggacatgatacagactagcctccacaacgatagaaaactagtgaggaatgaggattatgagtgggctgaggatgcatgcacaactgaagaggtttaactatcctgcagctcacacatccctggaggcagcctggactctagggttgtctgatttatggaggtggctgagtcaaagcccaggacattacctggaagttctcgctttgacctctctctctctaactgtgtattccctaaggacaatattatctgtccaagccacatgggctgtcatgatgctgtccctccattttgaaatctggttgagatgatattatggcttctggacaaaatgtccacttccctgagaactttcagaagtgagcttaaaaggctaattagggtaaggaagggaagagatgcttgtttgaaaggtggcttaccttttttggagctttaatttagctccttcaagaaatgagaacttggcagtgagtacaaagwagaaagtggaaaatttgtgagcgacaccttgataagttaactcttagcaagaaagggttccctgaagagttttgtaacagccaaagggtttaaggatttaagac

SEQ ID NO: 358592 - DNA, 429 bp, Homo sapiens
ctaaaaccaaaatggatgtggggcttccctggccttttctttcttcctgctggctggaggaggaccacagctgckgcattcaccttgggccagaggtagaagcctcacactgaggatcactgagccacctcacacccctgagccacctgcctttggattactctgagagaaaacaaatgtcttgttgaagtcattatattttggggtctccttggtccagcagcttagcttctatcctagttaatataactccttactctaatatcccaggaaaaacagggtcttttgggtctactgatagagggaaaccctgatgtgagggtgtggcctgctcaatcttgaaaagacagcgcatacagggactggactctctttggtgacagaaggcttaggtctgtcttctgcacagttcgcataggcagatggctc

SEQ ID NO: 358593 - DNA, 429 bp, Homo sapiens
ctaaaaccaaaatggatgtggggcttccctggccttttctttcttcctgctggctggaggaggaccacagctgcggcattcrccttgggccagaggtagaagcctcacactgaggatcactgagccacctcacacccctgagccacctgcctttggattactctgagagaaaacaaatgtcttgttgaagtcattatattttggggtctccttggtccagcagcttagcttctatcctagttaatataactccttactctaatatcccaggaaaaacagggtcttttgggtctactgatagagggaaaccctgatgtgagggtgtggcctgctcaatcttgaaaagacagcgcatacagggactggactctctttggtgacagaaggcttaggtctgtcttctgcacagttcgcataggcagatggctc

SEQ ID NO: 358594 - DNA, 429 bp, Homo sapiens
ctaaaaccaaaatggatgtggggcttccctggccttttctttcttcctgctggctggaggaggaccacagctgcggcattcaccttgggccagaggtagaagcctcacactgaggatcactgagccacctcacacccctgagccacctgcctttggattactctgagagaaaacaaatgtcttgttgaagtcattatattttggggtctccttggtccagcagcttagcttctatcctagttaatataactccttactctaatatcccargaaaaacagggtcttttgggtctactgatagagggaaaccctgatgtgagggtgtggcctgctcaatcttgaaaagacagcgcatacagggactggactctctttggtgacagaaggcttaggtctgtcttctgcacagttcgcataggcagatggctc

SEQ ID NO: 358595 - DNA, 536 bp, Homo sapiens
ccacagctggcttggtttcagtaaccagattttaagcccaggaaaggctgagagctgtgaaaacagaaaaagcaaatttggagcccctgcctccctaacaggactcttaacacagctggggtcagggaagagctggggctgctactgaccagcagggaggcaatggcagtgccttgaggaagctcagagcttttgaaggctctgcacggtgtggatgagttgcctaacacaacagccaagtctgccctttcatctttggagagatacaatcagcagcctcacagaattctggcggagacaattagctcgtgaattatttatctaatatctcagcagccaaggtcttgggggtgctgctctgcaaacttatcccaggaacttacggacaaaaaggtaggtgacttgctctaattcccactagggattttagccaatctgtccatctctctgyatgccctcctgccatacacgtactacatgccctcctccaccattgctctggacccagatgcagtctgcctccctcacttcctcca

SEQ ID NO: 358596 - DNA, 503 bp, Homo sapiens
ttaattttctgtgtcaaattggctagaccacagtatttgtttaaatattattctaattgtgtctgtgagartattttttaaatgagattgccatttaaatcagtagactttgagtaaagcagattatcttccataatgtgggtggctctcatctgatcagctggaggccttaacagataaagactccctctccttcccattaggcagagagaattttgccagcagactgcctttagacttgaccagcaataccaactcttccctggggctccaggtgaccagctcactctgaagattttggacttgcctgcctgtacaataacgtgagccaattcctaaaataaatctctgtctctctctcttgctatatatatatgtgtgtgcgtgtgtgtatttctctctatatatataataaatacatatataatacatactatatatgtatgaaggtatatgtatctctctatatgtatatatagaatttctctagatatatgtgtata

SEQ ID NO: 358597 - DNA, 527 bp, Homo sapiens
ttccaaaacacaatttatatggagatgagtttgggaaaagagagagatggcgttcaggtcatagatcacagcttaaaggtctgtgatcttccactatccccctttcggaggacatttaagtattaatctgatggggagaatgaaacaggaaaagggttgaactgtatgctaggtttcttcacrgaactttctgaaatctaactggtatagatcctgacaccatttgcgacgtagccagaggagggcaacagtgctaggagaactttttagagctgtcttggcaagtggagggagaaaatgatgccctcagaaatcatgggggttgaagggggagggtctttattttctctcccctcaccagagctttaaagggcttctggctccatcccatctgtgtctgactgatgtttgctggaaagctagatgccctccttccatatctcaagatggaactgtctttcactttttacttttccgcataaagatctggggaaaggataggtctagaaggaacttaacccggatgt

SEQ ID NO: 358598 - DNA, 527 bp, Homo sapiens
ttccaaaacacaatttatatggagatgagtttgggaaaagagagagatggcgttcaggtcatagatcacagcttaaaggtctgtgatcttccactatccccctttcggaggacatttaagtattaatctgatggggagaatgaaacaggaaaagggttgaactgtatgctaggtttcttcacagaactttctgaaatctaactgrtatagatcctgacaccatttgcgacgtagccagaggagggcaacagtgctaggagaactttttagagctgtcttggcaagtggagggagaaaatgatgccctcagaaatcatgggggttgaagggggagggtctttattttctctcccctcaccagagctttaaagggcttctggctccatcccatctgtgtctgactgatgtttgctggaaagctagatgccctccttccatatctcaagatggaactgtctttcactttttacttttccgcataaagatctggggaaaggataggtctagaaggaacttaacccggatgt

SEQ ID NO: 358599 - DNA, 527 bp, Homo sapiens
ttccaaaacacaatttatatggagatgagtttgggaaaagagagagatggcgttcaggtcatagatcacagcttaaaggtctgtgatcttccactatccccctttcggaggacatttaagtattaatctgatggggagaatgaaacaggaaaagggttgaactgtatgctaggtttcttcacagaactttctgaaatctaactggtatagatcctgacaccatttgcgacgtagccagaggagggcaacagtgctaggagaactttttagagctgtcttggcaagtggagggagaaaatgatgccctcagaaatsatgggggttgaagggggagggtctttattttctctcccctcaccagagctttaaagggcttctggctccatcccatctgtgtctgactgatgtttgctggaaagctagatgccctccttccatatctcaagatggaactgtctttcactttttacttttccgcataaagatctggggaaaggataggtctagaaggaacttaacccggatgt

SEQ ID NO: 358600 - DNA, 527 bp, Homo sapiens
ttccaaaacacaatttatatggagatgagtttgggaaaagagagagatggcgttcaggtcatagatcacagcttaaaggtctgtgatcttccactatccccctttcggaggacatttaagtattaatctgatggggagaatgaaacaggaaaagggttgaactgtatgctaggtttcttcacagaactttctgaaatctaactggtatagatcctgacaccatttgcgacgtagccagaggagggcaacagtgctaggagaactttttagagctgtcttggcaagtggagggagaaaatgatgccctcagaaatcatgggggttgaagggggagggtctttattttctctcccctcaccagagctttaaagggcttctggctccatcccatctgtgtctgactgatgtttgctggaaagctagatgccctccttccatatctcaagayggaactgtctttcactttttacttttccgcataaagatctggggaaaggataggtctagaaggaacttaacccggatgt

SEQ ID NO: 358601 - DNA, 541 bp, Homo sapiens
tctaatgggatgtctgtgtcaaagcaaggagtatgaaactggacaggacactcacaaactctttgaacccaggaacaacagcatccaaatgcccagggctggtgtcttctatgggacagaatttgaaaggcattatcttcccaaatttctctctcatgttagcacattgcacctttcctaagagcctctaccactactgccattcctctgggttaacagtggaaatgagatgactgtgtcctcatatgtcaaactgcaccaatcttgttcccaccagagaggaagkgttcgggagggaaggggggctgtgccttctctcaccatgaacacttgatcatagattagcttttcctatctgcaagggtccatcctggcagcctttcccaacatttctaccaccgcggatccctttttcggtatcttctatatggatcccatgttttgaatgattctgccttgctaatctatatttattaccaaacattaattcattttcctatttttcccacatatgaaaaatacatctaaaaatcagagcttc

SEQ ID NO: 358602 - DNA, 541 bp, Homo sapiens
tctaatgggatgtctgtgtcaaagcaaggagtatgaaactggacaggacactcacaaactctttgaacccaggaacaacagcatccaaatgcccagggctggtgtcttctatgggacagaatttgaaaggcattatcttcccaaatttctctctcatgttagcacattgcacctttcctaagagcctctaccactactgccattcctctgggttaacagtggaaatgagatgactgtgtcctcatatgtcaaactgcaccaatcttgttcccaccagagaggaagtgttcgggagggaaggggggctgtgccttctctcaccatgaacacttgatcatagattagcttttcctatctgcaagggtccatcctggcagcctttcccaacatttctaccaccgcggatccctttttcggtatcttctatatggatcccatgttttgaatgattctgccttgctaatctatatttattaccaaacattaattcattttcctatttttcccayatatgaaaaatacatctaaaaatcagagcttc

SEQ ID NO: 358603 - DNA, 595 bp, Homo sapiens
aagaatatatattggaaactgtgtgccttaatgtgagttatagatgtgtagtataattaggaatgtatctggtctttgcactggttcttggcatagagcttcaaaaacccttggaatttcctgagtgataggagtgactttgtgatgcaattggggtgactcatggtagacccttagatagccttagaatgatggctggtctccagaaagattagccctgtgatcacagggttgcaactctggtcagccagacctctgaggaggaaagaggggctggakattgagttcaatcatgtaacaaataatttaatcaatcattcgtgtctacataatggaactccaattacaattctggacactgaggctcagaggagcttcctggttattgaacacactgacacaaaggagggtgaggtgccctgatgccacagggagagggcatggaggctctgggtccaggacccttccagagcttgcccatgggtatccctcataataaacttgcattcataaggatagcactttcagtgagttctgtgaatcattctagggaattctttaatttcagagggtcatgaaaactcctaaatttata

SEQ ID NO: 358604 - DNA, 601 bp, Homo sapiens
tggagtggtgaaaggagaatgtatcccaagttaggatgttactaacagttcatggtgattacaatgattgtgagttaatttaaaaaaattttagcaccactgggtgtggtggctcacacctgtaatcccaacacttccgaaggccaatgtgggtggatcagctgagctcaggagttcaagaccagcctgggcaacacagtgaattcccatctctayaaaaaaattttaaaaattagctgggcatggtgggggcatgcctgtggtcccacctactcaggagactgaggcagtaggatcgcttgagcccaggaggttgaggctgcagcaagccgtgattgcaccactgcactccagcctgaatgacagtgaagctctgtcaaaaaaaaataaagaaataaagaaagaaaaattctagtaccataataaaaattctaatttgagagttcaaactaataggaattacatttattattattctgtaaatgtaagttaggaattgatcaaggaggaaagagctcagagtatttacctaagaaagccagcattgtataacagaaggtacgcagaaaaaatactgctgtggtagcttaataaaaagtca

SEQ ID NO: 358605 - DNA, 544 bp, Homo sapiens
tgctgtggtagcttaataaaaagtcacgttctaagacattctaatttgtgggcttcctgagtgcttgctgtggacctacaggcaacatatgacaagggactctaagtccaaggagtacaaaccaataagatatcaggccctttcatcaagggtgaagtggtagaacatatgtctgarcagagatattcaaaatttgcaaacaaaggaaatactaatgcaacatagattgttgattcatctgaaacaatggtagggttgcaacactcctagatagaatataaaagacctaagaaaccagccattctttcatcttcaatggtaatgcattgaaattgcaactaatgacttctcccttgatcataccactgtaataaactaatcatacacataatcacgtatacagttttgtagaaatgcaatgacttgattgcttatttatgtttgagtgtgtatgtggttgtgtgtggcagagagaaaaaaagaacacataaaactttgtgataagaatgtttacaattggaaatctgagggtttttaccatctt

SEQ ID NO: 358606 - DNA, 544 bp, Homo sapiens
tgctgtggtagcttaataaaaagtcacgttctaagacattctaatttgtgggcttcctgagtgcttgctgtggacctacaggcaacatatgacaagggactctaagtccaaggagtacaaaccaataagatatcaggccctttcatcaagggtgaagtggtagaacatatgtctgagcagagatattcaaaatttgcaaacaaaggaaatactaatgcaacatagattgttgattcatctgaaacaatggtagggttgcaacactcctagatagaatataaaagacctaagaaaccagccattctttcatcttcaatggtaatgcrttgaaattgcaactaatgacttctcccttgatcataccactgtaataaactaatcatacacataatcacgtatacagttttgtagaaatgcaatgacttgattgcttatttatgtttgagtgtgtatgtggttgtgtgtggcagagagaaaaaaagaacacataaaactttgtgataagaatgtttacaattggaaatctgagggtttttaccatctt

SEQ ID NO: 358607 - DNA, 544 bp, Homo sapiens
tgctgtggtagcttaataaaaagtcacgttctaagacattctaatttgtgggcttcctgagtgcttgctgtggacctacaggcaacatatgacaagggactctaagtccaaggagtacaaaccaataagatatcaggccctttcatcaagggtgaagtggtagaacatatgtctgagcagagatattcaaaatttgcaaacaaaggaaatactaatgcaacatagattgttgattcatctgaaacaatggtagggttgcaacactcctagatagaatataaaagacctaagaaaccagccattctttcatcttcaatggtaatgcattgaaattgcaactaatgacttctcccttgatcataccactgtaataaaytaatcatacacataatcacgtatacagttttgtagaaatgcaatgacttgattgcttatttatgtttgagtgtgtatgtggttgtgtgtggcagagagaaaaaaagaacacataaaactttgtgataagaatgtttacaattggaaatctgagggtttttaccatctt

SEQ ID NO: 358608 - DNA, 582 bp, Homo sapiens
ttaattttttggagaaaagctatcttgtgttccatagcacagctgagaggtgcctaatgtgtgctctctgagccactcataagtattagttctttaattgagggagagggggggggacaggaaaaaaaaaaaaaaaaaaagaaaaacccagagacagtaggagcccttctttggctagggcctctttctccacgtgtgggtttgccctccaggctcaggttagcctcctgtttttggcccctccccacctctttcctgctatctgatgccaaatgctaccatccctgatgtagccatactcctagcccctgtggtaggcagaacaacagcctcctaaaatgtatacaycataatccttgggaattgtcaatgtattgtgtttcatgatgaaagagactttgcaaacataattaaggttccagaccttaaaacacagggattagcccgtgttatccaggtgggcccaatttaatcacacgcacccttaaaagcagagaaatgtcttcagctggagggagaagagaatggcagaaaagagatcccccagaaagaaaagccaaagagattccaagcataagtaag

SEQ ID NO: 358609 - DNA, 503 bp, Homo sapiens
aattaaggttccagaccttaaaacacagggattagcccgtgttatccaggtgggcccaatttaatcacacgcacccttaaaagcagagaaatgtcttcagctggagggagaagagaatggcagaaaagagatcccccagaaagaaaagccaaagagattccaagcataagwaagatttgatgcatcattgctggttctgagatgcaggggccacatacaaggacaggcagagacctccaggagccaaagacagcttctgctggcagccagcaagcactaagaactcaattcgacaactacaaggaactaaattctaccaacaacctaaaagggcttggaagaggattcttcccaaagtctccagaaaggaatgcagtcccaacaacaccttcattttagtgctgtgtgacccatttcaggcttctaacatatagaactgtgagataataaatggatgttgttttaaattgctaaatttatgataatttgtcatagtgcaatag

SEQ ID NO: 358610 - DNA, 536 bp, Homo sapiens
aatatttttgccatgaccggtaaagctctggcctctgcctatttctacagcctcatctccagctactcttccccttccctccatttctgggatctagccagactggccttctttcagtctctggaccagctctctactccatgatctctagtgccccagggctcatttattcagcaaatattcactgagcatatattatacagtagacatcattctagtaataggaattcatctgtggacgaaacagaaaaacatgatctcagggaagttacgttctaaggaaatagtaagcaaaataaataaaaaataatatagcatgctaaaaggtaacaggtgataaggagracaattaggcagagaaagggtaatgctagaaggaggttcaactggaaattctaaataatatggtcatgggtgtaaattggtgcagccattatgtaaaacagtatggatcatcctcaaaaaattaaaaatagaactattacatgacccagcaatccctattcctggtatatacccaaacaaggggaaatcac

SEQ ID NO: 358611 - DNA, 536 bp, Homo sapiens
aatatttttgccatgaccggtaaagctctggcctctgcctatttctacagcctcatctccagctactcttccccttccctccatttctgggatctagccagactggccttctttcagtctctggaccagctctctactccatgatctctagtgccccagggctcatttattcagcaaatattcactgagcatatattatacagtagacatcattctagtaataggaattcatctgtggacgaaacagaaaaacatgatctcagggaagttacgttctaaggaaatagtaagcaaaataaataaaaaataatatagcatgctaaaaggtaacaggtgataaggagaacaattaggcagagaaagggtaatgctagaaggaggttcaactggaaattctaaataatatggtcatgggtgtaaattggtgcagccattatgtaaaacagtayggatcatcctcaaaaaattaaaaatagaactattacatgacccagcaatccctattcctggtatatacccaaacaaggggaaatcac

SEQ ID NO: 358612 - DNA, 536 bp, Homo sapiens
aatatttttgccatgaccggtaaagctctggcctctgcctatttctacagcctcatctccagctactcttccccttccctccatttctgggatctagccagactggccttctttcagtctctggaccagctctctactccatgatctctagtgccccagggctcatttattcagcaaatattcactgagcatatattatacagtagacatcattctagtaataggaattcatctgtggacgaaacagaaaaacatgatctcagggaagttacgttctaaggaaatagtaagcaaaataaataaaaaataatatagcatgctaaaaggtaacaggtgataaggagaacaattaggcagagaaagggtaatgctagaaggaggttcaactggaaattctaaataatatggtcatgggtgtaaattggtgcagccattatgtaaaacagtatggakcatcctcaaaaaattaaaaatagaactattacatgacccagcaatccctattcctggtatatacccaaacaaggggaaatcac

SEQ ID NO: 358613 - DNA, 550 bp, Homo sapiens
tcctttcagcaatgtacaagacttccttttgctccatattctcaccaacacttgctatagtaagactattccatttttctaattaagtgtgtctaaacagtatcttatactgcatgtgtgtttgtttcctgtctctactccaatgactgatgcagttaagcatcctcacttgtgcatctgcttccactttcatatgtcaataaaatataaaatatattttatctatttttttcagttggtttgtcttctttatgattggcaagagtttttttataattcctcaatacagactttttaaaaaatattacaagccatgaaaatatttcctataagtttatggttttttttttaacattggtgacatggtttggccctgtgtccccacccaaatctcatcttgtagcttccataattcccacgtgttgtgggagggacctggtgggagatgactgaatcatggggacaggtctttccygtgctgttctcatgatagtgaataagtctcacaagatctgatggctttataaggtggagtttccctgcacaagct

SEQ ID NO: 358614 - DNA, 541 bp, Homo sapiens
agacagacagcgtgctctctgcaaggcttcagataataagaatctacattcgagaggatggccgtcttgtcattgaattcaagacccatgccaaattcagaggtaatatcaatgccgttttttttttccaactttttattaagaaacatttcacacatacagaaagttgaaagaatagaacagtaaaaaacagtcaacaatgattaacattttgctatacatccatgtgcacatacatccatccatacatatctttttttgtcacaccgttcagaaacaagttgcagacttcgtgtcaagttacccaaaatacttcagttgacatctcctaagaacaaggacattctcttatagaatcacaacatcatgatcacttctacgatatttagcattgattsaataatatccagtctctattcatatttcctttattgttccacaaacgtcttttccacttatttttatatttgtttattttataactgcttacataaaaagaaagaagttccagttatgattcatatgttacattttgattgtt

SEQ ID NO: 358615 - DNA, 547 bp, Homo sapiens
acattaaatgcatgtgtttccccttcaaataggacagtttgtgatggagcatcacactctcccagaagtgaaatctttcgtattgactccagaccacctaggaggaattgaatttgacttgcagctattatggagcgctcagacttttgattctccacatcaactctggagagccacaagctcttataacaggtaaatacagtgatggaggcctccatgggtagagctgaatggttttccatttctttcaggagcttgrgaaatagtgctttcctctgaaggctagacttttattttaaaaggggaattgatagaaataaccctcagctgggagtagtggtgctagctggtagcccagctactcaggaggatcacttgaactcaggagtgcgaagctgcagttagccatgatgccacctgcaaatagccactgcactccagcctgggcaacagaaagagatcctgactcttaaaaaataataataataattaaaagaaatgacattctagcaaagaaagaaagaaacaaatcttgctcagatcaact

SEQ ID NO: 358616 - DNA, 547 bp, Homo sapiens
acattaaatgcatgtgtttccccttcaaataggacagtttgtgatggagcatcacactctcccagaagtgaaatctttcgtattgactccagaccacctaggaggaattgaatttgacttgcagctattatggagcgctcagacttttgattctccacatcaactctggagagccacaagctcttataacaggtaaatacagtgatggaggcctccatgggtagagctgaatggttttccatttctttcaggagcttgggaaatagtgctttcctctgaaggctagacttttattttaaaaggggaattgatagaaataaccctcagctgggrgtagtggtgctagctggtagcccagctactcaggaggatcacttgaactcaggagtgcgaagctgcagttagccatgatgccacctgcaaatagccactgcactccagcctgggcaacagaaagagatcctgactcttaaaaaataataataataattaaaagaaatgacattctagcaaagaaagaaagaaacaaatcttgctcagatcaact

SEQ ID NO: 358617 - DNA, 439 bp, Homo sapiens
tgtaaatcatttaaactttccaagcctcgttttccctatctgtaaagtggaagtgatacatattctcctgatgtacataaagcactaagcccagtgcctggcacacagggaacatcagataaactgaagctgtaaacatcatcatcaycatcatcatcatcatcatcatcattttagaaccagcttgtgaaaccagtaaaatgcttttctcttgaggttgtgcaactgtcaagctttacttcctaaaggaatcgctgtcttctaacatccagatatccagaagaaatgttgattccccttccattcccttgccgccatttttactcatccctttgtttgttagccagctctcctgtagttcataaacctcgcctgggaaaaacttcaattctggtgaaaggtgggcctgggggcacccctacatctgtgtctgacctgg

SEQ ID NO: 358618 - DNA, 412 bp, Homo sapiens
ctctttcacatctggcataatcccacctagaaatttcaacattaacaatttaatgattatttttgtcagcctctcatgaaaattttaacacggtttattgaaaggaaaagtactgtttkgtttttttttcatcccaaggcagtatcgaactcaactaaagaagacataggtgtgtaaaaaccaacttccatagcaggtgaaatgacagcaagaatgccacttgttgttgttgttgttgttgttttgtttttccttttcttcctacattgttctcactctatcattcagctttctcccttaggccttgtgccaggatgataagggatgggaacgggctcagttgcccatccctcatctctgaagtgttagcagacttcagaggttacagctgtgtaggccctggacctgacat

SEQ ID NO: 358619 - DNA, 412 bp, Homo sapiens
ctctttcacatctggcataatcccacctagaaatttcaacattaacaatttaatgattatttttgtcagcctctcatgaaaattttaacacggtttattgaaaggaaaagtactgtttggtttttttttcatcccaaggcagtatcgaactcaactaaagaagacataggtgtgtaaaaaccaacttccatagcaggtgaaatgacagcaagaatgccacttgttgttgttgttgttgttgttttgtttttccttttcttcctacattgttctcactctatcattcagctttctcccttaggccttgtgccaggatgataagggatgggaacgggctcagttgcccatccctcatctctgaagtgtyagcagacttcagaggttacagctgtgtaggccctggacctgacat

SEQ ID NO: 358620 - DNA, 637 bp, Homo sapiens
aagttatacacaaattttcaactgtgtggggagttggcacccctatcccctgcattgttcaagggtcacctgtagtatacaaaattctgagaatttttggaatttatataaatgacttcattacagacaaataaagacaataagagaatctcatctttcagccaccaccaatccacttactttgtcccctttgagaaatgtaatccgtgaagagtctgcattttgtctctcctcaaagtcctccatgacctgagcggaatggctctgagtatagcacctcactgatgactcatagctcaggtctccgctccgagtgatagggacatgcaggacaccctccttctccttcactaggagcaaatccttggcaaactgcatgctgggcactaggtgggcagacagaaagacagacgcaccrttagtggaagacagggaagctgtggccatggtccttgtcagccttcagcagctattttggcaggtgagctccaccaaagcccaaggtaggctgacaaatcacaggtggcaagcagattccaaagcatggttgttgctctcaggacaagggaactgcttctactataagtgtgcatccagtgaaatagaacagatcaattttgtacctatctttgtacaa

SEQ ID NO: 358621 - DNA, 637 bp, Homo sapiens
aagttatacacaaattttcaactgtgtggggagttggcacccctatcccctgcattgttcaagggtcacctgtagtatacaaaattctgagaatttttggaatttatataaatgacttcattacagacaaataaagacaataagagaatctcatctttcagccaccaccaatccacttactttgtcccctttgagaaatgtaatccgtgaagagtctgcattttgtctctcctcaaagtcctccatgacctgagcggaatggctctgagtatagcacctcactgatgactcatagctcaggtctccgctccgagtgatagggacatgcaggacaccctccttctccttcactaggagcaaatccttggcaaactgcatgctgggcactaggtgggcagacagaaagacagacgcaccattagtggaagacagggaagctgtggccatggtccttgtcagccttcagcagctattttggcaggtgagctccaccaaagcccaaggtaggctgacaartcacaggtggcaagcagattccaaagcatggttgttgctctcaggacaagggaactgcttctactataagtgtgcatccagtgaaatagaacagatcaattttgtacctatctttgtacaa

SEQ ID NO: 358622 - DNA, 578 bp, Homo sapiens
caaaaggtaccaactaggccttagttctaagttctatattcttcctatcatacgtcagtaatttcaattattttcaaagaaacagacaacaacaaaatacttctgtgcatgttttttctgtgttggtttaaaagtgggattatatataasaaatccttgtctttgagtttttaagcatattctgaataaaaatattcaaacagtaattacagcaaaatcataaagaacagagaatactaatttttgaagggccaggaaagaaacaaaatcacttagttttgcattttccaaagtcaaagtttatacaactggagaaatggaaaaccgatgaacgccttaaaattctcttcagtagatggcagtagtgtgtacaaaatgagaggaaaccaggctgagaggcaccacaaagaaaatgacaaattttaatcaaagacactttctctaaataattactgtaaatccctctataatttctctccttcagtgaggataaacctgatttgaaatgaagaacaaacatctaactagtttttagctcattgagataactgctcaaaattggatagaacctgttttag

SEQ ID NO: 358623 - DNA, 551 bp, Homo sapiens
tgactgctataaatggtcaataggacatacttctttctcatcacctaatttgtcttcaccaatgagcccccccttttttttcttcctgaagctttccaggtaggatttctatctgaacagggggtatacatatacacatagtatcattgcttccctctaagagaccctccagacagaggactgatagyaatctagaattatagattttttttctatacaggaaaagataacatcacaaccacaaattactttaaagctctcctttgctttttaatggaaactctgttatttcaggagctaaagctgagtgactagagagggcctgttcccctgctctgtcacagtgaatgtctatggaagttaggtaaggttgacactcacatttcttttaagtatttgagtcaaaaatatatcgttgagcttttaaactctaaaaccaattcctctacccagccaaatctgagaaactacaatatccagctacttatactgtctctcctgactgaaaacagccttctctctccagtctgcctgtaagtcctatcagcact

SEQ ID NO: 358624 - DNA, 551 bp, Homo sapiens
tgactgctataaatggtcaataggacatacttctttctcatcacctaatttgtcttcaccaatgagcccccccttttttttcttcctgaagctttccaggtaggatttctatctgaacagggggtatacatatacacatagtatcattgcttccctctaagagaccctccagacagaggactgatagtaatctagaattatagattttttttctatacaggaaaagataacatcacaaycacaaattactttaaagctctcctttgctttttaatggaaactctgttatttcaggagctaaagctgagtgactagagagggcctgttcccctgctctgtcacagtgaatgtctatggaagttaggtaaggttgacactcacatttcttttaagtatttgagtcaaaaatatatcgttgagcttttaaactctaaaaccaattcctctacccagccaaatctgagaaactacaatatccagctacttatactgtctctcctgactgaaaacagccttctctctccagtctgcctgtaagtcctatcagcact

SEQ ID NO: 358625 - DNA, 426 bp, Homo sapiens
tcaaatcaaacataatggaaccataactgtctcaagtatattattcagggttctccagagaaacagaaccaataaaatgtttagaaagagatttattcagagggattggctcacgtggttatgtaagttgagaagacccacaatttgtcatctgtaaactggagacccaggaaagtcaatgtttcagttctattccaaactcgaaggtctgagaaccagggaagtcagctgggagtactaaagtccaaggacaggacaagatagaaggtccaactcaagcagagagagccaatttacccttcccctgcctttctgctttgttccggccctcagtgaattggatgaaggctscccaccttggtcagtgtgctctttgttacttaggccacaaaagctaatctcttccagaaataaggtcttacaaac

SEQ ID NO: 358626 - DNA, 538 bp, Homo sapiens
tatttacataattttaaattgtgtatctaaaattacaataaataatgatcttaaacyacagagatttttataagaaatgggcacacaaattgaccatgacttttgtattttattttattattcaatacatttagtttgtatataggtattttccaaaacgcatacatattttaatgacaaaatgtaagtagttcattgtaccagcaaatagtaaaatcgtacatgtaaaatgacattgtccagatccaatcttattaattacatattttgatcctttatacatgacatttctgatggtaaatacatgacttgtataataaaccatcaatatgtccactgtactctgtttaaaagattgaaagggcatagtacttctaggctgaaataacattctttaattgtttttattcatttaaatatttttctttgttcactatatttcacatttcattttgctttgctaggtacttctttttttcctaatatacttgtggtttccttccatttacaaaatacatatatttttattgtgaaacat

SEQ ID NO: 358627 - DNA, 523 bp, Homo sapiens
atgtctatacttacattattctaagtacaaaaatgtgttctaaagtagttcataaatattggttctcattttacagtcaaacacagtatattgctttttgtatagcagcttccctgatgataaatgctgcaaaaataattcatgttcatgccagaacaaaattggcagtaaagattaaactcacattatactagaawgtccagggatttcaacttgagcctccagcaactagacgttctagttagaaatgtgtcagtaagattaaataattcaggctttcctctgggtagtgtggacaaaactgaattttcaatcacagtttattgttaaaaaatgatatttgatattggaaagtagctttcatttaacaaacattaatatgctattattatgtgccaggaaatgttctaggttataggcagtaaacaaaaccaaaaaagtccttccattgtaaaacttgtagtggataaacttccaggtagttgagttgagatataaaaatttccagtgcatggcacttcat

SEQ ID NO: 358628 - DNA, 523 bp, Homo sapiens
atgtctatacttacattattctaagtacaaaaatgtgttctaaagtagttcataaatattggttctcattttacagtcaaacacagtatattgctttttgtatagcagcttccctgatgataaatgctgcaaaaataattcatgttcatgccagaacaaaattggcagtaaagattaaactcacattatactagaaagtccrgggatttcaacttgagcctccagcaactagacgttctagttagaaatgtgtcagtaagattaaataattcaggctttcctctgggtagtgtggacaaaactgaattttcaatcacagtttattgttaaaaaatgatatttgatattggaaagtagctttcatttaacaaacattaatatgctattattatgtgccaggaaatgttctaggttataggcagtaaacaaaaccaaaaaagtccttccattgtaaaacttgtagtggataaacttccaggtagttgagttgagatataaaaatttccagtgcatggcacttcat

SEQ ID NO: 358629 - DNA, 527 bp, Homo sapiens
aaggcagtttcatgatcacaaaaaggacatcgttaatcacaatgatggrgtaagtgatgagcttatatgtaacttttaaagcttcagttcttcataagatatataactatccagaaggtagttgtaaatataatgagaaaccttagcataaatctccccctaaaacacataaaaacaatatttaaatttcaacctgcaatatgtggagatatacaagcactattttaatcccttatagcccatgttcataatacttgcattataatacacattaataaaagtgaaaggccaactaactgccacaaagtgttaaatatatttgttatacacaaagattgttatgaaattcgtaatatttttagtcaattggaaaaatacaaaaactataaaattagggaaaagattataatgtaatttgcaaaaataaaataaacaggaataatagccaaaaaaatcttcaagttccctagtgacaaagaaatgcaatgcaaaacagtacatttccatatgtaagacctataaataat

SEQ ID NO: 358630 - DNA, 527 bp, Homo sapiens
aaggcagtttcatgatcacaaaaaggacatcgttaatcacaatgatggagtaagtgatgagcttatatgtaacttttaaagcttcagttcttcataagatatataactatccagaaggtagttgtaaatataatgagaaaccttagcataaatctycccctaaaacacataaaaacaatatttaaatttcaacctgcaatatgtggagatatacaagcactattttaatcccttatagcccatgttcataatacttgcattataatacacattaataaaagtgaaaggccaactaactgccacaaagtgttaaatatatttgttatacacaaagattgttatgaaattcgtaatatttttagtcaattggaaaaatacaaaaactataaaattagggaaaagattataatgtaatttgcaaaaataaaataaacaggaataatagccaaaaaaatcttcaagttccctagtgacaaagaaatgcaatgcaaaacagtacatttccatatgtaagacctataaataat

SEQ ID NO: 358631 - DNA, 527 bp, Homo sapiens
aaggcagtttcatgatcacaaaaaggacatcgttaatcacaatgatggagtaagtgatgagcttatatgtaacttttaaagcttcagttcttcataagatatataactatccagaaggtagttgtaaatataatgagaaaccttagcataaatctccccctaaaacacataaaaacaatatttaaatttcaacctgcaatatgtggagatatacaagcactattttaatcccttatagcccatgttcataatacttgcattataatacacattaataaaagtgaaaggccaactaactgccacaaagtgytaaatatatttgttatacacaaagattgttatgaaattcgtaatatttttagtcaattggaaaaatacaaaaactataaaattagggaaaagattataatgtaatttgcaaaaataaaataaacaggaataatagccaaaaaaatcttcaagttccctagtgacaaagaaatgcaatgcaaaacagtacatttccatatgtaagacctataaataat

SEQ ID NO: 358632 - DNA, 631 bp, Homo sapiens
gccatagaccctatcagagtgttatgcaatatgccgtctatgtaatgcatcacctttaaaaagtgaaaatgccaaattctgaaataactctcgacttaaatttctagataagtaattgtggactcgttttgagaaatgaaaattatttttcttctccaaatttttgttttcccatttttgraagtcacaatgtgtatgtgagtgttctaaatatataaatataaaacatataaatatatgtttaaatataaatataaaacataaaaatataaaacaaacatgattagaacattcacatacatgtatattgtatatagcattatatgtttaaaacatacatattaacatatctttaacaattttctcttacataaaataaatataagagacaatcagatttttgaaatttaaattgaatttacattgtatatacttctcatgtacaacacttctggaaatatgtatatagcatagaaagggtaaattgtgcttatatttgaaatctaaaaaagttgagctcatagactttgagaatgaaatagtggttactagggactgggagggtaaagtggggagatgttggccagaggatacaaaactttagttagattaggggaataaattcaagaga

SEQ ID NO: 358633 - DNA, 525 bp, Homo sapiens
  misc_feature (1)...(525): n = A,T,C or G
gtaaaacattaaagagagaacaagtggaaagaacaggaacctcacgaacaaaacaattttttaacaatnaacaatcaccaccaaaaaagtgagaaattaaacgcaatataatttggaaagaatcttgccacattattgcttacaattgtccatctaagaaaatgtaggatagtaaaatgccagagagtcggccggaaaaagtgaaggtgttcaggaagtgtagttaaatccattaaaaaaataattgagccagaggtaagaaatatctaagaggcctggcatgggggctcacgtctgtaatcccagcactttgggaagctgaggygggaggatcacttgaggtcagcagttcaagaccagcctttccaacatggcgaagccccatctctactaaaaaaaaaaaatatagaaatcagttaggcttggtggtgcacacctgtagtctcagctactcaggaggctgagggaggagaactgcttgaacctgggcattggaggttgcagtgagtcgaggtcactgacgga

SEQ ID NO: 358634 - DNA, 525 bp, Homo sapiens
  misc_feature (1)...(525): n = A,T,C or G
gtaaaacattaaagagagaacaagtggaaagaacaggaacctcacgaacaaaacaattttttaacaatnaacaatcaccaccaaaaaagtgagaaattaaacgcaatataatttggaaagaatcttgccacattattgcttacaattgtccatctaagaaaatgtaggatagtaaaatgccagagagtcggccggaaaaagtgaaggtgttcaggaagtgtagttaaatccattaaaaaaataattgagccagaggtaagaaatatctaagaggcctggcatgggggctcacgtctgtaatcccagcactttgggaagctgaggtgggaggatcacttgaggtcagcagttcaagaccagcctttccaacatggcgaagccccatctctactaaaaaaaaaaaatatagaaatcagttaggcttggtggtgcacacctgtagtctcagctactcaggaggctgagggaggagaackgcttgaacctgggcattggaggttgcagtgagtcgaggtcactgacgga

SEQ ID NO: 358635 - DNA, 519 bp, Homo sapiens
tatcatgtccatttttttttctaaargtatagattttatagaatagttctgtcacttcactaatcagcactttcaaaaaatgttggaaatgtttccatgtgcataccactatatggaaattgaagtaatttcttgtatattagaatttagtttgatctgtgtggttaatttttaaaagtatgttctatctgttactgtttggctcatgttttgtcagttacaagcagctatttatctttattaactatcttttcaacagtcattaatctgattttgttcatgatatattgttataaagaattatgttaaatatttcttgatgttgaattatccttatactgatggaattaattggacttggtctttatatttttcttctctctgacatttctagcactattacctaactcttttgtagaatattttgtctaatttcttgatataaatttagtcattgcttcattgtattttgttttcctaacattttggtttcagtgcatgcttatatcatgaaagtca

SEQ ID NO: 358636 - DNA, 519 bp, Homo sapiens
tatcatgtccatttttttttctaaaggtatagattttatagaatagttctgtcacttcactaatcagcactttcaaaaaatgttggaaatgtttccatgtgcataccactatatggaaattgaagtaatttcttgtatattagwatttagtttgatctgtgtggttaatttttaaaagtatgttctatctgttactgtttggctcatgttttgtcagttacaagcagctatttatctttattaactatcttttcaacagtcattaatctgattttgttcatgatatattgttataaagaattatgttaaatatttcttgatgttgaattatccttatactgatggaattaattggacttggtctttatatttttcttctctctgacatttctagcactattacctaactcttttgtagaatattttgtctaatttcttgatataaatttagtcattgcttcattgtattttgttttcctaacattttggtttcagtgcatgcttatatcatgaaagtca

SEQ ID NO: 358637 - DNA, 519 bp, Homo sapiens
tatcatgtccatttttttttctaaaggtatagattttatagaatagttctgtcacttcactaatcagcactttcaaaaaatgttggaaatgtttccatgtgcataccactatatggaaattgaagtaatttcttgtatattagaatttagtttgatctgtgtggttaatttttaaaagtatgttctatctgttactgtttggctcatgttttgtcagttacaagcagctatttatctttattaactatcttttcaacagtcattaatctgattttgttcatgatatattgttrtaaagaattatgttaaatatttcttgatgttgaattatccttatactgatggaattaattggacttggtctttatatttttcttctctctgacatttctagcactattacctaactcttttgtagaatattttgtctaatttcttgatataaatttagtcattgcttcattgtattttgttttcctaacattttggtttcagtgcatgcttatatcatgaaagtca

SEQ ID NO: 358638 - DNA, 618 bp, Homo sapiens
cagttgagcttcttggcttttgcctctatgctatcatgtccatttttttttctaaaggtatagattttatagaatagttctgtcacttcactaatcagcactttcaaaaaatgttggaaatgtttccatgtgcataccactatatggaaattgaagtaatttcttgtatattagaatttagtttgatctgtgtggttaatttttaaaagtatgttctatctgttactgtttggctcatgttttgtcagttacaagcagctatttatctttattaactatcttttcaacagtcattaatctgattttgttcatgatatattgttataaagaattatgttaaatatttcttgatgttgaattatccttatactgatggaattaattggacttggtctttatatttttcttctctctgacatttctagcactattacctaactcttttgtagaatattttgtctaatttcttgatataaatttagtcattgcttcattgtattttgttttcctaacattttggtttyagtgcatgcttatatcatgaaagtcaaatttttccatctcagtaactctatgccttctcattcacttcattttatagaaaatattgattgcctc

SEQ ID NO: 358639 - DNA, 491 bp, Homo sapiens
ttttgaatatgtttatactcattcttatgtgtaagtataacaaagatttattgggcacttgamatgtatttgacactctgttgagacttgtggatacagtgatttaaaaaaactttttcctttgctaatgttcacaagacaaaagtaagacccatatcaaacgttctatgttagaaccatataaaatgttatgaccatataaaaatgacattgttatcaaaagtatttaacatatttcccacttcagtattctgttttatgaattaacagaatgtcttaatgcatataatagctcaatctaaaactattgaaatatataatttaaaacttcccccaaatttttattataaatataatgatctacacacatttaaataacattatataaaggatcaaaatcaatatttgtatgtatttatagaacctaagatgcgtaacttatttaataaaaataacataagctgagtttttaccattcaacagatgctaca

SEQ ID NO: 358640 - DNA, 574 bp, Homo sapiens
agcaattaaccatatgttaattaaaacaataacaacaatttttaaatgtttaagcaaacatggtttcttaaagtgacattttcaaggctgaatagtcaaaaatgacatggtcatattgttagtatcaggartaaccagtgcaaattttgagaaagcaatataaaaatatgtatccaaagaataatatttgtgctaatttctagtaatttgtcattaggtaataatggaacatatcaataggtatttatatatttgtgagattttttaggattatatatattaatctcaaaatatgagcttttaaaattgttataatatattcatttaattttacataatttcttcaagtataataatatggtaagtgggaaagtaggggaaatagtctataaatattcattgatatttaaactcaaactagaaagcatgggtaaaatagatgttactgtgttataatttttgtaatgttttcttaattatcaaatatcttgaataataaaatattgaattgtgagctatttaaaatatcccaaatttttaattaaataaattttatatgatgaatataaagatg

SEQ ID NO: 358641 - DNA, 593 bp, Homo sapiens
gttatatttccattttagggacttcaaggtgaggaaaactgcatttaacactgagggtcatcagagcagccttagtgaggtgaagtttcttttgataagctgccaaatagcctccatttttgtcaccatggatattttgtttgtcyataaactccgcagaaatcactgaggttttaagggatattaggtgactgatatcctcagagcaagtcattccgtcttcatgaatattaagaatctccttcacactgcaggctttttatttcaaaaaggataaagctattcttcttttgttttgtcattcaaactgcaaaattgctgcaggtatctctccagacatgttaggttgaaaattcatcatagataccagtgctatcattatagatttcgttttcaatacttgcttttcttttcattggaatgatcctgaggctgtgaaatgactcagatctggaatttggttaaaggcatgtgaaaacctgtgtggctcaagactggtcttttaataagcagactcaggaagtttctttggctataaaattagacacttaatgggatacccatatattttggcgctggggacacttgtcaat

SEQ ID NO: 358642 - DNA, 622 bp, Homo sapiens
ccaattaaaacagatttcagtttctcataatttcatttcacttggcctgggagatctctaactcacaattatgacggtcataaatgtgtccctggattcctgctgtggaagaaaaaaatgaaagtgaaatgttgaaatkcagtaatttaaaaacttaacccccccaaatttaagaagtcatttccaaagtcccatttatgtattttaatttttaaaaagaaagcaggatggcctcccccgctgatgcctggggcttcaaaggccaggacagaggcctaatggggtctgcagtggtgcctgggcagggagtcccagtacccccgcatggaggctgacagccacgccagccacggagccaagtctgtctccaagtcattgggtgcaaagaacagcacagggaccgcctgattcatcactgactaagggcagagcaaggtcacgactacatccatcagatctgtgggctttggagtttgcagcctagatcatatccacagcagggagaatgatcggcaacttcatacaccggtgcctgtacttctgtttataattttatgctcaaggttaattatgtgtgtccttggctttgatcagagatagtagcatgtgagaatgttgcctg

SEQ ID NO: 358643 - DNA, 622 bp, Homo sapiens
ccaattaaaacagatttcagtttctcataatttcatttcacttggcctgggagatctctaactcacaattatgacggtcataaatgtgtccctggattcctgctgtggaagaaaaaaatgaaagtgaaatgttgaaatgcagtaatttaaaaacttaacccccccaaatttaagaagtcatttccaaagtcccatttatgtattttaatttttaaaaagaaagcaggatggcctcccccgctgatgcctggggcttcaaaggccaggacagaggcctaatggggtctgcagtggtgcctgggcagggagtcccagtacccccgcatggaggctgacagccacgccagccayggagccaagtctgtctccaagtcattgggtgcaaagaacagcacagggaccgcctgattcatcactgactaagggcagagcaaggtcacgactacatccatcagatctgtgggctttggagtttgcagcctagatcatatccacagcagggagaatgatcggcaacttcatacaccggtgcctgtacttctgtttataattttatgctcaaggttaattatgtgtgtccttggctttgatcagagatagtagcatgtgagaatgttgcctg

SEQ ID NO: 358644 - DNA, 528 bp, Homo sapiens
atctgcccaagtcatacatttcttgggggcacaggaggactacatctctcatgctcacttgaaattaactgtggccactcaaattaaggtttaccagatggaacatgagcgggagtgatgtgttctctctaaaggcctaacccatgaaaaacctattgggaacactcccccatgctcttttccattccatgagctggatgcagatgatggcaaggaactagggtgaggtggaaccacaaaacagagggagcttggatccctgaatgaccacatggacatacacatacaccaaagactgtcttgtaagcaagaaataaacatctactgtatggaacctttgcatggagggtctatttgttatagcagcttagcttaccctgactaatacaatccctgctctctgagaatttaaaattgcttcaaggagacaagactcactcatacaattctggaatggtagtacgtggcttmgaagaagggtgggttgtaaggtttggactttcagttctgaagtcacaagctataggc

SEQ ID NO: 358645 - DNA, 610 bp, Homo sapiens
catttgaattgtaatgagtatttttaatgtaaacaggcaggaggaaaaacttgctgggttctcwtgtagcacagacacccagatatatgtcttttgatagtgatattaaagtgtcaagggtgcataggaggctgcagatgtcagcggcatgaatgggcaaggcaatttctgtggttgcaggctggaggttccagcaggaatagaaaggcaatctctgtgctagatggcccagggtcactgcaagtctagctcctaaatgaaaatcagggacaagatgtggcctgtaaccacagtcactgctcttcgtaaggctggtggaaaggtgaactggaaaggtttttagggttagggagatacaggaactcccaaacatcaggcacctgatagcactctccacctaacatctgcatttatattgacctaatgcatctgttcaatttgtctcattctttgtgctcacacacatttatttgaaacaaaactttccatcattactataggtgaaaatccttgatcacttgccttgaatacaagaaaccattattaaatgcaagctagataattttgcttgtcttacagccatgagccttaagtctgttccccccacccc

SEQ ID NO: 358646 - DNA, 610 bp, Homo sapiens
catttgaattgtaatgagtatttttaatgtaaacaggcaggaggaaaaacttgctgggttctcttgtagcacagacacccagatatatgtcttttgatagtgatattaaagtgtcaagggtgcayaggaggctgcagatgtcagcggcatgaatgggcaaggcaatttctgtggttgcaggctggaggttccagcaggaatagaaaggcaatctctgtgctagatggcccagggtcactgcaagtctagctcctaaatgaaaatcagggacaagatgtggcctgtaaccacagtcactgctcttcgtaaggctggtggaaaggtgaactggaaaggtttttagggttagggagatacaggaactcccaaacatcaggcacctgatagcactctccacctaacatctgcatttatattgacctaatgcatctgttcaatttgtctcattctttgtgctcacacacatttatttgaaacaaaactttccatcattactataggtgaaaatccttgatcacttgccttgaatacaagaaaccattattaaatgcaagctagataattttgcttgtcttacagccatgagccttaagtctgttccccccacccc

SEQ ID NO: 358647 - DNA, 571 bp, Homo sapiens
ctaggtagctgggactataggcatgcaccacagtgcccagctaatttttatatttttctgtagagacagggtctcattacattgcttaggctggtctcaaacttctggtctcaaacaaccctcctgtgcctcccaaagcactgggattataggcgtgagccagtgcacttggccaagcctaatcattttaaaaacaaagatagttagatatttcaactatggaacaaaaaaatacccaacggttgttgtagttagatttttgttgttttgtttcttatttatcaagagaactacttcaccagatattgtgtygatgtggcccaaggttaacaggaaaaatcagaaggacccaggtatctgagaacatgagtaccccacgcagccaggatgctgccagtctaggaaactgaggtgctggccaggggagagccaggcttatagaattcagaaccggttctgggtggcctttggaatgtattgtgatatggtttggctgtgtccccacccaaatctcatcttgaatcttagctcccacaattcccatgtgttgtgggagggacccagggagagg

SEQ ID NO: 358648 - DNA, 571 bp, Homo sapiens
ctaggtagctgggactataggcatgcaccacagtgcccagctaatttttatatttttctgtagagacagggtctcattacattgcttaggctggtctcaaacttctggtctcaaacaaccctcctgtgcctcccaaagcactgggattataggcgtgagccagtgcacttggccaagcctaatcattttaaaaacaaagatagttagatatttcaactatggaacaaaaaaatacccaacggttgttgtagttagatttttgttgttttgtttcttatttatcaagagaactacttcaccagatattgtgtcgatgtggcccaaggttaacaggaaaaatcagaaggacycaggtatctgagaacatgagtaccccacgcagccaggatgctgccagtctaggaaactgaggtgctggccaggggagagccaggcttatagaattcagaaccggttctgggtggcctttggaatgtattgtgatatggtttggctgtgtccccacccaaatctcatcttgaatcttagctcccacaattcccatgtgttgtgggagggacccagggagagg

SEQ ID NO: 358649 - DNA, 571 bp, Homo sapiens
gtattttttgaaatttgatagaattcaaaagtgatctaatatatgagtgcttttgataggaagagtgtgataacaaatttaatttatttaacagatacatagctaatcagtttttatgttctgtgtgttaatttgggtaatttttatctttcaatgtatttttcaactttaagttgttaaatattagatataaagttgttcatagcattcccttatttatacttttaatgtctgatttatttctagtgatcatcctttttattaccraccctggaaatttgtgtttcccctcttctgtttttaattaacatagttagtaattcatcaattttcttaatcttttaaagcaaacaacttcttgttttatttattatcttcaatgtttgttcaatttctgttcactgttgcccttctactttcatgggttttatttacttagtttttttcttatatttttaagtttagtgcattgaattttggcactttattttctaatataaacttttaaggcaatacattttcctctaagcattgctttggctgcatcccctaaaatttaataggttgtatt

SEQ ID NO: 358650 - DNA, 571 bp, Homo sapiens
gtattttttgaaatttgatagaattcaaaagtgatctaatatatgagtgcttttgataggaagagtgtgataacaaatttaatttatttaacagatacatagctaatcagtttttatgttctgtgtgttaatttgggtaatttttatctttcaatgtatttttcaactttaagttgttaaatattagatataaagttgttcatagcattcccttatttatacttttaatgtctgatttatttctagtgatcatcctttttattaccaaccctggaaatttgtgtttcccctcttctgtttttaattaacatagttagtaattcatcaattttcttaatcttttaaagcaaacaacttcttgttttatttattatcttcaatgtttgttcaatttctgttcactgttgcccttctactttcatgggttttatttacttagtttttttcttatatttttaagtttagtgcattgaattttggcactttattttctaatataaacttttaaggcaatacattttcctctaagcattgctttggctgcatcccmtaaaatttaataggttgtatt

SEQ ID NO: 358651 - DNA, 561 bp, Homo sapiens
aagttctgttagtattgtagtatatttctcaatgtatttcttatttttatcatccaacattgttttggggccaactttatttctttgcattacagtgtaatattccaccacctatgtaaactgcactccacttatcctttttacttgctcattagatgccaagcaactcttatgttgacgcaaacaacactgcagaggaaatcgtgaaatatatccctggggtatataaagttgcacactttctttaattggatttaatcggttaacatgacagtttttaggatgactcctttttgatgaaaacagtagagaaagtgtaaaccaaagccagggagatgcgtggagaaggtgattagtgggagaagcctttgctgtatgtctgtccactactatcacaatcttccaatgatgcaataggtacctacaggggcctcccctaaaatcagagcccatctgcgaccctggtttttcccagtgcctgtgtggcayagggaggcctcatgttgctgatgaaagggagacgtgtgaaagagaaaggatcttctcttgtcattgctaagc

SEQ ID NO: 358652 - DNA, 602 bp, Homo sapiens
gcagggagatggaaattctaagaaaaaagaaacaaaaagaaatgctggagataaaaaacactataatagaaatgaatcacgcctttgatgggcttgtagtaaattggacatggctgaagaaagaatctctgagcttcaaaggtatctcaatagaaacctccaaaattgaaaagcagggagaaaaagaaaaaaatgggggggaagcagagaataatatctgagaactataggacaaatataaaaggtataacatacacatatgggaataccagacagagaaaagaggagaaaggtacagaagaaatatttaaaayaataatgccccaaaatttcctctcaaattaatgtcacacaccaaccacagatctaggaagctcagagaacaccaatcaggaaaaatgttaaagaaattacacctaggcatataattcaaaatacagaaaatcaaacataaagaaaaataattccccaaagaagccatagggaaaaacaccttacctatagagaagcaaaaataagaattatctctgacttctcctcttaaactatgccagcaagaagagagtggactgaaatatttaaagtgttaagagaaaaagaaa

SEQ ID NO: 358653 - DNA, 602 bp, Homo sapiens
gcagggagatggaaattctaagaaaaaagaaacaaaaagaaatgctggagataaaaaacactataatagaaatgaatcacgcctttgatgggcttgtagtaaattggacatggctgaagaaagaatctctgagcttcaaaggtatctcaatagaaacctccaaaattgaaaagcagggagaaaaagaaaaaaatgggggggaagcagagaataatatctgagaactataggacaaatataaaaggtataacatacacatatgggaataccagacagagaaaagaggagaaaggtacagaagaaatatttaaaacaataatgccccaaaatttcctctcaaattaatgtcacacaccaaccacagatctaggaagctcagagaacaccaatcaggawaaatgttaaagaaattacacctaggcatataattcaaaatacagaaaatcaaacataaagaaaaataattccccaaagaagccatagggaaaaacaccttacctatagagaagcaaaaataagaattatctctgacttctcctcttaaactatgccagcaagaagagagtggactgaaatatttaaagtgttaagagaaaaagaaa

SEQ ID NO: 358654 - DNA, 591 bp, Homo sapiens
ttatctctgacttctcctcttaaactatgccagcaagaagagagtggactgaaatatttaaagtgttaagagaaaaagaaacatcttaaaattctgtaccctgcaaaattgcttttcaaaagtgaaggagaaatagactttttatacaaaccaaaatgtagggattcttttatttatttatttatttatttttgccagcagacctgccttgcaagaaatgttaaaagaagtgctttagagagcagggaaattctataggtcagacacttggatctacataaaaaaaggaagaaaccaaaggagaaataagtgaaggtaaagtaaaaattttatttttcttacaacaaatacatttattcaaaataaaaatagcaaaaatgtatttgattatgtatgtgtttttgtatacatgcatacataatcaatatagtcatgtgtatacagacwcatataatcaatatagttatgtgtctcttaacaatgaggatactttttgagaaatgagtcagtaggtgattttgtcattgtgtgaacatcatagtgtgtacttatacaaatctagatagtatagcctactgtacacctaggcta

SEQ ID NO: 358655 - DNA, 484 bp, Homo sapiens
gacttaaaaatatcaatctcttcgtgttgattaaatgttcatgttaaatctaaaaacaaagggagccatcaaaatcaaaaagagaaaaagcttaaaagatttgtctacataaaaataaatacataawgaatgtcatattgctaaaaaaaattcactatgtttgacaagttgattttcttgataagtcatagaatttaatatggaaatatcaatgattttggggaaaaaaactgactaaaggaataaataagccacactacaaagaagcagtctacgtggccatggcatcacagcttatgtctaatcccctttgactagagtgcaggagtgtgtgattaaactgagcaggaactaatgtgggcttcacgagtggccgccactgtattcattcaactgctgggtggaagagcggcttccctcttccttcctcagaagaccagagatgatgatttaagaaataaaagttggaaatgtcttatttcaa

SEQ ID NO: 358656 - DNA, 484 bp, Homo sapiens
gacttaaaaatatcaatctcttcgtgttgattaaatgttcatgttaaatctaaaaacaaagggagccatcaaaatcaaaaagagaaaaagcttaaaagatttgtctacataaaaataaatacataatgaatgtcatattgctaaaaaaaattcactatgtttgacaagttgattttcttgataagtcatagaatttaatatggaaatatcaatgattttggggaaaaaaactgactaaaggaataaataagccacactmcaaagaagcagtctacgtggccatggcatcacagcttatgtctaatcccctttgactagagtgcaggagtgtgtgattaaactgagcaggaactaatgtgggcttcacgagtggccgccactgtattcattcaactgctgggtggaagagcggcttccctcttccttcctcagaagaccagagatgatgatttaagaaataaaagttggaaatgtcttatttcaa

SEQ ID NO: 358657 - DNA, 304 bp, Homo sapiens
gcgggaagagtggaaataaaagtcaaatytaaaacctgcaaacataaacctggagcaggcgagagaccattattgctggtgtctgttctcagctatagaatcattaacatgaaataccttttaatgaatgcattgaaaaaagtgattatatattaaagtacaaaagtctattcctgcaccatttaaattactttacaatgctgattaaaataacagaacattatagcttgcttagctaaccattatatttccaaatccatttccaattgtttcccttcaatttgaacaatttttgagcaatttt

SEQ ID NO: 358658 - DNA, 530 bp, Homo sapiens
gtaccaccattttcttctacgagaaacctcaacaggttacagatacataatttgaaagaaaacaaccttaagtaatgtgccattctagttaggtctaaattcacatttgaaaatattattcaactaattaaaatggaattaaatgaatacagtgttaactgtgtctagtgtttagcataaaatgttgttaaatatatcatactctgtgttccaaactggcggcagattttagcaatgtttaattgtaagaaatagccatgtactacttaattgcataagtaggtggaacataaaaatcacaattacatgaattatattaagtaaaatatgttaaaatagtttgtttttcgatggtggaattttatggacactataatgaaagtgaagtacatttttaattacctaattattgctattttcaaagtccatttacaccataattgttcctgttttcatagtccaaagagtycatgacagagagactcagtgggatctaaaataaggattcattcttcagacaactcctgctc

SEQ ID NO: 358659 - DNA, 613 bp, Homo sapiens
aagatagattctaaaactacgacaattaaaatagaatgttattggaccaaggatgggcaggtagaaagaacattaagaatctattccataataggagagctttttcaagtctctgggggaaatgatgcggggacaactgcgaaacactaaagataaattgattcatcactgcttcacaccacatcctaaaataaatgtcaagcggattataaatttaaaaatacatatacaaatgaactagaaggaaatataggtgcatgtttatctgatcttgtaatgggaaaatcttttaggtagtgtattaccataaagtaraatcttgatgaaattgatcacatgtaaattcaaatattctgccataactatatctaagagcaaataggaaactggaaaaagaaacttgcaatgtatgtaacaaagggtttacattcttaagtctctgaaatgtcaatgtggacaaaagacatgattagaaaattcacaaaggaagtactaacagcaaaaatatgaaaaatgtttaactttgcaagctgtcaaagatgtgcaaactgaaacaatagtgaaacacgatttttcagctattacactgacattttctaaaaaagaaaagatt

SEQ ID NO: 358660 - DNA, 577 bp, Homo sapiens
ctccaacaatatgtgcagaataattattaattttttttaatctttgtagagatgaagtctcgctatgttgcccaggcaggtctcaaacttctggcctcaagcaatcctcccccttcagcctcccaaagtgctgggattacaggcatgaatcattgcacccagctgcaaaatgatcatatatgtaaaaagcaatagtctgtrcatgcatgggtacgctttcctgtgcacatataagcatggaatgatgacatacttctacctcgcaacccggatagaaagggccaactccctgtcccccacccaccagttcaccactgtcccttcagcaaagggacaggaatgaagagggagttttactacttctgtaatgtgtggcaatttctcagcaaagacggcagcagaatttgacagtgcaatctcaaaattaaggaaatttcacatccagctgtcaaaggctgtcaaaggacagctgggtgtgactaaggcagaggagctcctgctcttgtctgaacactactctcctccccacccccatctacagaacagaccggctcacagacaacctcccatactaatt

SEQ ID NO: 358661 - DNA, 577 bp, Homo sapiens
ctccaacaatatgtgcagaataattattaattttttttaatctttgtagagatgaagtctcgctatgttgcccaggcaggtctcaaacttctggcctcaagcaatcctcccccttcagcctcccaaagtgctgggattacaggcatgaatcattgcacccagctgcaaaatgatcatatatgtaaaaagcaatagtctgtgcatgcatgrgtacgctttcctgtgcacatataagcatggaatgatgacatacttctacctcgcaacccggatagaaagggccaactccctgtcccccacccaccagttcaccactgtcccttcagcaaagggacaggaatgaagagggagttttactacttctgtaatgtgtggcaatttctcagcaaagacggcagcagaatttgacagtgcaatctcaaaattaaggaaatttcacatccagctgtcaaaggctgtcaaaggacagctgggtgtgactaaggcagaggagctcctgctcttgtctgaacactactctcctccccacccccatctacagaacagaccggctcacagacaacctcccatactaatt

SEQ ID NO: 358662 - DNA, 544 bp, Homo sapiens
ttgatggccaggagaggccacttgcaaacccttgctccaagtcctcaaccmgggaaatcgcccttctgttcaacaagcacttcctatgagtctctccctggctctgttttggttttctccgcagccagcagcaccctatcaggcatgagagtaaatgtttatttgcttcttggattatggtctgtctcccccactgatctgatcagctctccaaggacagggattcggtcatactgttttatctcaagtgcctaacacagtgccttgtccgtgaaagatgctcacatatctgttgaatacaggaaataagggaaggaagaactgatgcctgagattctcggagactagctgtcaatcaatgtagtctcccggggagaaatgcaggtctcttgccacagcttagcataagtgtcttcccttggcttcccctgggccctagggctggcttcccaaagctgctgttcagtggcccatcgggtcgattcctctaggcaccatcacagccatttccagtacagtgtgagtcctctgtgagtcccggcag

SEQ ID NO: 358663 - DNA, 563 bp, Homo sapiens
ccaaccatgtttgtgagtttcatccatggttttacatgaggttgtagttcatgaattctcattgctgagtagtaacccaccgtatgattatatcacaatataataatctcttttacagtctatgggcattggctttttttccagttttgtgatatcaccaatagcactgccataagccttcttgtatgtgtctgttgatgaacatacaagcacatttctgttgggtgcatatgaaggagtagaattgcggggtctcagggtaggtgtatgtgcatcaactgtattttgaaacaagctggtgagtgggacttttctctctgactaagtccctgagctaaatttgtcataagataagtgataagtgccccatattctatagaggagctgcargacacacaccctcagacttcttaagaggtggcctaacaggtcacccactaagacctaagagtatccccatcacccactccaatctatataaggagaggagtaaatgtttgagagaaatatggggaagtaaaaagatagtcagctttgagagttgtcaccctgggcagagagca

SEQ ID NO: 358664 - DNA, 563 bp, Homo sapiens
ccaaccatgtttgtgagtttcatccatggttttacatgaggttgtagttcatgaattctcattgctgagtagtaacccaccgtatgattatatcacaatataataatctcttttacagtctatgggcattggctttttttccagttttgtgatatcaccaatagcactgccataagccttcttgtatgtgtctgttgatgaacatacaagcacatttctgttgggtgcatatgaaggagtagaattgcggggtctcagggtaggtgtatgtgcatcaactgtattttgaaacaagctggtgagtgggacttttctctctgactaagtccctgagctaaatttgtcataagataagtgataagtgccccatattctatagaggagctgcaggacacacmccctcagacttcttaagaggtggcctaacaggtcacccactaagacctaagagtatccccatcacccactccaatctatataaggagaggagtaaatgtttgagagaaatatggggaagtaaaaagatagtcagctttgagagttgtcaccctgggcagagagca

SEQ ID NO: 358665 - DNA, 460 bp, Homo sapiens
tcatctataatcaactgggctaatctcatgtggtgaatgttcctgttctccattttaacaaaataattaaaactgaggttcagaaagactaagaggcttgtccttggtcatgtcaaggcaaagccagggttatatgtcagactggtctggacactacttagaaaaaagaaaaatctccgcacctgattcttggagaatcattctaggaagagggcagttcaggccagattcatgtctcagcaccttctatcctgaagacacaccccaaaggtagtcaggatcatccccttgggcagcaaggggcatgttcacccagatccccaactaaaacgtctctgcctcatgagttcaaatgattagctgcttccaacctaggcccctcttctccatccatcccttcctccccgactctggggccctgacactycactggagtggcaactctttcaaggacgctaaa

SEQ ID NO: 358666 - DNA, 381 bp, Homo sapiens
tcccaagcgctggcaggctgctgtgcatgcagacagcccaccccaatggaagaatcaggggagaagagaagccsgaccccagaagtatgcccacatataagaccccaattcaaaggtcaaacagggcacttgtctttcaagttgcccacttggccctcttccaaatatgcttgccttcattctgttcccactctaaaactttttaataaacgttcattcctgctctaaagactttcctcggtctctccttctgtcttatgcctactcagtgggattgtttcttctgatgaggcaagaattgaggttctgcagacccatagggattcgccacgggtagcactaacatctctccatagttgtctccttctccccaccacctcc

SEQ ID NO: 358667 - DNA, 552 bp, Homo sapiens
ccacctgccaacctcaggggtatagtccttgttcccacttaacgtaagaggaaactgacagagatcccaggcgatttacccaaagtcacccagctggtagwtggagaagtagaggcaggaactcggattatctgaattatggtttgtattaagcactcattctgtgccaggcgcagtgaaagtaccagatggggagtttgtaaactgggcaaatgggggtcccggaaccccagaacctgatgaaaccctggccccgcctcctctgagtgtcggccccaacaacagcgcagaagaggcccctttctaccaccaggctccacccccagcgccattgattggactgtgcagaaggggtggggccttccaagcgagatgagccaatcagaacctctcttcaaggaactggaaattagaacagtgtttgggccaaatagatgggggtgagcaggggaggaaaggtcttgagggagcagcacgcttgcctgatgggtgcccaaagccaggggcaggtggaggtgagagaaggacaagctctgcaaacgttgcggaagc

SEQ ID NO: 358668 - DNA, 552 bp, Homo sapiens
ccacctgccaacctcaggggtatagtccttgttcccacttaacgtaagaggaaactgacagagatcccaggcgatttacccaaagtcacccagctggtagatggagaagtagaggcaggaactcggattatctgaattatggtttgtattaagcactcattctgtgccaggygcagtgaaagtaccagatggggagtttgtaaactgggcaaatgggggtcccggaaccccagaacctgatgaaaccctggccccgcctcctctgagtgtcggccccaacaacagcgcagaagaggcccctttctaccaccaggctccacccccagcgccattgattggactgtgcagaaggggtggggccttccaagcgagatgagccaatcagaacctctcttcaaggaactggaaattagaacagtgtttgggccaaatagatgggggtgagcaggggaggaaaggtcttgagggagcagcacgcttgcctgatgggtgcccaaagccaggggcaggtggaggtgagagaaggacaagctctgcaaacgttgcggaagc

SEQ ID NO: 358669 - DNA, 552 bp, Homo sapiens
ccacctgccaacctcaggggtatagtccttgttcccacttaacgtaagaggaaactgacagagatcccaggcgatttacccaaagtcacccagctggtagatggagaagtagaggcaggaactcggattatctgaattatggtttgtattaagcactcattctgtgccaggcgcagtgaaagtaccagatggggagtttgtaaactgggcaaatgggggtcccggaaccccagaacctgatgaaaccctggccccgcctcctctgagtgtcggccccaacaacagcgcagaagaggcccctttctaccaccaggctccacccccagcgccattgattggactgtgcagaaggggtggggccttccaagcgagatgagccaatcagaacctctcttcaaggaactggaaattagaacagtgtttgggccaaatagatgggggtgagcaggggaggaaaggtcttgagggagcagyacgcttgcctgatgggtgcccaaagccaggggcaggtggaggtgagagaaggacaagctctgcaaacgttgcggaagc

SEQ ID NO: 358670 - DNA, 578 bp, Homo sapiens
ggtactgccataggatacatgtataggtcaatagaatagaattgagaatggtctataatcaaaacatgaaaataaaaccactacatctatggtcaattgttttgacaagggtgccaaccaagatcattcgatgggaaaaagcatagagttttcaacaagtatgctgaatgactgcatatctgcaagcaaaagaattcagttggacccttgcttcacacgttatacaaaaattacctcaaaatagatcaaagacctaaatgtaaaagctaaaacaataatactctcagaagaaaacgtaaggctaagtcttcatgactttgaatttggcaatggctttttagatataataccgaaaacacaagcaacaaaagaaaaaaatggataaattggaattaatcaaaattagaaacttttctgcatcaaagaacactatcaagagagcgataaaaaatcttaaaaatkaaagaaaatatttgcaaataatatatctgctaagtatagtatctaatatgtattatcttataactcaacaagcaaaagacaattcaatcaaaatgtgggaaaaggacttgaataat

SEQ ID NO: 358671 - DNA, 602 bp, Homo sapiens
actgactccctgagaactcggataggagggtttgtctgtgtgtgtgcctatgtgtgtgtgtgtacacatttgcacctctgccatgcatcccataaatcaccactggggggacagtgacccagcctctattccatctgggcctcagattttctaatctgcctaatgagaagcttgagtgagggccctttccctctgacagcctgaggctttgtgttaacagagtttaaagtcaaaagacccagattctaaccccgcttctgccacttcctagctgtgtgtcctttaacaagtcactcgacctctctgtgtctattttcttctctctaaaatgagcaggctgatgagagctgtgcacatctatggggttgctgcagccacatccttggttttcagcctccctggactcgcatgacacacctctgcctccccattccatcacctccgtccttccactctgtcttcctttccctcatctcatctcctctcctacccactggcaagaagtagcctaaaagctcaaaccacagtgaaggatcaggagatgagaaagaaaaagattaggaagggwcatgggcagatggatggtagaagaaggggcacca

SEQ ID NO: 358672 - DNA, 593 bp, Homo sapiens
gattttaaaacactttaatacctttatagtcaacaagtaaataatatttcataataggaaaataattatgtgacatgtcatattggcattgcttcataaggtcaagggaaaagctggacatataaactagagatagtgtgtttcaccatagccttatgtacgtattactaaagaatgaaaacatcagccataacttgcaaatctgcattatgactcatgaaacaagtacactgtatctcgccaagctataattactgactaaacctaaacttctytatcacaaactcattcagcctcatgtgctcaacccatacacataaactctgttctagaaactgcctagttgatcaattctgacccagatctactaggaccatttcatggctagttctagctcccaaaaccttctcctacccttctccagttccttttgacataccccccagtttccctggtgttggttcacctttgcaacagcaagctcataacatgacttagaatctaaaaattgttctgatactctttaacgggttttagcaaaataagtgattaggataaacattgaaaattttacacctaattttaacagttac

SEQ ID NO: 358673 - DNA, 593 bp, Homo sapiens
gattttaaaacactttaatacctttatagtcaacaagtaaataatatttcataataggaaaataattatgtgacatgtcatattggcattgcttcataaggtcaagggaaaagctggacatataaactagagatagtgtgtttcaccatagccttatgtacgtattactaaagaatgaaaacatcagccataacttgcaaatctgcattatgactcatgaaacaagtacactgtatctcgccaagctataattactgactaaacctaaacttctttatcacaaactcattcagcctcatgtgctcaacccatacacataaactctgttctagaaactgcctagttgatcaattctgacccagatctactaggaccatttcatggctagttctagctcccaaaaccttctcctacccttctccagttccttttgacataccccccagtttccctggtgttggttcacctttgcaacagcaagctcataacatgmcttagaatctaaaaattgttctgatactctttaacgggttttagcaaaataagtgattaggataaacattgaaaattttacacctaattttaacagttac

SEQ ID NO: 358674 - DNA, 546 bp, Homo sapiens
tataccttcaaaagcaagatttaaaaagtaattgtaaaagttcaggaatagtgtaatgacacggttcatcatcagtgaacacctctccttcaaaaaatatttgtatgataataaatatccctcaacaaaggcatgtaagtcaccagtattcattcccaggaaataaggactgtctctttcaaaaatatttagaggacctgagatgacccttttcccctaggtcacaccaagagtttttatcactgaaagctcctttttgcaattcatagttttgacaaaaaagattttagtgatgtgtctgtgtctccagatgcactgctctgtgcaactatataataactattacctggtcaacctatgtcagcccattggaactgatctttaagaacacaaaaacatatatgtacacactggtatgaacagcaaatcattcttaaaatatttgatttagaaaaaaatgcaagagagaygatagttaatatccacaaaaggcaacacaatttcacaaatagacaagaaggggacaaagaaaaactaaaagaaaaa

SEQ ID NO: 358675 - DNA, 499 bp, Homo sapiens
agttaatatttttacttttaatatacctactttcccaagtacaaatttatcctggggctacgtaggtgacccaagwgcatcaggagcagtttcgaacaaggtgtaacttctcaacgttacatggaataagagagagattcaaaaatcacatccaaactcaaacatcatttcaaaggtcctttcccatcttcctctccccaaaaacaactaaaacatggcatattgcatctttcaaccatggtcaaaatccttctctgttaagtagattctatgtatttttaaatatctatgcttttgtttgttgttttttttttttttgagacagagtctcactctctcacccaggctcgagtgcaatggcgtggtctcggctcactgcaacctccgcctcctgggttcaaatgattcttctgcctcaacctcctgagtagctgggattacaggcacccataaccaagcccagctaatttctgtattttttagtagaggcagggtttca

SEQ ID NO: 358676 - DNA, 603 bp, Homo sapiens
ttacatgcatttattataatgggccaagaaaatatttctatgtaaaggtactatcttcctattaatctgtagtttttttgctttttttgtaagggttgaaagaaagagaaaagcaacagattgcaggtggggatagaggcaaagagagataaacggtagagaaaccagttctgaaatgtcagggaattgcctggagakagttaaatatactgtttctgcggacccattcccagataggtaccgcctattcctacatatgaagagagaagagatgagttatattcatgactagtaggagttagtttatcttgcttctgttttttaattttactctaagacaaagggactgctataaaagaggaagaagtggagcttactctaattactctttattattatcttgatcatcatcacctctagtaattttgtaattcattacagtaatttatctaagtttccaaggattttaatatgttctttagctcctaggtagagaaaaattgtggtaacaatcaaatgactaatcacaattattggttaggaaaatgaaaatcacaatgcaatcattataaaaacagggtgtgtatgtaattacactaaaac

SEQ ID NO: 358677 - DNA, 603 bp, Homo sapiens
ttacatgcatttattataatgggccaagaaaatatttctatgtaaaggtactatcttcctattaatctgtagtttttttgctttttttgtaagggttgaaagaaagagaaaagcaacagattgcaggtggggatagaggcaaagagagataaacggtagagaaaccagttctgaaatgtcagggaattgcctggagagagttaaatatactgtttctgcggacccattcccagataggtaccgcctattcctacatatgaagagagaagagatgagttatattcatgactagtaggagttagtttatcttgcttctgttttttaattttactctaagacaaagggactgctataaaagaggaagaagtggagcttactctaattactctttattattmtcttgatcatcatcacctctagtaattttgtaattcattacagtaatttatctaagtttccaaggattttaatatgttctttagctcctaggtagagaaaaattgtggtaacaatcaaatgactaatcacaattattggttaggaaaatgaaaatcacaatgcaatcattataaaaacagggtgtgtatgtaattacactaaaac

SEQ ID NO: 358678 - DNA, 520 bp, Homo sapiens
tagaggaagagaggccatacatgcactagataaagtcgcacctacagctgagcaagatagtttccaattatcctagccaataaattctattgtctgcttaagctagaatgggtcacatttttagttgcttactagtgaaattatcctaacatgctaacaggcaagataaaaatagtctgagcaatgactaaaggagcacattttttacctcatatactgacaattcaagagcattattgcatcatttgctgccaaatggagaggaaagttggttcctaaggaccccctcggccagaaaagtacaaaacatctgttgaagtcatgggtgacttgttagcaaagttcagcagcagtaaagcttcctaagaaacaggtcttttctcaccagcgggtattgatataattagggtcaaytacaatttagaatttccagggcatggggctgaattacagtggcatttaagagctctgctaaattttcccattcatcttgaagatttctggaggaacctgttgtaat

SEQ ID NO: 358679 - DNA, 599 bp, Homo sapiens
tccatgcatgttgtgtgtgtgtatctaaaaccatccttgacccagtacaggcacttctagttaatctttcaactgatcttatccttgtccagcrtgtgggccactgctcatgccatttcttctacacagcatacctttcttttccctcccatttccacctatggaaatcttgcttgtaagtcaaagccctgctgtgaactaactatgtgcaagacatgacaaacacagcagtcagacagatgtagcctctttgttatctattccataataacacgaggcatgtaatagtgtttcacagtttatgaagaccttccaatgcacttccagaatggccaaaattccagctaactctggaaaatgcattccaaagagaaccaactagaataaatggggaaaaattttatgtcatgagtaccgaatgtgtgccaagtatttccatatatgcctaacttaatcattggctgtatgacaaaatatgattgcaagcatattaatgtattaattcaaaaatatttttgcaacagctctgttgttaaaggttctgtgttagacacttgatgcaagcaacacaaagatgaatcagacgagaggaaataaag

SEQ ID NO: 358680 - DNA, 599 bp, Homo sapiens
tccatgcatgttgtgtgtgtgtatctaaaaccatccttgacccagtacaggcacttctagttaatctttcaactgatcttatccttgtccagcatgtgggccactgctcatgccatttcttctacacagcatacctttcttttccctcccatttccacctatggaaatcttgcttgtaagtcaaagccctgctgtgaactaactatgtgcaagacatgacaaacacagcagtcagacagatgtagcctctttgttatctattccataataacacgaggcatgtaatagtgtttcacagtttatgaagaccttccaatgcacttccagaatggccaaaattccagctaactctggaaaaygcattccaaagagaaccaactagaataaatggggaaaaattttatgtcatgagtaccgaatgtgtgccaagtatttccatatatgcctaacttaatcattggctgtatgacaaaatatgattgcaagcatattaatgtattaattcaaaaatatttttgcaacagctctgttgttaaaggttctgtgttagacacttgatgcaagcaacacaaagatgaatcagacgagaggaaataaag

SEQ ID NO: 358681 - DNA, 500 bp, Homo sapiens
caaacccaacttctcaccaactgctttcaggaatggaatgaaggccctgagtagctggaatcacttattttccaaaagccgccccaaatctaactttcctatgtgaaatgtcccawtaaaaatttcggtggctagtttatatttttttaaagaaaagataaaataaaaagaaatgaggactaaagaaaacagtcagtggcctccagggggaaccatgagacattagtctgcagccttagatggatatctataactggtgttcatggacctgggaggtggaggttgcagtgagccgagattgtgccactgcacttcagcctgggcaacagagcgagactccatctcaaaaaacaaaaacaaaaaaaaacaaacaacaaactggtgttcatggttagtgctatggcttatttcatgccctgtccttgagggggatctcagcccctaagtgaaacacttgaaattagtaaactgggtcggcttgcaagcctgatttttgaaaa

SEQ ID NO: 358682 - DNA, 500 bp, Homo sapiens
caaacccaacttctcaccaactgctttcaggaatggaatgaaggccctgagtagctggaatcacttattttccaaaagccgccccaaatctaactttcctatgtgaaatgtcccattaaaaatttcggtggctagtttatatttttttaaagaaaagataaaataaaaagaaatgaggactaaagaaaacagtcagtggcctccagggggaaccatgagacattagtctgcagccttagatggatatctataactggtgttcatggacctgggaggtggaggttgcagtgagccgagattgtgccactgcactycagcctgggcaacagagcgagactccatctcaaaaaacaaaaacaaaaaaaaacaaacaacaaactggtgttcatggttagtgctatggcttatttcatgccctgtccttgagggggatctcagcccctaagtgaaacacttgaaattagtaaactgggtcggcttgcaagcctgatttttgaaaa

SEQ ID NO: 358683 - DNA, 543 bp, Homo sapiens
taaaagcacaatagagcaaacactgcatatagagcatttagaagtccttcgaaagtctctgctaggaatggcttcaaaacccagggagttgaatgtggactctccttttctcctttcttttatttcagtggttcttgaatgttcaagtacrtatcaatatatcaaaaccatgtactcattaatgagccacttaaggaaggaatttttaaggcaattgtgatgaaatgcgactttcacctcactgtttctcaatctttttttcatcatcatccctgcaaggagcgttttctaattgcccccctgaaattttaataccacagattttctttatatccttatatgtattgtctctatgtctgcgctttacacataaaaagaatgactttttattgctcccaagaattaattttcaccggcttgggggtgatatcactcccactgagaatgcacgacctaacctggacctctagcttaatatgaacctctcctgtttatcttcaatggctcctttcaatgaaaagtctacatcccagagccttcttg

SEQ ID NO: 358684 - DNA, 515 bp, Homo sapiens
tgaattaatatccaattctcttctagaggaaattttattgaattggaagtgtaattcttctgtttaaaagaaagcctcagccaggcatggtggctcacacctgtaatcccagcactttgggaggctgaggcgggtggatcacaaggtcaggagttcaagaccagcctggccaacatagtgaaatcctgtctctactaaaaatacaaaaaaaattagccaggggtggtggcgggtgcctgtcctcccagctactcaggaggctgagggggagaattgcttgaacttgggaggcagaggctgcrgtgagctgagatcacaccactgcattccagccagagcaacagtgcaagactccatcgtctcaaaaaaaagaaaaaagcctcattattttttataatgatcatgctgatcatactgctattctagtcactgtcaataaacaaaatgacaataaataaccattacaaggcagcaattaacatgatggtacctcctaacttctaagcttgtttctt

SEQ ID NO: 358685 - DNA, 515 bp, Homo sapiens
tgaattaatatccaattctcttctagaggaaattttattgaattggaagtgtaattcttctgtttaaaagaaagcctcagccaggcatggtggctcacacctgtaatcccagcactttgggaggctgaggcgggtggatcacaaggtcaggagttcaagaccagcctggccaacatagtgaaatcctgtctctactaaaaatacaaaaaaaattagccaggggtggtggcgggtgcctgtcctcccagctactcaggaggctgagggggagaattgcttgaacttgggaggcagaggctgcagtgagctgagatcacaccactgcattccagccagagcaacagtgcaagactccrtcgtctcaaaaaaaagaaaaaagcctcattattttttataatgatcatgctgatcatactgctattctagtcactgtcaataaacaaaatgacaataaataaccattacaaggcagcaattaacatgatggtacctcctaacttctaagcttgtttctt

SEQ ID NO: 358686 - DNA, 592 bp, Homo sapiens
gaattaggaatggcaagaactctgttgcttcttttctctacacataccattttagaatttgactgcttgtgatataattactgtatctgacaaaacatagaaagagaaattaatgaaaaactgatttctggatatagctgcagaacatttatccaaattttctgtactgaaagctgtacattacagtgtgatgactagtagcgtttgcctacatgctttacacttaaatcattagatataaacgtggtttcatatgacytgtctgtgagagcttatttagtagtcttagatcatcatcttctaatgactacttatcagcttgtactacagtatgtgggccaagttggcccattcttactgaaaatgttttgaattaattttaacccctaaatattaaggccctattttcacaaagtatcacataactacatttgaacaggaagatatttctacgtatagtggttaatgcaaactaatatatagtggttttcagaggctaaaaaaaaatctgtttatactattttatttttactgcaaagttctattttgtacttttaaagaggagatctgaagatgtcagaagtgatggtaa

SEQ ID NO: 358687 - DNA, 592 bp, Homo sapiens
gaattaggaatggcaagaactctgttgcttcttttctctacacataccattttagaatttgactgcttgtgatataattactgtatctgacaaaacatagaaagagaaattaatgaaaaactgatttctggatatagctgcagaacatttatccaaattttctgtactgaaagctgtacattacagtgtgatgactagtagcgtttgcctacatgctttacacttaaatcattagatataaacgtggtttcatatgacttgtctgtgagagcttatttagtagtcttagatcatcatcttctaatgactacttatcagcttgtactacagtatgtgggccaagttggcccattcttactgaaaatrttttgaattaattttaacccctaaatattaaggccctattttcacaaagtatcacataactacatttgaacaggaagatatttctacgtatagtggttaatgcaaactaatatatagtggttttcagaggctaaaaaaaaatctgtttatactattttatttttactgcaaagttctattttgtacttttaaagaggagatctgaagatgtcagaagtgatggtaa

SEQ ID NO: 358688 - DNA, 537 bp, Homo sapiens
taaggctgagctgatcttaatgatgatggttgtaacttgaaatttaatactttcaatctctcccctgaagacttataaagtatcatttgggaaaaaaaggtcaaagtatattagctctactgctgcagaaaacaaatgtggtatgtatttcayattagtgacttcaaaagggaaattttacctagtgttaaccatacgatgtgctaaagtttaaattaacttttttttctcagattttttttttaattttattattattatactttaagttttagggtacatgtgcacaatgtgcaggcttgttacatatgtatacatgtgccatgttggtgtgctgcacccattaactcctcatttagcattaggtatatctcctaatgctattcctcccccctccccccaccccaaaactgtccccggagtgtgatgttccccttcctgtgtctttcaataagcatcttggttccccatctatgacacaatacttctttaggttgtcagttttttcttgaaatttgccttaaattgggtaagggc

SEQ ID NO: 358689 - DNA, 537 bp, Homo sapiens
taaggctgagctgatcttaatgatgatggttgtaacttgaaatttaatactttcaatctctcccctgaagacttataaagtatcatttgggaaaaaaaggtcaaagtatattagctctactgctgcagaaaacaaatgtggtatgtatttcatattagtgacttcaaaagggaaattttacctagtgttaaccatacgatgtgctaaagtttaaattaacttttttttctcagattttttttttaattttattattaytatactttaagttttagggtacatgtgcacaatgtgcaggcttgttacatatgtatacatgtgccatgttggtgtgctgcacccattaactcctcatttagcattaggtatatctcctaatgctattcctcccccctccccccaccccaaaactgtccccggagtgtgatgttccccttcctgtgtctttcaataagcatcttggttccccatctatgacacaatacttctttaggttgtcagttttttcttgaaatttgccttaaattgggtaagggc

SEQ ID NO: 358690 - DNA, 537 bp, Homo sapiens
taaggctgagctgatcttaatgatgatggttgtaacttgaaatttaatactttcaatctctcccctgaagacttataaagtatcatttgggaaaaaaaggtcaaagtatattagctctactgctgcagaaaacaaatgtggtatgtatttcatattagtgacttcaaaagggaaattttacctagtgttaaccatacgatgtgctaaagtttaaattaacttttttttctcagattttttttttaattttattattattatactttaagttttagggtacatgtgcacaatgtgcaggcttgttacatatgtatacatgtgccatgttggtgtgctgcacccattaactcctcatttagcattaggtatatctcctaaygctattcctcccccctccccccaccccaaaactgtccccggagtgtgatgttccccttcctgtgtctttcaataagcatcttggttccccatctatgacacaatacttctttaggttgtcagttttttcttgaaatttgccttaaattgggtaagggc

SEQ ID NO: 358691 - DNA, 537 bp, Homo sapiens
taaggctgagctgatcttaatgatgatggttgtaacttgaaatttaatactttcaatctctcccctgaagacttataaagtatcatttgggaaaaaaaggtcaaagtatattagctctactgctgcagaaaacaaatgtggtatgtatttcatattagtgacttcaaaagggaaattttacctagtgttaaccatacgatgtgctaaagtttaaattaacttttttttctcagattttttttttaattttattattattatactttaagttttagggtacatgtgcacaatgtgcaggcttgttacatatgtatacatgtgccatgttggtgtgctgcacccattaactcctcatttagcattaggtatatctcctaatgctattcctcccccmtccccccaccccaaaactgtccccggagtgtgatgttccccttcctgtgtctttcaataagcatcttggttccccatctatgacacaatacttctttaggttgtcagttttttcttgaaatttgccttaaattgggtaagggc

SEQ ID NO: 358692 - DNA, 576 bp, Homo sapiens
tggggtccttaaaccataccttgagaaccactgcactaaagtatgttgtcagtgtacttgaataaaggcatgaggaaagaagagttgtttctgaactcttaactaaggtaataataatcaggtgtccaaatttaatttaagtcctgtktctgagttgaactgcattttccaaacatcttgaagaactggcattccaacctgtttgaatttactgttctactaaccagtaggaattctactagcagcctacctctaacttcacaaagagtggctcaatagttttagctcttcaaaaatgcttagcaggaaacatcaactgcaaagagcgctgcacctttgaaagtgctctgaaaccaatttagtcttgctgctgtcactactacgaaatttaactttacctttccaaaatgatctagtatacaaacaaggtccttcataaggcaaaataatttttaacaaggacaactatcttttctttaaaaacacaaatacgttttaagacagtgaaaatgaaaattacaaataattacaatgcatttcatcgactatggtctacatttacatacattaattatt

SEQ ID NO: 358693 - DNA, 565 bp, Homo sapiens
aacttaacacaaacttctagaattaaatcaacactacaaatggaaatactctgggactcctcagttaaaatgttggcacaatccaatttgattagtcctgttttatgtatgatattggaagcagtaactcgtgacagcttttataacagaaagaatggaaataacaaagaatagtttattaaacaccaaacatggtaaaattaaaaatcaaaccatttagattgagtaaattaattttttaaaatttatttttcttttttgagacagggtcttgctctgttgtccaggctggagtgtaagggcatgatcacagctcactgcagccttgatctgggctcaatcatcccacctcagcctcttgaatagctgggaccgcagcacatgccaccagaccccaytaatttttaaatgttttgtagaaacagggtctcactatgttgcctaggctggtctcaaactcctggcctcaagcaagcctcctcccttggtctcccaaagtgctgagatcacaggcatgaaccactgcacctggcctgagtaaatttaaactgtgggtcagtatctc

SEQ ID NO: 358694 - DNA, 574 bp, Homo sapiens
cactgaagccagtgtacctggctgtgcacagtgggcagacctcatgattgctcactcacacacccctcgccactttgtgcctggctcacccttggcaggtgtgggatccagkccagtagtgcaagctgagtgcagcctgctgggccgagtgggtggaacaaatccagcaggcatgagcaaaactcaagcagaggcgctgctggtcatagacgtttccagctggtgaagcgacacctgaaggatcccatgacactactgttgttaccatggcaaagcaagaaactagtagggctcacctcctccttgacctctgcacttataccatggaaacagtaagagtttctctttaaaggctctaatttccattttctataccagctgtatgacatcttgcatgctaatgtctctctctgtcccccatacttctccccattaaattctgagatcatgaaagaaatgcacaaatgacctgataagtcccaccattcttggtttataattcagtgaagaataccttcagttttgcatcatccatcctataacatctgaaggcagcgccaggccaaagttccca

SEQ ID NO: 358695 - DNA, 584 bp, Homo sapiens
ttcttccacctctcctagctgtgccaaaatctaaattttctgtggagatgytgtcatgtgcaatttcaccaaaacttttacaactctaaccacagtagtggcctacctgttcatccaatacctgcacacctgctttaacacagaaaaatttggaagttaatatgattattaactattatcattatagacaatggcatctgaagatgctttccaatcttccttgaatgtatgaaattcaaaatgccagtacaatctccaaattgtcagttaatcttagtagcagtggatcatttacagaaggtaattttgctgcagtggtcaaatatttttgttaaatactgctattttatagccatacatagcattaactgacacacagggtatagctagaaatatgatcctaaagaaaatgttaagaaataggtttcttattttttgctaaattgcaaactaacaggttaattactactctgaagtgctagatagttggagtagtatttgccaagaatgaaaatgcatttaggggcatacaacttgagaagcctggagtgagggaaggataaggtatttattcctgactcctg

SEQ ID NO: 358696 - DNA, 584 bp, Homo sapiens
ttcttccacctctcctagctgtgccaaaatctaaattttctgtggagatgctgtcatgtgcaatttcaccaaaacttttacaactctaaccacagtagtggcctacctgttcatccaatacctgcacacctgctttaacacagaaaaatttggaagttaatatgattattaactattatcattatagacaatggcatctgaagatgctttccaatcttccttgaatgtatgaaattcaaaatgccagtacaatctccaaattgtcagttaatcttagtagcagtggatcatttacagaaggtaattttgctgcagtggtcaaatatttttgttaaatactgctattttatagccatacatagcattaactgacacacagggtatagctagaaatatgatcctaaagaaaatgttaagaaataggtttcttattttttgctaaattgcaaactaacaggttaattacyactctgaagtgctagatagttggagtagtatttgccaagaatgaaaatgcatttaggggcatacaacttgagaagcctggagtgagggaaggataaggtatttattcctgactcctg

SEQ ID NO: 358697 - DNA, 531 bp, Homo sapiens
ggccaccaccactactaccagtaaacagtgaggatggccttttgctactacatcaatttccttacttatgtatgccactggttgtgtggttgtcccaagagtttgagtaaggactctaagagctattcttactctttctgtgacatataaagagaagttttgtcctgtgggaaggcttaaggctggagcttgagtttgtttcttctaatccccagacttcagggttgactacctcctcaagcaggggacaagaaatgggtaactttttccccatattcatgtagacaatagtgccagctttggccagtatgtccctccctaataaagtatgrgtcgttcaggcataacaagaaaagcatgtgaaaagagaaaagtctcccaattacaactgaataagtgggagaaacacctggttacaggccatcccaggattcgttggatggtaacggaccttgaggaaagctgtccaggacaggagattaacactgagaaggctgcaccagtgtccaggaggaagtcaatttcctggtc

SEQ ID NO: 358698 - DNA, 531 bp, Homo sapiens
ggccaccaccactactaccagtaaacagtgaggatggccttttgctactacatcaatttccttacttatgtatgccactggttgtgtggttgtcccaagagtttgagtaaggactctaagagctattcttactctttctgtgacatataaagagaagttttgtcctgtgggaaggcttaaggctggagcttgagtttgtttcttctaatccccagacttcagggttgactacctcctcaagcaggggacaagaaatgggtaactttttccccatattcatgtagacaatagtgccagctttggccagtatgtccctccctaataaagtatgggtcgttcaggcataacaagaaaagcatgtgaaaagagaaaagtctcccaattacaactgaataagtgggagaaacacctggttacaggccatcccaggattcsttggatggtaacggaccttgaggaaagctgtccaggacaggagattaacactgagaaggctgcaccagtgtccaggaggaagtcaatttcctggtc

SEQ ID NO: 358699 - DNA, 531 bp, Homo sapiens
ggccaccaccactactaccagtaaacagtgaggatggccttttgctactacatcaatttccttacttatgtatgccactggttgtgtggttgtcccaagagtttgagtaaggactctaagagctattcttactctttctgtgacatataaagagaagttttgtcctgtgggaaggcttaaggctggagcttgagtttgtttcttctaatccccagacttcagggttgactacctcctcaagcaggggacaagaaatgggtaactttttccccatattcatgtagacaatagtgccagctttggccagtatgtccctccctaataaagtatgggtcgttcaggcataacaagaaaagcatgtgaaaagagaaaagtctcccaattacaactgaataagtgggagaaacacctggttacaggccatcccaggattcgttrgatggtaacggaccttgaggaaagctgtccaggacaggagattaacactgagaaggctgcaccagtgtccaggaggaagtcaatttcctggtc

SEQ ID NO: 358700 - DNA, 556 bp, Homo sapiens
tgccttcctcatcctaccaaagttctggggttacagacatgagccactgtgctcagcatggaccagtgttttaacttggctgtttctagggtctggtgtgacagaacaggcattctatgattctgctaattcctacckctccagaaaaaaactcagctcacaactatccttagataaggacaccttagtgaatgattctataacttgaggttgaatatatgacaccttttttgactagaactgagaatagccacacacataggataaaagaataattttaatttgatgttttaaattttttcctccccaagccagcatggtgttgcacacaaaatttttcccagactcacagtttcttcagaatggagagagttgaaaatgtacactcaggcttttcttttccattttgcaattcttcacatgatgttctctctagtcttacccagtgggaaatattgagggtatcagacaaccggggtcagttagaaacaaactacatggatggggctcacattgaccataaaagtaatcttacacttgcattccagccagcaga

SEQ ID NO: 358701 - DNA, 556 bp, Homo sapiens
tgccttcctcatcctaccaaagttctggggttacagacatgagccactgtgctcagcatggaccagtgttttaacttggctgtttctagggtctggtgtgacagaacaggcattctatgattctgctaattcctaccgctccagmaaaaaactcagctcacaactatccttagataaggacaccttagtgaatgattctataacttgaggttgaatatatgacaccttttttgactagaactgagaatagccacacacataggataaaagaataattttaatttgatgttttaaattttttcctccccaagccagcatggtgttgcacacaaaatttttcccagactcacagtttcttcagaatggagagagttgaaaatgtacactcaggcttttcttttccattttgcaattcttcacatgatgttctctctagtcttacccagtgggaaatattgagggtatcagacaaccggggtcagttagaaacaaactacatggatggggctcacattgaccataaaagtaatcttacacttgcattccagccagcaga

SEQ ID NO: 358702 - DNA, 556 bp, Homo sapiens
tgccttcctcatcctaccaaagttctggggttacagacatgagccactgtgctcagcatggaccagtgttttaacttggctgtttctagggtctggtgtgacagaacaggcattctatgattctgctaattcctaccgctccagaaaaaaactcagctcacaactatccttagataaggayaccttagtgaatgattctataacttgaggttgaatatatgacaccttttttgactagaactgagaatagccacacacataggataaaagaataattttaatttgatgttttaaattttttcctccccaagccagcatggtgttgcacacaaaatttttcccagactcacagtttcttcagaatggagagagttgaaaatgtacactcaggcttttcttttccattttgcaattcttcacatgatgttctctctagtcttacccagtgggaaatattgagggtatcagacaaccggggtcagttagaaacaaactacatggatggggctcacattgaccataaaagtaatcttacacttgcattccagccagcaga

SEQ ID NO: 358703 - DNA, 556 bp, Homo sapiens
tgccttcctcatcctaccaaagttctggggttacagacatgagccactgtgctcagcatggaccagtgttttaacttggctgtttctagggtctggtgtgacagaacaggcattctatgattctgctaattcctaccgctccagaaaaaaactcagctcacaactatccttagataaggacaccttagtgaatgattctataacttgaggttgaatatatgacaccttttttgactagaactgagaatagccacacacawaggataaaagaataattttaatttgatgttttaaattttttcctccccaagccagcatggtgttgcacacaaaatttttcccagactcacagtttcttcagaatggagagagttgaaaatgtacactcaggcttttcttttccattttgcaattcttcacatgatgttctctctagtcttacccagtgggaaatattgagggtatcagacaaccggggtcagttagaaacaaactacatggatggggctcacattgaccataaaagtaatcttacacttgcattccagccagcaga

SEQ ID NO: 358704 - DNA, 363 bp, Homo sapiens
cttccacagtctcttagcccagtgattgtggttcaggggcactcaggaggatacaatctagtgatggctcaggatggggacattgycaggtgtcttcttatttccctggtgccatggctagcataactcaaatagtggaggttgggctgctgagatcctcaggcatctccttttatttctatgagtctctccatgggatgtccattctgcatagtgttatcagggtgttagacttcatgatgtactggtctgaggcttctgaggggtttgtccccatgacagcaggagacttaggcagagctgtgtcaccttttctagcctaggccagaggtggcccaatatccagaaaatgctttcactgtt

SEQ ID NO: 358705 - DNA, 545 bp, Homo sapiens
gactttctgtcttgtgacctgtctagtgctgtcagttgagtactgcagtcccccactattattgtattgctgtctgtctcatttcttargtctagtagtaattgttttacaaatttgggagctccagtgttaggtgccaatatatttaggattttgatattttcctgttggcctaatccttttatcattatattatataatgtccctctttgtctttttttaacttttgttgctttaaaatttgtatggttgatataagaaaagctactcctgctcgcttttggtttccatttgtatggaatatctctttttatcccattatctaagtttatgagagtccttatgtgttaggtgagtctcttgaagacagtagatacttggttggtggatttttatccattctacttttctgtatcttttaagtggagcatttcacccatttatattcaatgttagtattgacatgtgaggtactgttctattcatcatgctagttgttgcctgaatatcttggtttttatatcattatgttattgtttcatagg

SEQ ID NO: 358706 - DNA, 492 bp, Homo sapiens
tttttcctcatagctcttaagattattttcttcactttgacttcagataacctgatgactatgtgcccaggtgattatctttttacaatgaatttcctgggtgttttttgagtttcttatgtttggatgtctagatacckagcaagaccagaggagttttcctcgattattgctttaaataagtttttcaagcttttagatttctcatcttcctcaggaacaccaattatttttaggtttggtcatttaatataatcccaaatttcttgaaggctttgttcatttaattttttttctttgtctttgtcgaattgggttaattcaaaagcttttcttctagctctgaatttctttcttctacttgtttgattctattgttggagttttccagtgtattttgcatttctctaaatttgtctttcatttccagaagttgtgattgtcttttctttatgaaatgtgtttctctggagacattttcatccatatcct

SEQ ID NO: 358707 - DNA, 492 bp, Homo sapiens
tttttcctcatagctcttaagattattttcttcactttgacttcagataacctgatgactatgtgcccaggtgattatctttttacaatgaatttcctgggtgttttttgagtttcttatgtttggatgtctagataccgagcaagaccagrggagttttcctcgattattgctttaaataagtttttcaagcttttagatttctcatcttcctcaggaacaccaattatttttaggtttggtcatttaatataatcccaaatttcttgaaggctttgttcatttaattttttttctttgtctttgtcgaattgggttaattcaaaagcttttcttctagctctgaatttctttcttctacttgtttgattctattgttggagttttccagtgtattttgcatttctctaaatttgtctttcatttccagaagttgtgattgtcttttctttatgaaatgtgtttctctggagacattttcatccatatcct

SEQ ID NO: 358708 - DNA, 422 bp, Homo sapiens
tggtatacaaaatggaatactattcaattataagaagaatgaaatcctgtcatttgcatcaacatggatrgaactggaggtcattatgttaagtgaaaaaaggtaagcagaaaaagacaaatatcacatgttctcacaaacatcacatggtaactacgaaagtggatctcatggagatagagagttgagtagtggttaccgagtctggggagggtagaggggaaaagctggatgaagagaaggaagagcatggatgaggagaagctagtcaatgagtataaaagcatgattagatagaaggaataagtttctttataatttataaagaaaaaaggtttaattagcttaattggctcacagttctgcaggctctactagcatggcactaacatctgcctggcttctggcgagggcctcaggaa

SEQ ID NO: 358709 - DNA, 422 bp, Homo sapiens
tggtatacaaaatggaatactattcaattataagaagaatgaaatcctgtcatttgcatcaacatggatagaactggaggtcattatgttaagtgaaaaaaggtaagcasaaaaagacaaatatcacatgttctcacaaacatcacatggtaactacgaaagtggatctcatggagatagagagttgagtagtggttaccgagtctggggagggtagaggggaaaagctggatgaagagaaggaagagcatggatgaggagaagctagtcaatgagtataaaagcatgattagatagaaggaataagtttctttataatttataaagaaaaaaggtttaattagcttaattggctcacagttctgcaggctctactagcatggcactaacatctgcctggcttctggcgagggcctcaggaa

SEQ ID NO: 358710 - DNA, 422 bp, Homo sapiens
tggtatacaaaatggaatactattcaattataagaagaatgaaatcctgtcatttgcatcaacatggatagaactggaggtcattatgttaagtgaaaaaaggtaagcagaaaaagacaaatatcacatgttctcacaaayatcacatggtaactacgaaagtggatctcatggagatagagagttgagtagtggttaccgagtctggggagggtagaggggaaaagctggatgaagagaaggaagagcatggatgaggagaagctagtcaatgagtataaaagcatgattagatagaaggaataagtttctttataatttataaagaaaaaaggtttaattagcttaattggctcacagttctgcaggctctactagcatggcactaacatctgcctggcttctggcgagggcctcaggaa

SEQ ID NO: 358711 - DNA, 614 bp, Homo sapiens
tgagtagtggttaccgagtctggggagggtagaggggaaaagctggatgaagagaaggaagagcatggatgaggagaagctagtcaatgagtataaaagcatgattagatagaaggaataagtttctttataatttataaagaaaaaaggtttaattagcttaattggctcacagttctgcaggctctactagcatggcactaacatctgcctggcttctggcgagggcctcaggaagcttacaktcatggcagaaggtgaagcaggagcaggagcatcacacggagagagtgggagccagacagcaaggagggagttcccagactcttaaacaaccagatcttgcatgaactgagcaagaaatcacttatcaccaaggggatggtgctatctcattagcaagggatccaccccctgatccaatcatctcccaccaggccccacttccaatattgggaattaaatttcaacatgagatttgaaggagacaaacatctaaaccatatcagtttcttaacaaaaaatatattcagtcaagtaactgcaggttgcttgacacctaaaaatcatcaaagcctggaaaagaactagatttattctggtataaaagagat

SEQ ID NO: 358712 - DNA, 614 bp, Homo sapiens
tgagtagtggttaccgagtctggggagggtagaggggaaaagctggatgaagagaaggaagagcatggatgaggagaagctagtcaatgagtataaaagcatgattagatagaaggaataagtttctttataatttataaagaaaaaaggtttaattagcttaattggctcacagttctgcaggctctactagcatggcactaacatctgcctggcttctggcgagggcctcaggaagcttacagtcatggcagaaggtgaagcaggagcaggagcatcacacggagagagtgggagcmagacagcaaggagggagttcccagactcttaaacaaccagatcttgcatgaactgagcaagaaatcacttatcaccaaggggatggtgctatctcattagcaagggatccaccccctgatccaatcatctcccaccaggccccacttccaatattgggaattaaatttcaacatgagatttgaaggagacaaacatctaaaccatatcagtttcttaacaaaaaatatattcagtcaagtaactgcaggttgcttgacacctaaaaatcatcaaagcctggaaaagaactagatttattctggtataaaagagat

SEQ ID NO: 358713 - DNA, 614 bp, Homo sapiens
tgagtagtggttaccgagtctggggagggtagaggggaaaagctggatgaagagaaggaagagcatggatgaggagaagctagtcaatgagtataaaagcatgattagatagaaggaataagtttctttataatttataaagaaaaaaggtttaattagcttaattggctcacagttctgcaggctctactagcatggcactaacatctgcctggcttctggcgagggcctcaggaagcttacagtcatggcagaaggtgaagcaggagcaggagcatcacacggagagagtgggagccagacagcaaggagggagttcccagactcttaaacaaccagatcttgcatgaactgagcaagaaatcacttatcaccaaggggatggtgctatctcattagcaagggatccaccccctgatccaatcatctcccaccaggccccacttccaatattgggaattaaatttcaacatgagatttgaaggagacaaacatctaaaccatatcagtttcttaacaaaaaatatrttcagtcaagtaactgcaggttgcttgacacctaaaaatcatcaaagcctggaaaagaactagatttattctggtataaaagagat

SEQ ID NO: 358714 - DNA, 614 bp, Homo sapiens
tgagtagtggttaccgagtctggggagggtagaggggaaaagctggatgaagagaaggaagagcatggatgaggagaagctagtcaatgagtataaaagcatgattagatagaaggaataagtttctttataatttataaagaaaaaaggtttaattagcttaattggctcacagttctgcaggctctactagcatggcactaacatctgcctggcttctggcgagggcctcaggaagcttacagtcatggcagaaggtgaagcaggagcaggagcatcacacggagagagtgggagccagacagcaaggagggagttcccagactcttaaacaaccagatcttgcatgaactgagcaagaaatcacttatcaccaaggggatggtgctatctcattagcaagggatccaccccctgatccaatcatctcccaccaggccccacttccaatattgggaattaaatttcaacatgagatttgaaggagacaaacatctaaaccatatcagtttcttaacaaaaaatatattcagtcaagtaactgcaggttgcttgacacctamaaatcatcaaagcctggaaaagaactagatttattctggtataaaagagat

SEQ ID NO: 358715 - DNA, 563 bp, Homo sapiens
ttattttggaacagtgttttataccatcaaaatgtacagtctaacattttatagcacttgatttgattcagattgggtttactgaggactttctgaaaatggaatgcctgtctgagagtaaatgagttttccaacacttggaattgtcaaataacagatggatatccacttagtgatgttatagaaaggagtcgcatttcctgtatgaagttaggtttgattagaccaaaagtttcttcaaactataagatttattggttttgtctttgaccagttaaatacagattagaaaaaaatgataaagasaatgtgtatactgtaggtaatgaaaaagatattttaaaaaacaatttgattactggtaatctatatggagcagatatatcagcattaataacaaaagttttggcatgaaatggacattgctctagttattttgatagctctgtagccctgggaaatcactttacctgaatgagcctcagtttctcatctgtaagttagaaataataataataataatatgcctttcagagttgtgtgagttaaagatagttcctgca

SEQ ID NO: 358716 - DNA, 563 bp, Homo sapiens
ttattttggaacagtgttttataccatcaaaatgtacagtctaacattttatagcacttgatttgattcagattgggtttactgaggactttctgaaaatggaatgcctgtctgagagtaaatgagttttccaacacttggaattgtcaaataacagatggatatccacttagtgatgttatagaaaggagtcgcatttcctgtatgaagttaggtttgattagaccaaaagtttcttcaaactataagatttattggttttgtctttgaccagttaaatacagattagaaaaaaatgataaagagaatgtgtatactgyaggtaatgaaaaagatattttaaaaaacaatttgattactggtaatctatatggagcagatatatcagcattaataacaaaagttttggcatgaaatggacattgctctagttattttgatagctctgtagccctgggaaatcactttacctgaatgagcctcagtttctcatctgtaagttagaaataataataataataatatgcctttcagagttgtgtgagttaaagatagttcctgca

SEQ ID NO: 358717 - DNA, 602 bp, Homo sapiens
cctgtttatgtacctggttttcttaagtgttaactctttcagaaaatagtttttcttaatgtttttttctggaaacagctagacaaggctgacctcatgagtatgtaccctgtgcagctacattgcttaccatgctcagaagagcctgakgcttggtttgattctctgctgttgccatcctaaaacttcttaataattttatttttggtcttgtgttttataagtgaagtgcaatgggacagcagaacacgtgcatgaacagaggagctgtacacaatatgtgcatccactgtttttgccccctttgtgcatagtgtttgcaatgtccaatcagttcagaattctgtgcacccatgagatgtggaagttcagtgagactcaaagagggaacaaggtaaatgtttcgcatctgtgacaaaataagtaggtgcactgacagccctgaggagccacattttcccttccaacctgaaattgctttgaaagtagatggcaatggtagtcttctaaagatacaaaacaccaagaaaccctatcacatcctttcttactcctgttatttcctgtattagccaacctcttcccctgaaaatgatgacaca

SEQ ID NO: 358718 - DNA, 602 bp, Homo sapiens
cctgtttatgtacctggttttcttaagtgttaactctttcagaaaatagtttttcttaatgtttttttctggaaacagctagacaaggctgacctcatgagtatgtaccctgtgcagctacattgcttaccatgctcagaagagcctgaggcttggtttgattctctgctgttgccatcctaaaacttcttaataattttatttttggtcttgtgttttataagtgaagtgcaatgggacagcagaacacgtgcatgaacagaggagctgtacacaatatgtgcatccactgtttttgccccctttgtgcatmgtgtttgcaatgtccaatcagttcagaattctgtgcacccatgagatgtggaagttcagtgagactcaaagagggaacaaggtaaatgtttcgcatctgtgacaaaataagtaggtgcactgacagccctgaggagccacattttcccttccaacctgaaattgctttgaaagtagatggcaatggtagtcttctaaagatacaaaacaccaagaaaccctatcacatcctttcttactcctgttatttcctgtattagccaacctcttcccctgaaaatgatgacaca

SEQ ID NO: 358719 - DNA, 610 bp, Homo sapiens
tggtagtcttctaaagatacaaaacaccaagaaaccctatcacatcctttcttactcctgttatttcctgtattagccaacctcttcccctgaaaatgatgacacagaaagaaagggaataataggataactcacagtgccttttcctttcagttcttcctgactcttccgaaagctaaaggtagagagtattggcagaatgtgcatgtatcaagaagtgaaataaaaatagttgagttwgttttgtgcagtgtttccactgttctggtaagaacaaaatatgcatacatatacaagctacaaaagcaaattttataaatttagtctttccgcatatgaattaaatactcatattgacatttaaatttggcattgcacaaacatgaatggcaaaattcatgctgataatttaaaattttaattttttacttagaatgacaatatcaaattttaaaaagcactatgtgaaaagacagtgagaacacagaagaaagtatatttaagaacagtacgtatttttccttctttttgaacaagagtcccacatattttcactttgaacagggttctactaattatgtaatcaggcactgcagctagaatacaattc

SEQ ID NO: 358720 - DNA, 610 bp, Homo sapiens
tggtagtcttctaaagatacaaaacaccaagaaaccctatcacatcctttcttactcctgttatttcctgtattagccaacctcttcccctgaaaatgatgacacagaaagaaagggaataataggataactcacagtgccttttcctttcagttcttcctgactcttccgaaagctaaaggtagagagtattggcagaatgtgcatgtatcaagaagtgaaataaaaatagttgagttagttttgtgcrgtgtttccactgttctggtaagaacaaaatatgcatacatatacaagctacaaaagcaaattttataaatttagtctttccgcatatgaattaaatactcatattgacatttaaatttggcattgcacaaacatgaatggcaaaattcatgctgataatttaaaattttaattttttacttagaatgacaatatcaaattttaaaaagcactatgtgaaaagacagtgagaacacagaagaaagtatatttaagaacagtacgtatttttccttctttttgaacaagagtcccacatattttcactttgaacagggttctactaattatgtaatcaggcactgcagctagaatacaattc

SEQ ID NO: 358721 - DNA, 610 bp, Homo sapiens
tggtagtcttctaaagatacaaaacaccaagaaaccctatcacatcctttcttactcctgttatttcctgtattagccaacctcttcccctgaaaatgatgacacagaaagaaagggaataataggataactcacagtgccttttcctttcagttcttcctgactcttccgaaagctaaaggtagagagtattggcagaatgtgcatgtatcaagaagtgaaataaaaatagttgagttagttttgtgcagtgtttccactgttctggtaagaacaaaatatgcatacatatacaagctacaaaagcaaattttataaatttagtctttccgcatatgaattaaatactcatattgacatttaaatttggcattgcacaaacatgaatggcaaaattcatgctgataatttaaaattttaattttttacttagaatgacaatatcaaattttaaaaagcactatgtgaaaagacrgtgagaacacagaagaaagtatatttaagaacagtacgtatttttccttctttttgaacaagagtcccacatattttcactttgaacagggttctactaattatgtaatcaggcactgcagctagaatacaattc

SEQ ID NO: 358722 - DNA, 529 bp, Homo sapiens
gtaaagagccttccagccgatctgaaaaccctttggactgtatatatagtataaatgaataataaatacatttatttgtattttagcccatgtacaattctgagtccatgtgttggcttatagtaatcacctggcttaaaatgctcttgcctttctttacactgtcataccactttgttgcctctaccataaagttggtaagtacgacataaaatcttctattgttatttgacttttatatttctctgctcctcagttaaagtatctttggactagagactatctctagtgccctgattgtattcctttggcactgaccattcatgcttgctccaacccaacatcatgttagtctactagagtggwgacatcaggttaatctgatatggtgagtaggaagtgacaagcagtgtgaattcctaggtagagcaccagagtgtgggagataaaccttacaacattttaggaacctggtcattggtaagctagtctacggcaggtcaggacatcctcttcaagaataagaata

SEQ ID NO: 358723 - DNA, 596 bp, Homo sapiens
ttggaccttccccattatccccattggacttgggagcaaggagaactaatgcaatgaattgatactcttgctgcttgctgtgccttgagttataaagttcttggtctatgatccaggagtttcatgtcttctacctgtatccatgagaccaaaacagcagcatcagatcaagtatcagactcaacatatatataatatgaccatgtatcatgtatgagyatatgtgtaatgaatatttatatgtttgtatatgtaaacaaacaggcatagttatctctgagtgatagtgtcataagtgataacttcctctgttttaggcttattttctatatatctgcagttaaaatatattatttgcaatgagaaataaagcaatatatgtacttttaaatctaaaaaataagaacccaacaaaattcttgggcctggttcatcaataggttaatttatatgttagtgtgagctgaaaatacaatgttctgcctgacgaccccactctgggctgaaggacaatggtgaaagggaatcctagtgagcagaactttgaagagctacctcggcttcaactttcagtggagagttgttagaggtaaggg

SEQ ID NO: 358724 - DNA, 596 bp, Homo sapiens
ttggaccttccccattatccccattggacttgggagcaaggagaactaatgcaatgaattgatactcttgctgcttgctgtgccttgagttataaagttcttggtctatgatccaggagtttcatgtcttctacctgtatccatgagaccaaaacagcagcatcagatcaagtatcagactcaacatatatataatatgaccatgtatcatgtatgagtatatgtgtaatgaatatttatatgtttgtatatgtaaacaaacaggcatagttatctctgagtgatagtgtcrtaagtgataacttcctctgttttaggcttattttctatatatctgcagttaaaatatattatttgcaatgagaaataaagcaatatatgtacttttaaatctaaaaaataagaacccaacaaaattcttgggcctggttcatcaataggttaatttatatgttagtgtgagctgaaaatacaatgttctgcctgacgaccccactctgggctgaaggacaatggtgaaagggaatcctagtgagcagaactttgaagagctacctcggcttcaactttcagtggagagttgttagaggtaaggg

SEQ ID NO: 358725 - DNA, 568 bp, Homo sapiens
caaacaggcatagttatctctgagtgatagtgtcataagtgataacttcctctgttttaggcttattttctatatatctgcagttaaaatatattatttgcaatgagaaataaagcaatatatgtacttttaaatctaaaaaataagaacccaacaaaattcttgggcctggttcatcaataggttaatttatatgttagtgtgagctgaaaatacaatgttctgcctgacraccccactctgggctgaaggacaatggtgaaagggaatcctagtgagcagaactttgaagagctacctcggcttcaactttcagtggagagttgttagaggtaagggtaatggtatactgattcctgagcagtggcaaatggcttgactgggtgctcaggagactgaaggaggaacagtgtaagataagagtcaaggaagtctagggaacagacatgtggatggagctataggagtgagcacaaaatgtgtgactctttatgtctcatgacaatgcccatcagagagattttggcatcagactctaacaaggccctcagtgatccctgtcccctgt

SEQ ID NO: 358726 - DNA, 566 bp, Homo sapiens
atggtatactgattcctgagcagtggcaaatggcttgactgggtgctcaggagactgaaggaggaacagtgtaagataagagtcaaggaagtctagggaacagacatgtggatggagctataggagtgagcacaaaatgtgtgactctttatgtctcatgacaatgcccatcagagagattttggcatcagactctaacraggccctcagtgatccctgtcccctgttatccatgtcctctgtgatccctacactttgattatgggctggcctagctactatctctagttgatatattatgacaaaagtaatgcaatgtcatttctagactatgttacatgagatagttacttttgtcttgtttctctctttcttgctggctttgatgaagcaaaccaccataatggggaggcccatatgtcaagggcctgtaaggacccaatagccagcaaggaactgagacactcattctaacaacctgcaaggaactgagtcctgccaacaactacctgagcttggaagcagatacttctccagttgagccttcagatgtgattccaaccctg

SEQ ID NO: 358727 - DNA, 566 bp, Homo sapiens
atggtatactgattcctgagcagtggcaaatggcttgactgggtgctcaggagactgaaggaggaacagtgtaagataagagtcaaggaagtctagggaacagacatgtggatggagctataggagtgagcacaaaatgtgtgactctttatgtctcatgacaatgcccatcagagagattttggcatcagactctaacaaggccctcagtgatccctgtcccctgttatccatgtcctctgtgatccctacactttgattatgggctggcctagctactatctctagttgatatattatgacaaaagtaatgcaatgtcatttctagactatgttacatgagatagttacttttgtcttgtttctctctttcttgctggctttgatgaagcaaaccaccataatggggaggcccatatgtcaagggcctgtaaggacccaatagccagcaaggaactgagayactcattctaacaacctgcaaggaactgagtcctgccaacaactacctgagcttggaagcagatacttctccagttgagccttcagatgtgattccaaccctg

SEQ ID NO: 358728 - DNA, 530 bp, Homo sapiens
agcagaacagatgctgggtctacattcagcaggcattttctgtctggtagggacatgtgtggttgccgcatgaggagtaggaggtctctgaaattcagcaagttcctgaattgggagactagaatgcatcaggaggatcacttataaaaatttgaggtatctcagagggctggcaagataaagaaacaagcaggtatctttctacagcatagtgatctggtagaaatactcttaagccagggtcagacaaacttggtgttggtcctgattctaccaaagatcagggtctcctccctccccattttttaaagaaaacatttcattttagaatagttttaaattttcagaaragctgacaagatagtatagagttcccatagaccccacgtcaaattttccccattattaatatctaacattagtatagtacatttgttacaatgaatgaatgaatcagtttcagtacattattattaactgaagttcatactttatacatattcccttactttgtttctttttttttttta

SEQ ID NO: 358729 - DNA, 537 bp, Homo sapiens
tatatcctgggcctgtcatagactaacaggtgatgaggaacaactcttaggcacagaccctcgattactcctctatagaaggagggcaacaatgtcttccctgtgaggtctgctgaatgaaataagataatgcatacaaagctcttagaattcaacaaatgtgagttctccacacctcaagcctttgctcagtttcacgtcagttcttttgctacctaggaaagcatgtttggaaatatgtgaattatcatataaaatcctcatgaactgggtccatgcctcatggatattttccagccttatgcatagaccatgggtggttgagkttatctctgtcccaatgtatcataaggggctttgtccaccagactaggaattcttgagggctgaggtcgtggccaatgtgttcttttatctgtcaagtttaactgagttctgggctgccatgttgtaggcacttaataaaatgcttgttaaattaaaggatatctcaatagcatattactgctgtatgtcaaacacctcaatgactttata

SEQ ID NO: 358730 - DNA, 644 bp, Homo sapiens
aattaacatgacttttcattatttaagtatcaaatcaacaggaattaaaatcttttgacagtgtgatcatatgagtcactttttttcattaattcaattatcaaataaaccagaagtccrtttgttactgctattcaaaatccatctctttctcttaataaattacggtcttgggtatgatctgaaaaaattattttttacaattttcctttccatgtcaaaataatttcattgattccagtacttatcttgttaactttcctttcatatttcattaacttttaatttgatttttctctattctttaacaaggaaatataagacagaagaatatacgcattcatgttgtccaaattgttaagtatggaatttctcacttgctttaaatttgtaatgatgatgattttttattattgtaaataaaaatatacatccatgcctagtttttagtggttttaatttaaaaaggactgccaagttgtagaagcttcagacttcacacaccttgagtcactcctgactgtggacaatggggagaggtgaagaggtctgttaaagcatggcttccttctggaattctgccctgataccccatgcctatgttaagcaactcctcaatttccacctgtgctcatctatagcac

SEQ ID NO: 358731 - DNA, 634 bp, Homo sapiens
ggaaggaaattctgcctcaagaatgcagtatgtaaatcctgcctgagtttctagcctgttggcctatcctgtggatttcagacttgtgagccataatcctaggagccaatttattgaaatctctcttcctcttgtttctctgagsaagcttggctgaaaaacttgtaattattattatcagagttttatagaaaataaaactgaatgatcctgaagatttggtactttatctcccccaacctctcctttcacatgtataaagtatggtaacaatgacacttgccctatgtacattacagggcagctttgagattcaaagggaactgtaggtgaaagcacaatagttatacaaatagaattcattgctaattaagaaattaacttcgtggttctctaccttgcctaaaagactggttttcctcttcctgagtattaatttcttcttcctcttgccacctctttctcctacttcatggccccttcttgtcagtggtaattatattacaacgtttgtgctttcatatatgatattttgtttaatctttggaacacatctagttagataaatgttatacccgtttcacagatgaggatttgacacacagaggtgcccaaagtaatatggccagataat

SEQ ID NO: 358732 - DNA, 481 bp, Homo sapiens
aaacattcttccactatctcaaagtggaataaaaaatactatacatgtttaatcaatttgaaccttgggaccattgccataaaaaagaatcccttactttgcagaaaaattgtctttaattcargtccccttcctgccctaaagggagcaaattataatttcagtgattaagcttttagagtcagtatttccattggaagactctgtgtcttattcacctgccagtacaaaactgaaactatcaaacacttggtgcccagctggctgaagaagattaaactctagaaaggtatttaaataaaatttaaataatttataatgtgcttccctctgcatagcaagtctgcacttgtgcaagtggaagaggtagcagtgaagccttcaacagaagaccacgttctggagggaaagaatacccagaatctgcttctctatgtagattatggcagacaagaaaagttgttaccttttcaaaaactaa

SEQ ID NO: 358733 - DNA, 601 bp, Homo sapiens
gctttggtagctttttcagcatcttctgagaaatctaaatgtttctttggtattcaaagcatttcatgatctgcttcaaaccctcctatcaaatgtactatttaatttctggataaactggatttcagggtgctgttaaaatgtgccctgggctctgttggctttatatcttcacttatctttgagagaaagtctttgcctttcctagaattagtgtccttagtttttgaaattgcatccatgacccagctgaaatgtcacctcctctgttaagctctcccatctcattatctctctttgactatagtgttgattatgttaacacattctcaagaacactgttggtttctcattccttgataaatcaagtctaagtattttagtatgactttttaaaattcatcaaaatgtggcagtaactaaatttactaatatcatctggtgtaatctaatagcaccttttcttcaatgaaaaggcataccctttataatcattatgtacataatttcccaaactattttattaatttcttatgctatgttctctayatggaatatccttctacgatactttgaaaccttaggcctcttttaagggcaa

SEQ ID NO: 358734 - DNA, 601 bp, Homo sapiens
gctttggtagctttttcagcatcttctgagaaatctaaatgtttctttggtattcaaagcatttcatgatctgcttcaaaccctcctatcaaatgtactatttaatttctggataaactggatttcagggtgctgttaaaatgtgccctgggctctgttggctttatatcttcacttatctttgagagaaagtctttgcctttcctagaattagtgtccttagtttttgaaattgcatccatgacccagctgaaatgtcacctcctctgttaagctctcccatctcattatctctctttgactatagtgttgattatgttaacacattctcaagaacactgttggtttctcattccttgataaatcaagtctaagtattttagtatgactttttaaaattcatcaaaatgtggcagtaactaaatttactaatatcatctggtgtaatctaatagcaccttttcttcaatgaaaaggcataccctttataatcattatgtacataatttcccaaactattttattaatttcttatgctatgttctctatatggaatrtccttctacgatactttgaaaccttaggcctcttttaagggcaa

SEQ ID NO: 358735 - DNA, 609 bp, Homo sapiens
ctgttccacctcccaggttagttgctacctttgtaaggactcaatggttatgtgtctggcaccgggcctggcatagtgtagtttctcattaaaaatcagactaattcctttttcctttcccatttttcattcagtttagcatgatttaatataaaatataaatatataaacaaccttccttcccccactaatccaaatgaaatcttgaagaacagtactatgtattgatgctgtcactcagtgttgcctctgtatgctcacgcatgctctttcatatttccacttacagccttcttataaagggcaatgaatagagcacrttaggacttctgaatatgacactcaagccatgcaatcaccacatggtggcttcttttttttggataagttttaggtgggagcaagctccgtgcttggttttcttaagaatgtgtagtgctctttagtgtttgctaaacagccatgttgctttattgtttgggcacctcaattcaggacttgaagtcggaagagactctaacatagcatttctgtcttttctactcatgaggtgacatggtacaaaagcaaaaactgaacctggaaagtggaactgaatgaagccaggga

SEQ ID NO: 358736 - DNA, 539 bp, Homo sapiens
ggcaaatatgcacatatgtgtattcatgcaaatgcagttgcatacccttgcatcaaagtcaggtgctccttgttaaattttgttccctagaaagatccttcacaaaaaccttatgtagcaggggtagttctttaaagacctttccaaccccagacgggctgcttgtgttgcacttcacctttctggtagactcactaactagactgctggagccagaaggggccttggtgagagtttaataaaatgttcttattttattaaaagagtatgtaaccattgaagtctgaggtagtggtctaaattctttcagctaagtagctgaagagtcaaccctcaatctcagggctcgaaaatcttgcttgtgtgagcagcagtacctggcactgtgctggtcagactgcatgaatcatacatattgagagattgattgctatcttatttttaaacatgtctatagtttggctctcmaccttcttttgaaagctagactaatataccactgtgattttctgtaattactttgattcaataacccgcat

SEQ ID NO: 358737 - DNA, 589 bp, Homo sapiens
attgtaagagtgtgggcagtgagctcactaagacaaagaaaacatttaattggtttgagtggaaagaccctagttagaggatgcttggtaattactgattggtaaggtctctagtttgttcttactgttttcttaggtctttggctcgcatgtgtagaaattgaaagcactgcagccttcccagcctaatggcctctgaattaaaaaatttttaacagatataccataaaatttatccgcttaaagtatacaattcagtggttttggtgtgttttcaaaattatgcaaaaacacaattatataatttcagaacatttttatcaccctccaaagaaacaatacacccattagtagtcactcctcattccccttccccacaattcccarcaaccaggaatctatttctgtcttcatggatttgcctatcctggcaatgttatataaataaaatcatccgatatgtggccttttgcatctggtttctttcaattattgtagtgttttcaaggttcatccgtgttgtagcatgtttggtatcttttccaattttgtggctgaataagattccattgtgtggatatgccacatt

SEQ ID NO: 358738 - DNA, 629 bp, Homo sapiens
cttgggccacaattctaattaattcttatttattgttgagctcttcattcaaatttaacttagctagcatccccacttccactccatgcaagattaaaacagaacccacagctttgagcactcaaagccctggaactactgtttcagattagtacctgttgatcccgctaaacctgaaatcctacagagacagcagttgtgtcaatttttctcgccactgtttcctcacttctcagcacagcgccaagcatacaataggtccctgttaatgttttcagactgattgctgactaattgactgcttgaatgaacaaatgctaggcactgctcaagttttatctggcttttcttaggtgttctaaaaaatgctggactgacggtgattctgacctgtttcaggagtgataagcacttgctgggtgggctgtctctaaggctgaccagtgagtattcctctcagtacaggagggagagtgagaamaaattgggagaggacggacagtagggcccagccttctgctaaaatgggacctgaaatcatcttagagtagctgccatctttgccataaagtgtctgatggtatcagctacagaataaatactgtttctgtgctctccagttgacatat

SEQ ID NO: 358739 - DNA, 344 bp, Homo sapiens
tttcctgatggctgatgcaacttggataaagggcaatattttccaccccttttgtggtggcctgtaaatcagccaaggcgatggttactatgagttaatctccattaaccaatttaattatgaaatctgaaaaggccacttttagcatcagatcctagaggtatcatctgtggatgagatttttcacttctctgtctatagtaacctgraattagacttgttttattattaaaactacttgtttgtacagtggtttcaataattaaaccaaaatgtcactacatccatatgctttttcatatcctatttccttgtggaaaggtttatcccataggaagtacccc

SEQ ID NO: 358740 - DNA, 626 bp, Homo sapiens
tacttttgaatgaatgaataaaattcattggaacctctacattatactactccttcaattcaacaaacatttattttgtggttattattagaatttttaggcccttttcaggaattactaccttatatagaacaatgagctccttttagcactctggatgttataaataatgctccatagatgagatctaaagagggaatcycagaatcacagttttagagctgacaggctgaaccacttcctttgctcttagatgtgtccttctccatctctttcttatccaaagtcccagggctaagtgaaggcaaagttaggactaaaaattattcttcagattccaaattctgtgtttctttcctatgcactatctagattatatcaacttacattttagaatattataatgagattctaacatagagcatccttgaacttggtaaggttttggatgatctggttggtggcaatatgattgattaattaattcattcattcattgaagtatgtattaagcgccaactatatcagttgcagtatgctaggtgctctcatggatgaaaaagaatgagacacatgatttttccttagcttaggggtcacctgcaggaagatttttctcaaccaga

SEQ ID NO: 358741 - DNA, 580 bp, Homo sapiens
ggtccaagagggggatgcttccaccaggggacacagtaaatgtattcctaatgtaaagctatggcttccaccttgtgctagctaccctcaaccctgttgactatcaaccaaagaaaagagttgctgtagtggtggggatatttaaccctgattatcatgaggttgtagagttgctcctacataatgaagtcaaggagaaatatatttagcatagagataattcacttgggcatctcttgatactctcatgactatttgtaactgcaaattggaaaatagaataatcatggcctaatgagagcatagtaaccagggtttcagacaccctagggctaaacatttgggggaacccatcagacaagtcacytagactggtagaggtgctggcccaaggggagggaaatttaaaatgtttttagaagttaggggtaattaatatcagttatgctttaacagcagcagcaaaggctgtaatttatcccagttgactatcctcttgtaaacgatcccaaagaaattgggatcatcagaattctggagaagctatacctcaatagagtgaatttaatggaagaaacaa

SEQ ID NO: 358742 - DNA, 535 bp, Homo sapiens
gttcccagcccagtgctctccaacttcctgttcacaatccacaaatcctttgattgccatttggagttttcctctgagtaatcagaaccctcagtaaaatgacttacctcccttgtcactgaagtgtaagaggcggattaaatattctttcactcatttaacaaattgtattgtaccttccatgtgacaggcatggtgcaaaccactgggaatacaggagctacttgcaattagccttacctatccttgcttcacaacattagtgttgtgattgataatgccttgcatctggatctctgtgtacacaatgccaggactcagacatcattccaatattcaacagagagaagtatcactgctggagccaagtgtgatgagatgaaatggaatgcagtgtcakcagtaagagtctgatcacaggaatgatttaatccaactcctctattttacagataaagaataaggcctagaggaatgaagtgattacccgatgtcactagctaactactagtggggttgagtgagactataaccc

SEQ ID NO: 358743 - DNA, 535 bp, Homo sapiens
gttcccagcccagtgctctccaacttcctgttcacaatccacaaatcctttgattgccatttggagttttcctctgagtaatcagaaccctcagtaaaatgacttacctcccttgtcactgaagtgtaagaggcggattaaatattctttcactcatttaacaaattgtattgtaccttccatgtgacaggcatggtgcaaaccactgggaatacaggagctacttgcaattagccttacctatccttgcttcacaacattagtgttgtgattgataatgccttgcatctggatctctgtgtacacaatgccaggactcagacatcattccaatattcaacagagagaagtatcactgctggagccaagtgtgatgagatgaaatggaatgcagtgtcagcagtaagagtctgatcacaggaatgatttaatccaactcctctattttacagataaagaataaggcctagaggaatgaagtgattacccratgtcactagctaactactagtggggttgagtgagactataaccc

SEQ ID NO: 358744 - DNA, 570 bp, Homo sapiens
tgctaaattctttatggaccctggagacttaaagacatacctgaggagatttaaatatatgtgtgttcaaaatatgcattggcagaaaaccagtgctgttttaggggaagacttttatggactagatgtttagcatttgctttaagtgaagctcactttgatttgcaaccttgatggtctctgaattagaaagatctggggatttgaagctggtggttaaagcacagcttctggtgaaaaaactaatggcaaggagcagagtaacagaggctccttcagatcaactcagaatgtcagtatgagggtgtagggccactgatgagtggttagtaatgcttggattgactctctcccctgttgtccactgctcttgtttaaaatgtcataaaggaaacaatatttatttacccatacactatgcactrgcattgcactgaaactgtctttgcaaaattatgacagtaagagatctgacaaggctaactctaccttgcttatggcctcatatgttggctatctttgctctttcctaggtgtgggccaagctaactttgggagaatttaatttat

SEQ ID NO: 358745 - DNA, 598 bp, Homo sapiens
taccgaatggtgactatttaataatattatgctgtgtagctttaatttgctatgaactagagtgttctcacctcctccgaaggtaaccatgtgagatgatgaagatgctaattagcttgattgtggtaatcattttacaatgtttacatctatcaaaatattatgttgtatacyttatgtttatacatttcttatttgtcaattatacatgaatacatttgggaaaaaacccatggggcacactgcgtatgggatatgtgcagtgagtcaatattatgttcattagtattatttgttgcctgaagagtttgtattacaccaacataacaacttctgatatttacaaagcactttgcaaatttcaaagtatttccacttatattttgtcatgcatcctgtggggttggtagggcaaaaataacctggtcccacatgacatattatatttagacacttacgcaaacttatgttgttggaagcattaggtcagggtttgaatattggtgctttttaacactatttccaaaattgttattttagtctattgctaaaatattgttagtctattatctatgaaaggttaagacatttaaaattc

SEQ ID NO: 358746 - DNA, 583 bp, Homo sapiens
gacaaaacactgcactctctttttaaagttggtttccaggcttatgggatgtcgtgtcttgctaaattgtggtaatatcagtaaaggcaatagcasagagcctggatataggagcacccaataaatgactcttctcttccttttcctacatctatattcaccttagagactagaacagaaagttacatacgggagtggcttaagactgtgatgttagttgcccaccctgcaagagcggaggaggagaatggcaagagcggtgcatcctggcaccttcgttggaatccttaatctagcgcttattaacactgtaggcttgaggaaggtctttaatattcctgaccctcttcccccctctgtaaaatggggctaatagtagacacagttttggattgaggataatgaagattacataggtaaaattgcatagactgtataaaaatgatatagtcattaattttctgtaagatctctactgtttaccttcttctctccaaatatgaagttctaaataaaggcccttaggaaagaagtcacgaatagctgggcaggacaagcagtattttgtgtttctcaatatgag

SEQ ID NO: 358747 - DNA, 551 bp, Homo sapiens
gcttgacactcagtatttttgtacttacacagttccatgaagtaggatctattacctccaccctccagataagaaaatgagctcgtatagattgtcagatgtccaaagtgtcccacctagtaggtgaaagatccagaattttgaatccagtgttctttattgaacaaaatactgaatctggagcttggtgacctttatccaaataacaacaataaagctaacattaacttagccctcaccatgtaccatacctgtgctaagccattccaagcactcagttgtgtctacaataacattatctccattgtacctgggagtaaactgtgaggttactggcttgctgcaggtcatgcagccaataaacggcagttggtatttggctccaggcaatctggttgcagastctttgctcttagttccatacaatattatctagggctaggttcacctctgccattttcaagcatgacacttctctgctctgagtctcagcttattaattggtaaaacgaggaagtcatttagattaaccataaaatcccttccatgag

SEQ ID NO: 358748 - DNA, 577 bp, Homo sapiens
ctaggttcacctctgccattttcaagcatgacacttctctgctctgagtctcagcttattaattggtaaaacgaggaagtcatttagattaaccataaaatcccttccatgagtctatccaatagaccaaatcaatgttgtcctaataaaaatcacagaagggcatgtcctgcaggtcaggcccatgctcaccaatgaatcatgaagtggagctgctcagtaagtaacaaggactgagtatcttttcctctttctgtgtgctgttgacgcagagctggggcttattggattccagagaaatgtgttatctatacaatacaaattttmtcttctctgtggcaattcttccttataattttattcccaaatttgaactttctctcactccagtaagagtcaaaacgtatgtggcaagggaatgggttatagcaggggttgggggcagtcaccaagaatggcttcatttcagatttaggacaaatgaagtgtccttaatcactttggtcttttctccattagaaaactaggcctgcaaaatgtcagtctaaaacttgtaagccatatgcagaatttcagg

SEQ ID NO: 358749 - DNA, 546 bp, Homo sapiens
tgtagtcttgctgtaggtaagagactctcagatctgtttggtttccaaactcatattttctacaacatcattacaacttcagatcagattttcaaataaaaatgctatcttccttcctctggaaactgttcggtcaccctctggcgattaaacgtgaatttgcttagagagccacctttattggaataagacgaagcagtgctgagaagccccaagctatccgttgtcctagcctctggctctgtcaaagtactggaaactgactctagaactgttcatttacgtgctgtgtggaaatgtcctgtcatgtgtgtactataatcctctctctgatatttctgcccatcctttcgggaagggcagtgtgctcctgccaatgacacagctggtcaacagtcctgcacaatggggaggtagctgaagcatgtcctcggagcatctcaccygtgtactgctttctgcttccttcctgtcctactgctccttttctctgaaggcccagcatgctaacattataaggtcagccagccacagctgacaatgatc

SEQ ID NO: 358750 - DNA, 600 bp, Homo sapiens
gccttcctcttctgggaagaagtgtttatattttagaagagggctacttaacccaaggaatgacaccccatcaaagattgcctagaaagagtactgtgaggctcactcagatgcccttcgtctttgcagattgctctctcctcctaagtgcaattagtgactttttcctttgagttcataaaatttgctaatcctttttttataaggctgatcacagactaatctgtttgataattagttgtgattgtggccttgttgtaagacaggacyggacctgcatcctgaaaacatttgtatgcttgcagtacctagaagagtctttgccttcttcaggagcttcctaatggctttgtgcattgaatagaattgaaggagttttctgggagaaggtagattaaaggggtacagtgtgagctttttctttgagtacattcggaaaaataaatggaggtagggaaatggcttgggcattccaggtcattctctaaagagatcaactaaataccatttgtttggtaccaaccatatactcagacactacaaatttggatattgccacttgttaactgtgtgacaaacttggacaaattaccttctctt

SEQ ID NO: 358751 - DNA, 484 bp, Homo sapiens
gccaaccctgctgacaccctgattttgaacttctatcctccagagctgtgagacaacacatttttgttatttaagtcactcaatatgtggtatttcgttagggtagtcctgggaaactaatgcagttgccaacacattgagcagcctgccatcggtgctgcagtcctgaagtgaggccatctggtgcacaccacagtagttattacgggagctccatggtgcttgagcgataaagtcttcaggtcccagcttggaccaatgccgggtcgtatttttctactacctaggaaattgacrcattctttcacctactgatgtccacacacctccttgcaatgaaacactcagccacatatggttgtcttgagcctgtctttagaaactgaccaagggagaagatctgcacatgctcaggaaacatacttactctgaagtgccctagaaaagaggaatatttatagagaagggtttcaagtcaggctag

SEQ ID NO: 358752 - DNA, 484 bp, Homo sapiens
gccaaccctgctgacaccctgattttgaacttctatcctccagagctgtgagacaacacatttttgttatttaagtcactcaatatgtggtatttcgttagggtagtcctgggaaactaatgcagttgccaacacattgagcagcctgccatcggtgctgcagtcctgaagtgaggccatctggtgcacaccacagtagttattacgggagctccatggtgcttgagcgataaagtcttcaggtcccagcttggaccaatgccgggtcgtatttttctactacctaggaaattgacgcattctttcacctactgatgtccacacacctccttgcaaygaaacactcagccacatatggttgtcttgagcctgtctttagaaactgaccaagggagaagatctgcacatgctcaggaaacatacttactctgaagtgccctagaaaagaggaatatttatagagaagggtttcaagtcaggctag

SEQ ID NO: 358753 - DNA, 484 bp, Homo sapiens
gccaaccctgctgacaccctgattttgaacttctatcctccagagctgtgagacaacacatttttgttatttaagtcactcaatatgtggtatttcgttagggtagtcctgggaaactaatgcagttgccaacacattgagcagcctgccatcggtgctgcagtcctgaagtgaggccatctggtgcacaccacagtagttattacgggagctccatggtgcttgagcgataaagtcttcaggtcccagcttggaccaatgccgggtcgtatttttctactacctaggaaattgacgcattctttcacctactgatgtccacacacctccttgcaatgaaacactcagccayatatggttgtcttgagcctgtctttagaaactgaccaagggagaagatctgcacatgctcaggaaacatacttactctgaagtgccctagaaaagaggaatatttatagagaagggtttcaagtcaggctag

SEQ ID NO: 358754 - DNA, 597 bp, Homo sapiens
ttgattatcaataaataaaaagtacattaacttcatagattcataatttataattatttacaaacatgatttgaacttttatgtctttcagaaatgttataatgctttgatacttttcattgccttttttaaaaaaacatacactatttaaggttattctgatatgtgtctgtctgattctgaatatacacactttatgagcaaaggctacatctttgtggctttttaaaaatttctttatccgcagttcctagcataaacatataaaatgacacataaaatttctcagtaaattactgagaaattcataattaatctgtaaatcttcagtttctctgtataccatcaagagattgagtgttttagtcagaagagaaaataggatttcacctgttgtcagctttctctgtcttttcmattccagttcatcctatcttctacatctactttctgctcatccttaaaagcagattggactgcctatttttttaaagctgtgctttccattatggtagcctctaatcacaaatttctgtttacatttaaattagttaacattaaattatgttaaaaatttgatacctcattcacacttgc

SEQ ID NO: 358755 - DNA, 597 bp, Homo sapiens
ttgattatcaataaataaaaagtacattaacttcatagattcataatttataattatttacaaacatgatttgaacttttatgtctttcagaaatgttataatgctttgatacttttcattgccttttttaaaaaaacatacactatttaaggttattctgatatgtgtctgtctgattctgaatatacacactttatgagcaaaggctacatctttgtggctttttaaaaatttctttatccgcagttcctagcataaacatataaaatgacacataaaatttctcagtaaattactgagaaattcataattaatctgtaaatcttcagtttctctgtataccatcaagagattgagtgttttagtcagaagagaaaataggatttcacctgttgtcagctttctctgtcttttccattccagttcatcctatcttctacatctactttctgctcatccttaaaagcagattggactgcctatttttttaaagctgtgctttccrttatggtagcctctaatcacaaatttctgtttacatttaaattagttaacattaaattatgttaaaaatttgatacctcattcacacttgc

SEQ ID NO: 358756 - DNA, 597 bp, Homo sapiens
ttgattatcaataaataaaaagtacattaacttcatagattcataatttataattatttacaaacatgatttgaacttttatgtctttcagaaatgttataatgctttgatacttttcattgccttttttaaaaaaacatacactatttaaggttattctgatatgtgtctgtctgattctgaatatacacactttatgagcaaaggctacatctttgtggctttttaaaaatttctttatccgcagttcctagcataaacatataaaatgacacataaaatttctcagtaaattactgagaaattcataattaatctgtaaatcttcagtttctctgtataccatcaagagattgagtgttttagtcagaagagaaaataggatttcacctgttgtcagctttctctgtcttttccattccagttcatcctatcttctacatctactttctgctcatccttaaaagcagattggactgcctatttttttaaagctgtgctttccattatggtagcctctaatcacaaatttctrtttacatttaaattagttaacattaaattatgttaaaaatttgatacctcattcacacttgc

SEQ ID NO: 358757 - DNA, 559 bp, Homo sapiens
ttcacacttgccacatttcaagtgctcaatagcctcatgtgactagtggctactgtactggatccaaaggtaaaaacctttccctcttctcacaaatttttgttggatagtgctgctgaaaccacttccttttctccagcttttaatggaaagattttatcaggagtctgactcaagcttctctcaccacacatctatgcttttaaatgcacaaacatgactgctacaatttttcagaataatctggaggcaagcacagagcttgtaggaaatgtctggggggctaytggtgaaggagtagactgatgaaagtgtctgagctatgaccgtgttccacatgtgaatcagctttctctaggacctgtgttatttgagcaattacatgtctaaggctagattgtttgccttctgataaagtcgaggggtcaggtcaaaaaataccatattgctccattcttttcctaggatgtgagggagtgagtgtgaatcatttatgtatttcctataaatattcatggaagattatatatatgtatagacatatgtatatatttactct

SEQ ID NO: 358758 - DNA, 561 bp, Homo sapiens
tttttcaaatggctccaaactgcagaaatacaattgtaaataatttggcaacttttccaaatgccttggaaaaatccatgcagagctaaatgaggctggtacatgaatgtgcttctgactgaggtttgggggcaggaaargaagatgaagagatcagcagagtgcatggtggagttccaaatccaaggcaaattgactaaatccagtaactgaggtcaatttggaagatgctgtgactcaacacagcagtatgagggttaggatctctcaatacagaaactgactgcaggctaagattggaataaagatcctatactagaattattgagtttttctttggaacctgactcagcatgtagaaatggcttcaggaataatatgggttaccaggacaaagggaaagatgcaaagatacagtgacacattagctaacctaaagaggtaaagagggcataaggtggaatcttagagaacctaaacaggtctatatgtacagcctcaagttgagactaaatatatgacagattaatgttcagtgcagacattaataaagagtttcta

SEQ ID NO: 358759 - DNA, 541 bp, Homo sapiens
ttttctttggaacctgactcagcatgtagaaatggcttcaggaataatatgggttaccaggacaaagggaaagatgcaaagatacagtgacacattagctaacctaaagaggtaaagagggcataaggtggaatcttagagaacctaaacaggtctatatgtacagcctcaagttgagactaaatatatgacagattaatgttcagtgcagayattaataaagagtttctaagttataggacataaaaaaatcctaaaatagctaatagactcatgaatgttaaaaaattaaaaaagagagtgagcaagagagaaatgtttgcattgtgattaagaatgtggactttcaaaattagtgagatctaaatgaaattctggctccaccatttagaatatgacctggtgtaaggtactcaacctccttgaatctccactgcacagctgttaacaagcctaacacttcccacctctcacggcttgttgagaagattaaatgaaataattgaatgctgagcactgtgattggcacataatgcatgat

SEQ ID NO: 358760 - DNA, 526 bp, Homo sapiens
tcagcatcatcatttatctgtgtcacccaaggtgggagcaccacctttgagaacacatttaatctgtaggctcgataagagaactttataacttgcaatcctgattcccatattttattcatgattttgatactcctagtcattatttcagtaatcgtccattcaaggcagcaggttaatgtatatgataaatttctctgctaatggctccaacaattgactgtcatggctggaggcagtctctggcagacagtaytaggctattcttggttggtgatgcaactgcatgaattctatgtatgtaccgactaattcaaagggacttaaactatttgggaggaaggtactcagccaaattacatttctaaaatgtgaattgtagggattggaattaagctcactttaaacactgtagttcataacgttttactattgtagcattttagatgaatggataggaattcattttattgagataactggagtattcttccatataaaatactgaactgtaatcactggactg

SEQ ID NO: 358761 - DNA, 526 bp, Homo sapiens
tcagcatcatcatttatctgtgtcacccaaggtgggagcaccacctttgagaacacatttaatctgtaggctcgataagagaactttataacttgcaatcctgattcccatattttattcatgattttgatactcctagtcattatttcagtaatcgtccattcaaggcagcaggttaatgtatatgataaatttctctgctaatggctccaacaattgactgtcatggctggaggcagtctctggcagacagtactaggctattcttggttggtgatgcaactgcatgaattctatgtatgtaccgactaattcaaagggacttaaactatttgggaggaaggtactcagccamattacatttctaaaatgtgaattgtagggattggaattaagctcactttaaacactgtagttcataacgttttactattgtagcattttagatgaatggataggaattcattttattgagataactggagtattcttccatataaaatactgaactgtaatcactggactg

SEQ ID NO: 358762 - DNA, 305 bp, Homo sapiens
agttcataacgttttactattgtagcattttagatgaatggataggaattcattttattgagataactggagtattcttccatataaaatactgarctgtaatcactggactggaagacctatattagattcagatatgccagtaattatctatgtgaccttaattaatttaattaacttttttgggtcttagtttccagatgatggtttgcatactttgataatagatactcaacaagtactgttgagagaatgtgttgttagaatttaaaatttctcttgctgccaaaattctatttggcaat

SEQ ID NO: 358763 - DNA, 592 bp, Homo sapiens
gacaaaacaatagactgcataagacaatgttaaagaagggcaccttttggttcagaacaaatttcttattactagagtatmcagtttggaaatgagctggatcatggagtaatgagcactttgtcactggatgtgtttaaataaagaatagaaaatcatcttttattaatgtctgtgaagggacctgttatattgatgaggaatattgaattggggcatcaatatgttttatttcaatagtgtgacatggtggaaagaaacagacaaatcagccaggtgtacctgattatattctcccactacaactttcttgttatgtgattttgggcgagtgacttatttttcctgagcctcagatttttcatttataaagtgggaataatcacagtactcatagctgactcacagtgagaaattacacaatatttgtgaaatgtgtagtacaatacctggcacaggcaagtgttcaataaatagtagctgctactatattatgaggcagatacgacctgtaaatagcacaggatttggagagaggtacatgtggttttgaatccccaccactatttgccagttatgccattttgactaa

SEQ ID NO: 358764 - DNA, 592 bp, Homo sapiens
gacaaaacaatagactgcataagacaatgttaaagaagggcaccttttggttcagaacaaatttcttattactagagtatccagtttggaaatgagctggatcatggagtaatgagcactttgtcactggatgtgtttaaataaagaatagaaaatcatcttttattaatgtctgtgaagggacctgttatattgatgaggaatattgaattggggcatcaatatgttttatytcaatagtgtgacatggtggaaagaaacagacaaatcagccaggtgtacctgattatattctcccactacaactttcttgttatgtgattttgggcgagtgacttatttttcctgagcctcagatttttcatttataaagtgggaataatcacagtactcatagctgactcacagtgagaaattacacaatatttgtgaaatgtgtagtacaatacctggcacaggcaagtgttcaataaatagtagctgctactatattatgaggcagatacgacctgtaaatagcacaggatttggagagaggtacatgtggttttgaatccccaccactatttgccagttatgccattttgactaa

SEQ ID NO: 358765 - DNA, 592 bp, Homo sapiens
gacaaaacaatagactgcataagacaatgttaaagaagggcaccttttggttcagaacaaatttcttattactagagtatccagtttggaaatgagctggatcatggagtaatgagcactttgtcactggatgtgtttaaataaagaatagaaaatcatcttttattaatgtctgtgaagggacctgttatattgatgaggaatattgaattggggcatcaatatgttttatttcaatagtgtgacatggtggaaagaaacagacaaatcagccaggtgtacctgattatattctcccactacaactttcttgttatgtgattttgggcgagtgacttatttttcctgagcctcagatttttcatttataaagtgggaataatcacagtactcatagctgactcacagtgagaaattacacaatatttgtgaaatgtgtagtacaatacctggcacaggcaagtgttcaataaatagtagctrctactatattatgaggcagatacgacctgtaaatagcacaggatttggagagaggtacatgtggttttgaatccccaccactatttgccagttatgccattttgactaa

SEQ ID NO: 358766 - DNA, 592 bp, Homo sapiens
gacaaaacaatagactgcataagacaatgttaaagaagggcaccttttggttcagaacaaatttcttattactagagtatccagtttggaaatgagctggatcatggagtaatgagcactttgtcactggatgtgtttaaataaagaatagaaaatcatcttttattaatgtctgtgaagggacctgttatattgatgaggaatattgaattggggcatcaatatgttttatttcaatagtgtgacatggtggaaagaaacagacaaatcagccaggtgtacctgattatattctcccactacaactttcttgttatgtgattttgggcgagtgacttatttttcctgagcctcagatttttcatttataaagtgggaataatcacagtactcatagctgactcacagtgagaaattacacaatatttgtgaaatgtgtagtacaatacctggcacaggcaagtgttcaataaatagtagctgctactatattatgaggcagatacgacctgtaaatagcacaggatttggagasaggtacatgtggttttgaatccccaccactatttgccagttatgccattttgactaa

SEQ ID NO: 358767 - DNA, 520 bp, Homo sapiens
gttgtgaaatgccaaattcagatcaggtacttaacagaagattagatgctattgaagaaaagattgctgaactgaaaatcatagaaatagaaacatccaaatgaagcacagagagaaaaccattccaaaacatttaagagagccttggcatcttggkgaacaatgaaggagtctaactttaccaataagtaattgaaactccagaaggaggagggtagaaaatatattagaaaagatagagcagaaaattttccatattacaagaaaactatacatacacactcttagcaggataaatcccagaaaaataaccaaagataaattacatgggggcggggagattaaggatggcctcatactttatatcccaaacaaaggaagtcagaaaacaataaagacattttaaaagtgattgaagaaaaaacatttttcaacctagaaacctataaccaacaaaactgtatttcacaaatgaatgaatgcaaaatgaaagttctttagacaacaatagctgagagaa

SEQ ID NO: 358768 - DNA, 520 bp, Homo sapiens
gttgtgaaatgccaaattcagatcaggtacttaacagaagattagatgctattgaagaaaagattgctgaactgaaaatcatagaaatagaaacatccaaatgaagcacagagagaaaaccattccaaaacatttaagagagccttggcatcttggggracaatgaaggagtctaactttaccaataagtaattgaaactccagaaggaggagggtagaaaatatattagaaaagatagagcagaaaattttccatattacaagaaaactatacatacacactcttagcaggataaatcccagaaaaataaccaaagataaattacatgggggcggggagattaaggatggcctcatactttatatcccaaacaaaggaagtcagaaaacaataaagacattttaaaagtgattgaagaaaaaacatttttcaacctagaaacctataaccaacaaaactgtatttcacaaatgaatgaatgcaaaatgaaagttctttagacaacaatagctgagagaa

SEQ ID NO: 358769 - DNA, 520 bp, Homo sapiens
gttgtgaaatgccaaattcagatcaggtacttaacagaagattagatgctattgaagaaaagattgctgaactgaaaatcatagaaatagaaacatccaaatgaagcacagagagaaaaccattccaaaacatttaagagagccttggcatcttggggaacaatgaaggagtctaactttaccaataagtaattgaaactccagaaggaggagggtagaaaatatattagaaaagatagagcagaaaattttccatattwcaagaaaactatacatacacactcttagcaggataaatcccagaaaaataaccaaagataaattacatgggggcggggagattaaggatggcctcatactttatatcccaaacaaaggaagtcagaaaacaataaagacattttaaaagtgattgaagaaaaaacatttttcaacctagaaacctataaccaacaaaactgtatttcacaaatgaatgaatgcaaaatgaaagttctttagacaacaatagctgagagaa

SEQ ID NO: 358770 - DNA, 520 bp, Homo sapiens
gttgtgaaatgccaaattcagatcaggtacttaacagaagattagatgctattgaagaaaagattgctgaactgaaaatcatagaaatagaaacatccaaatgaagcacagagagaaaaccattccaaaacatttaagagagccttggcatcttggggaacaatgaaggagtctaactttaccaataagtaattgaaactccagaaggaggagggtagaaaatatattagaaaagatagagcagaaaattttccatattacaagaaaactatacatacacactcttagcaggataaatcccagaaaaataaccaaagataaattacatgggggcggggagattaargatggcctcatactttatatcccaaacaaaggaagtcagaaaacaataaagacattttaaaagtgattgaagaaaaaacatttttcaacctagaaacctataaccaacaaaactgtatttcacaaatgaatgaatgcaaaatgaaagttctttagacaacaatagctgagagaa

SEQ ID NO: 358771 - DNA, 539 bp, Homo sapiens
agtctccaaaaaatagccccttaaatggaataactgtcagccaataatgttatatccagcaaaaacaagtttcataaatgaaggggaaataaaatctttttaaracaagcaaatgctgagggaatttgtcactaccagaccaacactacaagaaatgttaaaagaagtcataaatcttgaaaccccaggtcaatatgcaacagaataaagcctcttgaaagcataaaacctataaggtttataaaacaataacaatgaagaaaacaaagcatctagctagcaatcaacatgatgactggaacagtaccttttaccttactgttcatattgcatgtaaatcgtctaaattctccactttaaatatgcagattgacagaatggatttaaaaaatcacaatccaaatattgctatcttcaagtgattcacctaacatgtaaggattcttatagactcaagataaaggagtagaaaacgatattccatgcaaatgaaaaccaaaagtgagcaggagtatttaagatgaaacaaactttaaagt

SEQ ID NO: 358772 - DNA, 539 bp, Homo sapiens
agtctccaaaaaatagccccttaaatggaataactgtcagccaataatgttatatccagcaaaaacaagtttcataaatgaaggggaaataaaatctttttaagacaagcaaatgctgaggraatttgtcactaccagaccaacactacaagaaatgttaaaagaagtcataaatcttgaaaccccaggtcaatatgcaacagaataaagcctcttgaaagcataaaacctataaggtttataaaacaataacaatgaagaaaacaaagcatctagctagcaatcaacatgatgactggaacagtaccttttaccttactgttcatattgcatgtaaatcgtctaaattctccactttaaatatgcagattgacagaatggatttaaaaaatcacaatccaaatattgctatcttcaagtgattcacctaacatgtaaggattcttatagactcaagataaaggagtagaaaacgatattccatgcaaatgaaaaccaaaagtgagcaggagtatttaagatgaaacaaactttaaagt

SEQ ID NO: 358773 - DNA, 475 bp, Homo sapiens
aattaaaaataaaagtggagacatttctaccaccaccacagaaatacaaaaggtcatttgagacagatatgaacacctctctgcacacaaactagagaatctagagaaaatggatgaattgctggaaagatacaacccttctggattgaattaaaaaaaatagaaatcttgaacaggccaataaaaagcagtgaaactgaatcaataataaaaaattagcaacaacaccaccaacaacaaaaacaaaaacagaaacagagggagttacagccaaattataccagaaattcaaagaattcaaaccaatcctactgaaactrttccaaaagatggagaaagaaggaatcctcccaaacttgttctatgaagccagtatcatcctgataccaaaacctggaaagggcataacaaaacaaactgcagaccaatatgcttgatgaacatactcaacaaaatactagtaaaccaaatcaaa

SEQ ID NO: 358774 - DNA, 560 bp, Homo sapiens
gatgacacaaacaatcagaaatacatccatgcttatgaattggaagaatcaatatcatgaaaatgatcatatcacccaaagcaatctaaagattcaatktgatttctatcaaaatgccaacatcatttttcacagaattagaaaaaagaatcctaaaattcatatggaactaaaaaagcccaaatagccaaagcaatcctaaggaaaaaaaaatctggaggcataactactggagttcaaattatactacaaggctacagttaccaaaacagcatgatgctggtataaaaggagatacataggccaatgtaacagaatagagaacccagaagtaatgccaaatacatataacaaactgatcttcaacaaagcacacaaaaacaaattgtggaaaggacatcctatttaataaaaggtgctgggaaaaatggatggccacatgcagaataatgaaactggatccttatctttcactgtatacaaaaatcaactcaatatggatcaaagacataagtcttagacctaaagccataaaaatcctagaagaaaatgtaggaaaa

SEQ ID NO: 358775 - DNA, 560 bp, Homo sapiens
gatgacacaaacaatcagaaatacatccatgcttatgaattggaagaatcaatatcatgaaaatgatcatatcacccaaagcaatctaaagattcaatttgatttctatcaaaatgccaacatcatttttcacagaattagaaaaaagaatcctaaaattcatatggaactaaaaaagcccaaatagccaaagcaatcctaaggaaaaaaaaatctggaggcataactactggagttcaaattatactacaaggctacagttaccaaaacagcrtgatgctggtataaaaggagatacataggccaatgtaacagaatagagaacccagaagtaatgccaaatacatataacaaactgatcttcaacaaagcacacaaaaacaaattgtggaaaggacatcctatttaataaaaggtgctgggaaaaatggatggccacatgcagaataatgaaactggatccttatctttcactgtatacaaaaatcaactcaatatggatcaaagacataagtcttagacctaaagccataaaaatcctagaagaaaatgtaggaaaa

SEQ ID NO: 358776 - DNA, 496 bp, Homo sapiens
aaataatttatgactaaggctccagaaataaatgcaacaacaccataaataaataaattggacttcattaaactaaaaagcttctgcacagaaagaaataatcatccaagtaaacagacaacccacagaataaaaataaatttttacaaactatgcatctgaaaagattaataytcagaatctacaaggaaatcaaacaaattagcaagaacaaaacaaataatcccatcaaaaataggcaaaggacatcaacagacaagtagacgttccacaaaagaagaaatacaggtgttcaacaaacatgaagaaatgctcaacatcactaatcatcagggaaaatgcaaattaaaaccacaatgacataccatcttaccccagccagatggccattattaaaaagtcagaaatcaatacatgttggtatagatgtgatgaaaagggaacacttacatattgctggtgagaatattttccatacaagtacaacttgtatata

SEQ ID NO: 358777 - DNA, 618 bp, Homo sapiens
atttcctatttaggaaacttatttaggatttcttcatgatttgtttgtagtattttttagtatttcactttacaatggtcttggtgttttttctaaataaaacaatatgcgtatataacttaaggtctactggtaactatattttattccttcaaatgaagtctaraaatttattttcatatacatctctttacccttcctactttttatgtatatatattttaagtatttcctgtacatacattgagtaccataacagagatgtttataattttcatttcaatcaccaaatattaagaaattcccatgagaggttggatactctattatatttttgcatatttttacccattccactgtctttcttttctgaagtttcaagtcctcttctgcttatttcctttctgtttaaagaacttcctttaaccatacttcaaagagatattttccagcaacaaattctttttgctttccttcgtcttaaaatatctttttcttttctcttcattcttgaaagatttttttcactgaatatagaattcatgcttaatagctcttttctttcagtgattgaaaactgttgcaccactttcttctgacctccatgattccagatga

SEQ ID NO: 358778 - DNA, 567 bp, Homo sapiens
cttttggttaccatttatatgaaatatcctttaccatgccttcactttcagcctatgcataattttaaagctaaagtgagtatttttggacacagcgtatagttggatcttgtttttatgttttatccattcggccactctttatcttttgattggagaatgtaattcatttatatataaagtggttattgatagctaagggcttgctattgccattttgttaattgttttctattttgtagatttttattcctttctttctgtcttcctttgtgatttgatgattttcctagtagtacactttgatacctttttctttatcatttgtgtatctgctaaagggatttttctttgtattaccacaatgtttacataaaacatcttacaacagttgattttaagctgataatttatttttgattgcatatcctccccacactttgttattgacgacacaatttacatattttatattgtrtagtcattaacacattattataggagagtattttaatacctttgtcttaaattttatgctagtgttaaaattgatttatatgtcaccat

SEQ ID NO: 358779 - DNA, 593 bp, Homo sapiens
gctttgccaggtttagtattcttgactggcagggttttttccttcagaactttgaatatattatactactctcctggcctgcaaggtctctgataagaaatccatagctttatggaggttcctttatatgtcatgagcaggttttttcttgccgttttgaaaattcactcttggctttttacttttgatactttgattatcatttttctcagggtaatctttttggagttgatccagtttagggacttttgagataaatgaagctggatggctacatctctcccaagatgtaggaggcattcagcagttgtttatctaaatagcctttctgccctttactctcttttcttttttttaaataatcctgtaatgcatacagtgatyttttatggtattctataagtcttagagactttctctactcttttttattctttttctttattctcctctgattggataatttcagatgacctgcttctgaattctcaaatgtttccttctgcttgatcaactctgctattgaagttctccactgaagttttcatttcaaacagctccagaactttttggttccttttatgatttttatc

SEQ ID NO: 358780 - DNA, 631 bp, Homo sapiens
ccccaccccatttccctgctcctacctgcccccagactattcagccatgctgatcccctcagtattctgagtgcagagagaaagaagtgggcctttgggcaggaagctgcatggctagagaagcagacactcaactactctctcactttcccccgtggataaattcataaattgagaggatctgtattggcaatgaactgtgctaccttcgggargagtgatgtgggcagggtaaaactgttcttatgctcttcagtgtgcctactcacaaatttgtttcttccaatagaatgccaggacatctctgcttaactcctgggctcttctccacggatggttgtcaaaatcagtgtttctgtcaggatacaaaggttgaaaattctgattctgccatctttctgacatcctcaaggccttatatgctgaatcatatgtcattttcacaaagaccttacggggcaaatattaatatccacatcctatggatgaatatagtgaggctgaaagcagtaagtaatttgaccaaagtcactcacctagtaagtgatggatgggatttgacccaaaataaaatatagggaaatatagctgttgagcttaagctcttaaacactagagtataaagatgagc

SEQ ID NO: 358781 - DNA, 586 bp, Homo sapiens
aaaaaatttgaatttataatcttgagtatttcaayctgttattttggagcttgactgtattacaaatttatttgcatctttttaaaggaaaatactgtcagaaatttgattgcatttatttttacctactaaacctatttagaagaggccaatgttgaaggatatttcttttctttaacttaaaaacagatcaaaataatttttcattctttttcccaaaaacaaaaaaagttttcaatgcattttaataaaactcaaactgtctctctctgtgctttccctcaagttatccatttttaattgtcttcagttcttggcattttgatgccatggataggaattgtggctctttccagtctcccccacccacttcctcgtatgttcactgaaataggcttagaagccatctgcatctctgtgtggaggcacgctaaatgtcagtcttcccattggctccacacagaagagggctccaaaagacctgctggtctcatgcccaaactgctgtgacccttgccttgctgggtttttttttttctattaatattttaacatgtgggttgcatgagcttgggaagcacttttg

SEQ ID NO: 358782 - DNA, 586 bp, Homo sapiens
aaaaaatttgaatttataatcttgagtatttcaatctgttattttggagcttgrctgtattacaaatttatttgcatctttttaaaggaaaatactgtcagaaatttgattgcatttatttttacctactaaacctatttagaagaggccaatgttgaaggatatttcttttctttaacttaaaaacagatcaaaataatttttcattctttttcccaaaaacaaaaaaagttttcaatgcattttaataaaactcaaactgtctctctctgtgctttccctcaagttatccatttttaattgtcttcagttcttggcattttgatgccatggataggaattgtggctctttccagtctcccccacccacttcctcgtatgttcactgaaataggcttagaagccatctgcatctctgtgtggaggcacgctaaatgtcagtcttcccattggctccacacagaagagggctccaaaagacctgctggtctcatgcccaaactgctgtgacccttgccttgctgggtttttttttttctattaatattttaacatgtgggttgcatgagcttgggaagcacttttg

SEQ ID NO: 358783 - DNA, 551 bp, Homo sapiens
gaaggaaacattaagaggaatgaagaaagaaaaaaatgtaagtcctatgcttagcactgakgttgcaatgataggtaaatctacagtaggaagaaactattaagaagagaagatatggagggagaaagggagaaatgaagacttctctaatgtctactgtgtaccagccatgtggtaaaactttgatatccactatctcattcagtctttaccacatttgtataaagtgcatataaagaaagttaagctcagagtaattttgaaagttacataaatttcaaagctaatcacagaatccaatcttcactggtctttacattatagagtaaaccctttttgagcatcttctgaacaggtgtcatatgctgtgtcagttttccagatgagtggtacagtctctgcttttcagaacctcacaataaataagaacagacttttttgacaacaaatggaagtctaaccacaggtcgatatggcagggctaagaatctggagaagtctatacaatacaaacccatctctgggttttaagatccaaattagaagctcaa

SEQ ID NO: 358784 - DNA, 612 bp, Homo sapiens
tttaagaaaggcaaaggagaaagaagagaaaagtataggttagttcaatattggatagaagagaagaatagaaaagaggaaaaggagatggtaaagaaaaaggctaaaatagagaaagctgagaaggaaggaaacattaagaggaatgaagaaagaaaaaaatgtaagtcctatgcttagcactgaggttgcaatgataggtaaatctacagtaggaagaaactattaagaagagaagatatggagggagaaagggagaaatgaagacttctctaatgtctactgtgtaccagccatgtggtaaaactttgatatccactatctcattcagtctttaccacatttgtataaagtgcatataaagaaagttaagctcagagtaattttgaaagttacataaatttcaaagctaatcacagaatccaatcttcactggtctttacattatagagtaaaccctttttgagcatcttctgaacaggtgtcatatgctgtgtcagttttccaratgagtggtacagtctctgcttttcagaacctcacaataaataagaacagacttttttgacaacaaatggaagtctaaccacaggtcgatatggcagggctaag

SEQ ID NO: 358785 - DNA, 567 bp, Homo sapiens
tctctgggttttaagatccaaattagaagctcaagtttattctagcttggctggaatgatcctaaacactttagactattggtggaaactccttggatacagaattcagttttacracagttggaggagtttgcctgaggcaaatgcttcccacctatagtaggatcagtcttgaaaagatctcagtctagaatatggtatgtggaagaactgcaagcactagactttaaggattgtcacgtgccagcagagaaacaagttcagaatgactgaatctaagggaatagggaagaatcagaaggtaagcaagggttataaattgggcaagggttttagattttattttcagggtgaaaagaagccacagagggttttaagcaaaggaattagtgtaatcttattatgtattacaaggatgatttagggaggggatgagaagagtaagtggacaacaaaggaagtgagagaccagtttgtagatgaattcagtcatctgggtaattaaagatgatgacaagaactgggtagtagcagtggagatgaagagaagagagtcagattcgaaat

SEQ ID NO: 358786 - DNA, 567 bp, Homo sapiens
tctctgggttttaagatccaaattagaagctcaagtttattctagcttggctggaatgatcctaaacactttagactattggtggaaactccttggatacagaattcagttttacaacagttggaggagtttgcctgaggcaaatgcttcccacctatagtaggatcagtcttgaaaagatctcagtctagaatatggtatgtggaagaactgcaagcactagactttaaggattgtcacgtgccagcagagaaacaagttcagaatgactgaatctaagggaatagggaagaatcagaaggtaagcaagggttataaattgggcaagggttttagattttattttcagggtgaaaagaagccacagagggttttaagcaamggaattagtgtaatcttattatgtattacaaggatgatttagggaggggatgagaagagtaagtggacaacaaaggaagtgagagaccagtttgtagatgaattcagtcatctgggtaattaaagatgatgacaagaactgggtagtagcagtggagatgaagagaagagagtcagattcgaaat

SEQ ID NO: 358787 - DNA, 583 bp, Homo sapiens
ttgccatacagaaacagcagttctctcttgggctttttcgttttmgacgcatattaaatacacaagtgaagcagtctgtagatatacagtcaagttttaatggaagaatcaggggaagaggcacaaattgggcagtctccagcatatccaagaaacacagcatagaaggagaaaggaagagaccaagatctaagccattatgtattccaacatctaataggccaaccaagaaggaaccagctcaaaggtgaagaaggaatgaccaatgaggtaacaagaaaactgtgggagggtggtatcaagaaagacaagaaaagagagcatttccctaagaaggggatggtcagattatctagatactgcttagaagtcctgtacaatgagaacaagaagtagccattgaattcagccagatagaggtcgctggtgatcttgagaagaggagtttcagtcgagtgtttagtgtggaaaactgtattgagtggtttgagcaaggaaggagaaaagaattagatgcaggaagactgcaaaactgttgtgaaagggagcagaaaaatggggcagttctttgagatgaaccagg

SEQ ID NO: 358788 - DNA, 475 bp, Homo sapiens
ttggggaacagaatgggacaagaagcagctcagcaaaggtgagatccctggcaaaatcctgctaagagtagctagctccagactgaagccttaaggaaagttactaccagatttcccttaccttaaacagtgagatctggactctcacaawcctgcctcctccccacttaggaaataaattccaggcacttctggacttctgagaggacatgcgaaatgaagtatagtaaaaggaaacatggggtatctgagtcaaacaccatctaagagattgatctactttcctgaaagagaaattttagtagagacttgacatatttctttcgggacacttgtttttattttgcagcacagattttccttcagaagatctttactgagcacctactatgtgcttgtactgaatctgtgctgctgtgttatgtggtttgcagcaagggatggaatttgggcctttctacactaagttgtatgg

SEQ ID NO: 358789 - DNA, 475 bp, Homo sapiens
ttggggaacagaatgggacaagaagcagctcagcaaaggtgagatccctggcaaaatcctgctaagagtagctagctccagactgaagccttaaggaaagttactaccagatttcccttaccttaaacagtgagatctggactctcacaatcctgcctcctccccacttargaaataaattccaggcacttctggacttctgagaggacatgcgaaatgaagtatagtaaaaggaaacatggggtatctgagtcaaacaccatctaagagattgatctactttcctgaaagagaaattttagtagagacttgacatatttctttcgggacacttgtttttattttgcagcacagattttccttcagaagatctttactgagcacctactatgtgcttgtactgaatctgtgctgctgtgttatgtggtttgcagcaagggatggaatttgggcctttctacactaagttgtatgg

SEQ ID NO: 358790 - DNA, 388 bp, Homo sapiens
gctttagatatcagcccagaagataatgacctggaggtagtggctgcctgttgggtagaggcactctttgtacctgtggagttcattccaaaagaggcagatgcccttagaatcagcttttctaattaccattactacaatctacagattcaatgcaattcctgtcaaattacgaatgtcatttttcacagaattagaaaaaamaaatcctaaaattcatatgggaccaaacaagagcccaaatagccaaagcaatcctaagcaaaaagaacaaagttggaggcatcacattacctaactttgtttgctacaaggctgtagtaaccaaacagcatggactcgtgtaaaagtagacacttagaccagtggaacagagtagagaacacca

SEQ ID NO: 358791 - DNA, 548 bp, Homo sapiens
cctaggagttcgaggttgccatgagtcatgatcacaccactgcactccagcctaggcaacagggygaggccctgtctcaaaaaagaaaaaaaaaaagtcataactcgtggtctctttagtggcctctggtctttttaactaatgtaaattctgacttcatttagacttaaagctattgctcattttaaagctgttcttatcttattagacctatgctcaaatcctttaatagctgaaatcaattgagctattatttattaagtaactacgatgtaaaagacaaaatactagggatcatacagataaaaagggatgagtgaaatagaaacctcattctaaagtcactggtttttttgtagagcattagttagcagctgccgtacaataaatcatgccaaaatccagtggcttaaaatagtaagaatgtattattgttcatgagtttcttggtcagctaaacagtatttctggtatctactggtctcatttatttgtttgtggtcagatgtggattaggcaggcaacttgctgagttggttgactctatc

SEQ ID NO: 358792 - DNA, 522 bp, Homo sapiens
tttcaggaaaagagaacattgtgaagggagtgcagaggggtgaaaatcggcagtagaagagtaatgtatagtctgatttccaaatatactgggggaataatggaaagcaaatctggacacgtatataaagagttcagcataaatgagtctttgtagtggcctttgtgattcactagactatcaataattatccacaatcttttcagcaacagtgatttctaytctgagatgaaaaaaattcatttgcagcagtgtctaaactattaaaagtgaaaaacaatagaaaattgaacgaactgggagaagactgtgagtgtttaattattaatgttttttgaagtcttgagtgaaatgacggcagtgactgaaaagagaaggaaggatgtaagaaatatttggtaacttaagatacaagggggagagtcaaaaataagtgaaatgactgcaacctacaacatccagtcggaagacatcaggggacattaagtgaaattgagaagttaggaaaaaaagaatcttttg

SEQ ID NO: 358793 - DNA, 616 bp, Homo sapiens
agaaaagatgtctgaatagtcaagattggcaaggaacccaaatcaactcagttcaatctatttcgctcagtacttataaaaaattactttaaatactgctatcctatttcaattaagtaaaatgtagagcaagacagagatacaaagtgtctttgtcagtggaagaaaccatgcaatccataggcaactatgccctactcctcccccaacccttggaaagtaaattaaaaaaaaaaaaagaaagaaggaaagagaaaaagaaaacattcaggtaattgattttcatgtgagatgacacaagcaatcatttggcaataaagtgtccatattgatggtgaagagggttggtcaactactagataaggcaaggtagttagttacatgggactttgttttgagccctgttgcttttttgctttaatagaatttctattattctatgcttatttatcactgctgcaaggaaagtgaccattaatttttaaatatatcatatataaatatcttaamtatatcttacatatatatctctcttgcatatttacaaagtaatatatatttatacattacttgtatttatatttaaacatatttatatatatatatttgcaggagt

SEQ ID NO: 358794 - DNA, 560 bp, Homo sapiens
acctgccttctgcattgatcttgctgggagctgcagactggagctgttcctatttggccatcttgccaggcactgaaaaaaaatctttaaaaaaaaatgcctgcatgatgaaaaggatttcctattttcatttggcttattgtgaagtcacttggagctagcaawggggctggagagctacactgggaagcctgaatacacacaggacaggagactatttgaactagtctgaggaactaacctgagcatccaggttgatgtacaatatagagtctaaagctctggtgtgattgacagttgttgataccaggagttgagacagtggagtggcagggtacagcagtgacaagtttattctatgttggacacttgggcaccaattatttctaatctttccataactagtagaattctgcccagtgggctgcaagtacaggagatggattcagtttctgagaatggatttggcaagagcccagaaggatgcaaaggcctctgtcaaaacatctatgtacctcatgcatcttggaatggggatccaaatgacactttgtttttta

SEQ ID NO: 358795 - DNA, 560 bp, Homo sapiens
acctgccttctgcattgatcttgctgggagctgcagactggagctgttcctatttggccatcttgccaggcactgaaaaaaaatctttaaaaaaaaatgcctgcatgatgaaaaggatttcctattttcatttggcttattgtgaagtcacttggagctagcaatggggctggagagctacactgggaagcctgaatacacacaggacaggagactatttgaactagtctgaggaactaacctgagcatccaggttgatgtacaatatagagtctaaagctctggtgtgattgacagttgttgataccaggagttgagacagtggagwggcagggtacagcagtgacaagtttattctatgttggacacttgggcaccaattatttctaatctttccataactagtagaattctgcccagtgggctgcaagtacaggagatggattcagtttctgagaatggatttggcaagagcccagaaggatgcaaaggcctctgtcaaaacatctatgtacctcatgcatcttggaatggggatccaaatgacactttgtttttta

SEQ ID NO: 358796 - DNA, 560 bp, Homo sapiens
acctgccttctgcattgatcttgctgggagctgcagactggagctgttcctatttggccatcttgccaggcactgaaaaaaaatctttaaaaaaaaatgcctgcatgatgaaaaggatttcctattttcatttggcttattgtgaagtcacttggagctagcaatggggctggagagctacactgggaagcctgaatacacacaggacaggagactatttgaactagtctgaggaactaacctgagcatccaggttgatgtacaatatagagtctaaagctctggtgtgattgacagttgttgataccaggagttgagacagtggagtgrcagggtacagcagtgacaagtttattctatgttggacacttgggcaccaattatttctaatctttccataactagtagaattctgcccagtgggctgcaagtacaggagatggattcagtttctgagaatggatttggcaagagcccagaaggatgcaaaggcctctgtcaaaacatctatgtacctcatgcatcttggaatggggatccaaatgacactttgtttttta

SEQ ID NO: 358797 - DNA, 565 bp, Homo sapiens
tagttgtgacctacaaagttgctgtcaacactgaatcagtgaatactgagtcaatgttccaaggggaaatacaaggttaggatcctgcgaccttttgatcaaaacatcttcatcaactgatgaacacataaccttgtttcatatgtgtttaaaaatgcattatttaatatatatttcttataaataactaattatatatggattttgttgtaataaaaactagcagagaagggtctatcatttccctgatgctggataatgtgactggaaatttctttggctttcagctttgcaacaatactatcaactacacttaaaaaaaaatcaattcttatctcatgaaactacaaattgagccacatttccacgtcttccctagctccctcatacaccatacacgttactgtagcacttgctggggtagtttcatgtacagattagmaaatttcctctttctttttctggatgtatgtattgttgattcaccaacattaaacttagggacaatcatattctaacacatgcctgaacgaaatttatctaaaacacggatttttctctcatt

SEQ ID NO: 358798 - DNA, 631 bp, Homo sapiens
aagtttaggagaatggtcagggttgaacataaaaattttggaatcattgagtttacatggtatttcaagccatcaactagatagaaccaataaagaagtataaatgaaaagagaagatgatcaacaactgagccttggagagtgacaatagcaaaaccttagggagaagaagaaccagcaaagaagagtaagacataacaaccagcgagtcatgacgaatgtaagtagagtttgtgtgtatgaagtcaactgaaaaaygtgttcctaggatggtggactaatctgtatcaaatgctgcttacagttcaaataagacatgagtgagaattaggtactatgtttaataatgtggggggtcactggtgatcttgacatgaacagtctttgtggaatattggagcaaaagcctgattggggtaagttgagaaaaacagaaagaatgtgagaagtgtgtgtgtgtgtgtgtgtgtgtgtgtgtgtgtgtgtgaaggggagagagaaatgggtagctggaggatgaagtgttatcaagagaaggtttttaaaattaggaattataaaagcatgttagtataatgatagaaatgatccagtatggagggaaatatttataacaatgagagagaggaga

SEQ ID NO: 358799 - DNA, 591 bp, Homo sapiens
aaaaagtaagatttaacaaatgctagagttttgtcaagggcatatactattaattgagggaaggtcataacggttgaggatgtatgaaaacaataatatataatgatgaattgaagaatttaaacaaggaaatatgggagtggggacatgattggagataaggggctgtgcaaaaatgttagaattgatggattctaggttgtagtgggaccaagtattattggaatcagagtactacatgaaataagctgagaagtaggagctggataatgaaagtgaggttatatgaggtttgcagttacagaaaatgacaagatctatactgaaagcatgaccatatgattgcctgaaggtgagtggaagtcatagtcatctggaggacagaggtcaagggactgagagaccactgcattgaagggtattataaagatgattattgtaaatattgaaattaccagaaaatgtagcaaatacattctcaaargcactgtcaatgaatcacagctaaaatatttcaagaaaggaagaaatgacttcatggccaaaaaacaccacaattagtagaaatagtgggagaatccattgataaca

SEQ ID NO: 358800 - DNA, 650 bp, Homo sapiens
agtactagttaaagttgaataaaggaggagcctgaggaaaataagctgaaatctgattatagggaacatgacaacaactcctgaaatacttcaaagtggaaaaacagaaagctgtcaagaggagagagtaagtctgctgttccttatggcctcttgagtcaagtaaaatcagtggtagaaccagaagaaaaaattccatagaattataaggaagaatatcacctgaatatggtttaagtgtttttcacttaagcattggttttcaacaattttctccaattaatcttcasatctacttgtttaagtgaaaacttacttagaagttctgtttatgaaaaagggggagttgctgtggctgaagtaggatgtcgggacttacctgtttctctcccccaggtgtctcctggggagaaccacagtgcaaggatgggcaatgccttgctgaatgatcaagaggaattctagtgtctcattacttcttggactgaatggttttaaaaatctcttttatctcatatcttatgagcttaagatttgaggattaaagggttttgactatgtcaaaagcatctggtgattttaatgttcctttctagtgagttagtatttgcagtggtaagaggtgctacagccttctaattcataatgct

SEQ ID NO: 358801 - DNA, 524 bp, Homo sapiens
ggagtcaaaatatctccattgctttcagtgtggatacagaacaattattgaacttcttcatgccttctgcaaaatggagataataataattcacatcccaaagggctagcatgagaatcaaactagaaaatatgtacagaacattgagtgacccatgcaactcttagacctatgcctggtatgtaatagtgactcaataaagggaaacattgattatgagactttagaggtttcccttccttttctaaaacttctatgaatttgcaatagcatatatagcatggagatgttgtactatagcagattaaaataagcaggtagttagagggaccagccctgaatttctttatccttatctgaacatttcccaggaagtatgactgttacattgttggatattagagagaagaaaaagaaaaaaactgaattgttgrctaagtaaatgagtgatgtgaaaattaagtgagccaactgaaatttagtcagctctcatcatttttggaagctgcatgaattcactcaaa

SEQ ID NO: 358802 - DNA, 574 bp, Homo sapiens
tccaactgtagcctgaattgtgctggttttaattatcacggccttttctcttttatattgctaaagttttcttctagttagcttacaaataatctttttcattctagtgtactgctttgagtttctatgccctaagagttgatgtaytgattaataaggcatgttagtgacttagagtagtccagttaaattctgggcatcctcccagacagttaataatacaaggtggaagtttctaagctaaaatcagttgcagcgttactaaggaacacttgtgcactgtgcagcaaagtgaaatgtaaatgcaaatctcgtaagattcgaaacctttcagaggaggtctataagcatactgagatgagaaaaagaaaagaaacaagataataaatttgcagtataagacactagttatctaaagtctcacaggcaatttttaaaagaaaattacctgagataatcctatttatatttcctcctggctttgtgaacatttgacagcagttcatggtccaatctgagctgctgttaggtgaaagaagttttatttttcttcaaatgtaccaactgatggatc

SEQ ID NO: 358803 - DNA, 492 bp, Homo sapiens
ggaaggcacaatgctagtggtaaacagcttaagaatattcttcactggattttaccacgacaaatacataaaaacttgaggtgtctgttattattgtaatttcggtgggtttgcttctaaagtatacatttcatatctacagtataatttaatttagccacaaatgtgatgatacaactttctagaagcacagtttctctgataaagtatgttaaatagtatgtgtatacttaaataaggtcataaatttataggaagaaaatgaaagttaacactgacttcaaagttattttttaaaaagasagaaactataaatgagaaatgaactatattttcctaatttaaaaatatttgcagtgactgggaaattttttatggtgagacataaatcctttagaaggttaaaataagatgagatttaacctatatagaaatgaccataacaaatctaacaccttgaaaactagattttagatgtcgtgtagagtattg

SEQ ID NO: 358804 - DNA, 576 bp, Homo sapiens
gcagtcgcttgcagggaacttggcaaagatgagaaggtgtcactccagctctacactcctgactgctgaagcgaggaggcttaatgtatccagcacagtcttactattagctggttaacactttctaggccagtaaatttaattgtatccttatctgtggccaccaaattctctcctgtcctctctcccctctgctgtgtcttttggcccttgaaaccttagactcctcccgcttttgtcctccagaggacaatggtgtcctgtgtgattggtccagcactctatatactatacggttctgctgctggacagaaacagagcttcagcctctaaaggtggaggagggatggtgggaaaatgcctttagtactttgcttttcaatcatcmatgtgtagatgggagtctaattaaaatgcagattctgattctctgggtctgaattggaacctgtgagtctgcatttctaataagcttctattgatgttaaggttgctcatctgcaaaccacattttgagtagcaagactagagtttcaaatctaagggaaaaaaattaaagatggttctacttctaat

SEQ ID NO: 358805 - DNA, 503 bp, Homo sapiens
atgacaggcactgctgcttccttctctgtcttcctgctgagaatgtggctctatttctggagctgtaatagtcattttttgactcagtcagcagtaggcagaggacaggagaatctggaggtatcagtttaacattattggtccacttatcttctgattttgttatatgagcaaaaacatgttaagactatgaggctggatttttttgttacttgttgttaaaaacaawcttaatgaataaattttctaaatgatgtctctaagaatcataagggtgtgaaataattgatttccaggtttcacaagcaatgaaggactttctgcttaatactgagctgtattatttttgtttacattgtgcccatctatgatttcatttggaaaaagaaagtttagctatcaaaatatttcaaaactaaactctaaaaaacctatctaaggtgtcttaactaaaagtctgtagatatctggacttctataagcatattttgcttgcgttatgc

SEQ ID NO: 358806 - DNA, 560 bp, Homo sapiens
aatttttgtcacatttataaaccttggtttctacctgtttcacataatagatgtgttgattaatcaagatagtctacaaaaagtatctaacacagtgcttagcacattatagatgctcaacaaatgtgaacttctttcttttcagttaaaatacaggttcaaaagtcatacctggccactttgaattaatagacaaaggatgktgatgcctgcaggtctagctactatacagtaattgctttaattatatccaaaaattgttaattattgttttagctattaaataccaacatcaggaaatgtatatggaaagatggaatgtaacctcaaataaaatttttctactttatattttatagtaacctttcctcattgaaatgttctcattagtattatatatccgaagtttctattttgatattcatgagattagagctatgcaaattcagaattacatgtcttgtgattgtaagttcattagactaagaacaagtaccaactaataggcaatactacacaaagcagtacagaggctaataatctataaaatccagttattg

SEQ ID NO: 358807 - DNA, 613 bp, Homo sapiens
tagcatgcattacaaaaaattagatatttgattagtcaatataataattatttgtaattactttaagtcctatgagctatatattgataatggggtccctaaaaaatctattaccaaactttgtctaactgttgattattgttgttactagtagcatcaayaataactgctggttaattggaatatcttacttgggatataaatcaccagttggctgctttaaacactaatttagtcttcaactgaaatacatgttttgaaaataatttaccaggcattttagctaataatcacctattttaaagctagttatagcagatgttacaaatattttctttttgagtagcaataacaagattttaaaggtttctgctcttaataaaatattttagaactgaaaatattcaatatcttttaaattaaaaaggcttaataatactaaggaacagagtacagtgtatagtaagtgatttctaacatttgctactaacttcaaaataatgaacataatttgttgatgcatttcactgttcagtttctgaagatttctattggtaaaaatacacttctggatgagagaaactgttggtgtaaatcttaaagtcataaaagt

SEQ ID NO: 358808 - DNA, 572 bp, Homo sapiens
ttcactgttcagtttctgaagatttctattggtaaaaatacacttctggatgagagaaactgttggtgtaaatcttaaagtcataaaagtggaatacagccaagtagagccagtgtcagcaagtcatcggagcagtggtttctcctgtgtccttccacccacagtttctactaaagcaacaacagaggagtatttcctcgcctactaacaacatcagtttaattcaacaaatgattagcatttacctcaaatagtttatggttttgggttsagcaatgagggtagaatctgaaaaaaaaaatgagaagaacagcagagggaaggcataataatgtgcatgtgtagagttgcttctatttcaaatatataatttatttttatacattttatatttatgtcacacatatgtaaatatatgataaaatgtgtctacttctgtacacacacagatatatattttttaaatttattttgcttatatgctaatataggttgggacttattcaaatcccaaacacaggcctttttcattctctaaaagtctatactataccatcagttatatctgtatg

SEQ ID NO: 358809 - DNA, 587 bp, Homo sapiens
tcctgtgtccttccacccacagtttctactaaagcaacaacagaggagtatttcctcgcctactaacaacatcagtttaattcaacaaatgattagcatttacctcaaatagtttatggttttgggttcagcaatgagggtagaatctgaaaaaaaaaatgagaagaacagcagagggaaggcataataatgtgcatgtgtagagttgcttctatttcaaatatataatttatttttatacattttatatttatgtcacacatatgtaaatatatgataaaatgtgtctacttctgtacacacacagatatatattttttaaatttattttgcttatatgctaatataggttgggacttattcaaatcccaaacacaggcctttttcattctctaaaagtctatactataccatcagttatatctgtatgtgtacaggtataggtataaaaataacaaattaagcatacaatcattcctatttgagatagaaaattcatagagaagacaaatgatagcactcgaatggattctgtatatagagwttttgctttaatggaatacatttccactattctcacataataa

SEQ ID NO: 358810 - DNA, 574 bp, Homo sapiens
aggcggggcgtgagggagctgcagatggtagaagggagagggagtagcgagattaaagttagacaggcctgggttcaagtcctacctccaccactgagtttaccttagatgagccattttgcctctctgaaaatgttttcctcatctgtgaaatgattataaaaataaattatgggaaacgctgtcagaattcagagcgctattgttagtgttcagcattagcagaaagccaacaaatrggaaccacatatttattttatatatatagttaaagagaggaaagaaaattcctaaaacatgtaccaggaaaatccagacgagcacaccccggccccccacccactctcccgggcagggcaggaggcacacggctggctggggcgcaccagggcacctgtgcgtgcaggtggggcgggcgcgcggcgacagcaggttggcgatgccgccctgtcggcaggcgggggaaggaagagggcgggagggcccacctgaagacgcgcagcagcaggcaggcgatgaggagggtggtaaaggcgaacgccacgatcacggctgccttgagggtgggtaggtc

SEQ ID NO: 358811 - DNA, 574 bp, Homo sapiens
aggcggggcgtgagggagctgcagatggtagaagggagagggagtagcgagattaaagttagacaggcctgggttcaagtcctacctccaccactgagtttaccttagatgagccattttgcctctctgaaaatgttttcctcatctgtgaaatgattataaaaataaattatgggaaacgctgtcagaattcagagcgctattgttagtgttcagcattagcagaaagccaacaaatgggaaccacatatttattttatatatatagttaaagagaggaaagaaaattcctaaaacatgtaccaggaaaatccagacgagcacaccccggccccccacccactctcccgggcagggcaggaggcacacggctggctggggcgcaccagggcacctgtgcgtgcaggtggggcgggcgcgcggcgacagcaggttggcgatgccgccctgtcggcmggcgggggaaggaagagggcgggagggcccacctgaagacgcgcagcagcaggcaggcgatgaggagggtggtaaaggcgaacgccacgatcacggctgccttgagggtgggtaggtc

SEQ ID NO: 358812 - DNA, 534 bp, Homo sapiens
aaagtcttttggaatggataagagtggaccagattaaggcacaaaataacagcttgagaaaagactggtgacccaggcttactgtacaaggaaggtgtaagttggatgaaagggtgggattctagtacaaaatgtggtaaagatggatgcaaccccctaaccyggtgacacaggcatactggatgtgctttggaaatagtaactgtgtgtgtgtgtgctcaagggagcaccatgtattgagtttaatgccatggaagtcaaaataccatcttcctttgaagcctgtggcctgcacagggccatgcaaaatcgtcactgctggatgagcaggagtccaggggactgcacagggttgtgtgtgttcaacagcaacaccatgtggcagcgagacccaacaaggagacagaagctgttggaatgcaggcctctttccctgtgacatttgaaagcatcaacacagtcttcgcacgggagtccaatctgccagagaagggcaaagcaaatcgggccttatattaaattcctggaagtcaa

SEQ ID NO: 358813 - DNA, 534 bp, Homo sapiens
aaagtcttttggaatggataagagtggaccagattaaggcacaaaataacagcttgagaaaagactggtgacccaggcttactgtacaaggaaggtgtaagttggatgaaagggtgggattctagtacaaaatgtggtaaagatggatgcaaccccctaacctggtgacacaggcatactggatgtgctttggaaatagtaactgtgtgtgtgtgtgctcaagggagcaccatgtattgagtttaatgccatggaagtcaaaataccatcttcctttgaagcctgtggcctgcacagggccatgcaaaatcgtcactgctggatgagcaggagtccaggggactgcacagggttgtgtgtgttcaacagcaacaccatgtrgcagcgagacccaacaaggagacagaagctgttggaatgcaggcctctttccctgtgacatttgaaagcatcaacacagtcttcgcacgggagtccaatctgccagagaagggcaaagcaaatcgggccttatattaaattcctggaagtcaa

SEQ ID NO: 358814 - DNA, 552 bp, Homo sapiens
tgctttgaaaatacaaatctggcatcatttcaatccagtgctcctggagcccatccggcttccctcactccctgctccctgtgccacatcagactcaatcaatcgggaaagaagccagaagagctggccctgccacccaactcaggaacccctgttgtgatgccacaagcttgccccagcctgtccccggggcctcctgggacccactccaaccctgacacctcatttcccaggactcagccagcctcacctctcctctcttcctttcagcrctgctgggctctttcccagccacatatttcagaagctggcaggaagtctcaaggcagtgactgcagatccatcagactgtcatttacagtgtagtaattaaccctgagcttcctacaaagttcccagattccagccttccccaacccagcaaggctcgtggccatctcccagcccaggaggttgagtcagagaacatgagggctcaaggtccttgtcttctggtccataaggcagaaacagacaccagtctagacttcattccatcctatgatgagattg

SEQ ID NO: 358815 - DNA, 552 bp, Homo sapiens
tgctttgaaaatacaaatctggcatcatttcaatccagtgctcctggagcccatccggcttccctcactccctgctccctgtgccacatcagactcaatcaatcgggaaagaagccagaagagctggccctgccacccaactcaggaacccctgttgtgatgccacaagcttgccccagcctgtccccggggcctcctgggacccactccaaccctgacacctcatttcccaggactcagccagcctcacctctcctctcttcctttcagcgctgctgggctctttcccagccacatatttcagaagctggcaggaagtctcaaggcagtgactgcagatccatcagactgtcatttacagtgtagtaattaaccctgagcttcctacaaagttcccagattccagccttccccaacccagcaaggctcgtggccrtctcccagcccaggaggttgagtcagagaacatgagggctcaaggtccttgtcttctggtccataaggcagaaacagacaccagtctagacttcattccatcctatgatgagattg

SEQ ID NO: 358816 - DNA, 552 bp, Homo sapiens
tgctttgaaaatacaaatctggcatcatttcaatccagtgctcctggagcccatccggcttccctcactccctgctccctgtgccacatcagactcaatcaatcgggaaagaagccagaagagctggccctgccacccaactcaggaacccctgttgtgatgccacaagcttgccccagcctgtccccggggcctcctgggacccactccaaccctgacacctcatttcccaggactcagccagcctcacctctcctctcttcctttcagcgctgctgggctctttcccagccacatatttcagaagctggcaggaagtctcaaggcagtgactgcagatccatcagactgtcatttacagtgtagtaattaaccctgagcttcctacaaagttcccagattccagccttccccaacccagcaaggctcgtggccatctcccagcccaggaggttgagtcagagaacatgagggctcaaggtccttgtcttctggtccataasgcagaaacagacaccagtctagacttcattccatcctatgatgagattg

SEQ ID NO: 358817 - DNA, 205 bp, Homo sapiens
agtctagacttcattccatcctatgatgagattgaacctcagttgtgtcatttsagggtgagctgggcacagctgtgatgccttaagagctggctctcaactctatccaagcataggttgtcaggaatgcagaatcttgggctccacaaatgaatcagctaataagccagctaatgaatcagagcctgcattttaacaagatcct

SEQ ID NO: 358818 - DNA, 535 bp, Homo sapiens
gaggtacctagaataggcaaatccgtaaaaacagaatgtagactagaggttaccaagggtgaggaaaaggggcaaggaggaacgggggatgggtattgtttaatgggcacagagattttgtcacagatgatgaaaaagttttgggtgtggatagcggtgatggtcgcaccacactgtgaatgtctttaatgccactgaatggtatatttatgaatagtagaaatgataaatattatgtgtatttcataataatttaaaaaataaaaatttttaagcgacagattgctgggacccacctgcacccaccaccatartttctgatttctgattcaatgggtctggactgacgtctgagaatctacatttctaacaaatgcccaagtgatgctggtacttctggtttgagggccgtattttgaatgtcaaaaatctggacactgtttcttaattaaaattgaaaaataaaaactgatgtccagaccctgtcccagggattctaatttgattgatccacattggtgtcctgggcagaggg

SEQ ID NO: 358819 - DNA, 535 bp, Homo sapiens
gaggtacctagaataggcaaatccgtaaaaacagaatgtagactagaggttaccaagggtgaggaaaaggggcaaggaggaacgggggatgggtattgtttaatgggcacagagattttgtcacagatgatgaaaaagttttgggtgtggatagcggtgatggtcgcaccacactgtgaatgtctttaatgccactgaatggtatatttatgaatagtagaaatgataaatattatgtgtatttcataataatttaaaaaataaaaatttttaagcgacagattgctgggacccacctgcacccaccaccataatttctgatttctgattcaatgggtctggactgacgtctgagaatctacatttctaacaaatgcccaagtgatgctggtacttctggtttgagggccrtattttgaatgtcaaaaatctggacactgtttcttaattaaaattgaaaaataaaaactgatgtccagaccctgtcccagggattctaatttgattgatccacattggtgtcctgggcagaggg

SEQ ID NO: 358820 - DNA, 582 bp, Homo sapiens
ccctttcccaccacccaaatgagcttgggaggggcaatgtcaaaaccacatgctctacccaactcaactaagggaacttctgacatgttaaaaataatacattatcaagatcagtgtttgccaaggattgggaggagggatggatgaatatgtgcaaattagtccatccacatgctgctataaggacatacccaagactgggtaatttgtaaaggaaagaggtttaattgactcacagttcaacattgctggggaggcctcaggaaactcacagtcatggcagaaggggaaaccaacatgtccttcttcacatagtggcagggagaagaatgagagctgagcaaagggggaaaccccttataaaaccatcagttctcatgagaactcactcactatcacaagaatagtatgggggaaaccrtccccattattcaattatctctatctggtccagcccttgacacatggggattattacaattcaaggtgagatttgggtggagacacagagccaaaccatatcaaggtggaacacagagaatttttagggcagtgaaactacttgtatgatactataatgat

SEQ ID NO: 358821 - DNA, 582 bp, Homo sapiens
ccctttcccaccacccaaatgagcttgggaggggcaatgtcaaaaccacatgctctacccaactcaactaagggaacttctgacatgttaaaaataatacattatcaagatcagtgtttgccaaggattgggaggagggatggatgaatatgtgcaaattagtccatccacatgctgctataaggacatacccaagactgggtaatttgtaaaggaaagaggtttaattgactcacagttcaacattgctggggaggcctcaggaaactcacagtcatggcagaaggggaaaccaacatgtccttcttcacatagtggcagggagaagaatgagagctgagcaaagggggaaaccccttataaaaccatcagttctcatgagaactcactcactatcacaagaatagtatgggggaaaccgtccccattattcaattatctcyatctggtccagcccttgacacatggggattattacaattcaaggtgagatttgggtggagacacagagccaaaccatatcaaggtggaacacagagaatttttagggcagtgaaactacttgtatgatactataatgat

SEQ ID NO: 358822 - DNA, 592 bp, Homo sapiens
accatgataaccagcaactcagtcatgatgtggggatggtcagtacttgattgtcactggaggcactggaggcaagagccttcaggttgtgctgctaccacatcaggagagacagactttccgttctgtggtatggttacttcagtaaaactgtgcagtgtgataatatttctgaactcccaagctttatgttttttaccctccttgtatctcttcttaactctttccaccactgaggtggccagacctttctgggtcttttgccccaggggtgtggacagggtttaaagccagataaagaggaamtccctggattttagcctcccaaagctgaagcccatagtgaaagcctgctagtgaacaaagcgttttggaggaagataagaaagagtaaggcttatcctacctagtctagagaatatgtggttgggctcagggaaggaaggagagatgaagggaaatccagattgtctagggatcctgctcctgtgcccttcttcctgctgaggaagcagtatgttagccagttctcgcattgctataaagaaataacctgagactgggtgatgtataaagaaaagaggtttaattg

SEQ ID NO: 358823 - DNA, 432 bp, Homo sapiens
cgtgtccattgcaaaggtgattttaggaagtttcagaactgaccacctgcctacaactcttcagggtgacagtttggactcatttctatcttccttcttctcaatcaaatgtatctacactagaaagtacaccaactgctagctcatcccagggatcagagaactccgggttgtagcttgatcttagatgaccatctaagtgaaatatttatgtgctgagttttgctcttccacttaactggaaagatttccatttcatgcgycaccaccccacatgccaacctctaccatttcctcctctctgactctttagccataactgccatattctttccaaacaatatatgaacttttcattcaaaaatcatgttccaggtgactggctcactggaaatcattcagaggttgccaatgactcacccaataaatctg

SEQ ID NO: 358824 - DNA, 582 bp, Homo sapiens
ttctttccaaacaatatatgaacttttcattcaaaaatcatgttccaggtgactggctcactggaaatcattcagaggttgccaatgactcacccaataaatctgaggcccagaaattgacttggaatcagtggcgcctgacagctgctcagaggctgctggggaaaagaagcaggatctacattggtttataatagctagatgctcctggctcatcgtataaagttggtggagtgaaaagcaatcaatccctggctgcagtttgaccccagcagatcaaagttaaatttagctgtaagcagagggaaggacatttcaccatgggaatagaacccagccaatcattgtgcatgttttaatctagcacattctacatgtccatcactgtgctaaaagacacygagaaagattcactctaagacccctgtgatatagtttgaatgtttgtccccttccagtctcatgttgaaatgtgatccccaatgttggaggtgaagtcttacaggaggtatttgcgtcatgggggtggatcacccatgaatggcttggtgacttccccatggtaatgagttcatgcaagag

SEQ ID NO: 358825 - DNA, 582 bp, Homo sapiens
ttctttccaaacaatatatgaacttttcattcaaaaatcatgttccaggtgactggctcactggaaatcattcagaggttgccaatgactcacccaataaatctgaggcccagaaattgacttggaatcagtggcgcctgacagctgctcagaggctgctggggaaaagaagcaggatctacattggtttataatagctagatgctcctggctcatcgtataaagttggtggagtgaaaagcaatcaatccctggctgcagtttgaccccagcagatcaaagttaaatttagctgtaagcagagggaaggacatttcaccatgggaatagaacccagccaatcattgtgcatgttttaatctagcacattctacatgtccatcactgtgctaaaagacaccgagaaagattcactctaagacccctgtgatatartttgaatgtttgtccccttccagtctcatgttgaaatgtgatccccaatgttggaggtgaagtcttacaggaggtatttgcgtcatgggggtggatcacccatgaatggcttggtgacttccccatggtaatgagttcatgcaagag

SEQ ID NO: 358826 - DNA, 582 bp, Homo sapiens
ttctttccaaacaatatatgaacttttcattcaaaaatcatgttccaggtgactggctcactggaaatcattcagaggttgccaatgactcacccaataaatctgaggcccagaaattgacttggaatcagtggcgcctgacagctgctcagaggctgctggggaaaagaagcaggatctacattggtttataatagctagatgctcctggctcatcgtataaagttggtggagtgaaaagcaatcaatccctggctgcagtttgaccccagcagatcaaagttaaatttagctgtaagcagagggaaggacatttcaccatgggaatagaacccagccaatcattgtgcatgttttaatctagcacattctacatgtccatcactgtgctaaaagacaccgagaaagattcactctaagacccctgtgatatagtttgaatgtttgtccccttccagtctcatgttgaaatgtgatccccaatgttggaggtgaagtcttacaggaggtatttgcgtcatgggggtggatcacycatgaatggcttggtgacttccccatggtaatgagttcatgcaagag

SEQ ID NO: 358827 - DNA, 613 bp, Homo sapiens
caccagttatcgacttcattatcactggttttttagattatcagttgaaaaagttttatgtaaaatgatttgtaaatcatattttccgttgtcatttcagagatatggtccaacaggggaaaaaaattgacatatgtagtaaaaatcacagacaaaacctacatctttaagagaatattctctcttcgactgagtatgatttatgtgtatgtgattmtcccactggacatcttcaagaaaagttagccaaataggcaatcaattagaaagggcactccatgttaaaagtatatttattatttataaaccatctttcttgatcgattgccttccatttattggtttttctcaatgatgcaatgtaaactgatgacttaagcattcatactcataaccatgtgtccagatattcaatggaaactgcctgtaagccagctaggcttcagctactgggaacagatcctctctaccctcccctcctccatggtatgggtcattggtcctgccttgccctacataactccactccttaatgactccccaggttatgaagcagcctttttcaggactgacgctgtcccgcttctcagccctaggagaagctcctagaact

SEQ ID NO: 358828 - DNA, 613 bp, Homo sapiens
caccagttatcgacttcattatcactggttttttagattatcagttgaaaaagttttatgtaaaatgatttgtaaatcatattttccgttgtcatttcagagatatggtccaacaggggaaaaaaattgacatatgtagtaaaaatcacagacaaaacctacatctttaagagaatattctctcttcgactgagtatgatttatgtgtatgtgattatcccactggacatcttcaagaaaagttagccaaataggcaatcaattagaaagggcactccatgttaaaagtatatttattatttataaaccatctttcttgatcgattgccttccatttattggtttttctcaatgatgcaatgtaaaytgatgacttaagcattcatactcataaccatgtgtccagatattcaatggaaactgcctgtaagccagctaggcttcagctactgggaacagatcctctctaccctcccctcctccatggtatgggtcattggtcctgccttgccctacataactccactccttaatgactccccaggttatgaagcagcctttttcaggactgacgctgtcccgcttctcagccctaggagaagctcctagaact

SEQ ID NO: 358829 - DNA, 544 bp, Homo sapiens
ggcaacaaaagtaaaacttaaaaaaaaatggtgctataacaaattaaaaagcttctgcagagcaaaggaaacaatagaatyaagagacaaccctacagattgggagaaaatatttacaaatcatacatcagataagaggctaatatacaaaatatgcaaggaactcaaaatactcaataacaagaaaacataaccctatttaaaaatgggcaaagggcggccaggtgtggtggctcacgcctgtaatcccagcactttgggaggctgaggcaggcggatcacaaggtcaggagattgagaccatcctggctaacatggtgaaaccccatctctactaaaaatacaaaaaattagccaggcgtggtggcaggcacatggtagcaggcacctgtagtcccagctactcgggaggctgaggcagaagaatggcatgaacctgagatgcagagcttgcagtgagccgagatcatgccactgcactccagcctgggcaacagagcgagactccgtctcaaaaaaaaaaaagggcaaagggcttgagtag

SEQ ID NO: 358830 - DNA, 544 bp, Homo sapiens
ggcaacaaaagtaaaacttaaaaaaaaatggtgctataacaaattaaaaagcttctgcagagcaaaggaaacaatagaatcaagagacaaccctacagattgggagaaaatatttacaaatcatacatcagataagaggctaatatacaaaatatgcaaggaactcaaaatactcaataacaagaaaacataamcctatttaaaaatgggcaaagggcggccaggtgtggtggctcacgcctgtaatcccagcactttgggaggctgaggcaggcggatcacaaggtcaggagattgagaccatcctggctaacatggtgaaaccccatctctactaaaaatacaaaaaattagccaggcgtggtggcaggcacatggtagcaggcacctgtagtcccagctactcgggaggctgaggcagaagaatggcatgaacctgagatgcagagcttgcagtgagccgagatcatgccactgcactccagcctgggcaacagagcgagactccgtctcaaaaaaaaaaaagggcaaagggcttgagtag

SEQ ID NO: 358831 - DNA, 544 bp, Homo sapiens
ggcaacaaaagtaaaacttaaaaaaaaatggtgctataacaaattaaaaagcttctgcagagcaaaggaaacaatagaatcaagagacaaccctacagattgggagaaaatatttacaaatcatacatcagataagaggctaatatacaaaatatgcaaggaactcaaaatactcaataacaagaaaacataaccctatttaaaaatgggcaaagggcggccaggtgtggtggctcacgcctgtaatcccagcactttgggaggctgaggcaggcggatcacaaggtcaggagattgagaccatcctggctaacatggtgaaaccccatctctactaaaaatacaaaaaattagccaggcgtggtggcaggcrcatggtagcaggcacctgtagtcccagctactcgggaggctgaggcagaagaatggcatgaacctgagatgcagagcttgcagtgagccgagatcatgccactgcactccagcctgggcaacagagcgagactccgtctcaaaaaaaaaaaagggcaaagggcttgagtag

SEQ ID NO: 358832 - DNA, 563 bp, Homo sapiens
catgaaagtctatgggtaatgccatataagtcaggaggctcaggcttaaattaaagagggattttcttccctttccaatttgatagaaggaatccacgtcaggtgccaggtcttcacagtcctrttaatgggggcagtcatgaggcgcctccttcatcagggaattgagtagtcaaggaggctcacttgggctaaagagtcagcaatttcatttcaaagagcctcagaaacagatgcacctgcctgataattgtggccatatggctgcatcctcatttatggacagaagcaagaccaaaaggttgggtgtaaattacatctgttttcagaatcgtatttttcaatataataggacacttgactgcttaaaggggagccagagacttagttgacacaatctcattctaaacctgcaatagcccttggaagcatgtactctaattaatgatgagaaatggtgcccagaaaggttcaataaactgcccatatcagacaaccagcaggccttgaagccgagattctcggcatctctcaactctggcacccttgacatttggggctcc

SEQ ID NO: 358833 - DNA, 609 bp, Homo sapiens
atgcagggagaattggcagggaggggtagaaggaggatgagacaggcattcctgcagttgagggargacagactggagagggacaaggttggaggcacgaaccccagcttaacagatattattgcaattcaggagcgacaaggtagaaacggcggcaggtggcgaagcttcaccggggaaggtggtgtgggcagaggtgagacagtctcttggagactcaggtggtggaatttccaggactcggtgcccgcaggctaaggagttgcagagggagaaaggaaggagggcccccagccagcagagcaggcatttggttagctgactaaccaaggttacaggggagcgtgggacaggggaaaggccacagtacagaccgaatagcacagatgaggtgctggccctgccttggctacacagacttgcagagtgttctagaatctagcaatgacttattccacttcctgggatgcaactttctcaactgcaaagaaacacatggggactgtgcaccatcagggcccttgcaagctgtaaaatattacaaagtcctctctagatcagaatctggggtggcagctgtccacctgaaaactcaccctaacaagattg

SEQ ID NO: 358834 - DNA, 609 bp, Homo sapiens
atgcagggagaattggcagggaggggtagaaggaggatgagacaggcattcctgcagttgagggaggacagactggagagggacaaggttggaggcacgaaccccagcttaacagatattattgcaattcaggagcgacaaggtagaaacggcggcaggtggcgaagcttcaccggggaaggtggtgtgggcagaggtgagacagtctcttggagactcaggtggtggaatttccaggactcggtgcccgcaggctaaggagttgcagagggagaaaggaaggagggcccccagccagcagagcaggcatttggtkagctgactaaccaaggttacaggggagcgtgggacaggggaaaggccacagtacagaccgaatagcacagatgaggtgctggccctgccttggctacacagacttgcagagtgttctagaatctagcaatgacttattccacttcctgggatgcaactttctcaactgcaaagaaacacatggggactgtgcaccatcagggcccttgcaagctgtaaaatattacaaagtcctctctagatcagaatctggggtggcagctgtccacctgaaaactcaccctaacaagattg

SEQ ID NO: 358835 - DNA, 495 bp, Homo sapiens
ataattgaaattttaaagggataatttatattttaagtctttaaggaaataaaagctcatataaaaataagtgactcaatatttttaggaatctagcatgttgatatgaaaaatatcacaatacacayacacacaggtgtgcatacacatatgtatctttcacatttaaattggaaataaaataaacttgagagtggtttaattaatgtataaacaaatgttaaaaatgccatttattaaaatggagtttacacagacacaaaataaataagtttatataattcagttacaaatgaaatagttattttttgtaccttttcttcctaatttaacatagcatcaaaatataactcctaattctaggttttctgagaactagacacttaatgatttatctctgagaataaccttggcattcaagagtatgaataatccatgaaaatgactgaaatggtaatgctattaaatttaaacagcaaaagaaatgtgatagta

SEQ ID NO: 358836 - DNA, 577 bp, Homo sapiens
ggagtttacacagacacaaaataaataagtttatataattcagttacaaatgaaatagttattttttgtaccttttcttcctaatttaacatagcatcaaaatataactcctaattctaggttttctgagaactagacacttaatgatttatctctgagaataaccttggcattcaagagtatgaataatccatgaaaatgactgaaatggtaatgctattaaatttaaacagcaaaagaaatgtgatagtacaaagctatgaagtacaatgytttcaattgtaataggatttatatgttaaaagatcaaagaaggttatcttgagggtctcgatttttacctattgccaaaaaatttacaaaaaggttggcataaaaatagtttatgttcctatatattattttagtattatttctaataaattttaattgtatagtttggaaatagttttaccaaggattgcttttggtacaaatttggttttaaattcataaggcaaataaatgagctgaatacataattatttagcatatcattaaacctatggtattaatccaataatttaaaaaattctca

SEQ ID NO: 358837 - DNA, 603 bp, Homo sapiens
tttcaccattgagtatgatatttgctgtggcttttttatatgtgggttttattatgcagaggctgtctccttatattcctagtgggttgagtgtttttatcatgaaagggtggcaaatcarttgaaggttttatgtattccttctattaatgtggtgtattgcaatgatcgatttttataagttgaaccatccctgtattacaggaatacattttagttggccatggtgtataattctagttggctggtattttgttggggatttttgtgtggatgtctataagatattggtctctagttttcttctaatgtaccttctttatccagctttgggatcaaggtactgatgacttcatagaatgagttagggagtgttacctcctcttcaaatttttggaaaagtagagaaagattggtgttagttcttgtttaaatatttgaattcatcagcaaagccatcagatccagggcttttgtttgtcaggagattttggattaccgattcattcttcttgaattgaaagtctattctgactttctagctctatgtaatttagtcttggtagattgtgtatttctagaaatgttttaattttatctaga

SEQ ID NO: 358838 - DNA, 603 bp, Homo sapiens
tttcaccattgagtatgatatttgctgtggcttttttatatgtgggttttattatgcagaggctgtctccttatattcctagtgggttgagtgtttttatcatgaaagggtggcaaatcagttgaaggttttatgtattccttctattaatgtggtgtattgcaatgatcgatttttataagttgaaccatccctgtattacaggaatacattttagttggccatggtgtataattctagttggctggtattttgttgrggatttttgtgtggatgtctataagatattggtctctagttttcttctaatgtaccttctttatccagctttgggatcaaggtactgatgacttcatagaatgagttagggagtgttacctcctcttcaaatttttggaaaagtagagaaagattggtgttagttcttgtttaaatatttgaattcatcagcaaagccatcagatccagggcttttgtttgtcaggagattttggattaccgattcattcttcttgaattgaaagtctattctgactttctagctctatgtaatttagtcttggtagattgtgtatttctagaaatgttttaattttatctaga

SEQ ID NO: 358839 - DNA, 598 bp, Homo sapiens
ttcttttggcattgttaattcttttactaaaactgtctaatgagataataatttcacctacaatttrtggacagaccattatttgttattctatttttgtatgctttaggtgaaagactggaagttgatattacttttcatgaagaaataaaatgttctgagttagagatatacatttccaacagtaaaaccagccttgttttaagagttaaaaatcatgtaagaatgaaaaagaaaaagcagtcctgcagttcagtcgtttgggaagaacagattgagataaagccagctgcaactttaccagaaaacatcatttctttcaatgtcattcagtggccataaaatgccatcaccatcccctctgagtagcactgctttttcatcagtggtgatccagatgtctcttaacaacaccctatatttatttaatctccacttctaatctgcctcagaaacaacaacctatgtacaatttatctccacttttctcatatccaggtcaaaattcttcagcaggaatctgaaccttatgaaagacacttatctcttaccactttccacagttcctcttgtgagctctactgctaccttgagccaa

SEQ ID NO: 358840 - DNA, 326 bp, Homo sapiens
tatgctaacctattctggtgtatgctgactttattataaacatggatggtaacaatattgtaagcaaattattatttctcttataaacaatacattttgtcataaattcccaggatccaaagcaaccactcatccagtggattagtgagatttggggatctgacagattggttatttgagttttcatatygattcatctgggatattatttgattatattatattatttgattcatgttatattatttgattcatttgggatataaacacaatatttagttttttgatggtgcagttcctcccttgggctgcagcaagtatgtcta

SEQ ID NO: 358841 - DNA, 558 bp, Homo sapiens
agaaaggtataactccccctttttcctgtcaagtagattaatgttacatttatatcatttcatttttcatgctgagaactgggattacacttcccaaaagatagctctctatgcatcttttgtaattcagaacaaattaagattttgaaaaaaagtcaaaggtatygaagccattgttttcttttcagaaaatgaaactagataggacaagaaaaaatgggagttcacagaaataatatttgtatgtataaagttcttaagtaagaaaaatccaaatgggatataattctcaggagttttaagcatgaaatataatctttaggctgactataattgccaaagtataaaacaaaaacaattatataatatgaataagagtgacagaatctctttgttattgaaatttatataatttaaaaattaaaaagaaatctatatgattttgaattcattcattaaagacaaaatcatgagaataacacaatttgtaatagacaaaagtttcatagtctcctaatttcattgcaaaattgatgaattgtcttttggataattatt

SEQ ID NO: 358842 - DNA, 532 bp, Homo sapiens
cagataataaatttgctttgaagcctttaagtttgtagcaattattagagcaacaatagaaaaccaaagcagtaagagaaaaggcagatgaattaatttgtcacatcttacctctagaatagcatggatgcaactgattcttatataacagagtgtcacttcttatttgtgctgaacacycattttgttgtttctcttccagtttcaatttctggtttagtagcatatgaaacaactgtgtcacaggggtttgaaccagagcaactccatcttgaataggggatgggtaaaataaggctgagacctactggactgcatttccagatggtgaaggcattctaattcacaggatgagacaggaatttggcacaaaatacaggccataaggaccttgctaacaaaaaaagttgaagtacagaagccagctaaaaaccaccaaaatcaagatggggatgaaagtgccctctggttgtccttactgctacattcccaccagcgttataacagtttacaaatgccatgacaacatcac

SEQ ID NO: 358843 - DNA, 607 bp, Homo sapiens
tacttggggggttgaggcagaaggatcacttgaacctggaaggacgaggctgcagtgagccgagatcgcgccactgcacttcacctgagtgtcaaagtgagatyctgtctcaaaaaaataaaaataaaaataaaaataaataaatatatatatatatatatatatatatatatatatatatatatatatatttgcatcttaggatagttttagattcacagaaaatgttataaatatagaaaagataggtcccatatgccgtacccagtatctccatttattaaaatcttacattattatggtgcatttgtaacaactaagaaaccaacgttggtatattaatctccaaactttattcacatttcactagcttcatcaccactgttcattttttgttcaggatcctgttctaaatgccatgctacatttaaccatcatgcctcctcagtctcctctgctctgtgacagcttttcaggctttccttgcttttcatgatcttggcagttttctttaagagtattggtcagacattttgtagaatattcatcaatttgggtttgtttgatgattttctcatgagctaataggttttagcgaaagtgacca

SEQ ID NO: 358844 - DNA, 554 bp, Homo sapiens
agtaataagaaattatatgaaggtaaaaacctcactggtaacagtaagtacactgacgaatatagaatattataacactgtaattgtgatgtgtaaattacttatatcttgagtgggaagactaaaaggcaaacctatcaaaaaaaataactacaacaactttttaagacatagatggtgtaataatatatgaatagaaacaacaaaaagtcaaaaaataggaagaygatgttaaagtttagagtttttattagttttcttttttcttgttagctaatttgtataatcagagttaagttgtatgtttaaaataacaagttttgtcatttgcaagcctcaggctaacctcaaatcataaaacctacgatagatacacacacacacacacacacacacacacacacacaaaatgaagcaagaaattaaaacataccacctgagaaaatcactttcacagaaaggaagacagggaacaaggaagaaacacaagaccacaaaacaaccagaaaacaaataacaaaatggtagaagttaagttcttacttatcaataat

SEQ ID NO: 358845 - DNA, 547 bp, Homo sapiens
gcctctttttaccactgttattccaaatagtactcaaagtcctagctagagcaatcagacaagagaaagaaatgaaacacatccaaattagaaaggaagaagtcaaatwatccttttttccagaaaacataattctatgtttagataaacctaaagatactgaagcactactagaactgataaactcatgcagtaaagtttcagaatacacaatcggcatgcaaaaataaatagcatttctatatgctaacagcaaataatctgaaaaagaaatcaaaaatgtaatcccaggctgagtgcggtggctcatgctgtaatcccagcagtttgggaggcgaaggttggtggatcacttcaggccaggagtttgagaccagcttgggtaagatagtgaggcctttttctacaaaaaattttaaaaatttgccaggtatggtggcacatgcctgtggtcctagctactttggagactgaggtaggaggattactagagcccaggatactgagggttcagtgagccatgactgcaccactgcacccaagcctc

SEQ ID NO: 358846 - DNA, 575 bp, Homo sapiens
tattgtgattatatatatagaaggaaatcaatttgtgtgtgtatgtatataaatatatacataatgaaacaattatccccttaggcctaatctttttcagatccaatatataaagcaggcacaggaaatttttgtaaaaatttgatccttgaaatctatcattgacaattttttttaaaatgcctttcaaatatgaattaacccaagtccattctgttcargtgttatggtctggatgtatcccccaaatttcatgtgttgaaacgtaatggctaatgtgatcatattaataacttgggcctctaggagataaataagtcatgaggatggagccctaagagatgggattagaacccttataaaaggattggaggaagtaggttcactctcttctgtctgttctatcatctcattacatcagaggaatgatattagagaaagctataaatttttcagtttgtatacgttgttgaagtactaatgccattgctcactgtctttctactataacagatgaaaagagatttcgttctcttaaagcaactattcaattaaaaatgagacacagtctggag

SEQ ID NO: 358847 - DNA, 550 bp, Homo sapiens
tacatcattctgagatgaatatcagagtgtttatgctgtagtttcgtgcatatcacagaatcttttgcattactgtggtcttgcaaatattccagasccagaaaaatgatgctctgcatcatgttcagagtcctggaaatatctatcactctgctaatttaattaaatgccatttggttttaataatctgcaaacccagttaatatgtgaacctaggccttgctgggatacttgacaaaattattttcctaaaactgcaagtctgaggaagagaatctcaaccatggtaatatcacaaaatcagagacatctgctaaagttgaactacctttcatttcttcatttgttcatttaacaaacatttgtttgctaaatgttctgccaggcattctcctaggcaccaaattttaggggcaagtaaagacagcctaaatgccttcagttagtggcttatgccttatagtggtagaagacatgaggaacacaatctgaacaattaatcaacaggaaaaacaaaagctagttcaagggtattccaacttcggtgcac

SEQ ID NO: 358848 - DNA, 552 bp, Homo sapiens
tttaaactgtcttgaagtttagctttgttgtattgcttcattaggagcaataatgaggcttgaataatgtcacttgctaatggagtaaaaatatgaaacaacaacagcatgtccttctaccccctccttattcttagggcaataaacactgttttaaagttttaacacacaggaggatatcatatatacactaggtcaggtttctgatgtggtttttccattgttgctaatgacagcttgctgttcaaactgctttttatcctgtcagtattatcccataataaaaattgcctaagttttagcagttaaaaatgtgtggtctaggttataggacatyaaatatacagttagaaatgctgaaaacatttgtgacctcagtatctgatttctagcttttctcttgaacaacatttggtcaggaaactgagactatgccttacattcgtacaacctcttgtctttttagttttctttccaaaaaatatcaatcaggtttcaagagtgctttctagtttttgaaagaaattaaaaagtcatatctaaaaataattc

SEQ ID NO: 358849 - DNA, 581 bp, Homo sapiens
ataggtgcatttacaaaccttgagctagacacagggtgcggattggtgcatttacaaaccttgagctagacacagagtgctgattggtgtgttcacaatcccttagctagacataaagattctccaagtccccaccagattagctagatacagagtgatgattggtgcatccacaaaccctgagctagacacagggtgctgatttgtgtgtttacaaaccttgagctagatacagagtgctgattggtgtatttacaatcccttagctagacataaaggttcatccaagttcccactagactcaagagcccagctggcttcacccagtggatcccgcacctgtccgcaggtggagctgtctgccagtcccacgccttgcgcccgcactcctcagcccttgggcggtcgatgggaccgggtaccatggagcagggggtgcttctcgtccaggaggctccggccgtgcmggagcccactgcaggggtgtggcaggaggctcaggcatggcaggctgcaggtcctgagccctgccccatggggaggcagctaaggtccggcgagaaatcaagtgcagcgccagt

SEQ ID NO: 358850 - DNA, 581 bp, Homo sapiens
ataggtgcatttacaaaccttgagctagacacagggtgcggattggtgcatttacaaaccttgagctagacacagagtgctgattggtgtgttcacaatcccttagctagacataaagattctccaagtccccaccagattagctagatacagagtgatgattggtgcatccacaaaccctgagctagacacagggtgctgatttgtgtgtttacaaaccttgagctagatacagagtgctgattggtgtatttacaatcccttagctagacataaaggttcatccaagttcccactagactcaagagcccagctggcttcacccagtggatcccgcacctgtccgcaggtggagctgtctgccagtcccacgccttgcgcccgcactcctcagcccttgggcggtcgatgggaccgggtaccatggagcagggggtgcttctcgtccaggaggctccggccgtgccggagcccactgcaggggtgtggcaggaggctcaggcatggcaggctgcaggtcytgagccctgccccatggggaggcagctaaggtccggcgagaaatcaagtgcagcgccagt

SEQ ID NO: 358851 - DNA, 608 bp, Homo sapiens
atgacatctgtcaccatgtgtcttccctccaccttaattcctcaatttaataagttaatacaaggaagtttctaaaacacaagcctagattatggccatcatgtagattatgtttaaaatataaaacaaaagttaaagcagatacaggataatttaagttttattcrtaaccttcaattgcaactttccattatttcattttttacgtaatatctgaccaaaccacattttacataaataaaataatattttaactgagatacaagtcttgaaaataagaaaatccttttcacattacttttataaggtgtcacgtatcagtttaactttttttaatagtatctcaaaattagaacatcagcagttgagatacattcaccaaatatttttatttttgcgtgatttttatgatcacttgttacttcaattgtaggcatcctgaagattaactttttaacttttgtgagattatcagatataatctatattcgagtaatttactttatattgcttttaatgtatatttttatgatgatacaatacaatcaattttgtcttatcttcaactgcaaatatacacattaaatacatttagctgaaattcacat

SEQ ID NO: 358852 - DNA, 583 bp, Homo sapiens
tcgtaatccacacacctcggcctcccagagtgctgggattacaggcgtgagccaccgtgcctggcccatttctttatttgtctcatctaattgtatgcagggttactaaaataatactttcaacacaaaagagccaatgtaatactaaactcatcagagagaaaaaaaaaaagtcaaccttccaggtaacacctctacatagtgcaaattcccacgtaaccatctagtttgcttaacattgaattggttaatttctaaaatgtactatttctaataagcagctgtatactggcaatcattttatcctcatatctttgttatgaaatcccattwatttatttatcaaatcaaaatctctatactgaatattgacaacattccaaaaatgatgcagtgctctttggatgtaaaaagcataggtggccttctcttgatggaattcaatgtctatcagaggaaagagatcataaaactaaatattataaaatgtgataagtgctattcttgtcttgtgaccacagtaatctcaagtacagaacaggaaacatttgaatctacaatggagggcaaaggaatagtacaa

SEQ ID NO: 358853 - DNA, 585 bp, Homo sapiens
aattgacaaagaaatttggttatctccttggtttacaataacttaacataacaaccttaattatgattgatagcatatacttagattttagaattttagaaatcccatacaatttaagaacatatattaccactattcaccaaaatataacctaaagattgaacatcattttggcaatcccatgtacctaaatatgttaaatgaccctatttacctctcttttttggatactttaagagtcctscgaagtatccaaaaagccaggtgtcaggaaaggcaattttgaaacttaagtttgattttgggaaggctgttaaatatgtaagttttaaaaacttgatgtgatgaaatggaatttcagattaccataagatatttattttgccaaaattgagagacagtactagctgaatttcctaggccaattaagagttcctaagcctagctggggaaggtgactgcactcacctttaaacaaggggcttgtaactcagctcacaccgaccaatcaggtagtaaagagagctcactaaaacaccaattaggctaaaagcaggaggtaaagaaatagccagtcatctatcc

SEQ ID NO: 358854 - DNA, 569 bp, Homo sapiens
aaattcttaaaaaacagtttattcaggcagtttattcttctgggcaatcgttaccttatggggcaataaactgtacactaaaaaaagaaaaaggaaaaaaattgtacattctcrtgctgctaaaaaggactgctcgaaactgggtaatttataaaggagagaggtttaactgactcacagttccacatggttaggaaggcctcaggaaatttacaatcatggaggaaggggaagcaaacacattcttcttcacatggcagcagcaaagagaaatgctgagaaaaaggggaaaaatccacttataataccatcagatctcatgagaactcactcattatctcaagaacaggaatgtggggaaaactgcctccgtgattaaagtgcctcccaccaagtagctcccacaacacgtagggattatggcagctacaattcaagattagatttgggtggggacacagccaaaccatatcaatcatacacttgtcaaaaaatagattgctcactaaaccattttcttattgtgctcaccaataatgaacttatacaaaagtattattttgaaatac

SEQ ID NO: 358855 - DNA, 569 bp, Homo sapiens
aaattcttaaaaaacagtttattcaggcagtttattcttctgggcaatcgttaccttatggggcaataaactgtacactaaaaaaagaaaaaggaaaaaaattgtacattctcgtgctgctaaaaaggactgctcraaactgggtaatttataaaggagagaggtttaactgactcacagttccacatggttaggaaggcctcaggaaatttacaatcatggaggaaggggaagcaaacacattcttcttcacatggcagcagcaaagagaaatgctgagaaaaaggggaaaaatccacttataataccatcagatctcatgagaactcactcattatctcaagaacaggaatgtggggaaaactgcctccgtgattaaagtgcctcccaccaagtagctcccacaacacgtagggattatggcagctacaattcaagattagatttgggtggggacacagccaaaccatatcaatcatacacttgtcaaaaaatagattgctcactaaaccattttcttattgtgctcaccaataatgaacttatacaaaagtattattttgaaatac

SEQ ID NO: 358856 - DNA, 321 bp, Homo sapiens
ttaaatctacctctcttttagatacccaaacaataaattggacataatggcttttatatttccatcactctgcttctactcttccatctgactaaccctgctgaccacccagaaattcccaattcccaatgcttaatgacctgctaaagttaaaccataattaaaatagaacaagstctttaaaacattttttttgttttgatggagtcttgctctgtcaccaggctggagtacgtcggcacaatctcagctcactgcaacctccgcctcccgggttcaagccattatcctgcctcagcctcccaagtagctgggattaca

SEQ ID NO: 358857 - DNA, 321 bp, Homo sapiens
ttaaatctacctctcttttagatacccaaacaataaattggacataatggcttttatatttccatcactctgcttctactcttccatctgactaaccctgctgaccacccagaaattcccaattcccaatgcttaatgacctgctaaagttaaaccataattaaaatagaacaaggtctttaaaacattttttttgttttgatggagtcttgctctgtcaccaggctggagtacgtcggcacaatctcrgctcactgcaacctccgcctcccgggttcaagccattatcctgcctcagcctcccaagtagctgggattaca

SEQ ID NO: 358858 - DNA, 654 bp, Homo sapiens
atttctctttaaagactcgttagtctctatactgttgtcagaaagatccaaatactcattctgagacaaagcatggaaaaatgtccttcatgacttttctaaagtcaagatcattatagatgtgaagaaggcaggcttaatgtacttcttgaggagaaaaagaaatcctctgctctcttatgattttcagctgggtataaaaattaaactgacataagaccaattaataagagaaatgcttctgttttattaaatgtttatacatatatgggaccttgaatactcaaagaagtcactagatcagaaagctagttaacctcttagacaaagaaatgttaaatttgtgatcaaatacaagacaaaggtgctggggcaataagtttttttcactcctagaagtgactaggagacaaataatgggggtggagggtaaaattagttgaaggtaagagttattttggtaagtttgtttgtacagattcatttcagtgttgatacccagtctctggtgataaggatgttctcattckggtatggggagaatacctttctcatgagatattttatggcctcttcttaggtagaaaagaatagattagagagccttccctgcatctgatgtttcccaaatgctttcagctcaaaatgactaac

SEQ ID NO: 358859 - DNA, 541 bp, Homo sapiens
ggctcacgcctgtaatgacagcactatggggggctgacgcaggcgattcattagttcaggaattctagaccagcctgggcaacatagtgaaaccctgtctctattaaaaatacaaaaattagccaggcatagtggtacatgcctgtagtctcagctactggggaggcctaggcaagaaccagaacccaattctgggttcaagaattgcttgaaccyggaaggggaggttgcactgaactgagattgtgccactgcactccagcctggacaacagagcaagactccgtatcaaacaaaacaaaacaaaacaaaacaaaacaaaacaaaacaaaacaaaacaaaacagtaacagtttgtgattaatatatcatttaagtgataaagagcatatatttgaaaatttacttcagaaaacaaactttcttcttctaccttctgcgtgtttttttcatatctgttccttagggtactaatttgggtttctgcagtatcttgtatattttgcagactctcatgcaatgtaatatttagaaaaataatt

SEQ ID NO: 358860 - DNA, 541 bp, Homo sapiens
ggctcacgcctgtaatgacagcactatggggggctgacgcaggcgattcattagttcaggaattctagaccagcctgggcaacatagtgaaaccctgtctctattaaaaatacaaaaattagccaggcatagtggtacatgcctgtagtctcagctactggggaggcctaggcaagaaccagaacccaattctgggttcaagaattgcttgaacctggaaggggaggttgcactgaactgagattgtgccactgcactccagcctggacaacagagcaagactccgtatcaaacaaaacaaaacaaaacaaaacaaaacaaaacaaaacaaaacaaaacaaaacagtaacagtttgtgattaatatatcatttaagtgataaagagcatatatttgaaaatttacttcagaaaacaaactttcttcttctaccttctgcgtktttttttcatatctgttccttagggtactaatttgggtttctgcagtatcttgtatattttgcagactctcatgcaatgtaatatttagaaaaataatt

SEQ ID NO: 358861 - DNA, 613 bp, Homo sapiens
gtttttatataacaaatacaaaagcactatatattttaaaaagagagataaaagtgtctacactaaacttaagaggacttctagtaaaaaaaaaatcattaaaaatgaaagcaaaccctgaacttgggaaagacatataaaacttattttkctaagaaagattaatatataatggatcatattctttctttttttgtagattttatttagttttcatttcttattcttttttgtccttattaaatggatattatctcttaaattataatatggggcattttcacaagcctttttttaaaccacctggtattaaatatatgcttatttttaaataggaacatatttttcacactgttctatcaatttaattcagaaaaaaacacacattttatttaaaaacttttctgtttggttttgttttctcattttatatgacacatatacagacagcacatatgtgtatgtatatgtttggatcccagagtaggcaaatgagaataaacttaccaggccataacaattaaactatttacatttttgataattaaaaaataataaagccaaaagaagagtatgtagtgaccaaaaaaaagaaaactaatttatggaaaat

SEQ ID NO: 358862 - DNA, 613 bp, Homo sapiens
gtttttatataacaaatacaaaagcactatatattttaaaaagagagataaaagtgtctacactaaacttaagaggacttctagtaaaaaaaaaatcattaaaaatgaaagcaaaccctgaacttgggaaagacatataaaacttatttttctaagaaagattaatatataatggatcatattctttctttttttgtagattttatttagttttcattycttattcttttttgtccttattaaatggatattatctcttaaattataatatggggcattttcacaagcctttttttaaaccacctggtattaaatatatgcttatttttaaataggaacatatttttcacactgttctatcaatttaattcagaaaaaaacacacattttatttaaaaacttttctgtttggttttgttttctcattttatatgacacatatacagacagcacatatgtgtatgtatatgtttggatcccagagtaggcaaatgagaataaacttaccaggccataacaattaaactatttacatttttgataattaaaaaataataaagccaaaagaagagtatgtagtgaccaaaaaaaagaaaactaatttatggaaaat

SEQ ID NO: 358863 - DNA, 606 bp, Homo sapiens
cttctctatgaattaatttttycagcagttgaattaagttattaaagataatactacagttaagatcattacatgttatttaacttttgtcagcatttcaaatttattagacatttacaaattaactatcaagggaaatataataaaataagagagagatctaataatatgtatttgagattgatatttaaaacagaattacattttaaccacattatgtattgttattgattttattattgttattttttgagatggagtctcgctctgtcacccaggctggagtgcagtggcccagtctcagctcactgcaacttctgccccctgggttcaagaaattctctgcctcagcctcttgagtagctgggattacaggtgcctgccaccatgcctggctaattttttattttattttatttttagtagagatgaggtttcaccatgttggccaagctggtcttgaactcctgaccttgtgatccacccgcctcggccttccaaagtgttggttttacagacgtgacattattattattattattaacaaggagctataggccaagaatgttctaacaatatagaggaaaacttttaagtgagctgtta

SEQ ID NO: 358864 - DNA, 606 bp, Homo sapiens
cttctctatgaattaattttttcagcagttgaattaagttattaaagataatactacagttaagatcattacatgttatttaacttttgtcagcatttcaaatttattagacatttacaaattaactatcaagggaaatataataaaataagagagagatctaataatatgtatttgagattgatatttaaaacagaattacattttaaccacattatgtattgttattgattttattattgttattttttgagatggagtctcgctctgtcacccaggctggagtgcagtggcccagtctcagctcactgcaacttctgccccctgggttcaagaaattctctgcctcagcctcttgagtagctgggattacaggtgcctgccaccatgcctggctaattttttattttattttatttttagtagagatgaggtttcaccatgttggccaagctggtcttgaactcctgaccttgtgatccacccgcctcggscttccaaagtgttggttttacagacgtgacattattattattattattaacaaggagctataggccaagaatgttctaacaatatagaggaaaacttttaagtgagctgtta

SEQ ID NO: 358865 - DNA, 538 bp, Homo sapiens
tgtacactgccacttcaataaaagttgctaacaccatcagctggcctttgaattctttcctgggcaaasccaaaatcccttccaaggctaagccccagtgatgaggctcaactgctctgcaccattaccactaccctaactgttatttacagttgtgtactgtatttgaatatgtatctcactgtttcaggcaacacatcctttacattcattagggaggctgaggtactgaatttgggtagctgagtttcagctccaggccttatatgggtttgaggtttttacttatgtctcaagattcacattgtaatctcattaccaagtcttgtgtaatttcacttggccacgtggcatcactcaccatttatccttttgtatttatatttaattttttatttccaacacctgaagatctaatgtgtcttgccaaacataaattataatccccaaatgggggcagttttgctgttaatttcacacatctctgaaaatgactcaaaaatatttttttaaaagccttaaatttggaaagaaaagg

SEQ ID NO: 358866 - DNA, 555 bp, Homo sapiens
aagtgagggcattgtctggaaaaaaaaatgggaccctacaacttggaatggggaggtgtgagaggaccctggtgaagctggggaagctgagcttgtaaacactgaggaacctttttttttcccagaagaaacagcttcctcatccccagtattggcaacatcccctccctgacccatgctgcaatcagcctttccacctttgtctgaggagatgaactctgtgctgcctgaggcaacagtgatggcctcccgtgaggcagttgccaggcaagataatattgawtctcctcaggagccaccccgaatacccctgtttgcttctagacctacaactagactaaagtcctggtgggcccctgaaggtgaggttcagagtgtgacccatgaggaggtgtgctacactcagaaaaaaagtgctttagttttctaatttatataagcaaaaatctgaataacaagtatgggaatggatattaagggtgtgggataatggtgaagggaatatagagttgaatcaggctgaatttattaatttgggcctactaagtagggatt

SEQ ID NO: 358867 - DNA, 555 bp, Homo sapiens
aagtgagggcattgtctggaaaaaaaaatgggaccctacaacttggaatggggaggtgtgagaggaccctggtgaagctggggaagctgagcttgtaaacactgaggaacctttttttttcccagaagaaacagcttcctcatccccagtattggcaacatcccctccctgacccatgctgcaatcagcctttccacctttgtctgaggagatgaactctgtgctgcctgaggcaacagtgatggcctcccgtgaggcagttgccaggcaagataatattgattytcctcaggagccaccccgaatacccctgtttgcttctagacctacaactagactaaagtcctggtgggcccctgaaggtgaggttcagagtgtgacccatgaggaggtgtgctacactcagaaaaaaagtgctttagttttctaatttatataagcaaaaatctgaataacaagtatgggaatggatattaagggtgtgggataatggtgaagggaatatagagttgaatcaggctgaatttattaatttgggcctactaagtagggatt

SEQ ID NO: 358868 - DNA, 368 bp, Homo sapiens
tcatcaaccgttagcaattctaagagtggtgagagaggtgatttcctttctgtagagagaaggcagacttgggtaaaactggtcctttcctcarggttggatattatacaagacattccttttaaagtgttaagcagttactaaaatagaagctaataaaacatgacccttgaaaggggattttgaagtcaaaagaaaggtttgtagaattaaaataataaactggctctcccccacacccttttctcaatgccatttcaatctcatctacttcctcagtgctgccatgcacttgcattctttgaaacctttgctcattcagcatccgccacccaggggggccttgcttcatctcttctgttttatcc

SEQ ID NO: 358869 - DNA, 494 bp, Homo sapiens
gtgaccttgaagaaatgatttatgctctctaaaccctagtttcttcagctgcaaaatggcaatacaacaataactgcttcagtgggcagttgcaaatattaataacactatgcacgtgaagtgcttagcacaatgcctgacacatgttagctctacttaatcactcccataataccctgtttatgcacagatttgggactcatcacactgcattgtaatcatcaattttattgtctttccttcagtgactgtagttccctgaaggcagagaacgtttcttgatcatttcagtatcatggcacatttgtgatgtaaatagctacttatgagatgtttggcaagtggataaatgyggacttggcacgcctatttggacagtctgcgaatctcaaacctgttatgcatacgcacgggtttctaacacagaggtaaggccactttcatttcaggttcaagagaatcaagaccacaaaaaaggggaaataaggttttag

SEQ ID NO: 358870 - DNA, 554 bp, Homo sapiens
attaaccatttagcataactaaaatattcaaggatcttaagaaatgttaagtatccaaatatagaaaactacaaacttcagagggtgcaacatatttgttggccaggcactatggctcatgcctgtaatcccagccttttgggaagccaaggcaggaggatctactgaggccaggagttcaagaccagctggacccygtctctataaagaagtaaaaaatttagcctgtcatggtggcacctgtgttctcagcccacttgggtgtctgaggcaggaggattctttgagcccaggagtttgaggttacagtgagctatgattgcattactgcgctctagcccaggtgacagagtgagaccctttttctaaaagaaagaacaaagaaaaactatggaatttcttaaagataaaaataaagatttaaacaactggacatacatttcgtattcctttataggaagattggatattttaaagatgccaactttttcttagtacatttaatttaatttgaatcaatttctctccctatttcttttttgaatttaacataa

SEQ ID NO: 358871 - DNA, 554 bp, Homo sapiens
attaaccatttagcataactaaaatattcaaggatcttaagaaatgttaagtatccaaatatagaaaactacaaacttcagagggtgcaacatatttgttggccaggcactatggctcatgcctgtaatcccagccttttgggaagccaaggcaggaggatctactgaggccaggagttcaagaccagctggaccccgtctctataaagaagtaaaaaatttagcctgtcatggtggcacctgtgttctcagcccacttgggtgtctgaggcaggaggattctttgagcccaggagtttgaggttacagtgagctatgattgcattactgcgctctagcccaggtgayagagtgagaccctttttctaaaagaaagaacaaagaaaaactatggaatttcttaaagataaaaataaagatttaaacaactggacatacatttcgtattcctttataggaagattggatattttaaagatgccaactttttcttagtacatttaatttaatttgaatcaatttctctccctatttcttttttgaatttaacataa

SEQ ID NO: 358872 - DNA, 560 bp, Homo sapiens
tatccgtgtttgaattcctggtatctgtgaatgtgaccttacatggcaaaaggggctttgcagatctgataagttaaggatcttgagatggcagattatcctgaattctttgggtggattcagggcaatcacaaggatcctgaaagtcaagagggaggcagaagacagagtgagaatgatgcctcgccaggccccaacttcccactatgagttttgaagatggaggaaggggccacatgaaaggtgtgtgaacatcctytagatgatgaaacaaacaagaagatagattctccctgagaacctccagaaaggaattcagccctgctgacaacctgacttcagcccagcaagccctatgtctgattgtcgggactatgaaataataagtttgtggtgttgtaggccactatgttggtggtaattttttacagcaacaacaggaaactaatacaatctctgacacctttttaatctcctgcagcttctaacacagtgtgttgcacagagtcagatatctcttgtagctgatcgctctcatcacttcctctttattctctcag

SEQ ID NO: 358873 - DNA, 605 bp, Homo sapiens
ataatgttactaatccaatggtggttatttgccataacctttttaatgtgacaattctttggcctacatctgcatttttatggtttgcatttattctcaacrgtatgaatcccaaattgtcaaattacttaggctgatttgtgataattagctttaagttagaatatttgaaatgcattcaattaattttatctgtttagtgaagtacaatatggattttagcattacaaagttttctttataatattagctatgcatttgttaaaggacatggtggactcaaattactctcatttgaattttatatttagaaaatgagcatgcagtattggggattaggcagtattaagaaaatgtatgtagaaagattatctaggatggaatcaccgaaaatcctggaatatttagcagacacttgttgactgattttacctgcagcaaatatgaggcaataacaactgtgtaaattatttagagactagtcatccatatggggattccttaaaatcatttcagaaaacaatttggcagggtattttctttatacttattttttccaagttcatgtacaaaagagatatagatccacacaaagtggattatca

SEQ ID NO: 358874 - DNA, 605 bp, Homo sapiens
ataatgttactaatccaatggtggttatttgccataacctttttaatgtgacaattctttggcctacatctgcatttttatggtttgcatttattctcaacggtatgaatcccaaattgtcaaattacttaggctgatttrtgataattagctttaagttagaatatttgaaatgcattcaattaattttatctgtttagtgaagtacaatatggattttagcattacaaagttttctttataatattagctatgcatttgttaaaggacatggtggactcaaattactctcatttgaattttatatttagaaaatgagcatgcagtattggggattaggcagtattaagaaaatgtatgtagaaagattatctaggatggaatcaccgaaaatcctggaatatttagcagacacttgttgactgattttacctgcagcaaatatgaggcaataacaactgtgtaaattatttagagactagtcatccatatggggattccttaaaatcatttcagaaaacaatttggcagggtattttctttatacttattttttccaagttcatgtacaaaagagatatagatccacacaaagtggattatca

SEQ ID NO: 358875 - DNA, 593 bp, Homo sapiens
tttgactaagactcaacatgaaactaatttgtgatattaatgatagctatctcttttagttcaaaacacaaatgacaacgctctctttatacttaggagaggttgaatcatcagggttaattgcagaagcccaatgtataaaactgaagatgtgtttattacttatgcaattttgctgcaagaataaaaatataatgtttcttatttattcattgatctttttggtatastttcatctctccagtgcccatgctggtgtacgaaaccaaaggcaaaggaaatggttgtaaaatgcaaaaacaaatcatcaaataccattaattctacggcatcttaattttgtccgtagacttttttaaatgtaggaaagggtagggtttttctttcttcctgttctaacaggcaaagaggagagttgtcagtcagagacaaagaagcttcacactggatgcaaaagtcctggctgacaagagacttttgctacatggaaagtaatgatcacctgaatgatggtttaatctgcccatgtctcacttcattctggagatgcagaacatttacataatcttgtagatcagacggacatgtaagcc

SEQ ID NO: 358876 - DNA, 593 bp, Homo sapiens
tttgactaagactcaacatgaaactaatttgtgatattaatgatagctatctcttttagttcaaaacacaaatgacaacgctctctttatacttaggagaggttgaatcatcagggttaattgcagaagcccaatgtataaaactgaagatgtgtttattacttatgcaattttgctgcaagaataaaaatataatgtttcttatttattcattgatctttttggtatactttcatctctccagtgcccatgctggtgtacgaaaccaaaggcaaaggaaatggttgtaaaatgcaaaaacaaatcatcaaataccattaattctacggcatcttaattttgtccgtagacttttttaaatgtaggaaagggtagggtttttctttcttcctgttctaacaggcaragaggagagttgtcagtcagagacaaagaagcttcacactggatgcaaaagtcctggctgacaagagacttttgctacatggaaagtaatgatcacctgaatgatggtttaatctgcccatgtctcacttcattctggagatgcagaacatttacataatcttgtagatcagacggacatgtaagcc

SEQ ID NO: 358877 - DNA, 593 bp, Homo sapiens
tttgactaagactcaacatgaaactaatttgtgatattaatgatagctatctcttttagttcaaaacacaaatgacaacgctctctttatacttaggagaggttgaatcatcagggttaattgcagaagcccaatgtataaaactgaagatgtgtttattacttatgcaattttgctgcaagaataaaaatataatgtttcttatttattcattgatctttttggtatactttcatctctccagtgcccatgctggtgtacgaaaccaaaggcaaaggaaatggttgtaaaatgcaaaaacaaatcatcaaataccattaattctacggcatcttaattttgtccgtagacttttttaaatgtaggaaagggtagggtttttctttcttcctgttctaacaggcaaagaggagagttgtcagtcagagacaaagaagcttcacactggatgcaraagtcctggctgacaagagacttttgctacatggaaagtaatgatcacctgaatgatggtttaatctgcccatgtctcacttcattctggagatgcagaacatttacataatcttgtagatcagacggacatgtaagcc

SEQ ID NO: 358878 - DNA, 559 bp, Homo sapiens
ttacatagtatcagcacctcattgaaattcagcccattctctgttttgaacacagctgaattgaaaaagctccaaactaggtctcctggacaagtcattcaagactctgtgagagaagcaaaactttattataatttattattatcagatcccatattataatctaatgctgtaacagtaattactgccataaaacaaaatgccattttgtgcttttttaagaaaatggaataaaacagaaaggaagaatctatcatttcttatgtgtccagtgcatggacagtggccgaagctggcctctcagtgctgcaagactcaggcagctgccatcaatgcccaagccctgcctcctytgacatgagggcctgggaggctgcttaagcacctgcctgaatttgatgggatgaaggatccccaaaaccatatccactttattcaaaaattttttatttcatgagggtttcctttgtcttattccaagttcctgaatccatttgctgttgaacttctgtattcctactgtggggaggccactcatgtatgcagagtagttgcaaaa

SEQ ID NO: 358879 - DNA, 496 bp, Homo sapiens
aaaaatttagcccaatgcctgccatttgttaggtgctgaacaagtgggatactacttttctgaatcactgtaggcaatgtgtgttgaattggataagagctccttctctaccagttttgcccccatatttttgcttatgatgaataaggttaatttcagttccaaaacgtgctaacttctcttcctgagaatttacaagacagttcctagaatcacatattcttacatgttagcctttttcctgatctcctttttgctccaggcctagcatggtaccttgtacagagaaaaggcagggtgggtgtgggagggtgcaragttccttacattggatgagtatagcacattagttgatatgggtaagtacatctcccagttgggtctgatagtgtttggtttctagagaagtccagacttagtttacttattcctcttctttattattatttccatcattaaaaatatgatccttatcttagtttctgctgctgtgcag

SEQ ID NO: 358880 - DNA, 521 bp, Homo sapiens
ggcagagagtagagagcgagagagagagcaagctctcaagtctctttttataagggcactaatcccattcatgagggcttcactctcataaccttattaccttccaaagcccttacttcctaatactattaaattggaggataggatttcaaaataggaatttgcagaaaacataaacatgtcgaccataacaattcataacaagaaactcatggcattacattaatgaactgaagttaatggttttttttttcaagtttatagaggaaagtcaggcaatctaaatgtatatacagtatttttttcaccccatatttcactggtaaaaagaaaaatatatattctcaagcattctttctgaaacattaggatgaaraaaaaggagaggtggaaagcagaaagtagggaagaggaataagagaccaaagagactaagaagtcagactttgaaagagtgaaagctggaggaataaggatccccccaaccccaccaaaattatgatttgtagcaagagcaagga

SEQ ID NO: 358881 - DNA, 594 bp, Homo sapiens
gggattaaagacaagatatcaagaagaacaacagctattggctggttttgtatggaggttctgaatgaaaagctttaaagttcagcttttyctctgcagatagaaactattaaggggtttgagcaaggcaggagcagatctggatttaaatatttcacagctttaaatgtctattttttaatagtccagtagtgcttaattttccctgttaatattcatgttgaattgctgagaaactaagatgggattttatcgctctagcgtaaagtgaaagcatttgcttatgggggaaacactccaatctctatgtgccaaaaatagttgcctgtaattttagatactttgtcttcaaaaacagtgtctccaaaagctattgtcccaaagtttgtgatcctgtataatgatctcaactctgattaacttatcattctgtcagtgttcaattttaccacgtttatttttctatatataccactagacactttgagccaacccccaaaagatgatcactattctattccaaaaccaaacctatgactagaatgcatgcttcaagagggaggcccttgtctttttatttattcctgtctcagt

SEQ ID NO: 358882 - DNA, 594 bp, Homo sapiens
gggattaaagacaagatatcaagaagaacaacagctattggctggttttgtatggaggttctgaatgaaaagctttaaagttcagcttttcctctgcagatagaaactattaaggggtttgagcaaggcaggagcagatctggatttaaatatttcacagctttaaatgtctattttttaatagtccagtagtgcttaattttccctgttaatattcatgttgaattgctgagaaactaagatgggattttatcgctctagcgtaragtgaaagcatttgcttatgggggaaacactccaatctctatgtgccaaaaatagttgcctgtaattttagatactttgtcttcaaaaacagtgtctccaaaagctattgtcccaaagtttgtgatcctgtataatgatctcaactctgattaacttatcattctgtcagtgttcaattttaccacgtttatttttctatatataccactagacactttgagccaacccccaaaagatgatcactattctattccaaaaccaaacctatgactagaatgcatgcttcaagagggaggcccttgtctttttatttattcctgtctcagt

SEQ ID NO: 358883 - DNA, 655 bp, Homo sapiens
ttgttatttgcaagccttgtatttacaaactgattataaacattctgcatgggcctggcatagtggctcatgcctgtaatcccggtactttgggaggctgaggtgggtagatcatttgaggtcggggtttgagaccagcttagccaacatggggaaacctcatctctactaaaaatacaaaaattagccaggcatagtggcaggtgcatgtaatcccagctacctgggagcctgaggcaggagagctgcttgaacctgcgaggcagaggttggagggagccaagatctcatcactgcaacccagcttggacgacagagtaagacactacctcaaaaaacaaacaaacaaacaaaacaaaaaaagaaagaaatatataaacaccctgtatgtaatgagtattttgttatattattartatatttcatttaaagttgcacctataatttcttttttatacagttaataaaataaacatttagttaattattgtttggcagaatgataaataaagtctcaggtacctgaattcataggaacactttgtttcattaaatgattctattttccaggtttttaacaaagatatctggaattactgaaataacaaaacaaagctccagtatactaacaaagcttccaaaactgaaaaagaag

SEQ ID NO: 358884 - DNA, 555 bp, Homo sapiens
cctacattaaaaggtaaaactattttaaatatacagcctcaataaaatagaaaagcaagaacaaaccaagcccaaaatttgtaaaaggacaatataaggaccaagaagaaataaataaaattgaggctaaaaattttttttaaaaagatcatcaaaacaaaaagtttttttaaagataaaatcaacaaacctttcactagactaagaaaaaagaagacccccaaaataaaatcagacagaatagaaattacaactgataccatggaaattgaaaggatttttggagactactatgggctactacataccagcaaattggaaarcctagacaaaatcgataagctcctggacacataaaaccaactaatattggaccataaagaaatagaaaacccaaacagaccaataataatcaatgagattgaatcagtaataaaaagtttctcagttgggcatggtggctcacgcctgtaatcccagcactttgtgaggtcgaggagggtggatcagaaggtcaggagttcgagatcagcctgaccaatatggtgaaactca

SEQ ID NO: 358885 - DNA, 604 bp, Homo sapiens
atagttatgagctactagtctctcctgaccccagaaatttagataccttgtcttattattttctggaaatatcacttcgaagataagttagttctcctttaaatcatcgtatataacatgtcattttttctctggctatttccaagattttcgctttgtctgtggttttacttcttgagcattatcattcatgatgtgattattttcttatttataatgttttaggtttacaaaacctctcaaatatgtaaatttattgcttttgccaattattggaagcttttgaacattctrtcttcaaacaactgatcttttctgggactccaaatccaataactttagttgttttgttactgtcacttaggaccctgagtctatatttattttttactttagtacttttatgaatctcccttcatactggataatttctatttatatttttacattcactgacttttaaaaactattatatttttttgcctcttaaatctaactaataaactttaaattccaggaattgtaattttcaattataaaggttttataattgtcttgttctagtttctattcttttgttgagatttcctatcttttcacttat

SEQ ID NO: 358886 - DNA, 433 bp, Homo sapiens
gtgggttacatgcaacaggcggatcatctaggcaacctcagctatgaagctgggcatctgtgagggctgaaggctcagggttttcacagagacttgtggttcacctgggagatgctgacgcttatgactctttctactcactatgctgttttggttactaaagctctgtaatataatttgaagtcaggtaatgtgattcctctagttttgttctttttgttcaggatagctttggtcttttgtggttccacttaaattttaggattttttttttttttctgtgaagaaggycattggtatctttgtctcctctgcctgtgtatttcaaatagtctgtcttcaagctcactaattctttcttctgcttgatcagttctattaagaagttataatggattgctcaatgggtcagttccatttatcaactccagaa

SEQ ID NO: 358887 - DNA, 570 bp, Homo sapiens
ctttaataaactccccatcatatatacacctatcctattagttctgtttctctagagaaccctgactaatacagtcccacaaacactttgccctctccctctcccaaaagcacagattctctctttgcatcatgtggccaaccactgggggatgagaaagaggtggcagtrgcaatcctgtacggtctttctaaccctcttcagtgtctctttctgtgatatgcatttaaaaccacatattgcgattgttcacttgatttttggttcttatgaaggtgactttttgtgtggattcttgttcagtctggtgttcctgtggggaagattgttggtggaggcttcaatttggtcatcttgctccacctctgactgatatatgctttgttgatatattgttattatttcaattttttttctgagtgttgctattctgtaaaattggatttgtatttccattttaatctgacaaccagccaatttaaagagttcttttttttaaccccaataactctgtatattctttggggatatcgacgtaaagggtcatgtaatttgtaaataatgacaaag

SEQ ID NO: 358888 - DNA, 516 bp, Homo sapiens
aattataaataaatagagatataaaagcattactaattataagtcataatagaatattagagttatttagaaaaattagatagggaaagatggcagaaagaaattaagaaatgtttttgttttttatttttcctcagagctagttgattcatgcccattttatggattttatctcttggaaaattaaaactcaattgggagaaaaaggcacactgagttaactaatgtggtcccgcctctcagtgttgaacacataaatataaaggacagtacaatgttcttcttaaatccttatatacctacatcaattctgaaaatgaattctggccataaacaactcacraaacaacagcatcaataaatatgaaagagaaatgccctcaacttgtaaaacattctgcccatgtagagggaagttgattccaaattttgagaattcttcaaagtcctttactcattttcaaaagaaaactcctattctgaaaatgaatgtgtaccatctgctaaatttttttt

SEQ ID NO: 358889 - DNA, 516 bp, Homo sapiens
aattataaataaatagagatataaaagcattactaattataagtcataatagaatattagagttatttagaaaaattagatagggaaagatggcagaaagaaattaagaaatgtttttgttttttatttttcctcagagctagttgattcatgcccattttatggattttatctcttggaaaattaaaactcaattgggagaaaaaggcacactgagttaactaatgtggtcccgcctctcagtgttgaacacataaatataaaggacagtacaatgttcttcttaaatccttatatacctacatcaattctgaaaatgaattctggccataaacaactcacgaaacaacagcatcaataaatatgaargagaaatgccctcaacttgtaaaacattctgcccatgtagagggaagttgattccaaattttgagaattcttcaaagtcctttactcattttcaaaagaaaactcctattctgaaaatgaatgtgtaccatctgctaaatttttttt

SEQ ID NO: 358890 - DNA, 490 bp, Homo sapiens
ggccatggctacgagctccatggagccacccaatcacagctgcacacctaggcccctgttccactaagcaggcaggagacctgccttcctgagcacagctgcagctgcccaaaccacctctgcaggctgaggcatccctgcactcttgggggactgggaaggcccctgaccctttcaggctcagtagtgcctgcttccastgcctggcttctccctgcttttggcactcacttagatctcgaagtctggccaagcccaggtgctatgaacggcagcaggaggcagacaggctcctggacagaagcgggcaggtccccagtaaggccccaccttaaggccaggaagggcctgaaggctgggggctgggcttctggtcccacgaatgaagtggggacttgtggtgccttttctgggcccatccatggctgcccatgggccaattggcaaacacttgctcccctttgaggtccgtaaaagccccaggctcagc

SEQ ID NO: 358891 - DNA, 409 bp, Homo sapiens
ctgtcccggtgaggaaggccttgacttatcctgaaaaggtgaacaccaacatgtactgatagcccccatcacagggtaattcrgtgaagttcataagcagtttttcacatggcatggcttctgtttcctgaactcctgggggtggagtaagcccttgtcatggattgttctgaacacaagttaaatattgttcatttacaaatggcttgagtaatagcagtgagccatggcacatagaaatgatgccttaataatgtctttagtgctgtttttttgtgtgtttttttttcaggtcagttccttggtggaactgttttacaaatctgggggccaccgtttcagggatggctagcctcccactggaaaatttttactatccttcttcaatgtagttgatatttttctgggc

SEQ ID NO: 358892 - DNA, 472 bp, Homo sapiens
ctgcccctccacagtctcccatgcaggctgacaccatatggtggccttaatggagtccccaagtatttcaggttctccccctggcccctagaaggtggatgtacccatgggatttgctttgacccaggagatgtgagtggaagtgaargatgtaaccttgaggcaaaagagttgggagccattgagactgaccaccctctccttcatctcttagagcagctgacaggtcccatatggaggctgctcctttattctggtggcagaatgaggagatgtggagggcagggccaaggagagccatggaggacatgaggcatgagcagaaaaagagccttcagtgttgtaaacctccattgtttggggctgtttgttacctccagtgatacctagcccgtcctagcagggaacgcttcagggccaccagatcccttccatctgccctcactcaccttccttgggtacttgtatgggg

SEQ ID NO: 358893 - DNA, 472 bp, Homo sapiens
ctgcccctccacagtctcccatgcaggctgacaccatatggtggccttaatggagtccccaagtatttcaggttctccccctggcccctagaaggtggatgtacccatgggatttgctttgacccaggagatgtgagtggaagtgaagsatgtaaccttgaggcaaaagagttgggagccattgagactgaccaccctctccttcatctcttagagcagctgacaggtcccatatggaggctgctcctttattctggtggcagaatgaggagatgtggagggcagggccaaggagagccatggaggacatgaggcatgagcagaaaaagagccttcagtgttgtaaacctccattgtttggggctgtttgttacctccagtgatacctagcccgtcctagcagggaacgcttcagggccaccagatcccttccatctgccctcactcaccttccttgggtacttgtatgggg

SEQ ID NO: 358894 - DNA, 589 bp, Homo sapiens
atgctgtgtatgattctgactgctttgtgatcagcctggcctctctgatcaacccaaatcttctttcttttgtgaacagggactaatttgtgccacctactggggaatgaagatcaagccgggtttcatggggaaggccactccaccctaygacgtccaggtctggtcctaagggcattggcagggagcagttagggctcagcgggggttggacaatttgacaccaggtgacaacaccagccgcacttccctgctccagtcatccttccttctctttttttttatcatttatcccttcagtttcatatggaggcctcagttgaaaactgcattattgtgagcatgaacaccgctgaccctggcagccagggcatcacacacagtaggtaggaaagaatacctagaggctgcactgggagccctctctagcaagtggtgcttttcattttttttgatcactgttttccaacttgaagacacattggtgacatctactaactcatgaaacatagacccttggcttgagtttcacatttgcgtattttaaaggcttttgacagttttattccattttctgatgtttcctctg

SEQ ID NO: 358895 - DNA, 589 bp, Homo sapiens
atgctgtgtatgattctgactgctttgtgatcagcctggcctctctgatcaacccaaatcttctttcttttgtgaacagggactaatttgtgccacctactggggaatgaagatcaagccgggtttcatggggaaggccactccaccctatgacgtccaggtctggtcctaagggcattggcagggagcagttagggctcagcgggggttggacaatttgacaccaggtgacaacaccagccgcacttccctgctccagtcatccttcctyctctttttttttatcatttatcccttcagtttcatatggaggcctcagttgaaaactgcattattgtgagcatgaacaccgctgaccctggcagccagggcatcacacacagtaggtaggaaagaatacctagaggctgcactgggagccctctctagcaagtggtgcttttcattttttttgatcactgttttccaacttgaagacacattggtgacatctactaactcatgaaacatagacccttggcttgagtttcacatttgcgtattttaaaggcttttgacagttttattccattttctgatgtttcctctg

SEQ ID NO: 358896 - DNA, 580 bp, Homo sapiens
tatatatctgcatattacaatcatttcaggagattttttaaaatagtagtacttggatgcaaccagagattctgattgagctgaaatggggataatccaaagaaatatatttaaagaaaaaaacaaggtcttgctctgtcaccgagctggagtgcaggagcgtgattaaagttcactgtatcctggacctcctgagctcaagtgatattcccaactcagcctcccaaggagctgggaccacgggcaggtaccaccatgcccagctaattttttgattttttgtagagataaggtctcactatgttgcscagactactttcaaactcctgggcacaagtaacccccctgcctcagcctcccaaagtgctgtgattacagatgtgagctattgcacccagctaatttttttttgattgagcatgacatattttattttccaaagaactcctaacatatacccacacctacgtatccatgaaatgtcagtattcctccattgggacttctttgggtttttttccctccttattcatgtaaaagaattacagaattaccatgagacccagcaattctacttcta

SEQ ID NO: 358897 - DNA, 580 bp, Homo sapiens
tatatatctgcatattacaatcatttcaggagattttttaaaatagtagtacttggatgcaaccagagattctgattgagctgaaatggggataatccaaagaaatatatttaaagaaaaaaacaaggtcttgctctgtcaccgagctggagtgcaggagcgtgattaaagttcactgtatcctggacctcctgagctcaagtgatattcccaactcagcctcccaaggagctgggaccacgggcaggtaccaccatgcccagctaattttttgattttttgtagagataaggtctcactatgttgcgcagactactttcaaactcctgggcacaagtaacccccctgcctcagcctcccaaagtgctgtgattacagatgtgagctattgcacccagctaatttttttttgattgagcatgacatattttattttccaaagaactcctaacatatacccacacctacgtatccatgaaatgtcagtattcctccattgggacttctttgggtttttttccctccttattyatgtaaaagaattacagaattaccatgagacccagcaattctacttcta

SEQ ID NO: 358898 - DNA, 517 bp, Homo sapiens
ctttgtgccttcatagcttagctcccacttagaagtgagaacatacgctatttggttttccatttctgagttacttcacttagaataatggcctccagctccttccaagttgccacgaaagacatgatttcacwgctttttatggcttaatagcatcccatggtgtatatataccacattttctgtatccactcgttggttgatgggcactttggttggttccatatctttgcaattgcaaattgtgctataaacacgcatgtgcatatgtctttttcatataatgacttctttttatttgggtagatacgcagtagtgggattgctggatcgaatggtagttctacttttagttcttgaaggaatctctatactgttttccatagcagctgtactaatttacattcccaccagcagtgtaaaagtgttcccacaaccatgccaaaatctattgttttctgatttttttaacaatgacaatttttgcaggagtaaggtaatatctcattgtggtttt

SEQ ID NO: 358899 - DNA, 517 bp, Homo sapiens
ctttgtgccttcatagcttagctcccacttagaagtgagaacatacgctatttggttttccatttctgagttacttcacttagaataatggcctccagctccttccaagttgccacgaaagacatgatttcactgctttttatggcttaatagcatcccatggtgtatatataccacattttctgtatccactcrttggttgatgggcactttggttggttccatatctttgcaattgcaaattgtgctataaacacgcatgtgcatatgtctttttcatataatgacttctttttatttgggtagatacgcagtagtgggattgctggatcgaatggtagttctacttttagttcttgaaggaatctctatactgttttccatagcagctgtactaatttacattcccaccagcagtgtaaaagtgttcccacaaccatgccaaaatctattgttttctgatttttttaacaatgacaatttttgcaggagtaaggtaatatctcattgtggtttt

SEQ ID NO: 358900 - DNA, 600 bp, Homo sapiens
attgtggttttaatttgcatttccttgatgattagtgatattagtgccctttaaaaagcaactccagtagggttctccagaagagtcccattctccatgtgaggccccatcaagaagacagccatctatgaagcctcaccagacaccaaatttgttggtgacttgatcttgcattcccagcctccagagctctaagagataatatctattgtttataacccacccagtttatggcattttgttacagcagcctgaatgggctaagacagtatgtgtgtaaattacctttttrgcactgtgtttgctacaatctataagttttaatatgctgtgttttttatttcatttgtctcaagataatttctaaatttcctcgtgacttcttctttgattcattggttagttaagagtatgttgtttaattttgcaaagattgggaaaatttgtgattttttaaaagttttccttctgttaattcctttcatgtgacttgataagatgctttgtataatttctgtcttttaaagttaattaatacttctcttctggcctaatatatggtccatccttgagaatgttccatgtgcacttgagaaaaat

SEQ ID NO: 358901 - DNA, 600 bp, Homo sapiens
attgtggttttaatttgcatttccttgatgattagtgatattagtgccctttaaaaagcaactccagtagggttctccagaagagtcccattctccatgtgaggccccatcaagaagacagccatctatgaagcctcaccagacaccaaatttgttggtgacttgatcttgcattcccagcctccagagctctaagagataatatctattgtttataacccacccagtttatggcattttgttacagcagcctgaatgggctaagacagtatgtgtgtaaattacctttttagcactgtgtttgctrcaatctataagttttaatatgctgtgttttttatttcatttgtctcaagataatttctaaatttcctcgtgacttcttctttgattcattggttagttaagagtatgttgtttaattttgcaaagattgggaaaatttgtgattttttaaaagttttccttctgttaattcctttcatgtgacttgataagatgctttgtataatttctgtcttttaaagttaattaatacttctcttctggcctaatatatggtccatccttgagaatgttccatgtgcacttgagaaaaat

SEQ ID NO: 358902 - DNA, 593 bp, Homo sapiens
ccaacttttatgctactaattacgatatctagtaataatgatagtaataatgacatttctcttttacaaaaaagagaaagggggcatgttgggaaaaagctgaatattgggaagaaaactgaggcagggcttgcatgtctgacataatgtcctctggaatgtgtctagactttctggctccttgcttctagccttcctagtctcctagatccattgtattcccattatcacaagtagcagaacacgttccttataaatgctaaactatcacagctgttcatcatgcacctgcccttttgacctcctcattctcaccacctgttcctttgttggattaccaataaatagcatgggctcccagagctcaggaactttgcagcctccacagtcgcgatggccccctsctcccactttacttctcaaattgtctttttctcaatcctttgactctgccggacttcattacccccaccacctggtgttgggcctgataaccccaacatttctatgcctttctcatatccaggagagactgagaatctgacaactttaaaagtctgaaaagaaacatttaccatctattctctctgaag

SEQ ID NO: 358903 - DNA, 607 bp, Homo sapiens
tatcttgaaactgccctgcaaagtcccttgtgggaaaagtccacattctatagagaatcccctttcccatttgttttccttctttcctttccagatccaggagataataaactaagagccaggcactcttttaaatccagtaagaagcattttacaacctgttctctctctctctctctgatgtctggtatctgacagattcctctgcacaataaaacttggtctccacaaacctttatcttaacctgaacwtttcctttgatcccaggtcttcagataaacttaaccaattgtcaatgagaaaatgtttaaatttacctatagcccggaagcccccactttgagttgtcctgcctttctgaaccaaaccaatgtatttcttaaatgtatttgattgatgtctcatgcctccctcaaatatacaaaaccaagctgcatcctgaccaccttgggcgtatgttctcaggacctcctgagggctgtgtcacaggccatggtcgctcatatttagctcagaataaatctttaaacatattttacagagattcactctttgtcaacaatagtttggtgcccaaacacgtggggcctcagagaagactcagga

SEQ ID NO: 358904 - DNA, 540 bp, Homo sapiens
agcaattgtttagaagatcagttttactagcctttaaaataagcgcaatagcacattaaaaaatccaagaaatcaacacttaaaaaatttgtgtttctggactcagaattaacataataacaaacaatcagatttaaggggaaagaactattatcacaaattaataactcatccaatgcctattagttaagcaactactatatgctcaaaattgttttacatgatctttgccctcatggataaagagaacaaaggtaaaaaaaaaaaaaatacttttgaccaaaagctctgttggcatcctactaaacaaaygcaaacctatttaattttcataatgtaaatggcagctatttttataattcttctgctaataaattatttttttctgatttttttggtaaaacccaatattcataatgaagtccagaaccatgaattgtttaaaatgatttcttcttatttatgattacaagtatacctctacaggaagtcagtatactcacaccaaagctagtattccagaagaaaatggcaaattta

SEQ ID NO: 358905 - DNA, 540 bp, Homo sapiens
agcaattgtttagaagatcagttttactagcctttaaaataagcgcaatagcacattaaaaaatccaagaaatcaacacttaaaaaatttgtgtttctggactcagaattaacataataacaaacaatcagatttaaggggaaagaactattatcacaaattaataactcatccaatgcctattagttaagcaactactatatgctcaaaattgttttacatgatctttgccctcatggataaagagaacaaaggtaaaaaaaaaaaaaatacttttgaccaaaagctctgttggcatcctactaaacaaacgcaaacctatttaattttcataatgtaaatggcagctatttttataattcttctgctaataaattatttttttctgatttttttggtaaaacccaatattcataatgaagtccagaaccatgaattgtttaaaatgatttcttcttatttatgattacaagtatacctctacaggaagtcagtatactcayaccaaagctagtattccagaagaaaatggcaaattta

SEQ ID NO: 358906 - DNA, 535 bp, Homo sapiens
gagactctgtcttggtctccataggttcagggagcctatttcatgtttgtgcccctctaatgcagcaccaaatgtcacaggacaaacatagtaataataatagctaayctttagctattgtttatttttattattatgaatatatttgttatacatctatgagcataataaatctattattataaaattatttattagtataaatatattatttactgtaactatttagctaacctggagtacttactatgtgaaaacactgtccttaatgctttatataacccacctctcaaagctggatgggagatgtgattattatccctattttactaacgaggaaagtgggtcactgaccggcaaggaaatttgcctaaagattcaaagatagcacaggatgcaatccagatttgaactgaggtagtctggctctgagtccctgtccctacccctacatgatttttaaaaaggcgcattacactacagtaacaatttcccttggatattttagagaaattgatggcatttttattttttt

SEQ ID NO: 358907 - DNA, 319 bp, Homo sapiens
gatatcttgagtgtccaaggccacactattagtaagtagtagggccctgcctgtttgattttgagcttagcttttaaccactggcgttactgaagacaggtgagaaagcctagaacagcttgcttctcaaacactgaggccccaaatgaaccagaggatgtggktagaatacaaatcatatgcattcagaataatcgttgaatagtccctgaattactattgaaatgtgagcaagatgctcacataggaccaaaggcgttgacactgactagggaaagagaagatttgtatttgcattattctgtcttgcatagcactt

SEQ ID NO: 358908 - DNA, 592 bp, Homo sapiens
ttcccccttccgtgtatttctttttccactaagctacgttgaagtaggcttctgttactggcagccaagggagctctgcttagtaggtaagaattagacatcataggtgtctaaggcctttcccagaaattggcacttagtaggtgttcatcaaatgtgggctctggctattatcatgtaagttgtaatctatgactactcctggtgctttgcagctttcagtaggggtgtggaacggagatcagcagactcttgcaacagatttggcaaggactaagttgacaggggtgggtagagaggaaatagaaggaatgttttgttttactaaattgaatagtatttatttatttatttatttatttatttatttatttatttatttttggtctaaatgccccctttaaaaggcagagtgggaagatggatacaaagaaaatacccaactgtcttctgtcttcatgagacccatctcacaagtaatgatrcccacaggctctaagcaaagaaatggagaaatatctgccacacaaatgaaaaacagaaaagagcaggagtccttattcttatatcagataaaaacagactttaaacc

SEQ ID NO: 358909 - DNA, 557 bp, Homo sapiens
ctttctcttaacctgaacatttcctttgatcccaggtcttcagataaactaatcatcaatgacaaaatgtttaaatttacctataacctgaaagaccccgctttgcrttgtcctgcctttctgaaccaaaccaatgtgtttcttaaatgtatttgattgatgtctcacgcctccctaaaatatataaaaccaagatgcatcctgaccaccttgggcacatgttctcaggacctcctgagggctgtgtcatgggtcatggtcactcatatttagctcagaataaatctctaaaaatattttccagagtttcacttttttcatcaacagtagtagtttcctatgtacagcatgtgatataaagtctcttgtccctttttcccatgaaattttcctaaagaatacaaaaacaatcacaaaataataattagattccctgaagaaaatggagaaaagtgatggaagtttgaaagccagctggatgcatctagcatgaggctcagcccagccagctcttggtgatgaggaaagtggcaccatctagaccacttttccacctc

SEQ ID NO: 358910 - DNA, 561 bp, Homo sapiens
gagctagcctctcaggcagccaacctctcaacctcccaacaagcctctcagccagccagcatctcagcaagcctctaacccagcctctcarccatgcagattctcagtcagccattctcacctccaccctctcagctagcttcacagcctgcacttggccagactccccagacagcctctaaaacagcctctaaacagcctgacatccagccccccagcctgccttttctccagtctcccatgcagccatcctctggaccagcctatcagccagcctcccaaccatcaagggagccagcctctcaaccagcctcccagcgagcctcttgaccagtgagctagatggcccttcgaccatcctccaagtcacccccttgacttgcctcagccagctagcctgctaatcaggccctcaaaaagcctctcagctagcaagcccctcagcaagccactaagccagtctctcagcaaggaggtctcagagtcagcctctcagacagccagcctctcaaacagcctctaagccagcttttcataaagcttctaagccagtctctcagc

SEQ ID NO: 358911 - DNA, 561 bp, Homo sapiens
gagctagcctctcaggcagccaacctctcaacctcccaacaagcctctcagccagccagcatctcagcaagcctctaacccagcctctcagccatgcagattctcagtcagccattctcacctccaccctctcagctagctwcacagcctgcacttggccagactccccagacagcctctaaaacagcctctaaacagcctgacatccagccccccagcctgccttttctccagtctcccatgcagccatcctctggaccagcctatcagccagcctcccaaccatcaagggagccagcctctcaaccagcctcccagcgagcctcttgaccagtgagctagatggcccttcgaccatcctccaagtcacccccttgacttgcctcagccagctagcctgctaatcaggccctcaaaaagcctctcagctagcaagcccctcagcaagccactaagccagtctctcagcaaggaggtctcagagtcagcctctcagacagccagcctctcaaacagcctctaagccagcttttcataaagcttctaagccagtctctcagc

SEQ ID NO: 358912 - DNA, 561 bp, Homo sapiens
gagctagcctctcaggcagccaacctctcaacctcccaacaagcctctcagccagccagcatctcagcaagcctctaacccagcctctcagccatgcagattctcagtcagccattctcacctccaccctctcagctagcttcacagcctgcacttggccagactccccagacagcctctaaaacagcctctaaacagcctgayatccagccccccagcctgccttttctccagtctcccatgcagccatcctctggaccagcctatcagccagcctcccaaccatcaagggagccagcctctcaaccagcctcccagcgagcctcttgaccagtgagctagatggcccttcgaccatcctccaagtcacccccttgacttgcctcagccagctagcctgctaatcaggccctcaaaaagcctctcagctagcaagcccctcagcaagccactaagccagtctctcagcaaggaggtctcagagtcagcctctcagacagccagcctctcaaacagcctctaagccagcttttcataaagcttctaagccagtctctcagc

SEQ ID NO: 358913 - DNA, 636 bp, Homo sapiens
ttacaaacagctatacttgtttattctcccaaacacttccagttaaaaggctttcttataatcacgttttcacttttccttaaaccatactaaattttatcatttccaatcccctgcaacctttgaggagaactaactttttggaatttccctaaggtttcaatgagcaacaaatgtcttcaggagaatatgatgcatcatatctatttaggatgtgccaggattctcctgctgatgaattctcataattctagacaaagttaatagaagaagggaactccccttgagaaargaataaatggtggagagtgatctgaacacaaatggtacagttcagtgcaattatgtctagagttctctactggatatcaagtacaactgtcatttggtatttcaaaaacattcacagtacacatggttggtctaatgggaaatacattattcatttgccaaagtttgattactatttgaaatcattttccacaaatcacttatgtgaattgtagaaaaaggtatgcaggagagcaaggtatacatgccagattaattttccattaaaaataatttatgcttctcttgtgacttaagtaataacttctaagagctataatgtataaaacattacaagcaagagta

SEQ ID NO: 358914 - DNA, 636 bp, Homo sapiens
ttacaaacagctatacttgtttattctcccaaacacttccagttaaaaggctttcttataatcacgttttcacttttccttaaaccatactaaattttatcatttccaatcccctgcaacctttgaggagaactaactttttggaatttccctaaggtttcaatgagcaacaaatgtcttcaggagaatatgatgcatcatatctatttaggatgtgccaggattctcctgctgatgaattctcataattctagacaaagttaatagaagaagggaactccccttgagaaaggaataaatggtggagagtgatctgaacacaaatggtacagttcagtgcaattatgtctagagttctctactggatatcaagtacaactgtcatttggtatttcaaaaacaytcacagtacacatggttggtctaatgggaaatacattattcatttgccaaagtttgattactatttgaaatcattttccacaaatcacttatgtgaattgtagaaaaaggtatgcaggagagcaaggtatacatgccagattaattttccattaaaaataatttatgcttctcttgtgacttaagtaataacttctaagagctataatgtataaaacattacaagcaagagta

SEQ ID NO: 358915 - DNA, 616 bp, Homo sapiens
ggccttggtgtggaggtaccctggagagcaatgggaatgacttggccctccagaagtacatttcagcctcctttgtactgaattctcacttctagctctggaatctacattgtgaaactatcaaagaaactaacaactactaaaacccccacctgtatctgaatgcagctgggtttacctcaagagccacacccttaacttaattaggggaataggaacctaaatgttttgaggactgttagtgaataagatatcaatattaaagaataaattagcaaagaataaaagaaccacccattagaccaagggaagggaaaaaaatgaagaaaggaygatggcagatagtttttaaaaattatataccaaatcactgaggttttctaaaatttaacatttaattggtgatgtgttattaacaaaaattccttaaaatatgcttgaaaggtgaatctgtgactatacttattggatatgcctaaatatgatttttagtgtaattataacttctgactctaaaacattgctaagttgtgccagacactacttgaaacttcacacttaacactcattctaaaagtaacaataatacctataggcactgattcccaaataaaca

SEQ ID NO: 358916 - DNA, 616 bp, Homo sapiens
ggccttggtgtggaggtaccctggagagcaatgggaatgacttggccctccagaagtacatttcagcctcctttgtactgaattctcacttctagctctggaatctacattgtgaaactatcaaagaaactaacaactactaaaacccccacctgtatctgaatgcagctgggtttacctcaagagccacacccttaacttaattaggggaataggaacctaaatgttttgaggactgttagtgaataagatatcaatattaaagaataaattagcaaagaataaaagaaccacccattagaccaagggaagggaaaaaaatgaagaaaggatgatggcagatagtttttaaaaattatataccaaatcactgaggttttctaaaatttaacatttaattggtgatgtgttattaacaaaaattccttaaaatatgcttgaaaggtgaatctgtgactatacttattggatatgcctaaatatgatttttagtgtaattataacttctgactctaaaacattgctaagttgtgccrgacactacttgaaacttcacacttaacactcattctaaaagtaacaataatacctataggcactgattcccaaataaaca

SEQ ID NO: 358917 - DNA, 443 bp, Homo sapiens
tcacatatgtaaaatcttaaatgctaaccttcagtgtctatttgcttgcctatttctctccccgtttgagggtaaatatctccccattacctggaacaatggctgccccattaactcattygacagttgtgtttgttgaaataaaacataggttttctaaattttcttcacatggagaagtatatacatatacaaccagcatacagaacatagttctgatgtttcagatggtgtttacaccacaaaatgcttgtttagtagtggttaatgtgtctggtctagtcaaggcataggctttttttcttttctcttttagcttctgaggtctttgttgttgtattttctacttttacatttcagagaaggcagggggatatgttccacatcaaaattaccacttttaaaaggaccctcatactcaaaatatatttgactttcaaagt

SEQ ID NO: 358918 - DNA, 556 bp, Homo sapiens
ttgcaaaaattttctcccattctgtaggttcacttgcctgttcactctgataatagttctgctgtgcagaagctctttagtttaattagacaccatttgtctattttggcttttgttgccattgcttttggtgttttagcatgacaatatttttatgataaattcctagaaatagaattgtttggtcaatatgtttatgtatttttatgcattttacgtgttgatatgtaattactgtcacccacccaccaaggcggttatagtaatttatattcaagtagcctgtatctcaattgtgtctaatcataagagtgggttgaacatacaaaggagacagtgaataaccaagagtgtaagattctaagaaagaaggaggtttgaaggaaaagcaatamttttcaaaagaatgtagagagagatgaagtgaggtgatgttgtgtgactgttggtcagcgctaaaggatggttttagatttgtcccaaattttcattcaggtagcagttggctgcttgatgcaggcaaagagaaaaagctaagttcaacaatctttctttg

SEQ ID NO: 358919 - DNA, 556 bp, Homo sapiens
ttgcaaaaattttctcccattctgtaggttcacttgcctgttcactctgataatagttctgctgtgcagaagctctttagtttaattagacaccatttgtctattttggcttttgttgccattgcttttggtgttttagcatgacaatatttttatgataaattcctagaaatagaattgtttggtcaatatgtttatgtatttttatgcattttacgtgttgatatgtaattactgtcacccacccaccaaggcggttatagtaatttatattcaagtagcctgtatctcaattgtgtctaatcataagagtgggttgaacatacaaaggagacagtgaataaccaagagtgtaagattctaagaaagaaggaggtttgaaggaaaagcaataattttsaaaagaatgtagagagagatgaagtgaggtgatgttgtgtgactgttggtcagcgctaaaggatggttttagatttgtcccaaattttcattcaggtagcagttggctgcttgatgcaggcaaagagaaaaagctaagttcaacaatctttctttg

SEQ ID NO: 358920 - DNA, 556 bp, Homo sapiens
gatgataattccaataaaggcttaattttgaaggaaaaatacgagagtaatgcagataagaaaaattaggaaactttaggaaatttggtttcagattgtctctttaccaagaaagaatgagctcatgtcttctgcaaaacgtcaaagcagttgaatatagaaaatgttgggaatataagagagagagacaagaagacacacataaaagaattaccaarcatcaggaggatcaaactgacattaagtaatctgaatttgtggagtactttgtcagagaaagtttttgtttttttatagcaactgctgtcagtaatgaaataaccaacagtgaacatgggggttaattatgagtggggtaatcatgaaggtgaactaaaggaaggaagagattctggttttttcatagtcctttagtagttagggaggcaaataaagccagatttggggaacatcagggaaattacaagagatcagggactagagatcataattagaaagaagaacagaataggaaaaaaggatcagaaactgatgtcaaagatggaggttgcagcat

SEQ ID NO: 358921 - DNA, 556 bp, Homo sapiens
gatgataattccaataaaggcttaattttgaaggaaaaatacgagagtaatgcagataagaaaaattaggaaactttaggaaatttggtttcagattgtctctttaccaagaaagaatgagctcatgtcttctgcaaaacgtcaaagcagttgaatatagaaaatgttgggaatataagagagagagacaagaagacacacataaaagaattaccaagcatcaggaggatcaaactgacattaagtaatctgaatttgtkgagtactttgtcagagaaagtttttgtttttttatagcaactgctgtcagtaatgaaataaccaacagtgaacatgggggttaattatgagtggggtaatcatgaaggtgaactaaaggaaggaagagattctggttttttcatagtcctttagtagttagggaggcaaataaagccagatttggggaacatcagggaaattacaagagatcagggactagagatcataattagaaagaagaacagaataggaaaaaaggatcagaaactgatgtcaaagatggaggttgcagcat

SEQ ID NO: 358922 - DNA, 513 bp, Homo sapiens
  misc_feature (1)...(513): n = A,T,C or G
nngggagaagcctgtgatgaaaacacatgtaactgcatgatttacctctatccggctattatagggacacaaattacacaaacggtttcccctgctaatattaatgaagaagggctgattgaaaggtagccatggtgatgggtgtgtaaggaggggagaggtccacacttacgtgaacgggaaagtgtcagaagccatttggagttgtcagagaaaatcatggcagtggattcctttccattagtcatcaaccaaagcaaggagaatggctcgcaaaggtgcctagttaaatctcagtaaaagataaaataaagggagaggagacaatgaaagaaaagcttacctcagtcctcattgttgttttttcccctatgggctcatttttctttgaaaaaaaaatcacatttcatcttcaatgtrtaatgaccttctcagaatgaattcttaagaaaataagcaaaagcacaccttccaatgtgaataggtaaaagaaccaaaacatggcatgctgaa

SEQ ID NO: 358923 - DNA, 491 bp, Homo sapiens
agagcaggaacccatcaacttctttttctttgagaaattttttgaacrtaagtactaatattttggaggtagagtgtcatctgtgctcacagtagcccaaggggtcagaataacaatgatgatcatgacatttgcccacagaacctttctgcttgccttccctctctctccttgactctctttatccccttctttgtctccctatcacctatcagttacagcaatattatttaaaaaatagcaagtattgttgaacacatactatgtgctaacctatatatacacacacacacatatatatataggttacgtatatataatgactttcagttcaaaaggaaccacgtgtgcttttttgttggttgtttaagcaaaaaaactggaaatgaaataaaagttatgttcttgtagttctctagctgctgctaaaatgatctctagaggattttactcgtggggctgttaaaaaaaaaaaacgacaatgacaaatt

SEQ ID NO: 358924 - DNA, 610 bp, Homo sapiens
tagtttttggaatgagaaacaacatggcgtccagtgatattaaatgagttgcctgaagttaacactttctgatcaccccttacaatcaagcagaaaagctagtgctctgcatagtacagcgtctgggggagctgtcaggagacagggctggtgcatagcctcagggcacagrctgaaccaaaaaacagaaccaaaatctaagtcctagtcacgggcaagtgtgggatgcacagaaaacttccaagaaaggggcaaaggaaaaattcatattcaagttcaggtactggagaagtagaactgatctaatgaagcttagggaggcagtaccgatcagagagagaatgctttttattgggtagctggactaagaagacaatggaatagtggaaaactaactagtggaaaactaatttcgaaatccaaaggggttttcatgaatttcaccttttatttatcttttaaaatgtttattggcaattttatgtagcctactactctgtccctctagaaatattctctattttccagaatattcctgccttcaatacttatgcccatggtaccacttactcatgaaaagggctcatcatcctttaaccagtcaacatat

SEQ ID NO: 358925 - DNA, 610 bp, Homo sapiens
tagtttttggaatgagaaacaacatggcgtccagtgatattaaatgagttgcctgaagttaacactttctgatcaccccttacaatcaagcagaaaagctagtgctctgcatagtacagcgtctgggggagctgtcaggagacagggctggtgcatagcctcagggcacaggctgaaccaaaaaacagaaccaaaatctaagtcctagtcacgggcaagtgtgggatgcacagaaaacttccaagaaaggggcaaaggaaaaattcatattcaagttcaggtactggagaagtagaactgatctaatgaagcttagggaggcagtaccgatcagagagagaatgctttttattgggtagctggactaagaagacaatggaatagtggaaaactaactagtggaaaactaatttygaaatccaaaggggttttcatgaatttcaccttttatttatcttttaaaatgtttattggcaattttatgtagcctactactctgtccctctagaaatattctctattttccagaatattcctgccttcaatacttatgcccatggtaccacttactcatgaaaagggctcatcatcctttaaccagtcaacatat

SEQ ID NO: 358926 - DNA, 598 bp, Homo sapiens
aatggagtataatgagttatcattatattatttcccactaattgaatgctagggttccttaggggaagtacctaataaatgtggttaccctcaagaacaaagtaagctctcttaggtttggggtttgtaaaagtgggaagtaaggagcaataaaagaacaggattgagaaagagaggctatattttacaacatcctagctggccttttagggttcatgtaatagaactagaaggaaccatttaagaccaccttcttatccacttcctgcttctagacaggattatatccacaacatttccagtatgaggagtaattctgtttttaataacctctgaaggagatttaaacactttgatttgtaacctatgctgagttttgacaacattcataatcaaatcattctttgtagagctgacctaaatccctcttaacccagtaggatttcatttcctatctgtgctccttagaggagtaagctkatcaccttcttccatgtagtctttcagatacttggttaataaatcttgggtctggaaaatgcctgagagggctgggataagcactaagctcaatggatcttgatggaggctcatgctt

SEQ ID NO: 358927 - DNA, 598 bp, Homo sapiens
aatggagtataatgagttatcattatattatttcccactaattgaatgctagggttccttaggggaagtacctaataaatgtggttaccctcaagaacaaagtaagctctcttaggtttggggtttgtaaaagtgggaagtaaggagcaataaaagaacaggattgagaaagagaggctatattttacaacatcctagctggccttttagggttcatgtaatagaactagaaggaaccatttaagaccaccttcttatccacttcctgcttctagacaggattatatccacaacatttccagtatgaggagtaattctgtttttaataacctctgaaggagatttaaacactttgatttgtaacctatgctgagttttgacaacattcataatcaaatcattctttgtagagctgacctaaatccctcttaacccagtaggatttcatttcctatctgtgctccttagaggagtaagcttatcaccttcttccatrtagtctttcagatacttggttaataaatcttgggtctggaaaatgcctgagagggctgggataagcactaagctcaatggatcttgatggaggctcatgctt

SEQ ID NO: 358928 - DNA, 510 bp, Homo sapiens
agggcgacactgcaggatcatctcattggaggtgctactggcatcctggacagacaagttctttgttggtgggattatcctgctcattgcaggacatttaaaatgtcttccttcaccctcagactcccccgacaagatgctaatagcacaactcttcagacattacagcaaccagaaatacattctccatatccacatttccaggtgcctcatgagggggtgaaactgcccctgtttgagacccacrggtcaataaccccgagatgtacacttatcaattaggccagaaccaatcagtttgtatatgcggaagggaaaagtcaatacttttctttggtatatttcaaatagacttatactttctttcatattcctggtctgttataagccataaagaaataatttataataacaacaactgtcacttactattacccagcagattctgtttgccatttttatatattacacaaccatatttagataaaactaataaactcattttaaata

SEQ ID NO: 358929 - DNA, 598 bp, Homo sapiens
aactgtcacttactattacccagcagattctgtttgccatttttatatattacacaaccatatttagataaaactaataaactcattttaaatatgaagaaaatgaagatcacagagatcaactcccctgtttgaagtcccccagrttagaaccaatagaaccaaatctacatctttccacttccaaggcccttactcttttcagaacatcgatctgtaatatatgctgccatatacttgtagatatttttctaggtgggtcccatgcacaggaaggagacctggggagaagataacactacacatgtgataagcgaagtcacaaacatgaggaaggttactcagagacttgacagagtaaggagagaaggcagtcagcgtcacaaccctagaaaaatagcagagagactagagtcagggaaagaagaagaagaatttgcataaatgtgtttctcataaaaacctaaggcattaatttagaaacttcagaatcacaacctttatatgacaacctaattacaccaacatcttactgcaatggtgaagatgtgcgaaagaatagtctttagggcaaagacaaaaatgcaatgaccaagta

SEQ ID NO: 358930 - DNA, 597 bp, Homo sapiens
caacaacaacaacaacaacaacaacaacaacagcaacccataattctcaattttgtaggcatgaagagatccctggatctttttatagccttgaagtggagtcaatttggaactagttataaaaactaaagagtatgtgtttgggtctttgcagtaacccccagcaatactgaatgtaactactatatcacatttacttactgacagtcatctatagttctgaagttttttgacccagatttggacacttatgaaaataaacagtgtttcagtttaatctaattgaaaagagaaagcyttgtcctaatcttgtcttactttattcaaattttgaacatgtttactttctcttcttaagagctttttatatttcaggaatgccaaatcacttttttcctccatacttttctatgtatgtgttcaaaactttatatagtcatgccatttcaatttctttggtcttaaacttataattacattacataaactctagtaactgtccatggtcttttaaaaataggctctcttgggccttaacattgaatagttgcatataatctctttcctgatttggttaatttgtatttctaattctct

SEQ ID NO: 358931 - DNA, 588 bp, Homo sapiens
tatattgggcaggtgtaactcatcttcccagagttataaataacaraggtgaaacaaaagaatttcttattcacattgatttaataaatgcggtagacaaaatattaaaaattacacattatataacttgcccaatagaagcatttaaagtatagaatagatacatttaccattttttttttagctgcctgatttggaatgtttagttttgaagcattaatttgggaaacttggggcctaacatgtagctagtacctcatgcataataggcatgccataagtatttgcttttgctgttcattatttgaaattccttccacctcaaaaaaatattgttttcttctgatttagaatcagtttgcctggtgccaaaatagccaattaatgaaacactctgctgcatgatcaggtgtaaaaaaaaaaaaatgctttgctatttggatggatttttcatgtatttgcagttgaattagcactatgcaaaaaaaagcctctctcctgattaactttcaactacaaacttttattaatgtatgaaaggtacactgtatagcaaaaaattgttgactgctcaacatcagcagtgca

SEQ ID NO: 358932 - DNA, 588 bp, Homo sapiens
tatattgggcaggtgtaactcatcttcccagagttataaataacagaggtgaaacaaaagaatttcttattcacattgatttaataaatgmggtagacaaaatattaaaaattacacattatataacttgcccaatagaagcatttaaagtatagaatagatacatttaccattttttttttagctgcctgatttggaatgtttagttttgaagcattaatttgggaaacttggggcctaacatgtagctagtacctcatgcataataggcatgccataagtatttgcttttgctgttcattatttgaaattccttccacctcaaaaaaatattgttttcttctgatttagaatcagtttgcctggtgccaaaatagccaattaatgaaacactctgctgcatgatcaggtgtaaaaaaaaaaaaatgctttgctatttggatggatttttcatgtatttgcagttgaattagcactatgcaaaaaaaagcctctctcctgattaactttcaactacaaacttttattaatgtatgaaaggtacactgtatagcaaaaaattgttgactgctcaacatcagcagtgca

SEQ ID NO: 358933 - DNA, 588 bp, Homo sapiens
tatattgggcaggtgtaactcatcttcccagagttataaataacagaggtgaaacaaaagaatttcttattcacattgatttaataaatgcggtagacaaaatattaaaaattacacattatataacttgcccaatagaagcatttaaagtatagaatagatacatttaccattttttttttagctgcctgatttggaatgtttagttttgaagcattaatttgggaaacttggggcctaacatgtagctagtacctcatgcataataggcatgccataagtatttgcttttgctgttcattatttgaaattccttccacctcaaaraaatattgttttcttctgatttagaatcagtttgcctggtgccaaaatagccaattaatgaaacactctgctgcatgatcaggtgtaaaaaaaaaaaaatgctttgctatttggatggatttttcatgtatttgcagttgaattagcactatgcaaaaaaaagcctctctcctgattaactttcaactacaaacttttattaatgtatgaaaggtacactgtatagcaaaaaattgttgactgctcaacatcagcagtgca

SEQ ID NO: 358934 - DNA, 567 bp, Homo sapiens
ttgctgactgcagatcttgagacctctcaaccttcataattgtgtgagccaattccttataacaaatctctttatatatacatatgtgtgtgtgctgtgtgtgtgtgtgtctgtgtgtgtgaatatacacacacatatattctattggttctatttctctggagaatcttaaygaataacagtgactaaaagtatttaaaaatttataaatgtcattaacgaaatgagttactcaccaattataaagatgctgaaggaatgaaataagaaacatacaacatgtgaattttaacattctatgtaatcgatggtgatcagaaagtggtaaaacaaaggtattgataaaagatgaaaagaaacatttttgaagatgagtattgacaatagatgtttagtgatctaatacttcagaagaaggctaaacatttattccaaacttttataggctaagcatgataaaagccattgatgaaagtttgttgcaaccccctagatgtttccagaggttctggttttcttaggctctcataagtttgagacaatggtaagaggtcaggccttctaagg

SEQ ID NO: 358935 - DNA, 621 bp, Homo sapiens
atcgtatttcttcccttttcattttctttggcacagaaaaatttaatgtttaccttcaaagcatgaattgrtgtgtatgtgtatgggttctccccaggagacaatttaatataattaataacttcaaaatcatttgggtgatgtgaaatatgcatagttattacaagccagtgtgtggcagggggaggggtagatggctgttcagtaggaggcagaggcagataacatatgtgcaaatggaagttagaaaccaggcaaccttccgagagtgaaggctgccaagtcagtctcaaacaacttgcaccactcaggtgcattcatgcccaacccagagaggactgtgggcttggtgcagatgactggctgagctcctatcagagcctcttacttccagcttcaggcatttgtggaatagcaatgtaggtgtgctggctgtgaataaacttgggttttgagcagccacattaacaagctagaatcaacagggagaatttgccataataaagcactttcccagttgtcacattgtactttttaaagtggcaagtttttcccagtgtgctccaaatgtgatcagatttacaaacagctgattaaaaagataggattttagagctgaaa

SEQ ID NO: 358936 - DNA, 529 bp, Homo sapiens
cactctactcttccactgaacaataacactgacctgtaaagtcagaggtagtcatttggaacctctggctttggaaagactattgcaatgtgccatgtctgacttcaattatttcctgcactaggtctcaggttctcccctaatttggtatcttgagtccttccccagcaaggtactagggacgtgcccagaatggtcaggttatctatgcctaccaggagaataagacctcactctgctgcttgtcactcctrtctggggatgtcataggtcatcttctctctgaattctgcatttgccagagagaacctttcgtgtgaactttggaatggtgcctcttcctgtatccacaggacttgaggaatgaatcaaaccctttaagcagaatgcttatacacccaacattccatcctcactcttcaatgcctagttgaccttgtaaaatgtttgttcttggtctttttttcttaaaaaccaataaaattggatacctttttgtaagtatctccataagtttcaaaaatgtgat

SEQ ID NO: 358937 - DNA, 529 bp, Homo sapiens
cactctactcttccactgaacaataacactgacctgtaaagtcagaggtagtcatttggaacctctggctttggaaagactattgcaatgtgccatgtctgacttcaattatttcctgcactaggtctcaggttctcccctaatttggtatcttgagtccttccccagcaaggtactagggacgtgcccagaatggtcaggttatctatgcctaccaggagaataagacctcactctgctgcttgtcactcctgtctggggatgtcataggtcatcttctctctgaattctgcatttgccagagagaacctttcgtgtgaactttggaatggtgcctcttcctgtatccacaggacttgaggaatgaatcaaaccctttaagcagaatgcttatacacccaacattccatcctcactcttcaatgcctagttgaccttgtaaaatgtttgttcttggtctttttttcttaaaaaccaataaaattggatacctttttgtaartatctccataagtttcaaaaatgtgat

SEQ ID NO: 358938 - DNA, 574 bp, Homo sapiens
aggtggaattacaatcagtcagcttcacttactgaagttcttgtgaaagtttgatagaagagagcgttgatgtttaagaaaatatttttcacagaataaggcagctcttaattacctgcagtaatggagagcagtggtgtgtataatccaaaatggtggataatccaaaaactatttctatttgactttgaaatgtatttttgaacttgcatttgaatagaaatatggcaccaacaacttaaagagtcctaagctttctatctttcttatacacattggtctttagaaattgcatgtttgagttttaagaccttcctccactggactgcaggtcaactytaggttaaaaggaacagtgctactggcaatgtcaacaaaaatagctaagcaagacatttctaaaaagaaattaaaataaaatgtatcttagatgatgtagagtttggctacatattgcttgattatatacactcgtctatgaaccaagttcctacttacagtaaatcatttaagctggatgtgatgcacatcatttcaagctgatggaaagatgactagataaagtttgttctgt

SEQ ID NO: 358939 - DNA, 574 bp, Homo sapiens
aggtggaattacaatcagtcagcttcacttactgaagttcttgtgaaagtttgatagaagagagcgttgatgtttaagaaaatatttttcacagaataaggcagctcttaattacctgcagtaatggagagcagtggtgtgtataatccaaaatggtggataatccaaaaactatttctatttgactttgaaatgtatttttgaacttgcatttgaatagaaatatggcaccaacaacttaaagagtcctaagctttctatctttcttatacacattggtctttagaaattgcatgtttgagttttaagaccttcctccactggactgcaggtcaactttaggttaaaaggaacagtgctactggcaatgtcaacaaaaatagctaagcaagacatttctaaaaagaaattaaaataaaatgtatcttagatgatgtagagtttggctacatattgcttgattatatacactcgtctatgaaccaagttcctacttacagtaaatcatttaagctggatgtgatgcacawcatttcaagctgatggaaagatgactagataaagtttgttctgt

SEQ ID NO: 358940 - DNA, 532 bp, Homo sapiens
atttccaaacaaatttagacttgtcttatacatgatgagagctatttataaagattgtataacaaatagcttataaaagacacctctgtcaattgcatttataatgaaaaaatctaacacaagaaggcgttgattcccagtgcaagctaacgctgcartatctttgcttttttatcagctaaaccaaccggggaaagggagcatgacaaaactcactgcacttcattgaaacttgaattgagatcttaaaaagaagtagagtttcatcaaaatatacaaaagagtaaagggcagtaggtgcattttagttggtaaagtcagaatccagcaatcatatcgaatgacaagatctactctcagaaatgataggtaatgacattattatgtgaggatctttaataacttctactgttatctgtttaattgatgtacaaaaggcaaaaagatttaaagaattgagagaaaagcagaagaaaacatcaaaaattgaagaatttaaatcttccatccccaagacaaatggaaagcaaaa

SEQ ID NO: 358941 - DNA, 532 bp, Homo sapiens
atttccaaacaaatttagacttgtcttatacatgatgagagctatttataaagattgtataacaaatagcttataaaagacacctctgtcaattgcatttataatgaaaaaatctaacacaagaaggcgttgattcccagtgcaagctaacgctgcaatatctttgcttttttatcagctaaacyaaccggggaaagggagcatgacaaaactcactgcacttcattgaaacttgaattgagatcttaaaaagaagtagagtttcatcaaaatatacaaaagagtaaagggcagtaggtgcattttagttggtaaagtcagaatccagcaatcatatcgaatgacaagatctactctcagaaatgataggtaatgacattattatgtgaggatctttaataacttctactgttatctgtttaattgatgtacaaaaggcaaaaagatttaaagaattgagagaaaagcagaagaaaacatcaaaaattgaagaatttaaatcttccatccccaagacaaatggaaagcaaaa

SEQ ID NO: 358942 - DNA, 572 bp, Homo sapiens
aggatctttaataacttctactgttatctgtttaattgatgtacaaaaggcaaaaagatttaaagaattgagagaaaagcagaagaaaacatcaaaaatygaagaatttaaatcttccatccccaagacaaatggaaagcaaaaatcaatacattacaaaaaaactaaataattttagtgtgaatgttttgaaactatcagccatctgtagtaattgtacaggcaaagattttagcattgcaacaatctaagatgggaatttacatacgaaaatgaaaacattagacctttaatcagaagaattgaaatgaaaaccaaaattacttaatattttttccccaaaaaatatgcttttggaaatgtgagactatgtttgaaagcctgtgattttcttattttataaacgtgaaatgtgttcagtgatgactatgacatgacaatttggaaccttgaatttagtctcctattttactcctaatttgtaatgttaccttgtgcataatgtttattcctttggggtaaagtgctaattaaataattcattcattttaataagcatttcttgtgtactt

SEQ ID NO: 358943 - DNA, 572 bp, Homo sapiens
aggatctttaataacttctactgttatctgtttaattgatgtacaaaaggcaaaaagatttaaagaattgagagaaaagcagaagaaaacatcaaaaattgaagaatttaaatcttccatccccaagacaaatggaaagcaaaaatcaatacattacaaaaaaactaaataattttagtgtgaatgttttgaaactatcagccatctgtagtaattgtacaggcaaagattttagcatygcaacaatctaagatgggaatttacatacgaaaatgaaaacattagacctttaatcagaagaattgaaatgaaaaccaaaattacttaatattttttccccaaaaaatatgcttttggaaatgtgagactatgtttgaaagcctgtgattttcttattttataaacgtgaaatgtgttcagtgatgactatgacatgacaatttggaaccttgaatttagtctcctattttactcctaatttgtaatgttaccttgtgcataatgtttattcctttggggtaaagtgctaattaaataattcattcattttaataagcatttcttgtgtactt

SEQ ID NO: 358944 - DNA, 553 bp, Homo sapiens
ttgtacaggcaaagattttagcattgcaacaatctaagatgggaatttacatacgaaaatgaaaacattagacctttaatcagaagaattgaaatgaaaaccaaaattacttaatattttttccccaaaaaatatgcttttggaaatgtgagactatgtttgaaagcctgtgattttcttattttataaacgtgaaatgtgttcagtgatgactatgacatgacaatttggaaccttgaattyagtctcctattttactcctaatttgtaatgttaccttgtgcataatgtttattcctttggggtaaagtgctaattaaataattcattcattttaataagcatttcttgtgtacttatgtactaggccctatgcttggcataggagctataaaattgaataggccctggttatagttttggcatatttgataaagtcagtggggatgaaggcagaaagacaaacatgtggcgtaagatggcactttgactaaaactacatacaagtggagatggcactaacagaaagtgacaatttctacatgggatgaga

SEQ ID NO: 358945 - DNA, 560 bp, Homo sapiens
ttttgcagactcccaccttttataaactccggtcagagtggaaaattccaccagagactgaaccgtgaagaaacatcttgtgggacaggtcccaggcctaacccctaacccagtgaattccttccttatcagcagcccagcataccattcccaccccatttcacagcaacctcrgacctctcccgcctggacctacaactgccccagcctgcaagcgggaaaggaggctcctgcgctcgctggtgctccccctccgcaggtctttgtccaataaacctgtgttaccgtcgagccgccctccttgtctttttttctccatcttaacagtaacatggaagttataccacacaacacagcacacacacacacacacacacagagtgaaaaggtaaaacgttacaatttttaaaatcagaaacaggaaaggtatataattaagcaggatgcaacatctgggagaagaaaaatgccatatatcaatgaactgtgtacacttgggcaatgtaacattagtgggccagcttcaggaccttactatggtgaaaatctgctacaaattt

SEQ ID NO: 358946 - DNA, 548 bp, Homo sapiens
caacaaagattagtttaatgaatgaatacatgaagacatgaattaacacaataaagtatgattctttccatgtattattttggcattttatcctagatatatggtttcttttttctcctctattaatttgttgatatgactattctaaggctactctaattctcaagcagatttcactcttgtttttaagaaccactatgttctccatagaagccaaacagcatagttttcaagtaataatccaaatcaaccttctaatatatgtccagaaagattagaaaagaaattaaagccttggaccmcttctggctcctttctctaaccagcttatcagtgtacaatgtgcgatcaggcaaagcacgatgtatattaagttttcattgtttctccatcctttgcactgcctaccttctatttctgctctgcttcatttgatttatttcccatttctggagttcattatccattgttaaagagtaactatcctatatgtatatgttagctatttgtaacacattccatataatgattttacttcatgtatgaaa

SEQ ID NO: 358947 - DNA, 597 bp, Homo sapiens
  misc_feature (1)...(597): n = A,T,C or G
tgcagatctgtgatgacccgtgtaagcagattattcatgtggattttcccacccctacacagcctactccaagctggtagccttgngttngttgtttcttgtctttaaatacctgctgtgtcctttatactggaagactagttcttctgaagtgtagactcccttcaaataattgcatgtaaaaatactctaaaaagtatttttgactcactytgagtcttcttttgagttttgacatcaagcacattatgagttggcagaagtagctgacagcaggtgatcaagcagttggaggtatttcttttaagcagaaggctacaaatgaggaatattaaccagacagtcatttaagaatagactgtaactaggaagagttctgaggccagtagaccagctaagcagctacacactggtctagttgagtgagggatgacagagccctagaggagagagaatgggtagaaagaatcaaagtcgaaagacatggaatctgtaagatttgatagtggacttgatgtgaaggaggaaacggttaacattcaagcttcatatctggatgactagagaaatggtcagggcattaaaaggaacattaag

SEQ ID NO: 358948 - DNA, 597 bp, Homo sapiens
  misc_feature (1)...(597): n = A,T,C or G
tgcagatctgtgatgacccgtgtaagcagattattcatgtggattttcccacccctacacagcctactccaagctggtagccttgngttngttgtttcttgtctttaaatacctgctgtgtcctttatactggaagactagttcttctgaagtgtagactcccttcaaataattgcatgtaaaaatactctaaaaagtatttttgactcactctgagtcttcttttgagttttgacatcaagcacattatgagttggcagaagtagctgacagcaggtgatcaagcagttggaggtatttcttttaagcagaaggctacaaatgaggaatattaaccagacagtcatttaagaatagactgtaactaggaagagttctgaggccagtagaccagctaagcagctacacactggtctagttgagtgagggatgacagagccctagaggagagagaatgggtagaaagaatcaaagtcgaaagacatggaatctgtaagatttgatagtggacttgatgtgaargaggaaacggttaacattcaagcttcatatctggatgactagagaaatggtcagggcattaaaaggaacattaag

SEQ ID NO: 358949 - DNA, 636 bp, Homo sapiens
aagatttgatagtggacttgatgtgaaggaggaaacggttaacattcaagcttcatatctggatgactagagaaatggtcagggcattaaaaggaacattaagagctgctgacttctatgggcaatgctgagttagggacctgaagagttttgtatctgggtcatttgtgccaagctatctaataggcagttaaaaatgcagaacttggaaactatctgtgtatcatcagtatggtttaaaggtatctccataaaggtgacacccaaactgataaaaatagacaagattaatgaaaaataagaatagcaagaaaagaagtgaggactaggatttacatgactttgagcataatctggatcagattacttacctgtgtctcattgtctactcttataaaaaatgtgatgataaacttcttaaatacaaatgaaataaggtatgcagaaatattgcttcacaaatgccattgttgttgctattaagggkagaaggaagaaggtctagtgagtgataccaagaagtagaaactgtaatagaacgacgggagtggacactgtcagagaggccaaaggaaacgagtctcaagaaacaagattctcagaacccttgggtgttaagatttgcaagtcactgat

SEQ ID NO: 358950 - DNA, 636 bp, Homo sapiens
aagatttgatagtggacttgatgtgaaggaggaaacggttaacattcaagcttcatatctggatgactagagaaatggtcagggcattaaaaggaacattaagagctgctgacttctatgggcaatgctgagttagggacctgaagagttttgtatctgggtcatttgtgccaagctatctaataggcagttaaaaatgcagaacttggaaactatctgtgtatcatcagtatggtttaaaggtatctccataaaggtgacacccaaactgataaaaatagacaagattaatgaaaaataagaatagcaagaaaagaagtgaggactaggatttacatgactttgagcataatctggatcagattacttacctgtgtctcattgtctactcttataaaaaatgtgatgataaacttcttaaatacaaatgaaataaggtatgcagaaatattgcttcacaaatgccattgttgttgctattaaggggagaaggaagaaggtctagtgagtgatacmaagaagtagaaactgtaatagaacgacgggagtggacactgtcagagaggccaaaggaaacgagtctcaagaaacaagattctcagaacccttgggtgttaagatttgcaagtcactgat

SEQ ID NO: 358951 - DNA, 636 bp, Homo sapiens
aagatttgatagtggacttgatgtgaaggaggaaacggttaacattcaagcttcatatctggatgactagagaaatggtcagggcattaaaaggaacattaagagctgctgacttctatgggcaatgctgagttagggacctgaagagttttgtatctgggtcatttgtgccaagctatctaataggcagttaaaaatgcagaacttggaaactatctgtgtatcatcagtatggtttaaaggtatctccataaaggtgacacccaaactgataaaaatagacaagattaatgaaaaataagaatagcaagaaaagaagtgaggactaggatttacatgactttgagcataatctggatcagattacttacctgtgtctcattgtctactcttataaaaaatgtgatgataaacttcttaaatacaaatgaaataaggtatgcagaaatattgcttcacaaatgccattgttgttgctattaaggggagaaggaagaaggtctagtgagtgataccaagaagtagaaactgtaatagaaygacgggagtggacactgtcagagaggccaaaggaaacgagtctcaagaaacaagattctcagaacccttgggtgttaagatttgcaagtcactgat

SEQ ID NO: 358952 - DNA, 519 bp, Homo sapiens
tccttgcagcatttgttgtctgtgttctggattttggccattctaatagacatgtagtagtatctcattgttattttaacttgctttgccctgatgacatatgatatggatcatcatttgatattcttatttgccatctcctgtatcttcttgaaraggtatctgttaatgtgtttggcctatttcctttttttttttttttatactgggttttatgttttcttattgttgagttttaagagttctttgtatattttaaataacagttatttatcatatacactttttgccaatattttctctcagtctgtggcttgtcttttcatcctcttgacagtgttttttgcatatcataaattttaaacttatttttttatttcattgaagtataattggcaaataaaattatatatacttaagatgtaaaacgtgattatttttaattgtatatatttaggtgtataatgttttgatatacattgtgaaattatagcagtcaaatatgttcatctccttgct

SEQ ID NO: 358953 - DNA, 519 bp, Homo sapiens
tccttgcagcatttgttgtctgtgttctggattttggccattctaatagacatgtagtagtatctcattgttattttaacttgctttgccctgatgacatatgatatggatcatcatttgatattcttatttgccatctcctgtatcttcttgaaaaggtatctgttaatgtgtttggcctatttcctttttttttttttttatactgggttttatgttttcttattgttgagttttaagagttctttgtatawtttaaataacagttatttatcatatacactttttgccaatattttctctcagtctgtggcttgtcttttcatcctcttgacagtgttttttgcatatcataaattttaaacttatttttttatttcattgaagtataattggcaaataaaattatatatacttaagatgtaaaacgtgattatttttaattgtatatatttaggtgtataatgttttgatatacattgtgaaattatagcagtcaaatatgttcatctccttgct

SEQ ID NO: 358954 - DNA, 552 bp, Homo sapiens
tagacataaatcccttatcaagcttacatttataatgaaattagagaatagtgacataagtaagtagaacataagttggttagatgttaagtgctaaggagaaaaatgaagcaggaaacaggcacccggaagtataagaaatgtatttctctgtttcaatatattgttgctaataccaattgttgttttacatgaaaacatttaaattcatataaatggcattgtgctatcaatcttgtttagtttttaattctttctacttagagctattttcttaatatctattcatgtaattatgagtgtggataatctgttgcttctgaatgttgtgtaatacccccatacatccccctcatatyttatgtatccatacttccaataatggaaaacaagattacctccatttccttgctctcagagcaaagccaagccatggctccatggactttgtatgcatgtgagaggaggtggcagtggaagagaaataagactggcttcgtattttcaaaacatacctctagatgcaatgtgaaaactggagtggagggaatc

SEQ ID NO: 358955 - DNA, 503 bp, Homo sapiens
ggggcgtggggccatataattctctggcatacaaaggattttatggagactgtgacgggaggtactcgagcagaaaagtagtgattagattcggacactagagagattactccagcatcaagagagaaagacaggtaaggacactactcgttggcgacctctgaaatgacgactgtatgaactatggcagggacatagggattggataagaggggcacatgaaggaggtgttcagaaagtagacttgaaaggacctcatgattaattgaatgttctggggaatcaaggatgactcccargttcctggcttgggcagttgtgtagatggctgtgatagttactgagcttgggtgtacaggagggacagaagttctgagaaggtcatgtgctcagttgaattttagtttgtttttttaaaaggtcaatccagatggaggatgtatatgggttcagacctaagaactaggtctgagttagggatgtagattttagactgggtcagt

SEQ ID NO: 358956 - DNA, 599 bp, Homo sapiens
aaaaaacatggggatacatttgataatttcaataaatgctgcatcaccagataaacattaaacttggagtacttctacatgaaataatataaatgtaataataatattagagatttatttctgtaaccagctaaggagatgaagtttgaaatattgagaaaggaactgtgagtagcaatagcatcctagacacaccgtaatttaaatctcctttcccaaagacagtttctccctgaggctgggaaaaaatgaagatggtggcatggatagcaatcaagtcactgtagccttatgacccctttcaaaataaagcaaagtggaatggggaagaaggagattcaggggagaaaatatttgtggtctttgactatatgagtctgaaataacttaatctggctacctaaacatatgtctagttcctcccttgaatattcaataggtacttgaaacctcagtgtctaaagtggatgccaccataaggggtcaactgaatatatagstgtggtgttgctccagatgttagtgatacctgattttctgccaggagaaaccagcagaactttaagaattcacctagctacaaaaagcacagtttcttt

SEQ ID NO: 358957 - DNA, 629 bp, Homo sapiens
gagtgtttgctatacagcaatactgtggcaaatagatggtagaaacaagggccaaattgtctctttcttcctttaattttaaaattgacatataataattgtacatagtttcaatacttatatagttatcagttcagggtaatgagcatatccatcatctaaaacatttatccttactttgtgttgggaacattcattattctccttctagctatttgaaactgtatattattgttaactatagtcaccctagatccctagaacttactcctcctatctagctgtagttgtgtattctttaacaaatgtattcctcttcccccttcccctacccttcatctctgcttctcttcctccattactccctccctccctctccagcttgtatattgcccaatatcattgccagtgctttgtctgcctatccttacagacatagtgtgcatcatccactgcagkttttgagtctcttggttcaaattcttgacatagaaaagctctgattagtttatggaaagccagtgaattggtttactttgggtcaggtttccacctggtctgaccaactgtggttaaggtggtggtagtggttaaaggagaacagcgttatatggtttgcaagagtttag

SEQ ID NO: 358958 - DNA, 647 bp, Homo sapiens
tttttgtataaggtgaagagagatgaggatccagtttcattcttttacatgtggctagccaattatcccagcaccgtttgttgaaaagggtgtcctttctccacttcatgtttttgtttgctttgttgaagatcagttggctataagtatttgggtttatttctggattctctgtgctgttccattggcctatgtgcctatttttataccagtgccatgctgttttggtgactatggccttatagtatagtttgaaatcaggtagtgtgatgcttccagacttgttctttttgcttagtcttgctttggctatgtgggctcttttttgttccatatgaattttagaattgctttttctaattctgtgaaaaacaatggtggtattttgatggagagtgcattgaatttatagattgcttttggcagtakagtcatttttacagtattgattctacctatccatgagcatgggatgtgtttccacttgtctgtgtcatctatgatttctttcagcagtgttttgtggttttccttgtagaagtctttcacgtccttggttaggtatattctcaattattattatttttttgtgcagctattataaaaagagttgagttcttgatttgattctcagcttggtcgctgtt

SEQ ID NO: 358959 - DNA, 610 bp, Homo sapiens
ttactggtacaggctttctgtatatagtgattaactgacatcagtacaacagctgaagtagccaaagttccccagaaaatggacaccggcttayacagtttgtaaactagtggctgtaaagtttgttaaaaggtcttctctgctgggagtctccaagggagtatactaaagcagttgctttggtattcatttcaatttcacatagattcttactaacttggaatttacaaagggagatgagcaaaggatatgaaatcagcattggttcccttggtcaatctaccaacctttgccccctcaaagctccccacttctagttaaaagcatcatgtccctcaaccaaaggctaccagggttatacctgtgtttgaataagttaggtttaatattcattgtgatgaaggtaaacacaaactgtggggaaccatggggcacctcagtaggagattgtgagaaaaaaacttattacaggatttgagctttggttaggtgatatgggggagtttcaaagagacagggatttgctccagattgggtgctgtcaggaagtggtgacaattttgagtgggtgtctcaataaatcttatctagagcagggtcacactaaagt

SEQ ID NO: 358960 - DNA, 610 bp, Homo sapiens
ttactggtacaggctttctgtatatagtgattaactgacatcagtacaacagctgaagtagccaaagttccccagaaaatggacaccggcttacacagtttgtamactagtggctgtaaagtttgttaaaaggtcttctctgctgggagtctccaagggagtatactaaagcagttgctttggtattcatttcaatttcacatagattcttactaacttggaatttacaaagggagatgagcaaaggatatgaaatcagcattggttcccttggtcaatctaccaacctttgccccctcaaagctccccacttctagttaaaagcatcatgtccctcaaccaaaggctaccagggttatacctgtgtttgaataagttaggtttaatattcattgtgatgaaggtaaacacaaactgtggggaaccatggggcacctcagtaggagattgtgagaaaaaaacttattacaggatttgagctttggttaggtgatatgggggagtttcaaagagacagggatttgctccagattgggtgctgtcaggaagtggtgacaattttgagtgggtgtctcaataaatcttatctagagcagggtcacactaaagt

SEQ ID NO: 358961 - DNA, 547 bp, Homo sapiens
aggacaaaaaccatatgattgtttcaattgatgctgaataagcatttgataaaattcaacattgctttatgataaaaattctctgactgggtatagaaggaacatacctcaacataataaaagccatatatgacaaacccatagctagcatcatcctgaatggggaaaaatggaaagcctttgctctaagatctggaacatgacaagaatgcccactgtcactactgtttttcaacgtagtactggaagacctagctagagcaatyaaacaagagaaagatataaagggcatccaaattggaaaggaagaagtcaaattatccttgtttgttgatgatataatcttatatttggaaaaacctagagactccaccaataaactgttagaactgataaacaaattcagtaaaattgcaggatactaaatcaacacacaaaaatcagtagcatttctatatgccaacaatgaacgctgtgaaaaagaaataaaaatagtaatctcatttacaatagctcaaaataaaatacctaggaattaaccaaagaa

SEQ ID NO: 358962 - DNA, 547 bp, Homo sapiens
aggacaaaaaccatatgattgtttcaattgatgctgaataagcatttgataaaattcaacattgctttatgataaaaattctctgactgggtatagaaggaacatacctcaacataataaaagccatatatgacaaacccatagctagcatcatcctgaatggggaaaaatggaaagcctttgctctaagatctggaacatgacaagaatgcccactgtcactactgtttttcaacgtagtactggaagacctagctagagcaattaaacaagagaaagatataaagggcatccaaattggaaaggaagaagtcaaattatccttgtttgttgatgatataatcttatatttggaaaaacctagagactccaccaataaactgttagaactgataaacaaattcagtaaaattgcaggatacyaaatcaacacacaaaaatcagtagcatttctatatgccaacaatgaacgctgtgaaaaagaaataaaaatagtaatctcatttacaatagctcaaaataaaatacctaggaattaaccaaagaa

SEQ ID NO: 358963 - DNA, 623 bp, Homo sapiens
aattgctttcaatattatcaactttctggactctgggcctgcatggatctccttaactcttctttcccatcttagttgggctaatacgtattgacctctgacctgcttagactaatagtagctgcctgacactgcttgctgccttttgttaactaaatttgcctattagcaaattaaatttgatttttcttaaccagttcttcctccaaaatacaacagtttgctgatcctactttgtctaagcaaaccacaaatcctggtttctcctgtccatcctctgtcctgctgycactagtccatattgtaaaaattaccctctttcactctaaggaaattcactgcctctatcaggaaatcagtgcctttgggcacagaccccttcaccccttctcacaaccttacccaaacctgttctgcctaggctttgtatgaaacaaacatgttatttctaattctctacatgtaccatcagctttacgtgttccctagttagtgccctcagtgctctctctccacctgacaaactaattcatgctgagctattgatcactgggaatatcttgatgatttacactatacaaaaaagtatccccactttatttaccaaagataaatatgccagt

SEQ ID NO: 358964 - DNA, 579 bp, Homo sapiens
tggtacttgaactcaggcaatcaggtctgcagtatgctcttagccactctcttatacgtctctcatggcaaaaagtgtaaatattaaaacataattcaaaaaatttttattgagcacctgcacagttctaccactgtgatgaacacggagagtataaggagaagcacagaaytgaagaggtttgctagggatttccagatatcttggagattaaagggtcttcaagatgatcttaatacaagcttctaaaaaggtcatgggaaaactggaaaaagatatttattacatcatgaagttaatcctccttgatctctgtatcagcagcaaaacttcatcttgaagtctatcaagatggcacaagatgaatgtagccacaaaaagaatctctgggaaggttctaaaatccttaagatccccatgaaggttctcatgtttgagaagcacttcagaccattgtattcaagcaacagttatttccattttatttttatcaactttgtcccacttgaaatcattcaacccataagtatgtatgagcatctaacatggtatcagacattatgagttatacaataacgc

SEQ ID NO: 358965 - DNA, 580 bp, Homo sapiens
gagagaagcaaaaatcttaatttgctttcctttgatgaaaaaaaaatctttgaaatttattcggggcaggagccaggcaatggggaaataatttatactgtaatcctcaaaggagtacaacctgaattgaattaatgttcttcaggatatgggattctcttcttatgaataaaaccttttgagatcaggtaggaagttgtaaccatttttctcttttattactttttccaatttgttgctttgaatatttggctttatactggcagtgagygatgaccaacaaagcagcctgactgtgtaagaccaccttactgagtagattcagttcagcagatctttttccagagtgaacagctgaaggaaccagatcatacctattacaccatttggttcaatcatgtaataatttccccttggccatctcagagatttatagaccccccccttatgcaagtgttacctgtgtctatggtcccttgttaagtagaagctgaaaattatagtttattctaaatgcgcattcttgtgaagctatggtattagtcatttagttcagccaaaatgatctaataattcaaaa

SEQ ID NO: 358966 - DNA, 621 bp, Homo sapiens
tgactttaaattataatatgcaagcagccttcttagtcataggtcagaaaacaccgtattaatccaattagaggggtctctggctgaatgcaattacaaaagtactcataatttattttttaaaaaggaagggataaaattctagaaatgatagactagtgagcttcacatcaatccttaatggaatagtctagacaattcataaagaaataggttgcaagtactaagaaacggcagtgttagtcaccaggaaccagtatggcttcaccaaagattacgacaaattaatcccatttcattaggtcaataacaaataaacccatatcatagtgattgcttgtggactgtagcactagwcttgtgaatttgaacccgtagctctatcacttactagttgtgagagctcaggcaattgagctcatctattagtgtctcagttgtgtgatctataaaatcaaaacccatgtagtacctatttcttatgaatcttgtgaaggtaaaatgtgtttatacacgcaaaatatttggaacaatgtttaaggactttagagcaaaatctagtaattgctcaataaacgtttgctgttatcatttgagtgcctggaatgtgagctgtatggt

SEQ ID NO: 358967 - DNA, 600 bp, Homo sapiens
tgaataactccagtccaaacatactaattagtgaatttatggcaatcagaatggaagtttctaatcatattctcttcatcattttamtcaattaattgggtaaaaatgtagataaaatgcctatcaactctgtagatcttaaaaacttgtttccttctagaaaaatggggtgaagtaataattgggcatttaataggtgtaaatttcaagttctagctgtcaggttttaaatcaacaaatgcagggtgtggacaatctggtttaatagaagtttttatctataagacttagagggttataacctaggacttatatataaaaaggttatatggccaatatgaatcaacactgatcaaccatgctaatgaagccttgggctatatacataaaaatgtattaacagaacaggagaagtgcgttggaccagacagtttcctttttgtaacattcgttgctgatgttattcttttaagaagggttttgaccactggacatttttttgaaggcaggaactgtgttttattcatggttatatcaccagagcgtagcatagtgcctaaaatgtgattggtgtccatgaaatgtttgataaatttaaaa

SEQ ID NO: 358968 - DNA, 600 bp, Homo sapiens
tgaataactccagtccaaacatactaattagtgaatttatggcaatcagaatggaagtttctaatcatattctcttcatcattttaatcaattaattgggtaaaaatgtagataaaatgcctatcaactctgtagatcttaaaaacttgtttccttctagaaaaatggggtgaagtaataattgggcatttaataggtgtaaatttcaagttctagctgtcaggttttaaatcaacaaatgcagggtgtggacaatctggtttaatagaagtttttatctataagacttagaggkttataacctaggacttatatataaaaaggttatatggccaatatgaatcaacactgatcaaccatgctaatgaagccttgggctatatacataaaaatgtattaacagaacaggagaagtgcgttggaccagacagtttcctttttgtaacattcgttgctgatgttattcttttaagaagggttttgaccactggacatttttttgaaggcaggaactgtgttttattcatggttatatcaccagagcgtagcatagtgcctaaaatgtgattggtgtccatgaaatgtttgataaatttaaaa

SEQ ID NO: 358969 - DNA, 472 bp, Homo sapiens
actggatgagtataaggatggtctggtctagaatttacttgttcttttcgaaaatgaatgctgaaaatcttcctaatatgtacacatttccatcttagaaaggtgaagtctggttaccgacagtgaccttacctttggcaatttgcaaggtccttatgacattctatgtccctagtatacttgttggtkaagaactcaaaatccagagtaaaatgatctaggtttgaatcttggctcctccactttatgatgtgaccctgaaaaatttacacaatctctctgagactcagtttccccatctgtgaaataaagctggtaatacgtacctcactgtgctgctgtgatgatgaaatgccccaatatttgtcaagtgtctggcagagtgtctcccatatagtaagcactcattacatattgtatttaataatagtaagtgttcaataaaatgatagctgcaagcaacattatttat

SEQ ID NO: 358970 - DNA, 561 bp, Homo sapiens
tactgtagtcttctcagtctaagcttgtatgcacctgtctttttgggaagacttttcagatatttgaaaggacttgtgtgtcatgatctaagctgtgtctgctttagtgggcaccccaagcccagtaatgctgtggttcttgcagatttgtagaggtattgccttgatggtcttggacaatatctggaagaattctctggatcattaggcagagactcttgttctcctcccttactttctccaatacaaatgggggtctttctctctgaactgagccccctrgatctgagggtagaatgattcaagcacccctgtggctaccaccactagtatggctgcatcagacctgaagccagcacagaactgggtttcccctagggcttgacttaaccactccctggctatggcctatgtttggtcaaggtttgggggttctaccattagtaggtggccaagctagccaggactgtgtccttcccttcagggtggtgagttcccctaggcccttggcatgtccagaggtgccatctaggagccaggaactagaataaaaaacctcag

SEQ ID NO: 358971 - DNA, 561 bp, Homo sapiens
tgatgaagtttgcaaaaagttacatttggaccactaggattgttgatttccctctggctatggttggtttaaatgttcccaccatgggtgggtgtcagttgagtttggtctggttttcctttgtgctctaatgggacagcactgagttcaatgcctcacagttgctggctctcccttgcccagcacccagagatgctctcaccactactycctggctgctgggagttcagggggaggggtggcattgatggttcatgactatttttcctacctcttcagtcctgtagatttttaaatatggaatttagtcttacgctgattaacagtagtcttctccatatcattcaaattagtgaggtaagattgtgccagtccaacctcatatgatggccttccttgttaccaagagaggtcccgttggggctttatttggcacccaactttctagtatcttgacagctttggcactcagatgagacctgatgtcgcatgaattgtatcaaggctacagatttattctgcaaagtcatgctataagtccaaaaggttaatattatgcct

SEQ ID NO: 358972 - DNA, 561 bp, Homo sapiens
tgatgaagtttgcaaaaagttacatttggaccactaggattgttgatttccctctggctatggttggtttaaatgttcccaccatgggtgggtgtcagttgagtttggtctggttttcctttgtgctctaatgggacagcactgagttcaatgcctcacagttgctggctctcccttgcccagcacccagagatgctctcaccactactccctggctgctgggagttcagggggaggggtggcattgatggttcatgactatttttcctacctcttcagtcctgtagatttttaaatatggaatttagtcttacgctgattaacagtagtcttctccatatcattcaaattagtgaggtaagattgtgccagtccaacctcatatgatggccttccttgttaccaagagaggtcccgttggggctttatttggcacccaactttctagtatcttgacagctttggcactcagatgagacctgatgtcgcatgaattgtatcaaggctacagatttattctgcaaagtcatgctmtaagtccaaaaggttaatattatgcct

SEQ ID NO: 358973 - DNA, 576 bp, Homo sapiens
ttttgtgatctttgttttctagtgtgactttcctgacactgggaattcatccctcagttggacagacaggatggggtgagggacaggggagaggtgcagagaggaagagcaaatacttttaatagcttctcagttgcggcaaatcacatttcactcacaaacagtttctgcagtcaccattcctctatgtctagcttacatgtcaatggcaactcaaagtctcacaattttcaaatcacttaggaatgaatttcctaagtggcggcataggtgattgaaacacaaattccctttcatgatcaacatctcaaattacaaataatgcaygaggcttaaatattccctctgtctcaatctttgcatttttattttctgaaaatgctagcaaaggttttccaaaatttctttgcttaagtattcatggttggtctagggggctgaaggacacatttgtaagacagaggtctctctaacataaacagaaggttttgggcccagctggtgtttgacagtggggatatttatcttcagttagccttttgttgagggactttcttccttcacaaaagtcccctt

SEQ ID NO: 358974 - DNA, 618 bp, Homo sapiens
agtttgaatatttgtccccgcccaaatctcatgttgaattgtaatcctcattgctggaggtggggcctggtgagaggtttttggatcatggtggattactaatagcttggtgctgtctttgcgatagtgagtgggttctccagtgatctggtcattttaaagtatgtggcaactcccatccccaccctgacttgtccctactttcaccatgtgacatgcctgttcctctttcatcttcagccatgattgtaagcttcgtgagtcatccccagaagccgakcagatgccagcaccataaagcctatggaaccctaagccagttaaacctactttaagttacctagtctcaggtttttctttatagaaatgcaagaatgggcctaatacagagagcctgtagggaatttagttagtttgttttatttacttttggcttttcaaattccacttaaatccagtcctccttaggattttggggatggtctctttcctgacactccagtgtctgacatttcaagagtactttgaaacctgggccaaaaaagaagccagagttagaaaagtgtcatcattttttcagcaaaagtgctttctttgctttttggtaaagttttagaa

SEQ ID NO: 358975 - DNA, 585 bp, Homo sapiens
tttatttacttttggcttttcaaattccacttaaatccagtcctccttaggattttggggatggtctctttcctgacactccagtgtctgacatttcaagagtactttgaaacctgggccaaaaaagaagccagagttagaaaagtgtcatcattttttcagcaaaagtgctttctttgctttttggtaaagttttagaagcccctctagtcagtaatctaacattaaaatgcaggggggagtctcaactagatagttattggctttcactatttcaactgcatcttagtaatccaacaaagtcagtctcattgtctgacatttctctaatagcaacactcctttgggctgaagcaggagaagaatttatgaggtaatatattagctggatactgactactaggtcattgccatcggaaagtgtgttaggggtaaggggactggccctatcagccaggctttatgtcactatyttatgttacttttattgtttttatttgtaattgacacataataattgtacatatttataggatacaatgtgatgtttcaatacatgtgtacattgcgtaatgatcaaatctg

SEQ ID NO: 358976 - DNA, 349 bp, Homo sapiens
aaccccatattggggctaaagttatcaaattttcagcatctgctgaggaatctgagcagaaatcatcttacctacattagcttttcacctttatctttgcatcctcaakgcatacccctgcctgagccacagaattgcacggctactaaaaatatgtgctatcatctcaggaaattctttgtggtttttctcctgcctcattggtttcttctcctcagccttttttgctaggcccttatcttcttcacaatcttcaaatgaagtgtccccacagctcagttctaagacttctgcctttttctatatactctctttagattatctcatctggtctcatggcattatatgc

SEQ ID NO: 358977 - DNA, 349 bp, Homo sapiens
aaccccatattggggctaaagttatcaaattttcagcatctgctgaggaatctgagcagaaatcatcttacctacattagcttttcacctttatctttgcatcctcaaggcatacccctgcctgagccacagaattgcacggctactaaaaatatgtgctatcatctcaggaaattctttgtggtttttctcctgcctcattggtttcttctcctcrgccttttttgctaggcccttatcttcttcacaatcttcaaatgaagtgtccccacagctcagttctaagacttctgcctttttctatatactctctttagattatctcatctggtctcatggcattatatgc

SEQ ID NO: 358978 - DNA, 587 bp, Homo sapiens
agggggaccatattcagaaaggctacgaaacgtgactagggtcatacagctggtacttgttagagccaagatttgaatccatccctatcygacttccaaagcctgtgttcttgtcaccttccagcccacctggcctctacacatgtgctatgaaatcctcctggtgcctgcaaagaaatttatggtgaaacctccaaattgaagcttatttttttagtttatatacctcccactcaggataaatagtcatcaaaatctccaaagtaaaaaagaaagagtgagggaaaaaatggctaaaatcttctgatcacaagcccatctgggatctttcagatgctgaaaattccagaaggctggatcgtcaagtttcagcttagaagttgcaatcagaaatctttattgaaataagtttatttccccccgaggactctgctggtataacagatgagagatgagagtgcctactagggaagaaagtggcgagaaagcgagtgatgctactctatccgggaatctagaacaaacccacagaggatccacagggatggagtgtgtgtatggggaggtgggccagatgaaacaagaaa

SEQ ID NO: 358979 - DNA, 587 bp, Homo sapiens
agggggaccatattcagaaaggctacgaaacgtgactagggtcatacagctggtacttgttagagccaagatttgaatccatccctatccgacttccaaagcctgtgttcttgtcaccttccagcccacctggcctctacacatgtgctatgaaatcctcctggtgcctgcaaagaaatttatggtgaaacctccaaattgaagcttatttttttagtttatatacctcccactcaggataaatagtcatcaaaatctccaaagtaaaaaagaaagagtgagggaaaaaatggctaaaatcttctgatcacaagcccatctgggatctttcagatgctgaaaattccagaaggctggatcgtcaagtttcagcttagaagttgcaatcagaaatctttattgaaataagtttatttccccccgaggactctgctggtataacagatgagagatgagagtgcctactagggaagaaartggcgagaaagcgagtgatgctactctatccgggaatctagaacaaacccacagaggatccacagggatggagtgtgtgtatggggaggtgggccagatgaaacaagaaa

SEQ ID NO: 358980 - DNA, 582 bp, Homo sapiens
atatcttgttttcttttttatatcacttgttactatctgatgttattatttattwgattgctttttagtgaactgtctctctccagtagaatgtaagctccatgagggcagattctggactgtctggctcaccgctgcacccacggaacctaggataaggaatacctcttgatgaataaataaccctctggataggtcagtagctactttcatatatatatgaaggcattttttttgatgaggcactttttcttaatatatgaataagcaaaaaaatatagtatctatattcagtaaaaaattattttgaaaaaactaaaatgatataaggttggggctgtcctggagaatctaaggtatctagtcatcatatatatgaaattcaacttttccattgtttgataaatgttcctgatgactcatgtgtctttagcactagtttatctgtcaaatggtcactggtaagagaaagagcgctcgctgtgaagggatgggattcctgaatggggatctggatacacagctgggtttgtgtgttcatgcatgtgcacaagcacctgcagctcagaatctacaaccaac

SEQ ID NO: 358981 - DNA, 559 bp, Homo sapiens
gctgaatataaagacttccctgtaatccatttccatatatatatttttttattttttattttttattttttttgagacagggttttgctcttgtcgcccaggctagagtgcagtggcatgaatacgcctcactgcagcctcaacctcccagagtatgatgatcctcccaactcaatctcccaagttgctgggactacaggcacatgctgccatgcccagctaactttttatgttttgtagagatgaggtcttgacatgttgcctaagttgatctcaaactcctgggcttaagcaattctcctrcctcggactcccaaagtgtgagattatgacacaggtttgtttctcagtcactttgaaaactggagacctctggctggcaaagccctgcctgggcctcactcagccatgctgtctgctgcaggagatgccctgcccactcagcccacccaggccacgtctggcttgcacatcagatcctgaagtcttgtcctgtgcccaagaagaatgaggatccggtgacaaatgaagagtgagcaaggtcaggagttttattgag

SEQ ID NO: 358982 - DNA, 583 bp, Homo sapiens
accagtcataacattaaactcacagcaaattaacattaccgagagcaataaagataacattttcaagtcagaaaaaaagtgacattcaaaatacataagaatttggaaagaaaaaataagaacttttcatgtatggagaagataaatttgtataaaaataaattayttttctttataaaacattctactttgcccccaaaattttatacttacatatcagaaatattaataatcaatttacttgttattctcaatatacccatttcttgcagcaaattttcactcagagaaaatgtgttgtttatagaaattaaccaacttactaaatattttcctgcacatagataaaatttatatgcttttgccccctatttaagttttcttaaggcattatttttaatagatgtttatattttacatagaataacctccagcttttaatatcatgagagggagcaaaatgaagtttaaaaacttagctctttggccagagtgtaacagcctgatgggctcgttttccccaatgtccagaaaagtcaatgcactgagatcatcaggttttgttggaaagaaactgtttaaa

SEQ ID NO: 358983 - DNA, 583 bp, Homo sapiens
accagtcataacattaaactcacagcaaattaacattaccgagagcaataaagataacattttcaagtcagaaaaaaagtgacattcaaaatacataagaatttggaaagaaaaaataagaacttttcatgtatggagaagataaatttgtataaaaataaattatttttctttataaaacattctactttgcccccaaaattttatacttacatatcagaaatattaataawcaatttacttgttattctcaatatacccatttcttgcagcaaattttcactcagagaaaatgtgttgtttatagaaattaaccaacttactaaatattttcctgcacatagataaaatttatatgcttttgccccctatttaagttttcttaaggcattatttttaatagatgtttatattttacatagaataacctccagcttttaatatcatgagagggagcaaaatgaagtttaaaaacttagctctttggccagagtgtaacagcctgatgggctcgttttccccaatgtccagaaaagtcaatgcactgagatcatcaggttttgttggaaagaaactgtttaaa

SEQ ID NO: 358984 - DNA, 583 bp, Homo sapiens
accagtcataacattaaactcacagcaaattaacattaccgagagcaataaagataacattttcaagtcagaaaaaaagtgacattcaaaatacataagaatttggaaagaaaaaataagaacttttcatgtatggagaagataaatttgtataaaaataaattatttttctttataaaacattctactttgcccccaaaattttatacttacatatcagaaatattaataatcaatttacttgttattctcaatatacccatttcttgcagcaaattttcactcagagaaaatgtgttgtttatagaaattaaccaacttactaaatattttcctgcacatagataaaatttatatgcttttgccccctatttaagttttcttaagrcattatttttaatagatgtttatattttacatagaataacctccagcttttaatatcatgagagggagcaaaatgaagtttaaaaacttagctctttggccagagtgtaacagcctgatgggctcgttttccccaatgtccagaaaagtcaatgcactgagatcatcaggttttgttggaaagaaactgtttaaa

SEQ ID NO: 358985 - DNA, 582 bp, Homo sapiens
ttcttgcagcaaattttcactcagagaaaatgtgttgtttatagaaattaaccaacttactaaatattttcctgcacatagataaaatttatatgcttttgccccctatttaagttttcttaaggcattatttttaatagatgtttatattttacatagaataacctccagcttttaatatcatgagagggagcaaaatgaagtttaaaaacttagctctttggccagagtgtaacagcctgatgggctcgttttccccaatgtccagaaaagtcaatgcactgagatcatcaggttttgttggaaagaaactgtttaaaactttcagtggcagccaagcagaaggatgggagacatttctcaaatccacctctctgagagctcgggggccagggtttttaagaatattttggaaggaagagatctaagcaatgkgtgctattgattggttggagatgaaatcacaggcgtgttcaaactatcttcatgcactgattcaggttctgggttgtggatcaccagctgagtcagctcttttataagagccatggtttctggtgacatcagttggttgccagaatg

SEQ ID NO: 358986 - DNA, 512 bp, Homo sapiens
caaaacctgaaacgttttgagtgctcacataattctacaagtggaaaattttacacttgacctcatgtgatcaattacaatctaaacacagtcaaaatttgatgtacaaatttatttaaaatagtctataaattaacttcagactctgtgtataaggtatatgtaaaacataaatgaattttgtcttagatattggtcccatccccaagatagtattatgtayttgcaaatattccaaaatctgaaaaatgtgcacattctgaaacttttctggctctaagcattttggacaaataatacttcacctatgattactattttgattaaatatgttcatgcatgttggaagaaaaatatttgccctctattttcctagtttctctgaggccctgcaaattaagctgataaaagacagattaacagcagaaaaaccaacagaagtttattaacattagcagcccacatgcacatgggagaaactcacggatgagtaactcagagagatggttaga

SEQ ID NO: 358987 - DNA, 512 bp, Homo sapiens
caaaacctgaaacgttttgagtgctcacataattctacaagtggaaaattttacacttgacctcatgtgatcaattacaatctaaacacagtcaaaatttgatgtacaaatttatttaaaatagtctataaattaacttcagactctgtgtataaggtatatgtaaaacataaatgaattttgtcttagatattggtcccatccccaagatagtattatgtatwtgcaaatattccaaaatctgaaaaatgtgcacattctgaaacttttctggctctaagcattttggacaaataatacttcacctatgattactattttgattaaatatgttcatgcatgttggaagaaaaatatttgccctctattttcctagtttctctgaggccctgcaaattaagctgataaaagacagattaacagcagaaaaaccaacagaagtttattaacattagcagcccacatgcacatgggagaaactcacggatgagtaactcagagagatggttaga

SEQ ID NO: 358988 - DNA, 566 bp, Homo sapiens
tgccttttgtcctaagttgtctttcttttctaagatctcttactaaagaatagaaatagatagacccagcagagaaactgaaagcctgtttttttgtttgtttgttttttgttttgtttttgtttgttggttcagctgagctaaatgtccttagtggacagtaaatgttttagctgttttctgtatttctatgctcccaagttgtcagacctcatatattggggttaacataccagaccatcagccctggtatgcttaaagttgcatttcttaaaatctggctacctgagaaagattttctgaatgtgttacgttgcatgaaaacatatttactaaattatttttttgaaaatacatatagaaacttctgatatcagaatagtgatgtattcggtcatgagttgggaatccaaaagcagctcctgaaggaaatagttaaatgtaatgaggaattagttattgtaataaaagtgaaggaaaatagaatgatgagagggacaagcatctaaatagaaaatmctggcccggaaaatcctggtcttaggtcatctctgtgcagtgtgaga

SEQ ID NO: 358989 - DNA, 540 bp, Homo sapiens
gtgcttcctttctgtaacccagatgatcatcacctgtcaaattcgactgctcacacaaattctaactagaggaacctgacaatggtaggggccatgaaaaccaaaggagatagaaaatacggcaagcgcacytagcttcaagatgacaatagccttgactcatcgcacaggcttcttagctatcatatagcctcacccactgccaccttttgttatttttatgcattcattcctaaaactgcaggactggggaaatgtttttactagggtaggttgggatggcctggggcacctagagggaatagaaggagctctctggatcccgacttagatggtttcatttttgtattcagtgtgtagcaaattctgtgttctcctaaaaacaaaaatacaaaaaccaatcaccgcggttttagtttcaacaacctaggtaaaaccctctctaagtcccaagtttctcatcttattaagtgggacaataaaatgcatctcaccaaggagttgtgagcattaaattcactgctgtctatggagcacata

SEQ ID NO: 358990 - DNA, 540 bp, Homo sapiens
gtgcttcctttctgtaacccagatgatcatcacctgtcaaattcgactgctcacacaaattctaactagaggaacctgacaatggtaggggccatgaaaaccaaaggagatagaaaatacggcaagcgcacctagcttcaagatgacaatagccttgactcatcgcacaggcttcttagctatcatatagcctcacccactgccaccttttgttatttttatgcattcattcctaaaactgcaggactggggaaatgtttttactagggtaggttgggatggcctggggcacctagagggaatagaaggagctctctggrtcccgacttagatggtttcatttttgtattcagtgtgtagcaaattctgtgttctcctaaaaacaaaaatacaaaaaccaatcaccgcggttttagtttcaacaacctaggtaaaaccctctctaagtcccaagtttctcatcttattaagtgggacaataaaatgcatctcaccaaggagttgtgagcattaaattcactgctgtctatggagcacata

SEQ ID NO: 358991 - DNA, 540 bp, Homo sapiens
gtgcttcctttctgtaacccagatgatcatcacctgtcaaattcgactgctcacacaaattctaactagaggaacctgacaatggtaggggccatgaaaaccaaaggagatagaaaatacggcaagcgcacctagcttcaagatgacaatagccttgactcatcgcacaggcttcttagctatcatatagcctcacccactgccaccttttgttatttttatgcattcattcctaaaactgcaggactggggaaatgtttttactagggtaggttgggatggcctggggcacctagagggaatagaaggagctctctggatcccgacttagatggtttcatttttgtattcagtgtgtagcaaattctgtgttctcctaaaaacaaaaatacaaaaaccaatcmccgcggttttagtttcaacaacctaggtaaaaccctctctaagtcccaagtttctcatcttattaagtgggacaataaaatgcatctcaccaaggagttgtgagcattaaattcactgctgtctatggagcacata

SEQ ID NO: 358992 - DNA, 572 bp, Homo sapiens
gtactgaatgttgtgaaaattacataataaatatgagtcatggaccttgccattgagacttacaatacaattttaacatgtaaacataaatttgtgaaaagtgaatgaatataataattcaaaaccaaaataagagctcaagaatatagtagaagacacatcaaaarcagggtgtgattaaatgtaaattgtattgtacacataactatctcataggaactagaaagagaaagattttacttctaaatggaatggtcagaaaaagtttgaaaaagagtgtgagctaccctttgggtcacaaaagatgggcttgatttggttaaacaataggaagagggtggatggtcagacagaaggaaaagtttgagaacagagaacaggtacagccatactcaaaaagtaggtggaagaaaatgatttgtgtaaaggtgtaccagggaatatactggaaagctctgagggttccattaaagacaataggtcctggaatgtaaagccattcattgtgcattcagtgtggaagaagacaggcagtcatttgcatttaaacttactttttttttttacttttg

SEQ ID NO: 358993 - DNA, 572 bp, Homo sapiens
gtactgaatgttgtgaaaattacataataaatatgagtcatggaccttgccattgagacttacaatacaattttaacatgtaaacataaatttgtgaaaagtgaatgaatataataattcaaaaccaaaataagagctcaagaatatagtagaagacacatcaaaagcagggtgtgattaaatgtaaattgtattgtacacataactatctcataggaactagaaagagaaagattttacttctaaatggaatggtcagaaaaagtttgaaaaagagtgtgagctaccctttgggtcacaaaagatgggcttgatttggttaaacaataggaagagggtggatggtcagacagaaggaaaagtttgagaacagagaacaggtacagccatactcaaaaagtaggtggaagaaaatgatttgtgtaaaggtgtaccagggaatatactggaaagctctgagggttccattaaagacaataggtcctggaatgtaaagccattcattgtgcattcrgtgtggaagaagacaggcagtcatttgcatttaaacttactttttttttttacttttg

SEQ ID NO: 358994 - DNA, 568 bp, Homo sapiens
agtatgctattcttaatgcaagctcacttttcccggtaaacaacatagaaagaccaagttttacagcttgcctaaaaaactatagtgcaacctagggaatgatggaaatatagtaaccatcagtctggtatcatgcagattacaayatgtactaaagtttttttccaaggtattcccaccttgttttccttttaaattttctgactcattctgaagttttcactgtttggaccaaatttgtttcttttcatttaaatttttcaaatccatctcttataatttctaactgttcaattagaccagtggggcatttaaattgttttgttgttgtagttatctaaattagcagaacaccattccactcagaggcagatactgcaaattgcaggcaaagggccagtcccaaagaagcaactgctgattgccaagatatatgcctagaaaactaaattctacatcaattgattgctcctgtcacattacacaggtgattttgaatcaataatttcgtttcagaattaactaaatatgttattcgcactgacacattaaatgttttcaagaagaa

SEQ ID NO: 358995 - DNA, 629 bp, Homo sapiens
gaaatataatccaagaaaagagaatgatttgagaaagaaaacagtccatttgagagagccctctgtgttgcagcatagagttaaaaatttgcaatggccacaagtcactcttgctctaagggtggggtcacaagccagccatcagtggcttgggtccccaaggaataataggccttggcttcawccttgttttaatgtcacattgaaaatatttcccaaatatatgttattgctttatctgtggttatataatgttctacacaattggtctgtttaattttgtgacagaaattcaaactggttgtttaattgaatttttccattatttctgcttataatttatttgtgtgtctaaatatatcctgaaacacagactggggcctatgtactcaacaaacaagcaaacagaaatcactcaatgaagaggaacaaaacatcctgtttctgaaagaggcagataaatttgtatttatttattttattttttcactattcagcttttgaactttggttgctcaaattcaggagataattgtttaagttgccacaagaatcatcctgtggaatctcagcgtgaagctagcagtactaaaatgtgcaaaatttgaactccaaaggaaatttcatcc

SEQ ID NO: 358996 - DNA, 625 bp, Homo sapiens
tttggaaacatttcaggatagaacaattaacagaaaagctgtagagttgtatgtcagaaaacatgatttaaatggcttaatataagtcgaagtccttcagtagattaggcttcagagctgtattgattcagacctggatcagttctaccttctcacttgcttctatagagccagtctcatcccaagactggattccccagtgaaaacaaatttgttgctacasttccagacttcacatctgcatatcaaccaccatcctgatgaagacaaagtgagcttttttcccagcatctctgacagagatccaaaatggactcattagattgcttaaactggatggttaatgagtgtggccaggagaatagaatgtgctgattggtttactcccagtgggtccctgaactggaccagtggtgaggccagaagtccaaatccttcaaagaacagaattgcaagaagtacagataccccaattaaaattaagtctgtgttcaggggaggatcctgaggcttagtgaagtaaggtgacttcccaagaccacgctgtagcacaatgagtaaggtttgaccctcaactctgacaggcataaccactgtcccagcctccaacttttattttcaaccc

SEQ ID NO: 358997 - DNA, 644 bp, Homo sapiens
tattacagcagctcatatcagagcatctgtcaaaaattgcactgggacacatttggcagtcactttccccctcattcacttaatgttatccatcaaagggcaaccatagtcaaagaagcaatggtacaaatgaagatatggagccatgagaagtttaaaggaaaaaaaaagtcaaatcggttttgatcgttgtccattgtctgtgagatatgacttctgtcattacaggatgcactctagcactaactttgtggttcagtatatctctcatgggtccttgaaatgtgattttattaccggaattactgagaggaccatgcagtgccatgggattaactggaactaggtcatgagacaccaacgagagttttgcaaatacaaatgtgcaaatgggtttctctgttcatggtggattagatcaatcttgtctgtaaggctttggcaagtctaccattttgttgggaaatgactgcagaacatccatcttccctggactctaaaacaacttcccctctgttctttgagtgagtccactagtgcacagaayggagccaatgaaggcaatggtctaaaaagccttgccacctgaggtatctgggtacattatcagacagatgagagggagacacattcacattggatcc

SEQ ID NO: 358998 - DNA, 544 bp, Homo sapiens
gcactccgtactcaaccttttgtttagtgaaaccagacaataaaattattttcttcattagaaagagggacatgaagaagaaaggggagcatggagaaagaaaaggaggataacaaggaagataaaagaagggagacggaggatagagaaagaaaaaaggaggagggcaaggacggaaaaggggagagcttccttttttgaccagargaaaatgcaggactcattgaatagttatttcttgaatgcttttctgcctagattgcatacttctgtaaagctctgatagacctgaagtccagcatctctgtttcagacttcctcagcagtgtcattttccctgtcacttgttgtttataaactatagtaccagattaatgaatgagaatataacagaggatttggacttctgttaagcccattctctttaaaataaggactatgtgcaatatgtgcatgttggtaaggttctcactatttctttctgaaagctcagcagtcttggattgtttccagacagattatagcctcactcccagaaagcatg

SEQ ID NO: 358999 - DNA, 431 bp, Homo sapiens
cctttaaataaagccaggcagtgacaactagtgttctgtatcaccagggccctgatgttcctackgatcccacacatgatcacaatggactccagaaacgcttagtctgagcactaagcacctacgaaggatcagtggtttttagaggtaaattgtatgtaaaaggccgtgcatcctgaagaagcttagaggaaaaggttttttaggtctgaaactagaagaggcatgtcaagcggcagaggatttccagtttccacttgctgggattggatgtaagcaacatgactctttaattgcacactgtatacgatttaaaacaaaaacatgaattatagaaaggtgatggatccatgaagcacatcttcccactctctcatcttaatttttttaatttctaaacaaatctatctctccctccagactgaattacc

SEQ ID NO: 359000 - DNA, 431 bp, Homo sapiens
cctttaaataaagccaggcagtgacaactagtgttctgtatcaccagggccctgatgttcctactgatcccacacatgatcacaatggactccagaaacgcttagtctgagcactaagcacctamgaaggatcagtggtttttagaggtaaattgtatgtaaaaggccgtgcatcctgaagaagcttagaggaaaaggttttttaggtctgaaactagaagaggcatgtcaagcggcagaggatttccagtttccacttgctgggattggatgtaagcaacatgactctttaattgcacactgtatacgatttaaaacaaaaacatgaattatagaaaggtgatggatccatgaagcacatcttcccactctctcatcttaatttttttaatttctaaacaaatctatctctccctccagactgaattacc

SEQ ID NO: 359001 - DNA, 431 bp, Homo sapiens
cctttaaataaagccaggcagtgacaactagtgttctgtatcaccagggccctgatgttcctactgatcccacacatgatcacaatggactccagaaacgcttagtctgagcactaagcacctacgaaggatcagtggtttttagaggtaaattgtatgtaaaaggccgtgcatcctgaagaagcttagaggaaaaggttttttaggtctgaaactagaagaggcatgtcargcggcagaggatttccagtttccacttgctgggattggatgtaagcaacatgactctttaattgcacactgtatacgatttaaaacaaaaacatgaattatagaaaggtgatggatccatgaagcacatcttcccactctctcatcttaatttttttaatttctaaacaaatctatctctccctccagactgaattacc

SEQ ID NO: 359002 - DNA, 431 bp, Homo sapiens
cctttaaataaagccaggcagtgacaactagtgttctgtatcaccagggccctgatgttcctactgatcccacacatgatcacaatggactccagaaacgcttagtctgagcactaagcacctacgaaggatcagtggtttttagaggtaaattgtatgtaaaaggccgtgcatcctgaagaagcttagaggaaaaggttttttaggtctgaaactagaagaggcatgtcaagcggcagaggatttccagtttccacttgctgggattggatgtaagcaacatgactctttaattgcacactgtatacgatttaaaacaaaaacatgaattatagaaaggkgatggatccatgaagcacatcttcccactctctcatcttaatttttttaatttctaaacaaatctatctctccctccagactgaattacc

SEQ ID NO: 359003 - DNA, 594 bp, Homo sapiens
atataaacatgcacaattcaagccattgtkttaagaagatttgatatttggtctgagttgggaagtaattagtatttaaaaaaaaaaagacaggggagttgtgtgtgcagtcctttccctttactaagatagccacagagctaaatcatctggatatgatctatttcttacctgctgactttataaatagatttgtatttatcaggctaagttttgttcatatctatgcttatatgtataatatcttgtctctgatcttcattaccaccctgaaagttgatattcatcaggttagattgtcaaagttgggcacagcttataagtgacccatgttgctttgaagtcaatattattccaatgcaccatgctactcatacataatgatgtggcatggaagtaaacatatgtgtttaaagaatggcaaggactccatgggggctaggttgagcatatatgttggagaacagccaagttaagtttgaacagaaggattagggtcagttaaggaagctcttcaaatacaagaggtgaagaatgaactctattctgaaggctatagagggtcatttaagtaagacgatggtgtgaatacta

SEQ ID NO: 359004 - DNA, 594 bp, Homo sapiens
atataaacatgcacaattcaagccattgttttaagaagatttgatatttggtctgagttgggaagtaattagtatttaaaaaaaaaaagacaggggagttgtgtgtgcagtcctttccctttactaagatagccacagagctaaatcatctggatatgatctatttcttacctgctgactttataaatagatttgtatttatcaggctaagttttgttcatatctatgcttatatgtataatatcttgtctctgatcttcattaccaccctgaaagttgatattcatcaggttagattgtcaaagttgggcacagcttataagtgacccatgttgctttgaagtcaatattattccaatgcaccatgctactcakacataatgatgtggcatggaagtaaacatatgtgtttaaagaatggcaaggactccatgggggctaggttgagcatatatgttggagaacagccaagttaagtttgaacagaaggattagggtcagttaaggaagctcttcaaatacaagaggtgaagaatgaactctattctgaaggctatagagggtcatttaagtaagacgatggtgtgaatacta

SEQ ID NO: 359005 - DNA, 546 bp, Homo sapiens
tgacctcaagaatgtgtaacctctggggtctgggtgtctgttacaagtccccaactctggaggtcttgcagcgggaaatatttgcactctgcacattggttttttccttgagggatttcagaaaagtgctgtagggtgactgtacagagaaagtgtacaccaactgtgctagtttaggctgctataaccaagcaccctagattgagtggtttatgaagaacagaaatttatttctcacagttatggaggctagaaatctcagattagggtgccagcrtggtcaggctctggtgagggactacatctggattgtagactaacatttgtatcctcatgtggtggaaagaaaggtgagaaatctctctggagtctcttttatgaaggcattaatccccttcatgtggacttcgcgctaatgacctaattacctactaaaggcctcacctcctactacaaccattggggattaggactgcaacatatgaattgggggaacataagtgacttacctgggaaaaagcattgagagaagaacctcaccacccc

SEQ ID NO: 359006 - DNA, 427 bp, Homo sapiens
tacaccaactgtgctagtttaggctgctataaccaagcaccctagattgagtggtttatgaagaacagaaatttatttctcacagttatggaggctagaaatctcagattagggtgccagcatggtcaggctctggtgagggactacatctggattgtagactaacatttgtatcctcatgtggtggaaagaaaggtgagaaatctctctggagtctcttttatgaaggcattaatccccttcatgtggacttcgcgctaatgacctaattacctactaaaggcctcacctcctactacaaccaytggggattaggactgcaacatatgaattgggggaacataagtgacttacctgggaaaaagcattgagagaagaacctcaccacccctggagcagcaccaagcagtcagtgggcccagaggca

SEQ ID NO: 359007 - DNA, 588 bp, Homo sapiens
aagaccaacagttcagaactaaggctgtgaacagcragagggagcctgagttctccttttatgtgactcagtgtgtggccctggtgtgaggcttacaaagatcattaagggctgaaacaaagcaaatgtttaatgtgtgactagggaacagttattacatggcagataatcattataaatattaacgcacattattgaacttttgctaaataatttatagatttatatatgtgccctatgtgagataagcattttgatgataattaaacaattcaaggaccattgtttatatgtgtgttttgtgtgtaatatttctcccagtaaggcttatttaccgatcaaaaatcatattccttggatttgtcccaaattgccttatatttctctgcagttcagggttattttctcattctgtttttgacccttaatatccacactcatgtctgccagcatttagaatataggatgctaattgattgatgtctttcaatcacaaaccttaggtttttcctactctataattctattactccctgaatagttctgcgttaaaaggccagcaagcaaactccttgtaaagggccacag

SEQ ID NO: 359008 - DNA, 434 bp, Homo sapiens
cttctaattctagtaactttggattaattgaacttgatggattgtatcattgttcataagwagtatctgtcctttcctggatgagaattatttacatcaggcttagtatgtgacttaatttggcctataaaatgtggttagaagagatacgtatcacttatcacttctaagcagtagttttacaaatcagtgattggttcaacatcttctctttttcttctgtctcatgaccaaaaatgttcagatggaggctgctttatcagtctgggtcctgaagtgaaatctctgtggaacagaggtgcagccaaccagtaatagatatagagaacaaaagagaaatcaaccttgtaagtgactgaaattccatggtcatttgttgccacagcataacctagcctatccatattgacacagaaacactagagacgatggcc

SEQ ID NO: 359009 - DNA, 563 bp, Homo sapiens
gaaaaggaagttatgattatcagctttggccttacgaaaagttaaagagtcggagagaagtattaatgcttagtttatgctaattgatcttggttttttttcttgcttcttttcttcctttctaccttgtatgaagcatgccggtggtaccttacattactaattacgaacaatttagaagtaggcttaartagacaaacactgagatgatacacagtggctgccaggactttctttttgccctgtatttaaaaggagaattttattgtctataccaaggacaagggcaaaagctgaaggacaaaaggagtacactgtactggtttttctccatcttcctggccccctatctattatccatattgtttggacttcctctgtggccagaaggattgaccctaaggactataacttctcactgttatactcatggaattctagttaagtacactggaggcacaaataggacatcaaaagacagaaggagggacaggtccctttcctgttgctgtctgcatcagaacaccatctctggctgtctctatccattactgaagttttgt

SEQ ID NO: 359010 - DNA, 563 bp, Homo sapiens
gaaaaggaagttatgattatcagctttggccttacgaaaagttaaagagtcggagagaagtattaatgcttagtttatgctaattgatcttggttttttttcttgcttcttttcttcctttctaccttgtatgaagcatgccggtggtaccttacattactaattacgaacaatttagaagtaggcttaagtagacaaacactgagatgatacacagtggctgccaggactttctttttgccctgtatttaaaaggagaattttattgtctataccaaggacaagggcaaaagctgaaggacaaaaggagtacactgtrctggtttttctccatcttcctggccccctatctattatccatattgtttggacttcctctgtggccagaaggattgaccctaaggactataacttctcactgttatactcatggaattctagttaagtacactggaggcacaaataggacatcaaaagacagaaggagggacaggtccctttcctgttgctgtctgcatcagaacaccatctctggctgtctctatccattactgaagttttgt

SEQ ID NO: 359011 - DNA, 666 bp, Homo sapiens
gccacaggttctgctgatattagctagtccacccaaatgcaaaagtctgaaaaatatctcaaagaccaattttaggttttgacaataatgatgacatctataggagaaattggtgagtttacaaatattgacctctcgctataagactcttaataagtaagggattatagaaaggaaagttaggaaacagtggctgattattatttaactatgcctacactttagccaaattcaggtccttgccataatcctaaacttgtggtctttcattagtttcacaaaggcaattttggtcccagagcaaataatacattagtttggggaagggactgttattatcttagtttaaaagttaacaaaggcaattagyttgtgaggttagaagcaagaaggagccagttaggtaaaatttctctcactgttataattttttttttcttttttgagacagagtctccctctgtcacccaggctggagtgcaatggtgcaatctcagctcactgaagcatctgccacctgggttcaagtgattcttgtgtctcagcctcctgagtagctggaattacaggcatatgccaccatgattggctaatttttgtattttttggtacagacagggtttcaccatattggccacactggtctcaaactactggccttaagtg

SEQ ID NO: 359012 - DNA, 528 bp, Homo sapiens
acaggcatatgccaccatgattggctaatttttgtattttttggtacagacagggtttcaccatattggccacactggtctcaaactactggccttaagtgacctgcctgcctcagcctttcaaagtgctgtattacaggtgtgagccatcatgcttggccttcactgttataatttttgcaaagscagtttcaatatcagtaacaggaaaataatatagtattccacagttagataatcaagcaatggtagctagagatgatacaccctcagaataatgcatctagtttaaaaaaagatagcaagagttattaagttccgttatgatctgtgttctccaacttgtctaaaagtataaaatgtgagaaagaatccaatagcacttgatggacactcaggagtataataatgtttgaaaaggtaaaattatgttcttttagagaaaacagaatgagcacagtatccaagatattattttaatcactaattaatatgggaacaaggaagacttgatatcctgctagaata

SEQ ID NO: 359013 - DNA, 592 bp, Homo sapiens
agaagggctcagtacttttttttcatagttctgtgtttgtctcaaaacattactcttctcagtatacagtcatccctccatattgataggtttcatatccgtggattcaatcaactgcgaatcaaaaatattagggaataaaaaaagaaaaaataacaatataacaataaaaataatgcaaataaaaccccacaaagtataacaatgattgacaaagcatttacactgtattaagtattatgttattagtttgttctcgcattgttataaagaaatacctgaarttgggtaatttataaagaaaagaagtttaattggcccacatttctgcaggttgtactggaagcatggcagtatctgcttctgaggaggcctcagggagcgtttactcatggtggaaggcaaagtgggaaaagacgtcttacatggcaagagcaggaccaagagagagagtggggaggtgccatatccttaaacaaccagatctcctgagagagaactcactatcgcaatgacagctccaaccatgagaaactgcccccatgatccagtcacctcccaccaggccccaccttcaacattagagattgta

SEQ ID NO: 359014 - DNA, 592 bp, Homo sapiens
agaagggctcagtacttttttttcatagttctgtgtttgtctcaaaacattactcttctcagtatacagtcatccctccatattgataggtttcatatccgtggattcaatcaactgcgaatcaaaaatattagggaataaaaaaagaaaaaataacaatataacaataaaaataatgcaaataaaaccccacaaagtataacaatgattgacaaagcatttacactgtattaagtattatgttattagtttgttctcgcattgttataaagaaatacctgaagttgggtaatttataaagaaamgaagtttaattggcccacatttctgcaggttgtactggaagcatggcagtatctgcttctgaggaggcctcagggagcgtttactcatggtggaaggcaaagtgggaaaagacgtcttacatggcaagagcaggaccaagagagagagtggggaggtgccatatccttaaacaaccagatctcctgagagagaactcactatcgcaatgacagctccaaccatgagaaactgcccccatgatccagtcacctcccaccaggccccaccttcaacattagagattgta

SEQ ID NO: 359015 - DNA, 593 bp, Homo sapiens
aatgacagctccaaccatgagaaactgcccccatgatccagtcacctcccaccaggccccaccttcaacattagagattgtaattccacatgagattttgacgaagactaccatatcagttatccagagataatttagagtatacgggagaatgtgcatagattatatgcaaatattttgtcatttttcataaggaacttctgtatctgtggattttggcatccacgggggtcctggacccaatccagcaatgatactgagggacaactgtatayctatatcacctcctcttcttcccctatttcgtctcctttgtgttatcaccaccaccgctatagaggacgattatgattagggacctagggataaaagatgccataagacttggtttattcctccccttaagaactattcagccctggggagagacagaacttagataaaaaaagatctattacaaaacaaggtgactaagctaggtcaaatgcgtattacaatcaatatgtcaaaaggcaaatgcctgactgaatgctgtaactgttgggataattttatgctcttttttgactctctgccattccttggcctagaat

SEQ ID NO: 359016 - DNA, 494 bp, Homo sapiens
tgctgattacatgcagtcatgctttccagttacttctttgcacagccagaggagtccatactgacttgagacagagtctccagagatttagattattttaaaacacccacatcttttatgctttttwactctgtcttttctacaaataccttgatgttggtgaaagtccacttgagtttgccaacttttctgattattgttgcattttgtttttcccggtaatagacaacatgcccccacttgcttgctacttataggaggggtgacttacagggtgtacacagatcagacagtggttgaaagtggtcattttgatttgcagagttgtattcagatggaaaaataaaaaatggacttggataaatacttcccttggagatgcctgctttaggaataaagactcctgtgttgtccagcgatcagatacctgacctttgatcatttctcatgtggctgtctaaaggactcatgacaaattagttggagactcggta

SEQ ID NO: 359017 - DNA, 529 bp, Homo sapiens
acaatgggttatcaagcaattcattatcctataacatcttggctgtgtggaaatatcttcatgacttgattttgcatacgaagaaactgaagcccaaaggtataaggaaaaacattcttaaaagtcattaaaatctcaaggacaaataaaattttgagcaaaaacaagatttccttaggtacagagcagttgctttttggagctctggatgagccacaatgctcattctcattgctgtttggaaaacttcactgaatttcttttattgtaaactggatctattccaattaagttgggagagatgaaaaaaggacaaaaagacttcaataatttgtacattgaacaycgaatacacatatttacctctctattactatctcagaaatgcagtgttttttctttgacctcatgattttcctacctttgaagcatagatttgtccatgaagattgtgtgaatgaaacattcacttctgtcttgtgtgtgtgtgtgtgtttaaacacttatatggtggaataattgacataca

SEQ ID NO: 359018 - DNA, 529 bp, Homo sapiens
acaatgggttatcaagcaattcattatcctataacatcttggctgtgtggaaatatcttcatgacttgattttgcatacgaagaaactgaagcccaaaggtataaggaaaaacattcttaaaagtcattaaaatctcaaggacaaataaaattttgagcaaaaacaagatttccttaggtacagagcagttgctttttggagctctggatgagccacaatgctcattctcattgctgtttggaaaacttcactgaatttcttttattgtaaactggatctattccaattaagttgggagagatgaaaaaaggacaaaaagacttcaataatttgtacattgaacaccgaatacacatatttacctctctattactatstcagaaatgcagtgttttttctttgacctcatgattttcctacctttgaagcatagatttgtccatgaagattgtgtgaatgaaacattcacttctgtcttgtgtgtgtgtgtgtgtttaaacacttatatggtggaataattgacataca

SEQ ID NO: 359019 - DNA, 573 bp, Homo sapiens
tcagaacctaaagcagcactgtttaaaagaaatacaatataagccactcctagccacatgtgtaattatattttttatttttattatttttttcagaggcaatttctgactctgtctcccaagctgaattgcagtagtacaatcatagctcactgcagcctcaaacttctgggctcaagcgatcctcccaccttggcctsccaaagtgctgggactacaggcgtgagccactgtgcccagccatgttattttaaacttactagtagccacattaaaaagaaaatagaaaaataaatgggtaaaattaatttattatatattttatttaacccaatatatcaaaaatatcatttccacatttagtcagtatataattattaaagagatattttaaattatttcctttagaccaggtctttgaaatttgttatgtattttatacttagagaatatctcagtttccactagtcacattttagaagcccactagccacatctggctagtggctactatatggaagagtgcagacctacagtttcttgccttcctggaatgttgtagtctaaaagaag

SEQ ID NO: 359020 - DNA, 573 bp, Homo sapiens
tcagaacctaaagcagcactgtttaaaagaaatacaatataagccactcctagccacatgtgtaattatattttttatttttattatttttttcagaggcaatttctgactctgtctcccaagctgaattgcagtagtacaatcatagctcactgcagcctcaaacttctgggctcaagcgatcctcccaccttggcctgccaaagtgctgggactacaggcgtgagccactgtgcccagccatgttattttaaacttactagtagccacattaaaaagaaaatagaaaaataaatgggtaaaattaatttattatatattttatttaacccaatatatcaaaaatatcatttccacatttagtcagtatataattattaaagagatattttaaattatttcctttagaccaggtctttgaaatttgttatgtattttatacttagagaatatctcagtttccactagtcacattttagaagcccactagccacatctggctagtggctactatatggaagagtgcagacctacagtttctygccttcctggaatgttgtagtctaaaagaag

SEQ ID NO: 359021 - DNA, 632 bp, Homo sapiens
gctgatgttaatccttttttacaatcatcttaataggatttcaagcaattcaacagctgttgaaagaaacctgtgttttcatgaaataacagaggtaggattgttgggaagagaagacagaaaagaaatggaaggactcatgagaaactataaaggttttcatagtgaatgagctgcagtacttaaaaatgtttaggcctcagcacccagcacatagcagatatgtaatgaatatttcttggaagaaaggcaggaaagaaggaagaaaggaagaggaacagaggaagagagtaagagaaagggagggaaggatacaaggatactgtttttggttccctggcctaattcaatatgtgaagtgaagagctgtgctgtctctgggagaaaacccttcaagkgtagtgtgttagtaaggggattctgaaacacagacccctgtaaccagggtcttatttctttggtcctgaacacctcaccatctgatttaccagttgtaaaattggacctccaggctggagattaagtaaagggctaaggttggtgcatttatgtagcagaaggatctcacataagttctgtacacagatttctttcccaccgggggaccctatggttctatgggcagagaatag

SEQ ID NO: 359022 - DNA, 621 bp, Homo sapiens
atgactcccttaacctggtttaattattttgtaggtcttgcctatgaccttgcattaatttgcatggtgctaaacatgtttttctgtttatgtggctatgtgctgttatggggaaatttcacattttagctaaaatcaacattaaccaaagatgccagctgactaattggtcttagagatgtgtcaaacatatacttaaaatgcaaataaatggtggactttaatgtgaatatttrataatgatgtggaagaatttagcttgttcatataatttttattaaatgtgaattcgttacttatataccactcaaataatacaatacagaggacagtcttattttaaagattttgttaactgcatggtttcaagatggtgtacaaatcaaatatatggtctttatcaagatttaaaatgaacatacttaatttcaaattttaaatgagttgcaaacatataagcaactgtactttaggaatttatcatgcagccacaaaaatatatgtacaagaagggttcacacagttatttgtaatagagaagctaaaaattacctgaatgtctatcaacagtatgcatctgtacaacaaggcaaacatataagtacattcatgaaaccatgt

SEQ ID NO: 359023 - DNA, 565 bp, Homo sapiens
gatgacatttctacacgatgggaccaaagtcagtggccaattacttccagactccttgtgggagaaaaatttgtgtttttaggattgaacgcttttcaggtagctattctgttgcttgaaaccaagtgtgttcctcaatcgctgtttcttaaactacactggtcataagaatcagagtgattgttcaaaatctggatttctaggtctcttccttcctttgaaatttcattactgtaggtttgggatgagagccagtatctatatatttaatgagtattccaggtgatctttaggtcaatgtttcccaaacttacatgatcaaaagacatttggtaaacaaaatatgtcaataacctataaatgagyctttattctccacttggtgtttgtcaatgcagccttcaggtaaaccagtaaaaatagctagctgagaacgtttcacaggtgcttctcattactttccctctgatgcctgggttcctgccaccttgactcactctcctaccaacattcatcacctttcccatttttttttaacccacagtcttttttcttgcctgctgga

SEQ ID NO: 359024 - DNA, 575 bp, Homo sapiens
taattttcttcctgcaaatgttgtttttttcttttttaaaaaatgattaagttaatctgtatttgatgaaaagactataaataagattggtttagatctgaatggttttctagccttattactttttgacacattgaccccttccacatatactcaagtgagaaagaatttctgcttccaaatgcagcccatctgatagttatatatttgaacagtttaattacacagagctaaaataagtctctttgtatattttccctatcaggcttcttgtggtcacacagaataagtgaaccattgtsaactgtatgaagcaagctaatctttataccacaatacgcccaaagtcttccttatactaagctaaactttgctgatttatttaataaaatctcccaggccgtgaattcaatttcttccagcatacatcattggattaagttccagccttaaaatttagggctcaagattatgtaaagtatacaaattaaattctgataaataataaagtgggattataattatcttttaaaatgttatataaatgttaatcccaccctatgttgatttattat

SEQ ID NO: 359025 - DNA, 293 bp, Homo sapiens
aaaacaaggcaagtgccttccacaatgagcctgtaaaatccaaagcaggttagttacttcctagaaacaatgggcagtacaggaattgggtaaatacagccatttcaaatgggagaaattgggcagaacaaagggtctacaggccccgagcaagtctgaaatccagcagggcagtcaaatcttaaagttccaaaatgatctcttttgactccatgtctcacatccaggccacgctgaygcaagaggtggtttcccgtggtctttgaagcactgccccatggctttgcgtggtg

SEQ ID NO: 359026 - DNA, 562 bp, Homo sapiens
ggcattttgatcaaagccattcaacaagtctctaggatgttccaaactttctgacattttcctatcttcttctgagccctccaaactgttccagtctctgcctgttacccagttccaaagttgcttccatatttttgggtatcttttcagtagtgcccaactcccaataccaatttactgtattagtccattttcatgttgttgataaagacatacttgagattgggagatttacaaaagaaagaggtttaattggactgacagttacatggctggggaagcctcacaatcatagtagaaggcaaggggaagcaagtcatgtcttacatggatggcagcaggcaaagagagagaacttgtgcagggcaactcccatgtttaaaaccatcagatctcatgagacttattcattatcatgagaacagcatggraaagacctgtccccattattcaattaccttccaccaggtccttcaagatgagacttcaagatgagaattcaagatgagatttggcgggggacatagccaaaccatatcagtgaggttacagtctgattaca

SEQ ID NO: 359027 - DNA, 631 bp, Homo sapiens
caacacttctatcatctttgtgctcatgaaggctcctttcctgccacgttagcattttggtatccaatattgacagatggttcctaatatttctacagatagtttcctctattgtacaaagcacaaattataatgaaataatagcaacaaaagtggttatttaagcaaaagctttctatggttttgggtgggaggaagctgttcagcaaagatcaaagtaaaagatactttttcctgcttaaatactcctacgtttaatttttctagtttcattgcttatgtggtccagctatctttcatttactgcttttgcatgtgcaaaatttcccctatgcccttaaaactttgtattaacttgggttggtttataagggtttaattccatatgacaaatatttctctagttgaataatctcaacattcagaaagttcagtaacggaaaattttgctattggaagactactctggtgtttaagaatgcctgcacaataataccactttacacttggtgttttcracttttaaaattgagttcttaaagcctattgtctcattgttcaaaaacacaattactggttctttttaaaaatacaatcctatgatttggattataggtggtcatagaagatt

SEQ ID NO: 359028 - DNA, 559 bp, Homo sapiens
gtaaaaacctagaaatgtattaaaagggataaatatgcataattagattatatgtttatcaatcgatatcagtgtttggcagtacctatctgtatgaaaagaaaatttttgaagatcaaatacctyttattacagatcagtggtagcagatgaaatttcaatgataggaaacactaacattgaaccctaattaagtgaaatgttatccccaaaatgtataggtctatatttcaaaaattatagtcaattattattttatattttaagtttcatcaataaaaattgtggaagtttgtcttcattgttgttacttaagacctacataatagcttcaattttgctcttttgcttctaaaatatttgctatctggctctttagagaaaaagtttgccagtccctggattacagtacagtatgcattgttcattttcgataaagttatcttgagatcagttgatattttctaaaaatgagaaaataatcattaatacttttttaactttgaaaaactaaaaaaattaagttttaaaaattaaatattgttataattatgcttat

SEQ ID NO: 359029 - DNA, 596 bp, Homo sapiens
agattcagtgtctagtgggggccctctttccaagttgcaaatagctctttttgctgtatccttacatgatgtgggagagataatctctcttgtgtttcttcttataaaggtactaattccatcatgaagactccactctcatgacttcccaaaagcttcacctcaaaaactattgtattggggattaaggcttcaacacatgaatttggcaggaggggcatgcagacatttagtccgtrgcagtcagtttctttgaatgatttttttcctagttatgagtaatgtttccctatttctttgaatgtcttataatttttggttgaaaattgggcattttaagtgatgatcatgtaataactctggattcttacagattttcctgaggattatgttttcttttttcttttcctttttatagtaactttcttggacttaaaatgtagaatttgtctccctgtggtatgtgtccctctgaagtctctactctttgggtcacgatcctaattgttagccaaagatttgggtagaagttgtgctcaaatatcttgaatttgaaagcctccaccttatgccatttaatgtttgtgtggtataca

SEQ ID NO: 359030 - DNA, 596 bp, Homo sapiens
agattcagtgtctagtgggggccctctttccaagttgcaaatagctctttttgctgtatccttacatgatgtgggagagataatctctcttgtgtttcttcttataaaggtactaattccatcatgaagactccactctcatgacttcccaaaagcttcacctcaaaaactattgtattggggattaaggcttcaacacatgaatttggcaggaggggcatgcagacatttagtccgtggcagtcagtttctttgaatgatttttttcctagttatgagtaatgtttccctatttctttgaatgtcttataatttttggttgaaaattgggcattttaagtgatgatcatgtaataactctggattcttacagattttcctgaggattatgttttcttttttcttttcctttttatagtaactttcttggacttaaaatgtagaatttgtctccctgtggtatgtgtccctctgaagtctctactctttgggtcaygatcctaattgttagccaaagatttgggtagaagttgtgctcaaatatcttgaatttgaaagcctccaccttatgccatttaatgtttgtgtggtataca

SEQ ID NO: 359031 - DNA, 597 bp, Homo sapiens
tcacaaaaagtgctatgataagtaatctgaaaatattttgttgatgatacacattaacatggcattttggagcaccagaatgaacttcttagacaattttaaggactgcattttaaaaatattactgttttctaagaaagtttataaattcagaataaaaaacctaatctggaaaagtgaaactaaagttatgaaatttgttatttgagtcctaaagagcaacatctatatgtactgaagggcaagtgaaataattgaaacacttgtagaaataagttgaaatgatactaaatccaattgcattatcacaataatacaattttccartgttagaaaaggaagaggtgttaaagactaaaatattacactttaatcaattttttaaaaatattatccaaattctgaataatagaaaaaaaatagtgcttctgttaatcagagaaaaggcagtaatcttctatttctgtcaccttttaaggaaagtttttttctgataatgaacataaagaatttaaagacatcatatttatgaatttatattaatgaatttaaagacatcatatttaaatacattaagttatcaggaaatgaaggtag

SEQ ID NO: 359032 - DNA, 597 bp, Homo sapiens
tcacaaaaagtgctatgataagtaatctgaaaatattttgttgatgatacacattaacatggcattttggagcaccagaatgaacttcttagacaattttaaggactgcattttaaaaatattactgttttctaagaaagtttataaattcagaataaaaaacctaatctggaaaagtgaaactaaagttatgaaatttgttatttgagtcctaaagagcaacatctatatgtactgaagggcaagtgaaataattgaaacacttgtagaaataagttgaaatgatactaaatccaattgcattatcacaataatacaattttccagtgttagaaaaggaagaggtgttaaagactaaaatattacactttaatcaattttttaaaaatattatccaaattctgaataatagaaaaaaaatagygcttctgttaatcagagaaaaggcagtaatcttctatttctgtcaccttttaaggaaagtttttttctgataatgaacataaagaatttaaagacatcatatttatgaatttatattaatgaatttaaagacatcatatttaaatacattaagttatcaggaaatgaaggtag

SEQ ID NO: 359033 - DNA, 345 bp, Homo sapiens
agagaatagggtacatttatacagtgttggtgagattgtaaattggtacaacctctgtagaaaacagtatggagatttcccaaagaactgaaaaagaactaccatcaacccagcaatcgcactactgggtgtctacccaracgaaaataaatcattatatcaaaaagacacatgcactcatatgtttgttatagcattaattgcaattacatagtcatgggatcaacctaagtgtccatcaaaagttgattgtataaagaaaatgtggtgtatatatacaacatggaatattatacaaccacaaaaagaatgaaatcatgtcctttgcaacagcatgggtagagc

SEQ ID NO: 359034 - DNA, 596 bp, Homo sapiens
attatgcaatatatccatataacaaacctgtatatgtaattcctgaatctaaaataaaataaaaaataaaaacaaaatataaaaagaaaaaatataacctactatgtctacttacctttgtacagacaattgcttaagttatgctgtttttaacatttgtacttggataaaatgcttatgtgtgtataggaatgtcatagtacaagatgctgctaacccaggcacaaagtattaaaattattttgtagggaaaaaaaaaacattattttacaatatttctgctcattgggatgtgtaaagtttcccttacttgaccctagaagaaatgttgaattaagaaaaatttgtcatattttcccacatactttttttttwaatctctagtttacctcctagtgtatgcactctttcactaagccctcaaatggctaacaataacaggggctgttaatatttattgaatatgtactatttgctaaatactatacatggtgatttactgcactatctcatttaattctcacaaacaacttgcatgcaccctttccctaagcccccaaatgcctaacaataacaatggctgttagtatgtactg

SEQ ID NO: 359035 - DNA, 596 bp, Homo sapiens
attatgcaatatatccatataacaaacctgtatatgtaattcctgaatctaaaataaaataaaaaataaaaacaaaatataaaaagaaaaaatataacctactatgtctacttacctttgtacagacaattgcttaagttatgctgtttttaacatttgtacttggataaaatgcttatgtgtgtataggaatgtcatagtacaagatgctgctaacccaggcacaaagtattaaaattattttgtagggaaaaaaaaaacattattttacaatatttctgctcattgggatgtgtaaagtttcccttacttgaccctagaagaaatgttgaattaagaaaaatttgtcatattttcccacatacttttttttttaatctctagtttacctcctagtgtatgcactctttcactaagccctcaaatggctaacaataacagkggctgttaatatttattgaatatgtactatttgctaaatactatacatggtgatttactgcactatctcatttaattctcacaaacaacttgcatgcaccctttccctaagcccccaaatgcctaacaataacaatggctgttagtatgtactg

SEQ ID NO: 359036 - DNA, 589 bp, Homo sapiens
cagcagaaccatccggacttaaagttttctctgtgtgaaaatcttgataaagtattcaatttctttggctacatgtatgtcttcttttgagatgtgtctgcttatgtgctttgcctatgttttaatggggttttgggtttttgcttgttaatttgtttaagttccttatagattctggatattagacctttgtcaaatacatagtttataaatattttctcccattctgtaggtgtctgttgataatttcttttgctgtgcagtggctctttagtttaattaggtcccacttgtcaatttttggttttgttgcaattgcttttggagcctttatgtcatgaaacctttgtcaggtcctagtctagaatggtatttcctattttttttttatagtcttgggttttacatttacgtctttaatccatcttaagttgatttttgtaggtggtgaaaggaaggggtccagattcaattttctgcataggctagccagttatatcagcattatttattgaataaggagtcccctttccccattgctttytttgtcaactttgttgaagatcagatggttgtagttgtgtggctt

SEQ ID NO: 359037 - DNA, 471 bp, Homo sapiens
tactggcaaatttcccaacattcaatattgttttccttctagtrtggaatccattcagtaattgtcttttgctacgtccatcctctttaacaaagttacgtgtaaacagctatattaggaccatttttctttttgacatttttcctcaccaacttactcaatgattaatatatccacctccctctttagacaaaagagttaatttttataatatggtaaaacactgaaatctgtcgagagttcctaagccacagtatttcaggaagatacacataatttttgtttctccctatggtacagactgttaatgtcctttacagataccctttaccagtcttatgaatccctcccgcagctgctataagtgttggctacaataatggctaacattttcccttctgcagagaactggtcccctcaactaacagaagtcacctccactggaaagtagcactgctattccctccccag

SEQ ID NO: 359038 - DNA, 534 bp, Homo sapiens
aatccctgtcttaagctctgtttctaatgaacttgacctgagacaattaatgccaggagtgaacctagagacagacactaggaaggaaattctggagttggattacttgctggccaactagaaatgaacactccatcactgctgtaagtggactgaatatatccgtggtccctgccacacagtggccatgcaactgttaagattttcacctayagcgaattggaatagattataggtagcaagggatgcactggattatgtggtatctctatcatttcaaaggtatgagagaaacagtaattgtaaagactagttttagatggtcattgctgaatgccaaatggatgcattacaaattaagaatgacaaggtcagagaagtcatccactaatataaatcaaagtatgagagtcaaaaggcctctctagcattgtttaaaggcttcttcatctcttaaagttagaaagaagatagagctgaagactagtcacagaatttaattataacattgacagaacttcacagaaggctaaa

SEQ ID NO: 359039 - DNA, 621 bp, Homo sapiens
tgacactgattatggcataatcaaagaaccacaagaggccaattcagggagaaatcaaatagctggagaakaaacagtagccacatcctatagagcatggaaaactgttgagattctgatttttaatcaaatccatgaataattatgtgttttgctgtagcaatgctttttgagtcaacagatatatcaagtcctagcagtcagaatggagaagattcaggagttaacaagaaacacataggaggacatataaccataaataccccaaaatattatctcactgtatgtggatgcagagagatcatttagaaagctaatgtaatagtccaggcaagattttagttggcctggattaaagtgatcataacaagatagagaaaaaagaatagacttaaaaggtagaagtcgaatcaacaggacttagtcgttgattggtcacagtcaagataggtgtaaaaagtaactcttagatttatctcttaagtaccaagtagacagtcttaaaatttgctgagacaaaaaatgctaaaggagaagcaggttgagggagaagaaaggggaagatgatggattgctgaatttgaggtgcatgcaagacagctaacaagacagagaagtaag

SEQ ID NO: 359040 - DNA, 621 bp, Homo sapiens
tgacactgattatggcataatcaaagaaccacaagaggccaattcagggagaaatcaaatagctggagaagaaacagtagccacatcctatagagcatggaaaactgttgagattctgatttttaatcaaatccatgaataattatgtgttttgctgtagcaatgctttttgagtcaacagatatatcaagtcctagcagtcagaatggagaagattcaggagttaacaagaaacacataggaggacatataaccataaataccccaaaatattatctcactgtatgtggatgcagagagatcatttagaaagctaatgtaatagtccaggcaagattttagttggcctggattaaagtgatcataacaagatagagaaaaaagaatagacttaaaaggtagaagtcgaatcaacaggacttagtcgttgattggtcacagtcaagataggtgtaaaaagtaactcttagatttatctcttaagtaccaagtagacagtcttaaaatttgctgagacaaaraatgctaaaggagaagcaggttgagggagaagaaaggggaagatgatggattgctgaatttgaggtgcatgcaagacagctaacaagacagagaagtaag

SEQ ID NO: 359041 - DNA, 553 bp, Homo sapiens
gttctccttccctgcaacgctgtgttcccactcgctgatggagctgggtaggcgcacccaccagctgcaccagggtccactctgcacactcaggacgactgtgcacaggtactcattcactagggtggcaacctccttttcaagagccatttctgccagtccttctgggaatcaaacccaaaggaccctaagaaacagagatgacccagcaaggccaggagtgtgtactcctagtagccctacaattcagctcaagggaatgtgacgaacttgcactatgacctctattcatcatttcttgacaatttccttcacttcaggtatgaggaaatgacaataaagactagaaaacactgtgtgctcaagtagtaaatcgcaggaaaaaaagagtaggaaagaagcagtccaagtcagagcctcctttactgcytgctgcacacaccacaccacacctccccacacagacagaaaggccaagtcagagaacaacatacaataaggcttctaaagcctgaaaacaaagtatcattatttgacaaaatataagcattaa

SEQ ID NO: 359042 - DNA, 608 bp, Homo sapiens
acaagtattatgccctactattctcacgaaaatttcagccttatccagattgtttctcatccccctcaaaaaacaaaaatttttgcagaacacgtgtcttgcttttggataggaaatatgtgatatgtacactgaaagcaaattatcaagcatgcagtatatctcctgtggtggaacaaacgacctgaactctgcacctcctcctgatcaaggacccaccgtggggagaaggaataccaagttcgcaatagctctcgaggatatgagtgttctgaacacaagctcagacagtatttgaagtcaacagaattagggaagtaaaggcaggatacttgcttaaagcaaatagatgaattttctatcagtaaaccacacctkaagttactgcaatacagagaaactcaataatcccaaccaatgctgaaaatctaggagaactgaatgcagatgttcaatgtacaattatttcaactttgctgttttcttaataaaatgttgaaataaaacacatacctcctgaaaataatattatagaactgcaaacaagttggtgatgtaggtggaagttcatttgttaaagtgatcgttatcctcacatcctctccatt

SEQ ID NO: 359043 - DNA, 571 bp, Homo sapiens
ctacaataatgccaaagtaccctatgtgtttattccaagtcatatcagacaggagactcctggggcctctctaaaagccatgtgagctatcttacattgtggtagttctgctttgaagtggaaatcccccatctcccttttcccaaataaccttttgctgtagtcttttaggtaaaaataatatcgttccatcaaaagcatgacactttccaattagatcttcgtgttgaaaaagaagagctgaacggagtyttctggcttccatcagtgggttatagtcaatgtgatactgatataaggcccactggggacgggatgtcagccggaaatggttagtgcttaaccttactataatgcctgaagaacctggaaaaggaagttatagtcaattaacaaaatatcaagtttatttttccttgaaatctttcctaccatgacaaggcaggcacagttccgtaaacacaaggctaagagcagcagacaacatgaaagtcctcagacatctgactttggagaccactagtctctctctttaggtgaatttctaaagaagcatacatttagaaacaaa

SEQ ID NO: 359044 - DNA, 628 bp, Homo sapiens
ctggagtgcaatggcatgatcacggctcactgcagccccaacctcccgggttcaaccagttcttccacctcagccttccaagtagcygggactacaggtgcgcaccacccctcacaactaatttttttttttgagatggagtcttgctctgtcacccagggtagagtgcagtggtgcgatcttggttcactgcaacctctgcctcctgggttcaagcgattctcctgtctcagcctcccaagtagctgggattacacacacacaccgccacacctggctaatttttgtagttttactagagatggggttttgccacgttggccaggatggtcttgaactcctgaccttgggccccccttggcctcccaaagtgctgggattataggcataagccaccattcccagcctcctcccaactaatttttgtgctttttattgagatggggtttcaccatattgctcaggctgatctcaaactcctgggttcaagtgatcctcccatcttggcctcccaaagtgctgggattacaggcgtaaaccactgtgcccagcctacctgccattttatatacagttttccccaaacaaatccacagttcacctcactggatcctaccagatgagccgt

SEQ ID NO: 359045 - DNA, 444 bp, Homo sapiens
agcagccataagatctgaatagacatttttctattctttccaaagaaggtagaaagatggccaataagcacctgaaaasatgctccacatcattaatcactatttgaatgcaaatcaataacacaatgagatacaactttataccccatagaatgccaacaatcaaaaagagtgataataagtgatggcaggcaggtagggaaatgggaatcctcatacattactggtaggattataaaatggtacatgtcctttggaaaatagtttgtcagttcttcaaaaatttaaacatagagttactaccatcccacccaacaatcccattactaggtatacacccaaaggaatataaatcattctaccataaagacagatgcacgtgaatgctcattgcagcactactcacaatagcaaagacatgatatcaacctagatgtccaccaa

SEQ ID NO: 359046 - DNA, 444 bp, Homo sapiens
agcagccataagatctgaatagacatttttctattctttccaaagaaggtagaaagatggccaataagcacctgaaaagatgctccacatcattaatcactatttgaatgcaaatcaataacacaatgagatacaactttataccccrtagaatgccaacaatcaaaaagagtgataataagtgatggcaggcaggtagggaaatgggaatcctcatacattactggtaggattataaaatggtacatgtcctttggaaaatagtttgtcagttcttcaaaaatttaaacatagagttactaccatcccacccaacaatcccattactaggtatacacccaaaggaatataaatcattctaccataaagacagatgcacgtgaatgctcattgcagcactactcacaatagcaaagacatgatatcaacctagatgtccaccaa

SEQ ID NO: 359047 - DNA, 444 bp, Homo sapiens
agcagccataagatctgaatagacatttttctattctttccaaagaaggtagaaagatggccaataagcacctgaaaagatgctccacatcattaatcactatttgaatgcaaatcaataacacaatgagatacaactttataccccatagaatgccaacaatcaaaaagagtgataataagtgatggcaggcaggtagggaaatgggaatcctcatacattactggtaggattataaaatggtacatgtcctttggaaaatagtttgtcagttcttcaaaaatttaaacatagagttactaccatcccacccarcaatcccattactaggtatacacccaaaggaatataaatcattctaccataaagacagatgcacgtgaatgctcattgcagcactactcacaatagcaaagacatgatatcaacctagatgtccaccaa

SEQ ID NO: 359048 - DNA, 524 bp, Homo sapiens
tttttaattttgaaaagaaaaccgttttatgtgaagtgctctttcatatgggtaaagaaaaaatacctagctatcccctggctggctccgtgcacctccgcrtgcaagctcactgttgcagtcggactccaggcccttgtgctgccagctggcgcagccccttcctgcagcccctctcatcacagagaactgatgcctgggactaccaaacagtatatggagcttatggtagaacaacaataaccaaagtctctaaaaaagaggatgaatcaagtgtcaaagtgaaattaagaatacgaaagaaatccgaccctatgtggaaatactccatggagcaggaggagctatgcagagagagtgccgagaaggcccaggtacaggctttccacccacatgcatggtaggggccttctctacctttagaaccttaccccaaagacgtcaataaggaatccgtaaaatacatacagcaaacacaaaatgcccaacttcactagctgaagaaataaaaactaataatgcaa

SEQ ID NO: 359049 - DNA, 554 bp, Homo sapiens
ggaggtaaaaatagctcgagcggaaatatttgggtttgtatattagctctgcaacttcttctgtgtgtgtgagtaagcaggttacttatctattccaagacttagtttcttcagctctaaaacaggagataacgcttactaaatttacttttcagagctgttgcaagaattagtgaaatgtacatcaagatgtattttaataaaaataatgtgttcrgtattttaaaaaaaattagttctttcacacacctggtttgcaaaacactgcattagaaaaaattatttaccagagatatttgaaacttgacctgagctatctaaattcccaaagattgcacagtaattttagtaagaattatagcacataatatatatatttatttcttgcaactggagggtcagagagctacctatatatgtataataactcttggaccatatacggtcctgcaaatgcagtcgatctgatagcacttgaattgagctggcatgttagtcacagctgggcagatcatatcagtaccaccatggaaatagttccttgaaagatttca

SEQ ID NO: 359050 - DNA, 536 bp, Homo sapiens
tgcattcctatgttcactgcagcattatccacaacagtcaagatatgtaaacaacccaagtttacatcaacagatgaatggataaagaaattgtggataaagaaaatatatatgcaataaaatgttgygtataaataaaatgttcatccttatagaataaggaaatcctactatttgcgaccacatggataagtcttgaggacattaggctaagagaataagtcaacatacaaggacaaatactgcatgattccacttatatgaggtgtttataatattccaactgatggaaattacaactacaattatggttgccaggggatgaagggtaggggaaataggcgttgttcaatggatataaagttttagttatgctagatacataagttctacatatctgctgtacaacattatacctataattaacaatatagtattgtacacttcaaaatttgttaatagggtaaagttaggtaagtgttctaactgcctactgcgcccccctacctcgccagaaaaaaacccacaaagaaaat

SEQ ID NO: 359051 - DNA, 536 bp, Homo sapiens
tgcattcctatgttcactgcagcattatccacaacagtcaagatatgtaaacaacccaagtttacatcaacagatgaatggataaagaaattgtggataaagaaaatatatatgcaataaaatgttgcgtataaataaaatgttcatccttatagaataaggaaatcctactatttgcgaccacatggataagtcttgaggacattaggctaagagaataagtcaayatacaaggacaaatactgcatgattccacttatatgaggtgtttataatattccaactgatggaaattacaactacaattatggttgccaggggatgaagggtaggggaaataggcgttgttcaatggatataaagttttagttatgctagatacataagttctacatatctgctgtacaacattatacctataattaacaatatagtattgtacacttcaaaatttgttaatagggtaaagttaggtaagtgttctaactgcctactgcgcccccctacctcgccagaaaaaaacccacaaagaaaat

SEQ ID NO: 359052 - DNA, 553 bp, Homo sapiens
actgttcacacctttgctctttccctttgggtctttcccacatagccatcacttgtttttctttttctagctttttaaaatggatacttaattttaaactttcttcttttgtaaaataagtacttcaagtataatctcacttgagacggagtcttgctctgtcacccaggctggcgtgcagtggcgccatctcggctcactgcaacctcttcctcccaggttcacgccattctcctgtctcagcctcccgagtagctgggactacaggtgcccgccaccatgcccggctaattttttgtatttttagtagagacggggtttcactgtgttagccaggatggtctcgaactccagacctcgtgatccgcccacctcggcctctcaaagtgctggggttacaggcrtgagccacggcacccagccctcacttgaatatttgttttggcttcagcccacaaagtttgatagttttttatgatcaaccagttctaaatatactgttatgtcccttgtgatttcttctttgacccatgtttttttatagataacttgt

SEQ ID NO: 359053 - DNA, 440 bp, Homo sapiens
attggtctctatctgtcctctataacagaggacttccctgacccataagaaaacagagacgttttctacacaaattaggtttaggggcatattatctagggcttccagagatttaccaaccattcaaacttgttgtgggtcctgragatgcctccttatctaaggctaaatgggcccgagtcaatgaagacttataattaaatcaaagtacacccatcacctatcatgaagctaagtaaagtaaagattcctaccctatggccttgctatctaaaatagactggtcaaagtttcaagggtgcagataataaagagacaaatcagtctctgattatagtcactgcttaaaaaacattgggaaggttcatttgggcctattcctgattgactgcatggtgtctgattaggtaccagctttgttaatgggtttggtgtggtac

SEQ ID NO: 359054 - DNA, 433 bp, Homo sapiens
tactttacaaaaaaataaaaaattttttgctctttgaataacttaacatgaggaatttggaaacaacctctcttgaaaatatattggtattcattcccaaataattcttytaagtaccacttgaccagaggatagggaaaggaggaaaaggtgagtgtatttatatccttgctagtttttgttatatattcagttgcagatctatattatatatcattttattatcagattttctagtgagaaatatatatgatggttttttaataatcattttaggtttggaggccatttcaattcaatatgtatgtgttttacgtgtttaattcgtatttactatatattaaaagaatttccaaatagctcagataagaaaactttggtttaaaattgagttattttataagctacatagaatacatcaaaattttataag

SEQ ID NO: 359055 - DNA, 433 bp, Homo sapiens
tactttacaaaaaaataaaaaattttttgctctttgaataacttaacatgaggaatttggaaacaacctctcttgaaaatatattggtattcattcccaaataattcttttaagtaccacttgaccagaggatagggaaaggaggaaaaggtgagtgtatttatatccttgctagtttttgttatatattcagttgcagatctatattatatatcattttattatcagattttctagtgagaaatatatatgatggttttttaataatcattttaggtttggaggccatttcaattcaatatgtatgtgttttaygtgtttaattcgtatttactatatattaaaagaatttccaaatagctcagataagaaaactttggtttaaaattgagttattttataagctacatagaatacatcaaaattttataag

SEQ ID NO: 359056 - DNA, 573 bp, Homo sapiens
agcaacagttgttccatgactgaacacaaaaatagggctccctgggagttgggcccagggcgggtgccctttaacgcctgcctctgggttgcttcagtgcagatattgaaatacrgagtgcgctcttctctcactgcaagcggggagcttggcatttgctgaggagcttctggcttcaaggagctttacccaggtggatgcaagtccatgcagctgagccccgaggccgcattggcaccctgtttgacacaagggaccctgaggcgcagggaatggaagtgactggcctgaggccatcagcaagaggggacagagccgggatggctgggtctttggcgtgggcctagtgatggttcttcaggcccttgattacctgacatccctgcccctccaagcgaggatgacatgcactaggctgtccatcagcggagaggctgggtgtctcatggaggcctctccacactgcagtggtgacctggggctccccagcctcccagctgcttctcatacaggagtcaatatcagatcagttggctaatcaaagagtaattcccaggggatggggagcagacc

SEQ ID NO: 359057 - DNA, 525 bp, Homo sapiens
tccactgtagtctctgctcaaaggccgcctcctccgagaggccgccctgactgcccacccagccagcagagcagtcactcagagacgcttgttcttgactctcgtcactctggggcaccgtgttcttgtgtgtttattaccagcatccggcagggcttgggagcaggagccrgaccacctgtgtgccaatgctggctgtgtccctcctgagtggtgaccctggaggtcacttgcggtccccatgcccagggtccgtgtctgtagcacaggcaagcgcagcctcccctgagagctgtggtcgggactgaatggggtcagattcacggagcacttaatgccaggctgggtgcagaaagtgccctgtggatttctgtcatctgaaatataaacttcaaccctctctcccagcatggctgctctcagggctgggccttctcttgttcactgctgaatctgaaaacctatgacagtgtctggctcacagaagctcttggggaatatttcttgaatgagcagacaagcccc

SEQ ID NO: 359058 - DNA, 578 bp, Homo sapiens
tgttgtcacctttcttgttctctctgtccttgttgtgttaggcctttttttaaaaaaaatttttccttgggattttgagaggaaaacaaaatttgatacatgtattcaatgcactatcttattatagaacaccataccattattgactttacaggcttggatcttgaacctcctaacccactttatgagctgaaactctcagttttctttagtttgacaccttacatagcagtgtatgatcttctggcttacttgagttgctgctctttgccattatgtctttgggaaagttaattaactacaactggaacacaagtatcttagatatggtcatcatttaatacaaatgaagcacaaaactagccatttcrtttttggctactaatactggctgccttcacctggaaaaaatgatgctgttattagtaataattcctatcatttttggagtagcttttagttgaaaatatctaaatattccttgaactcctgtggacttcttattacagactttcaagtctaagctttaaaattgagaaaaatcaattttctgattcctgccaacagcaattcttggg

SEQ ID NO: 359059 - DNA, 399 bp, Homo sapiens
cccatggccagggaggattctactgccaccactgccgaggcatttgccatgggtcattgccattcttggagcaccagactggcccatcagcccttcgtgatacgatacaaacccacaagcaggtggttgctgctccacttcatttcytcattcaaaacatttcctgaagatcatttcacttacaagaacatgtaagtgaaatataaaagatccagatcaaaaataagtacacccaagaacatgtgacttggtccaatttcagagatgtaactcttcctaggtggactgtagtattgaaaagtccaccaacctgaaaagtcacgatatctgagattaccttagaagcaacatattaaatctcttcttcaacacataaaaattagttaatttcatttgcaa

SEQ ID NO: 359060 - DNA, 609 bp, Homo sapiens
ggaatttcagctggaggatatgaacttttcaagtaaggaagcttatattttattaccaggggaagagttgtttattatccggggaagcagtagttttcaacatgtggtccacaaccagcataattaagaaagtcaccttgtcaaaaatgcaaattctcaggcctcccttggacctattgcatgaggaactctgaggaagaggccagccagatgggttttaacaagttccaggtgattccagtgcacgctaaagtttaagcgattcttctgtctcagcttcctgagtagctgggattacaggcacacaccaccatgccccgctaatttttgtatttttaatagagacagggtttcamcatgttggccaggctggtctcgaactctggacctcaaatgatccgcctgcctcagcctcccaaagtgctggaattacaggcgtgagccaccacaactggccgtatgttgccttttacaaggtgttttgtctcatttgatgtcatggcatcccctaacttccgtgaaatgaaaattaagtattgttatctttctatttcacagctaaagttactaaattctgagatgacctagggcaaatcatgtgagtaccaa

SEQ ID NO: 359061 - DNA, 609 bp, Homo sapiens
ggaatttcagctggaggatatgaacttttcaagtaaggaagcttatattttattaccaggggaagagttgtttattatccggggaagcagtagttttcaacatgtggtccacaaccagcataattaagaaagtcaccttgtcaaaaatgcaaattctcaggcctcccttggacctattgcatgaggaactctgaggaagaggccagccagatgggttttaacaagttccaggtgattccagtgcacgctaaagtttaagcgattcttctgtctcagcttcctgagtagctgggattacaggcacacaccaccatgccccgctaatttttgtatttttaatagagacagggtttcaccatgttggccaggctggtctcgaactctggacctcaaatgatccgcctgcctcagcctcccaaagtgctggaattacaggcgtgagccaccacaactggccgtatgttgcsttttacaaggtgttttgtctcatttgatgtcatggcatcccctaacttccgtgaaatgaaaattaagtattgttatctttctatttcacagctaaagttactaaattctgagatgacctagggcaaatcatgtgagtaccaa

SEQ ID NO: 359062 - DNA, 603 bp, Homo sapiens
ttttcctagggcctttccccgactcctaaacctttttggtttattttcaaactaaagactaagcagccttttaaagaagttttccacgtcagaacaccatgactttccttcctcctcaacccccaacaaaaactcatttccttattcgtgtaaacataaagtttctctagaacagtaatcgaagacagcctgaggtttcttatgttccgattttttttttttttaaacacaggctattactgttcatyagtttggctttatttagggaatccttgaggactgccccagcgctaaacaagcataatcaggggacaacaaagaagagggcgggaagagggccgggggagcagccaagatcatcttactactttttctcttaactgggaattcggtttaaagtttctagtcgcaacacgtgatgtaatcttacctttctatgggagaaaagaaaattaattcttcattcttcaacgtgaagcaggtttaagggcaagcatatgcaattagcattctgattctcagagcagcctagtcttgaggaacagaaagaatttaacttggctgcttttgaaaatctgacttgatactttccccgtaaaagtt

SEQ ID NO: 359063 - DNA, 541 bp, Homo sapiens
cccatccgtgaaaggaacacttcagagtttctgtgaccgcggagtaagtaaggtcacacaaggtatcctcagagaaagctggctgtagtctccctacttaatgggcgtggagaaacattaatcacaaagataatccaataggaacaacaggatgagaatcatatcgaaagggtattggagggtttgggggggaaagacgggtttatgtattatctctgtgacattttcaatgaaatgcaaaatcaacagagcatcttctgccagggtcactgtggtaatgaatgctgacctcaacttgttagcacaccaatccctcaaaacagcaaaaaagagaawaaatcaactgcctttgctacctttatcagcataaacaaagagataaaaatacggtataaaattttaactgtctttccccattctacctgcaaatgcgaaattcccctgtgcttcaataaaggaaaaatacatccaatgaagtctaacaaatgtgccatctgttcagaaagcagcaggcgagcatcttttacacgtgacaccattg

SEQ ID NO: 359064 - DNA, 579 bp, Homo sapiens
tgcaatattaatagctgttaattgtttaatttgttcatccttcccaggggcaattgcattttaactggcacctcagacactcaaaggaatgtgtctacaggaaattatttcaggactgtgacagcatggtggaagacagctatttgggactggaggccttccctgtaccctccaaattctgtgacaaaggcaagaaccaaattaatccaccttttatcccaggccatccctgaaacactgaggaccactttaagaggggggaaaaaaagccacttggagtgcaggctgccagcactgctctatcatctacagctaaacagaaggccagtgtcacctgaatggctcaacaaagcacaattgacttggggtctgtcaatcagacatattccactgacataatttagctgccactatatgtcaggtctgtaaagacataattgctgggtcccragagaattgatgctcaacacaaggcattacaagtgggcccaagagtgtccttttcttcccctgacatgaaactccaagaacttctccagtctaacacacgcaaaaaattcactacttttcagggacaaa

SEQ ID NO: 359065 - DNA, 579 bp, Homo sapiens
tgcaatattaatagctgttaattgtttaatttgttcatccttcccaggggcaattgcattttaactggcacctcagacactcaaaggaatgtgtctacaggaaattatttcaggactgtgacagcatggtggaagacagctatttgggactggaggccttccctgtaccctccaaattctgtgacaaaggcaagaaccaaattaatccaccttttatcccaggccatccctgaaacactgaggaccactttaagaggggggaaaaaaagccacttggagtgcaggctgccagcactgctctatcatctacagctaaacagaaggccagtgtcacctgaatggctcaacaaagcacaattgacttggggtctgtcaatcagacatattccactgacataatttagctgccactatatgtcaggtctgtaaagacataattgctgggtcccgagagaattgatgctcaacacaaggcattacaagtgggcccargagtgtccttttcttcccctgacatgaaactccaagaacttctccagtctaacacacgcaaaaaattcactacttttcagggacaaa

SEQ ID NO: 359066 - DNA, 472 bp, Homo sapiens
aatggctcaacaaagcacaattgacttggggtctgtcaatcagacatattccactgacataatttagctgccactatatgtcaggtctgtaaagacataattgctgggtcccgagagaattgatgctcaacacaaggcattacaagtgggcccaagagtgtccttttcttccccygacatgaaactccaagaacttctccagtctaacacacgcaaaaaattcactacttttcagggacaaaagcccttactttgtgttgccacagacaatgaaaaaatcagcctgtctggtccaccctcagagaaaaagccagtcagtgcaatttaccatgaccactgaccattcagtgggacttaccaactctcttggggactgcattctttcagtatgcagggtatggaaactctataagcctctcgattgccctggtgcaattactgtattgatttgatgcagcattagctccgtgtt

SEQ ID NO: 359067 - DNA, 608 bp, Homo sapiens
gctcttgctgctttcaacaatttttctttccctttgactttgtagtgcctgtggttttatttattttattgtctgtttatcctgcttgtgtttagtgagttccttggcctgtaaatttgtgtttttcaccaaatgttgaacatttttaccctttattttttcaaattttttctcccccaattttttctcccctccttcttgaactacaattaaatgtatcttagataacttgatatggtacccctggttcctaaggctctatttatttttaagcctttttttcctctgttcttcagattggacaatttctattaattttayaagtatacttacctgtcatctaccatgtgatattaagcccatctagtaatgttttaatttcaaatattttaattttcaattatacaacacccattggcttcttcacactttccatttcactgttgatgttacacatctgtttattcatgatgagtatatttttctttaaattcttgaccatgttttaaatagatgctttacagtatagtctattgattccactatcttatagtttctattgcctgctttttcttttgactgtggaatacatttttctgtttctatac

SEQ ID NO: 359068 - DNA, 546 bp, Homo sapiens
ttggggggacgcacacattcagaacatagcaccctagtacctcaaaatgcaactatatgtggagatagggtctttaaagatacaatttaaaggtaaaatgaaatgatatgcgtaggaatggtggtaggacagagtggtactggtaggaaagggtacttgggagaaactggcgacgtgagacacactcctatcacaattcattggtcacctactatgcccagagcattgtactaagcatcaaagaacgaaacaagataacaactccttccaagccaacttgtgtagccttctcttatttacaaatgcttccttactcatcattctcatctgatcttgaaaaaatatcttatgaggcaaccggagccaggaaggctcatctttaacgatgcagctattgggaaatcaatggaatgagttgataataaaataagacagaacttggccctttaattttaactgaaatgcacattgttttaccaacactttgatgtasccttttatgagtgtgaacccactgattggaattgtacattgttttccttacac

SEQ ID NO: 359069 - DNA, 630 bp, Homo sapiens
tttgctctttgacctctctattctgtggtgaccaactgaggacacactagcatcatgactccaagtctcttggggaagatcagaacactcagcagctgtaacatgtttagctatgcctatgcatttctgtctgcctatgcagttatgsctaggcctatgaagttatcaattcatacactgcaaggcagtgagtcataagtttttgtttttcttttttaatcccacagataccctttgaaagctaaagacacttttcccagatagatatacataaaaacttgtgaacaattcagggcaataagccacttgatcaggtttaagttttcccaggtatacacttcttgggttttgtctcagcgaatgaagctcttaaaggtcagaataatacagcaacttccagtaaaataaatctcacaattttttttccaattatatatctctcatgtatctgtactggacacaatattcttcctatgtccatatcccaacttggtcttggacatctttcatacttgatttgttcttgtgaaagtcataagtacctttgatggatcaactaaaatgttacttttcaaaaaaagccttttctgacaatctaaactaggtggtatatctctcttctccaaagtt

SEQ ID NO: 359070 - DNA, 630 bp, Homo sapiens
tttgctctttgacctctctattctgtggtgaccaactgaggacacactagcatcatgactccaagtctcttggggaagatcagaacactcagcagctgtaacatgtttagctatgcctatgcatttctgtctgcctatgcagttatgcctaggcctatgaagttatcaattcatacactgcaaggcagtgagtcataagtttttgtttttcttttttaatcccacagataccctttgaaagctaaagacacttttcccagatagatatacataaaaacttgtgaacaattcagggcaataagccacttgatcaggtttaagttttcccaggtatacacttcttgggttttgtctcagcgaatgaarctcttaaaggtcagaataatacagcaacttccagtaaaataaatctcacaattttttttccaattatatatctctcatgtatctgtactggacacaatattcttcctatgtccatatcccaacttggtcttggacatctttcatacttgatttgttcttgtgaaagtcataagtacctttgatggatcaactaaaatgttacttttcaaaaaaagccttttctgacaatctaaactaggtggtatatctctcttctccaaagtt

SEQ ID NO: 359071 - DNA, 582 bp, Homo sapiens
aattctacaagtgatttaaaaaccaggcattagagggagataagctaatatgggtgggtaaacaccagaagaaataatacatgatggamttagatccaccagtaccccagaaactgaaaatactgcacatagaatgtaagagaactggttactgtggtcaaagagatagaagctaagtttgaaatttttgacagtgaactacaatctacaagaagtgataaagtagatttgaagaggaactattaatcagtagaagttcttgaactaaaaaataaaagaaccaaaacgaacagctcaatagataggtttaactgcagattagacttggccaaagaaagaattgaaaatcaggtcataagagactatacagaaggaagcagagaaagtcaaaataattgaacatgctgaagggcaggcaagatacacagagtgagaaggttggacatacatttaattggagttctggaagggaagcagagaatgaggcagcaacaatatttaaagagacaatgagagagagcccttcaatatactgataatattctatgacaatagcaacagcatcttactgaagtctatatt

SEQ ID NO: 359072 - DNA, 559 bp, Homo sapiens
ctttttgactcaactctggttaattcagccatgctgtcagagctgctttgatgcaaggacatctgaatgctatctgaatgctgcccctaaaataacaaattaaaaacaacaacaacaacaaaaatcaagtgttgtagaacagttctcctgccccaatccctgagcctcagttcatcccagcccttcctcctagggttagagagaggctcaggatgagctgagatactaggatgaggtaagcgacaggaggggctgaaggctgggactaagagttgggaacaggtataggaagaagtccagtgacaaaagcctggtcaggaatggggaattaaaacagatcacattacatcagcagtcatgtcmaatgttcctagtccaaagagctctgcaattatcaccttggttgactgtcttgcaactccaccactcacacgcaggaataggcagccattaccaagggcatggttggacctgaagcttgccactcaagaccctccagcatttggccaaacttccatctccatcttatttcttccccttcatgaactgtcattttaaa

SEQ ID NO: 359073 - DNA, 607 bp, Homo sapiens
ttctttaatctttgctattttctaggaccacagggctggggtgaaattcagcctcactacagtgaaagcttgtttaatctccgtaagcctctgtttcttcctctgtaaaatgggggtagtaatagctacttcccaggactgctgtgcagattaaatgagacaagatatgctaagtgctgaccagggctcctggacacagtgaaactaaatattgttgctttttttaatgttgcatatctaccatgtatcaagcattgtgctcagcattgtaacaaaaaatattttgagaagattttgggatgctgaagcaggaaaggcctgggacaggtgcgktggctcacagatagcttctataccttccttactgcccttttctagggaatgagagagacacaagtttgatgatctccattgaccctggacttcacaattctaaatcacaggctgtctgaaatgaacatagcatggtatccaggagatttcccccaagcagcaatttcattagtcttcccagatgcagaatactggcactgtactgattctgctctctcacctgggctgggtgcacgctgagtccaccttttctacagatggtgatggctgagca

SEQ ID NO: 359074 - DNA, 590 bp, Homo sapiens
gtcagcatagttcacattctttgcacctatgtaaagacttttagttcttaccactaatccagcttcttgaggaagatttctgaaaggctaatggagatacagcctgcggtgcttgaagagtggcttttagccaatccccctcctccaacttctctgttccctctcagggccctaaattgtggtaagagttggtttttcgtaggaaacttgaaaaggtttaaagacccaaataaatagcctatggttctttgagtccctggagaagatgttttggggacttctttacatccagccaatgacacagtgaggccggcccagcaatgtcaggcccaggtgtgagtgcggcaccattgaagagaggtggaatcaactgccacctcctcctgccctgcagctgcaggagtggctggtgcaaaggagaacagccaaaagcataaggatatgtacaaaagcataaggaaacctaatgccatccataatggaaattayacttgattatcatttctcaaataagaatgatggttttgaattagctttcgggtactttttttctctttgtaaaatagatacatttcaataaacttggctat

SEQ ID NO: 359075 - DNA, 537 bp, Homo sapiens
ttgacattttgtagtagagcagccatttggccatcaatcacattctcccgtctctgcattgctgattgccaggtcacagcagacgactcctgagactatgaggctgtctgttcctgatccggctctcagcacttagaatgccctcccttcctagcctcctggagcaacaggctgacgggctgtccctgtgaaccagccagacagagcattaacgaggaagatctgtgagaagtctcaacttcctgccaaacttcccattagctcttttacatctctccctcccccttttcttctctgtcgctcttcctttgctaacttgcttttctgttcccatgccccaacttctgcaaacttccagactcctttaaatgctaattcttaaattggagagtggtctgacagagacttatcattcccttattaagttttagggcctgaaccagaaggcgttttcttgttgcaagaatatgacytttaaatctggacagcaaggttaatactaagacattatttgaagattcatttctggagccagta

SEQ ID NO: 359076 - DNA, 509 bp, Homo sapiens
tttgctagcactctcagttgactaacagaggcaaatagaaatgcttttgccaggccagcttctgtggccccaggctctaggctggcccccacggctccatgcctcagtggacccatggtccaaccctgcctcagtagaggtgctcgttcagcccctgcgaacacaggctccaagccagtcccctgagatccagtgaacaggtccaccccaggggccccctgcaccaggctgacccttggagaactaagattcagggccacccccagcagatccyagctttaggctcccctcagtgaatccaggcacagacccactcacctgctgaccctggaactagccacctgcccaaggactccaacaggaagcctgcctgtggatcatgccaaacgcccaccaagaatctttggatcaatgaaattaagagttgctttttcaaaaaaataaacaaaattgacaaacctttagccaaactaagtaagagaaaaagagaggaggtttaaataaaattt

SEQ ID NO: 359077 - DNA, 584 bp, Homo sapiens
ctgcccaaggactccaacaggaagcctgcctgtggatcatgccaaacgcccaccaagaatctttggatcaatgaaattaagagttgctttttcaaaaaaataaacaaaattgacaaacctttagcyaaactaagtaagagaaaaagagaggaggtttaaataaaattttaaacaagaggcattacaactgataccacagaaatacaaaggatcataagcgactactatgaacaattctgtggcaacatattagacaacccaaagaaatgaataaattcctagaaacataaacctaccaagactgaatcatgaagaaacagaaaatattaacagaagaccaataacaagtaaggagattgaatctgtaatcaaaaaactcccaacaaagaaaagctcaggatctgatggcttcgctggtaaattctaccaagtatttaaagaattaactccagtccttctctaactctcccaaaaaattgaagacaagggaacatttacaagctaatttttcaaggccagctttactctatgactgaagctagacagggatattataagaaaagaaaattataggccaatatatt

SEQ ID NO: 359078 - DNA, 584 bp, Homo sapiens
ctgcccaaggactccaacaggaagcctgcctgtggatcatgccaaacgcccaccaagaatctttggatcaatgaaattaagagttgctttttcaaaaaaataaacaaaattgacaaacctttagccaaactaagtaagagaaaaagagaggaggtttaaataaaattttaaacaagaggcattacaactgataccacagaaatacaaaggatcataagcgactactatgaacaattctgtggcaacatattagacaacccaaagaaatgaataaattcctagaaacataaacctaccaagactgaatcatgaagaaacagaaaatattaacagaagaccaataacaagtaaggagattgaatctgtaatcaaaaaactcccaacaaagaaaagctcaggatctgatggcttcgctggtaaattctaccaagtatttaaagaattaactccagtccttctctaactctcccraaaaattgaagacaagggaacatttacaagctaatttttcaaggccagctttactctatgactgaagctagacagggatattataagaaaagaaaattataggccaatatatt

SEQ ID NO: 359079 - DNA, 587 bp, Homo sapiens
tcacctaattgaatgaaatgccacaactgacaagagttcattctgaatttgagcttcatatccccaagaagacattttcttagtaacacttagcaaaatgatatctatcaaatcactggtgcagttagaatttaatttgctctatcagctgccattgtcatgctacttaaccttaaaaaatgtaattttcctcaagacttcataattccttttacatttcttcttctttttttctcattgctttaatttaataaactattgaatgagaaaaggctgggtaagagccattcttcacaaggtgacagggaaggagtgaatctgttgtgtccccatgcrtttccaattcacccctacttctctttcacctcccagctggaatctgatgctttccatgctggctttcctcctgttgctagtccacagcatcttcttaaggaaggggaaaggaacttgccgagaagtgggagagaaaagaagaggcagcaagaataagaaaataaaaggaggaaataaaaaacagaagaaataaatagcaacaaaggggaaagaaaaatgaaagggagaagcaaattgtgaaaagtcaaaga

SEQ ID NO: 359080 - DNA, 497 bp, Homo sapiens
tcacccctgttaaaactttctgtattataatgacccgtttgacatcwcacacacacacacacacacacacacacacacacacacacacacacacacaccctgtagattatgagtacctcagtgacaaagactaaataatacttatctatgtgttcctaatatcttcagcccaggttgcctgaaaagatggaaatcccaagacaagaaaagggcacagttcagtttctctgacttcttttattaaagatttccatggagagaactcattatgctcttgtagttaattttttttttagctgtactatttgtcaaaagcatcactttccagaaaaaaaaaaaagattgccaagagacaagaggctgaggtctagaactacctctgccaccaactagataggtaacctagatagtccagctcatgtccctatgtccctcagcccaatctctcaccagcaattgagaaatcaggactcaatagtctttatggattgttaagc

SEQ ID NO: 359081 - DNA, 497 bp, Homo sapiens
tcacccctgttaaaactttctgtattataatgacccgtttgacatcacacacacacacacacacacacacacacacacacacacacacacacacacaccctgtagattatgagtacctcagtgacaaagactaaataatacttatctatgtgttcctaatatcttcagcccaggttgcctgaaaagatggaaatcccaagacaagaaaagggcacagttcagtttctctgacttcttttattaaagatttccatggagagaastcattatgctcttgtagttaattttttttttagctgtactatttgtcaaaagcatcactttccagaaaaaaaaaaaagattgccaagagacaagaggctgaggtctagaactacctctgccaccaactagataggtaacctagatagtccagctcatgtccctatgtccctcagcccaatctctcaccagcaattgagaaatcaggactcaatagtctttatggattgttaagc

SEQ ID NO: 359082 - DNA, 599 bp, Homo sapiens
caaaaagaaaatgcatagcatttatctgatacttcttgagatgaacatcggatatgttagcatgtgtttaaaagaaaaaaaagctgttatgatcataagagtgtacacttactataacccatcttacagagcaagcagaaaccagcctcttttgattcatataagggtgtactaagagatattttttctctttctctctctttttttaacagaactatttgttggagtgccagattatttaagggcctttgcatgtttcaagtcctcttcttaaagtaagaatactctccacatttataacagcaacaaaaacaccaatgtcagcacaaaatgcaaaaacggaggcacttctatgtcataatgatacatcagagttctgctcaactcttttttagaaaaagaagctcagacttacacacatccactttcttaaataaataattgttcaatgaaagttaccctgggaggattgctgtctccagctcccaagcactgctcatctgctgacggggggtactytgtgactgttacagaaattgctcttaaatgcataaaacacagaagagaatttttggaaaatcccttattattcattaaag

SEQ ID NO: 359083 - DNA, 595 bp, Homo sapiens
gttagcacacaagccagttgcaatgaacctgtctttacttctgtcagtagagcatattctgaggtcttgaggttgtacttttccaagttgtgattgatgttccttaagtttsagatgtctgtgtaaatcctgtcaactcagcaaagaagttctgaagtgaaaaagacatagaagaagcatggcctattggaaagagctctggaaggaaagagaagcgttcaatttatatatctttgggcaactcacatgttctctctgaacttcagttttcctttcaatgaaatgcaaatagtgaacctagtttatagaattgttgtgaagatcaagcagcttataacataaagaccttgacaaaagtactaagcaaaacttttaatttttgaccatgcaaaaagtggaagaagcatcttctcctggttcataaaagtgtcacataccaggagacataaatgtctgtatgaggcagctatgagttttgcctgggaaatacagatcatggatgagggagtaatgcttaacactgtgcacctcctgtgtgccagggatgttttcacattttctctttaatttttaggacaaccttatgaggtggcaa

SEQ ID NO: 359084 - DNA, 595 bp, Homo sapiens
tttttataagtttacatccagaagatcaaatataaaatatatttctacatctatttctaccagagacaagtaactttgggattcttttctgtccttctgttcaccttctgccttctctacaagctgasgccatttatttctgtataaatatgacattagaaatattttcacatatccttcctttccagtttacctagttttgacaaaacatagaccaagggtgttctttgagcctttaacttacattaaaagtgtgacatctagtgtagcaggcacatgatttataggactcctcagatattctacctccttcctgtgagaagtgctgcccaatgcctgaacaacattacggacactgggggctgaccagtcacttgttctggaaaggccagactccttctctaatgctgtttctgagtagctaggctggccagtagcaagactggagttcctggttcttaacagccatttctagacttgaacagaacctcacaatgaaggttcggattgtggcatcttgagtcactaaagcaactatgatatagagaagggcttaatactctgagagatgaactctgaccaactagaaacagaa

SEQ ID NO: 359085 - DNA, 595 bp, Homo sapiens
tttttataagtttacatccagaagatcaaatataaaatatatttctacatctatttctaccagagacaagtaactttgggattcttttctgtccttctgttcaccttctgccttctctacaagctgacgccatttatttctgtataaatatgacattagaaatattttcacatatccttcctttccagtttacctagttttgacaaaacatagaccaagggtgttctttgagcctttaacttacattaaaagtgtgacatctagtgtagcaggcacatgatttataggactcctcagatattctacctccttcctgtgagaagtgctgcccaatgcctgaacaacattacggacactgggggctgaccagtcacttgttctggaaaggccagactccttctctaatgctgtttctgagtagctaggctggccagtagcaagactggagttcctggttcttaacagccatttctagacttgaacagaacctcacaatgaaggttyggattgtggcatcttgagtcactaaagcaactatgatatagagaagggcttaatactctgagagatgaactctgaccaactagaaacagaa

SEQ ID NO: 359086 - DNA, 654 bp, Homo sapiens
actattgggtcaaaatttccagtttgaaaaacagtgtgcctagacagtctggtgaagttcagtttccaaactaatcatccgcaggtctcctagttcctcaaatgcacatcttctgactcctttaggggtttcctatcctctagtgttgwtgtcttcctggggcagccctctattctgctcttgattgaatttcctctcagatatcacctgcttgcctggctatgatgatcattgctgctgtagtgattcataaatgtatattcctaactgtggttgcgttcctgaattctgtatgatgtttccagcagcattccaaacagtttcatgtagccttctgttgtacccttcatcttgaactcagcaccaaaatcaaaatcattattttgtctaaacactgcaacttctcttcttagtctattaatggctctcttattcccctatctacctagcctaactattccaggccatcactgactcttcactctccttcaccctccgcagctcacctttcctcagctctcgttaattttttgctcacaacttctctctcacttttccattttgacaccacatcatctcaatttaaaaaaccaaatggcttctcattacctacagagttgaatgttaactctttagaatattggactttggcct

SEQ ID NO: 359087 - DNA, 654 bp, Homo sapiens
actattgggtcaaaatttccagtttgaaaaacagtgtgcctagacagtctggtgaagttcagtttccaaactaatcatccgcaggtctcctagttcctcaaatgcacatcttctgactcctttaggggtttcctatcctctagtgttgttgtcttcctggggcagccctctattctgctcttgattgaatttcctctcmgatatcacctgcttgcctggctatgatgatcattgctgctgtagtgattcataaatgtatattcctaactgtggttgcgttcctgaattctgtatgatgtttccagcagcattccaaacagtttcatgtagccttctgttgtacccttcatcttgaactcagcaccaaaatcaaaatcattattttgtctaaacactgcaacttctcttcttagtctattaatggctctcttattcccctatctacctagcctaactattccaggccatcactgactcttcactctccttcaccctccgcagctcacctttcctcagctctcgttaattttttgctcacaacttctctctcacttttccattttgacaccacatcatctcaatttaaaaaaccaaatggcttctcattacctacagagttgaatgttaactctttagaatattggactttggcct

SEQ ID NO: 359088 - DNA, 571 bp, Homo sapiens
actttcatgtgcatataaattatctgttagaataaagattcttattcagcaggccagggatgtggtttgagattctgcgtttctatctggctttcagaaaatgtgaggctgctggttagagacccacactttgagtagcaagattcaaatgtggctttaacccatcccttcttcctccatgccactttttgggtttaagaccttattattacttattctcctgactggtctatttgccacctgtccctccccaccactagtctgtctcataaaacyattatctaatggatcattacttcatttgtgaacttcctaaaacaaaagtgcaatggaaattagaaatgcgatccttagagacctggcctctgaactaggattgggttaggcgccttgcttgggacatccttattctattcctgtttctgtggtttccttcttctctgctcattcattttgatgaaattaattaggctgttctgcttttcccaaaacactgattttctttttgccccagcccaagccaggccccatatactatggcacctggatttttcacacaacttgaattttc

SEQ ID NO: 359089 - DNA, 623 bp, Homo sapiens
cgtgggtctttgggggtaagatagagaatattatggctgttccaggtacatgaccacaaagagaaaataaatattatccatacacaatgccaccaagacaatggaccctaaagggggtatattgactactgtggagctgatggaccctccacccctgtctaayagagccagcagtccctaaagattgttgaaataaattccaggttccagtgggattgcctccaggtcccagtggaagaaaagattttggctggctggagagaagtattcctgtatttggttctcaactcagctcagctcatgagtctatattcttgggcaggtggagtgctgggaattgcttggacaatgatgatgctgataacaaatttatatttaaaagttgactcttttctcagttacttgagtgattgcaaaagaatagctctggggttctgaataatttgaggaattttttgcctggtagccctggcctaattacgttgggagtcaatttcatgtgtgcaatataatagcaggcacaatgcacttgggagggaagaagtcttagcttaatgtttttactcattttttcctccttacctcttcatctattttaatttggcaccttggaagccagctgc

SEQ ID NO: 359090 - DNA, 623 bp, Homo sapiens
cgtgggtctttgggggtaagatagagaatattatggctgttccaggtacatgaccacaaagagaaaataaatattatccatacacaatgccaccaagacaatggaccctaaagggggtatattgactactgtggagctgatggaccctccacccctgtctaacagagccagcagtccctaaagattgttgaaataaattccaggttccagtgggattgcctccaggtcccagtggaagaaaagattttggctggctggagagaagtattcctgtatttggttctcaactcagctcagctcatgagtctatattcttgggcaggtggagtgctgggaattgcttggacaatgatgatgctgataacaaatttatatttaaaagttgactcttttctcagttacttgagtgattgcaaaagaatagctctggggttctgaataatttgaggawttttttgcctggtagccctggcctaattacgttgggagtcaatttcatgtgtgcaatataatagcaggcacaatgcacttgggagggaagaagtcttagcttaatgtttttactcattttttcctccttacctcttcatctattttaatttggcaccttggaagccagctgc

SEQ ID NO: 359091 - DNA, 554 bp, Homo sapiens
ttgtcatccaggcagttctgagcaaagggaagattatatcagatgccaacatctgggcacagtcccctagctgtaacacagctaataacactctccaagctgtaacacagcacagtctcctagctgtgtttcagctaatgaattatacgcatggacagaccgtaaacagccttaatgtagaatgtcaaatttgaacattccaacatagaattttgtctaatgtagaatctgcacttttctgtctcttgctcatttcatacatcactgcaatgaattcagtctgaatacagacttaaaattctttcaagggatgctgcgcctaaggcaagacattgctcaggatagctgggggaagaggaggccggtgtcttttctcagccacccatgtgtcactgtgaattattgcctacgttaggcaatgagcagctgaattgatggaagttttgcttttctctttcagctgtcttctgtggagaaaaatatttttwaaaaaagataaaatatgaaatcagaaggaaagactaagtgaatcccaagtacctaaattaaattac

SEQ ID NO: 359092 - DNA, 550 bp, Homo sapiens
ttaaatgcattaaagtaggcaagtgccgaatagtaagcatttagtattagccagtgggaagagagaaggcatccttagtttcataaagtctcctaggagtctgcaagagaatactaggagtcactgctacgcagagcagagtcctagtaataattcccatgataacaaagcaaggcattttagtggaaaaggaccttgactaagagtataaagtcctgggtttaaattccagctctgcttctatrtagccaaagccacgaacatctcctgcctacactcctatcaacactctaattcctccccttactctccttccttccccttgtgccctctgataatctcttttccaaatggcagccagaatggtcctttaaaagcataaatcagtttaatgggtatagagtttcaatttttccagatgaaaagggttctggagatggatgggtagtagtgacagttatacaacaatgtacttaaccctaccaaactgtacacttaaaaacagttaagatggtgaatttggttgcatgtattttactacaattaattt

SEQ ID NO: 359093 - DNA, 512 bp, Homo sapiens
catcttattttacacatggacaagaaagacagtaaaggaacctttttccccccaagatcatatagtttgtttcgacagagctgagactgcacctctgaggcagaagtaattccaggatttgggagtctggacatctcctgaatgcttctggcataacttgtttggggaatgtaaagaaatatgatgggmaacatccttccaaagagtagttcagagactgaacaaataagaacgggcaagatgtctgggagagacgggtgatgccaggatagatgcacatctaactgaacaatttaatgtggaggcagcagagtaggtgattaagagtattgatcctggctgcattggaatcctggctttaccacttgctggtaacttgagtcattgacaattaacctctctttgcctcagttttctcaaccataaaatgaggattaaaaataggatcagcatcatataggatatgatgaccattaaatgaattaatatgtagagatctctgaaatgttgcc

SEQ ID NO: 359094 - DNA, 557 bp, Homo sapiens
aatgcttactaactctctgactatagcacataattaatgtaactatcaaattataataacagtacctacttcattgggttattaaaatcacttagcacaatgcctggcccacagtgagttcgcattcatgttcactattattaatggctgttattcatggtggttaaagtatgtrgagagctgggtcctacattgtggaggatcctgaatttcacactgtatttaattttttcagtaagggaagctaagtgatggcgtctgaagaaaagaatgattattccagagtatggaagttatgatggaaaagaacagagactttgtgtatagagattatgggtaagaaggggtcagaggagagataataggcatcacactaaaatagagatgggggaatagaaaagcaggatgctcacctgaaagaaattataggtagaatataaaagctgggcactgattatggagtaagagaaagaatcaactctgattactaaattttgagcctgaatagtgtggataatggtgatataaggaagagcaagtcaagagggagcaggaag

SEQ ID NO: 359095 - DNA, 468 bp, Homo sapiens
gagttcgcattcatgttcactattattaatggctgttattcatggtggttaaagtatgtggagagctgggtcctacattgtggaggatcctgaatttcacactgtatttaattttttcagtaagggaagctaagtgatggcgtctgaagaaaasaatgattattccagagtatggaagttatgatggaaaagaacagagactttgtgtatagagattatgggtaagaaggggtcagaggagagataataggcatcacactaaaatagagatgggggaatagaaaagcaggatgctcacctgaaagaaattataggtagaatataaaagctgggcactgattatggagtaagagaaagaatcaactctgattactaaattttgagcctgaatagtgtggataatggtgatataaggaagagcaagtcaagagggagcaggaagagctgagtggggcagggggagggtta

SEQ ID NO: 359096 - DNA, 647 bp, Homo sapiens
atttacatacatttcatggcagcctctagttgatacacaaaagagaaaaagaaaggactcaaagcatactgtcccaaaaaatcatcaaatacaaaggaagacagaagcaaagaagaaagaaagaaactacaaaacagttggaaaacaattaacaaaatggcaagactaagtccttacctatcaaaaaatgtaaatggattaaattctccaatcaaaagacatagaatggctgaatgaatttttttaaaaagatgcracaatatgctgcctataagaaactcactttagctttaaggacatacataggctaaaagttaaggggtagaaaaagatattccatgtgaaagtaacccaaacagatcagggatagctatacttatatcaaacaaagtagactaatacaaaaaatattgtcaaaaaacacaaataaagttattatatacaaaaagatccattcaatagaaagataaaacaattaaaattacatatgcccccaacatcaaagaacctaaatatataaagtgaacattgacagatctaaataagaaaatagacatcaacacaataatagtaggagacttcaatactccattctctataagggatatatcttctaaacagaatatcagtaaggaaaaagcagaact

SEQ ID NO: 359097 - DNA, 622 bp, Homo sapiens
gtcgtgggaattaattgagtcacgggggcaggtctttcccatgctgttctcatgatagtgaataagtctcatgagatctgatcattttataaagaggaattcccttgcacatgccctcttgcctgccaccatgtaagacgtgcctttgctgttctttcaccttctgccrtgattgcgaggcctctccagccacgtggaactgtgagtcgattaaacctctttcctttacacatgacccagtctcgggtatgtctttattagcagcatgagaatggactaatacagtgagcttaagctaagagaatattaggcatttgttgatttgtaatattattgtggaaaatgtaataataataataacaaattaaaagataacccatgagagaagaaaactttcaggctttgcctcgtccaacatttgctgcttgggagcctgtccagccaacactattttgaaggacagtgctcatgtgccctatgatactttttgactttttgtctctcatagctaatactgcttggtggcttctatagaccaaccttctgcctaacctgcttccgcatatctgatttataaaatctagattttatttttttttaaagtttgatatcaggcaccaaa

SEQ ID NO: 359098 - DNA, 622 bp, Homo sapiens
gtcgtgggaattaattgagtcacgggggcaggtctttcccatgctgttctcatgatagtgaataagtctcatgagatctgatcattttataaagaggaattcccttgcacatgccctcttgcctgccaccatgtaagacgtgcctttgctgttctttcaccttctgccgtgattgcgaggcctctccagccacgtggaactgtgagtcgattaaacctctttcctttacacatgacccagtctcgggtatgtctttattagcagcatgagaatggactaatacagtgagcttaagctaagagaatattaggcatttgttgatttgtaatattattgtggaaaatgtaataataataataacaaattaaaagataacccatgagagaagaaaactttcaggctttgcctcgtccaacwtttgctgcttgggagcctgtccagccaacactattttgaaggacagtgctcatgtgccctatgatactttttgactttttgtctctcatagctaatactgcttggtggcttctatagaccaaccttctgcctaacctgcttccgcatatctgatttataaaatctagattttatttttttttaaagtttgatatcaggcaccaaa

SEQ ID NO: 359099 - DNA, 552 bp, Homo sapiens
catcaatgcgcactgtggtcgtttccatatcttggctcctgtgaataatgctgcactgaacataggggtgtatacagatatctctttgatgtactgatttcagttcctttggatatatacccagaagtgagatggctggattgtatggtaattctatttttaattttttgaggaaacttcatactgttttccaaaatagctgcactaatttacattcccaccaatggtgttcagggttccagatcctcaccagcacttgctatcattcatctttttgataataaccaatctaacaagtgtgaagtggtatctcattgtggttttattttgcatgtctctgatgattagagatgttgaacatatttttttatgtatctgttggccatttgtatgtcttctgttcaraaatgcctattcaggccatttgcccatttttataaggttgtttgttttcttgttactgtgtagttggtgttccttgtatattttagatattagccccttatctgatgtatgatttgcaaatattttctcccaatttgtgggttgtct

SEQ ID NO: 359100 - DNA, 555 bp, Homo sapiens
tttccagtaagcttcttttaagaggctattttctattctctagtggttattttatttttgctgtttcgaaaaccatttttatttaagtctaatttcatttaattgtcagaaaatgtgatttgtataatttctgcttttttgggggaataatctaatgagtttttaatagctctatgtatgatcaattattgctacagttccatgaatatttgagaaaaaattaaaaaatattctctggaaagacaaagtttgacatgtgtctacaaaaacaatattgttcaaatactttatattattatttttatgccattratttattcaagaccgaggtgctgtcttaaaatctcccactccgagaagaattttttctctttctgctgttttttgtgttatatatttgaatcccatattatttgattcttaagatttatgagttttatatgttcattgtgaattgtgccctttatcaaaataagatcttaaaatcccatttaatgcacttgatcttgaatatggcttcattgtatattactattgccatgcttgctttaattt

SEQ ID NO: 359101 - DNA, 493 bp, Homo sapiens
ctcataaaacgactgcatgttttagcagcttgtgaatgtaatggcaagcaatgacactaatctgaccccagggcagaaattctgaatttcttctacacttttctacaggggagtagaaagaccacaggaatacacctcaagggctgatgttctgttcctgcatggctgctagctaaatgtgggacttccggtctcagttcttgcatctataaacgttaagggtgaattagacaacttcacccaacccctttgcattctaatgttttatatgaatggccaccaggaaccttatcagagtccaagatattctaacaagcraaaagaacagtgtcctagatccatgatcacttacccaatgggaaaggcaaacacataacacgtattttaaaaggaatccccatccctagcagactttttttttcttttctggtttctgcttttggttttgttttttagatagggtctcccttggttgcccacgatggaatgcagt

SEQ ID NO: 359102 - DNA, 539 bp, Homo sapiens
ttgttatcaccagaccagacttacaagagctccttaagtgagttctaaacatggaacaacataactatacctgctatacagaaacacacttaagcacatagcccaaagaccctataaagcaatcacacagtagaaactacaaagcaacaggctaacaacttcacagtggatgaatagtaatcattagttgtctaagtgccccacttaaaaggcatagtgtggcaagttggataaaaaaccaagacccatccatctgctgttttcaagagactcatctcacacataatgacatccatagcctcaaagtaaaggaytggagaaaaatctgtcatgcaaatgggaaaaaaaagcagggattgctattcttttattaaataaaacaatgtaacaacagtaaagaaggacaaaaaagggcattatgtgatgataaagggttcaattcagcaagaagacttatcttaaatactcaacattggaacatctagatttataaaataagtacttctgaacctatgaaaagacttagatgtctacacaat

SEQ ID NO: 359103 - DNA, 558 bp, Homo sapiens
cagctaattctgacatctctgtcttctcagtgttagcttctattgattgctctctttcaggacaattttcctgttttttatttttatttttgtgtgatgagtgattttttgacggaaacctgtatattttgagctatgatattatgagactttggatcttatttaagccttctgttttagctagtgtagtgagttgaatattgcctccactgccccccccccattcatgtctattcaraagctcagaatatgatcttatttgaaaataggggctttgcagatgaaattaattaagggtcttgagatgaagtcatcctaagtttagtgggggccttaaatccatgacttgtgtccttgaacatggaggagaggatacaaaaagacacagggaaggacatgtgaatgcagagcccaagattaggggctatgctgtcacaagccaaagatcatctggaggctccagaagctggaagaggtgaggaaaaatttcctctagcaacttcagaatgggtgtggccctgaaagcacgttgattttgatttctggcctccagaagtg

SEQ ID NO: 359104 - DNA, 559 bp, Homo sapiens
tattattcaggttatatgaatatttcgtgaacccagatgttaaaataagtaattactttctgaaatactggtttgtgaaaagcagtgggctagtgttctcctcccccagggttttctcatgctaatcaaggctactttctgaagatgaacgctttctcaattttgttttctgctctgtatgtttctccgcttgttatctaacatcctttttttactgctacttctctgcctgcccagtactcaatgtgttcatgagcactgtctaagctttttacaggatgaacatttgggaratagccaaattctggtcttccctatataatttggtcatgaactcaattatgttccttgacttgtatatgttggactagcttttctcagaaatattgtacactgtgtgagacccaaggctatatttcctacttctttcttatcttttgggatgatgaagaaaatgctggcctaataactgatggtgaaatgaattaatgaaggaggtaaagagaatctggcttagaggatagtaataaagattaaatattttttttattagattata

SEQ ID NO: 359105 - DNA, 550 bp, Homo sapiens
ataattttcctacaattaattatttaatcaatctattcatttgtttaaagcatattaattgagcacctcttctttttcaggcaccgttttagactctggggagcagcagggaacaaagaagacaataaacaaatcatgtcaaaagttctttacactkcctctactggtctgcttgagctttatattaaccatcttattttacctgcaggaaacatgcgtttaggagagagagagaacatttagacaagactttttttttttaatggaaagtaaagctataactattattcaaatgccttggctctgtgctctttttcaggagactctgctgctgctaagccatccccctggtgtttaacctcccacagtttgtggcaccaatagtgcatcagcgagcaacattaattatgcacctactatgttccaggcactgtgctaggcacaaagaatactgtcgtgaacacaacagaaatttattttcgtatgaacatagacattaaagaaagtttgaaagtaattacttaactaatagtaaatgttcaaagaagta

SEQ ID NO: 359106 - DNA, 550 bp, Homo sapiens
ataattttcctacaattaattatttaatcaatctattcatttgtttaaagcatattaattgagcacctcttctttttcaggcaccgttttagactctggggagcagcagggaacaaagaagacaataaacaaatcatgtcaaaagttctttacactgcctctactggtctgcttgagctttatattaaccatcttattttacctgcaggaaacatgcgtttaggagagagagagaacatttagacaagactttttttttttaatggaaagtaaagctataactattattcaaatgccttggctctgtgctctttwtcaggagactctgctgctgctaagccatccccctggtgtttaacctcccacagtttgtggcaccaatagtgcatcagcgagcaacattaattatgcacctactatgttccaggcactgtgctaggcacaaagaatactgtcgtgaacacaacagaaatttattttcgtatgaacatagacattaaagaaagtttgaaagtaattacttaactaatagtaaatgttcaaagaagta

SEQ ID NO: 359107 - DNA, 550 bp, Homo sapiens
ataattttcctacaattaattatttaatcaatctattcatttgtttaaagcatattaattgagcacctcttctttttcaggcaccgttttagactctggggagcagcagggaacaaagaagacaataaacaaatcatgtcaaaagttctttacactgcctctactggtctgcttgagctttatattaaccatcttattttacctgcaggaaacatgcgtttaggagagagagagaacatttagacaagactttttttttttaatggaaagtaaagctataactattattcaaatgccttggctctgtgctctttttcaggagactctgctgctgctaagycatccccctggtgtttaacctcccacagtttgtggcaccaatagtgcatcagcgagcaacattaattatgcacctactatgttccaggcactgtgctaggcacaaagaatactgtcgtgaacacaacagaaatttattttcgtatgaacatagacattaaagaaagtttgaaagtaattacttaactaatagtaaatgttcaaagaagta

SEQ ID NO: 359108 - DNA, 542 bp, Homo sapiens
agaataaatatttattttatctacctatggtgatgtcttcaaaaattataagaccacatgcaattagtggtttttgtagtgtgtacatagcataataaaacctttcttttatcataaaaaatactgacatttttaaggaaaaaaatcttgaattttaatgggatgtttttgggtttgttttattttttaaataatattttctgaaacttctggaatatttttattacatgattatgtgattgagtatgaaaaaccattttaaattaccatagcaaattgtttgacctacttcttctctttggcacattttggagatctttactttgtttcattctcattaataggaatttcaatttggtcttcttaataacagatatttcaatttctgttcagtaatttattatggtatcatgtcaaataatagtatttattgaataacagcatgaayattttttatttttaaatgaatgtatttacagttgaaattatccccatgagttttttatttgtttgtttgttttagttgattgttttatgattgc

SEQ ID NO: 359109 - DNA, 542 bp, Homo sapiens
agaataaatatttattttatctacctatggtgatgtcttcaaaaattataagaccacatgcaattagtggtttttgtagtgtgtacatagcataataaaacctttcttttatcataaaaaatactgacatttttaaggaaaaaaatcttgaattttaatgggatgtttttgggtttgttttattttttaaataatattttctgaaacttctggaatatttttattacatgattatgtgattgagtatgaaaaaccattttaaattaccatagcaaattgtttgacctacttcttctctttggcacattttggagatctttactttgtttcattctcattaataggaatttcaatttggtcttcttaataacagatatttcaatttctgttcagtaatttattatggtatcatgtcaaataatagtatttattgaataacagcatgaacattttttatttttaaatgaatgtatttacagttgaaattatccccatgagttttttatttgyttgtttgttttagttgattgttttatgattgc

SEQ ID NO: 359110 - DNA, 403 bp, Homo sapiens
tgataccttctctgtcactagtcaactctgatacacttgctgttgggaatatagggaaaaaagaatctctccaggatttaaataygcatcctaagcctccaaaggttgaggtcaggcctggtagtggtcctcacctatcttcattgcccttccacatttctcaccaccattaactccactttaacagctctggcatcatgaataactgatgaattatgaagatgagaaagaagagaatggcaatcagaagcagatttattgtgaatttaatgaagattaagtttcaggaatgcttacttgcccatgtggcttcaagaccctgggagagatcctgatatagtaataggttcatgtagtcatgagttttcataggatttgcaaaaggaaaacactttattgattt

SEQ ID NO: 359111 - DNA, 572 bp, Homo sapiens
agcactggaaacatcacctagcataaaggagtcatctgtaatatttgttggacaaatgattaagttgaatctagtagaccaagaatctgaggtttgtccatcagagttaaatttcatggttattacacatagcatagaacagtatttccgtcattaaaaataatattaataataataatgcccatagcaattttttaaattggtaaagtgaggtgtataggatgttcgggaaaagcttcatcttggaaatttaattgctttctgctcttcaatgagtcattctatttggaatggaaaatctagtcctcatatgttaatttatttaagagggatgagctaagagcaatacaaaccgacagatagtcccaaagggataaattcataagattagaacttgaagggcaaatytgtaaaatatgtgaagaatgtatatgtttctgcttgtatattcatatttatactgggatgaaagaacaatgttacctcccagtgtgcccaggtccaagtcaatgcataccaaggtttgatcctgccacatgagtaagataggcctggtgtattaccagaaaata

SEQ ID NO: 359112 - DNA, 572 bp, Homo sapiens
agcactggaaacatcacctagcataaaggagtcatctgtaatatttgttggacaaatgattaagttgaatctagtagaccaagaatctgaggtttgtccatcagagttaaatttcatggttattacacatagcatagaacagtatttccgtcattaaaaataatattaataataataatgcccatagcaattttttaaattggtaaagtgaggtgtataggatgttcgggaaaagcttcatcttggaaatttaattgctttctgctcttcaatgagtcattctatttggaatggaaaatctagtcctcatatgttaatttatttaagagggatgagctaagagcaatacaaaccgacagatagtcccaaagggataaattcataagattagaacttgaagggcaaatctgtaaaatrtgtgaagaatgtatatgtttctgcttgtatattcatatttatactgggatgaaagaacaatgttacctcccagtgtgcccaggtccaagtcaatgcataccaaggtttgatcctgccacatgagtaagataggcctggtgtattaccagaaaata

SEQ ID NO: 359113 - DNA, 584 bp, Homo sapiens
tcaataatacactgtctgctttcagctctgcctttgcaaagtgaatgagaaatcccacacagaaaagcctgtaatgaaaagatacaccatggcccagaggatattgtgcagatcatatcatcacttaggtcacatgataaattctctctgtaaaggagagttcacacacccagagaagaaagtacattcaaaattatagtgttggcacagctcaggccaaattgtatcagttgtttctagtaactatataaacagaagtayagaatcttgagtatcttataattaaagacttctaagggcctgatctgtataaatacggagactgtaagtattgagtttatatacgcttttaaaaatagaattgagctgactcacaaactttgttaaatatgtacacaaactactcacttattggcacatagctattgtttggttacaaaaataaaacattgctaatgaaataaatttctgggtatatgctcacattaattggcaacatgctctaattataatatgtgaagaatacaaggggattcccttcttacttcattgcacaaaaatcagaaattaaaaattcacaaaag

SEQ ID NO: 359114 - DNA, 578 bp, Homo sapiens
cagtaagtaaataagactacctcagtttcctgaaggaatagcagcaatccatgataacagtaacaaaaacaaccaggatctaaatccacctagtttttcattttggtgcaatattttcaattgcaagctgggttccacagtgaactctgcatgaagcttgtaattttcccctagaaatatttttcaagccttcagcggccctagaatgttcaagctggtccttcacagttatccacatacatgcacccttttcttcacaattcaaaactttcttctccataaatcctttgctgatcatctctgcccatgacaagttctcttgactcaattcgtatagccctgactgcatatatgtctcctttagatcttaacacatgcagtacatttgcatttacaaaggaaaataggctcaaacgccaaagtttctcaaccytttgcaatgtatttccaaagaaaaggtggtggcagctgaagcacatgtgtgcgtcatggtaggcctaagagttgtagagtgtgttgatagtatgtcgggggaatccccgtggggcccaaagggaacacaccttaaagttggacaa

SEQ ID NO: 359115 - DNA, 592 bp, Homo sapiens
gcttaacttggcctctaaacccacagggtggaaattaggtataaagtgttcagctgtgagaatagcatcagcacttagtcaataatacactgtctgctttcagctctgcctttgcaaagtgaatgagaaatcccacacagaaaagcctgtaatgaaaagatacaccatggcccagaggatattgtgcagatcatatcatcacttaggtcacatgataaattctctctgtaaaggagagttcacacacccagagaagaaagtacattcaaaattatagtgttggcacagctcaggccaaattgtatcagttgtttctagtaactatataaacagaagtatagaatcttgagtatcttataattaaagacttctaagggcctgatctgtataaatacggagactgtaagtattgagtttatatacgcttttaaaaatagaaytgagctgactcacaaactttgttaaatatgtacacaaactactcacttattggcacatagctattgtttggttacaaaaataaaacattgctaatgaaataaatttctgggtatatgctcacattaattggcaacatgctctaattataata

SEQ ID NO: 359116 - DNA, 674 bp, Homo sapiens
gttgacagacggatggcaaattgggttactggaagttcattttgaaaagggaagtctcccactcctctgtgtgtatgtgtatttacatatatgtgtggacaaacacacatatactccctcccttaaatctgaggccgaaatataatattgaaaaaagtaataattaaaatttacattcttaataaaagagagcaccatctctggaaacattttcaatataaagtagaaattccmccatgatagggttaaacagtcaaacaagatcatctaggcctcggtggattctttgaaccccgttttgtttaataggttaaattaaaaaaataatacccattccattaccatcttcctttaagccagatcatcatggagtgagactatatttggtacattcagttctctgagagctaccattttaatatattttctttctttccttctttcttttttttgagacagaggcttgctctgtcagccaggctggagtgcagaggcacaattacagctcactgcagccttgaactcctaggctcaaaggatccccccacctcagcctcctgagtagctaggactacaggcaaacaccactatgccttcctaattaaaaaaaaattatagagatagggtatcactgtgttgtccaagctggtcttgaactcctggcctcaagtgat

SEQ ID NO: 359117 - DNA, 674 bp, Homo sapiens
gttgacagacggatggcaaattgggttactggaagttcattttgaaaagggaagtctcccactcctctgtgtgtatgtgtatttacatatatgtgtggacaaacacacatatactccctcccttaaatctgaggccgaaatataatattgaaaaaagtaataattaaaatttacattcttaataaaagagagcaccatctctggaaacattttcaatataaagtagaaattcccccatgatagggttaaacagtcaaacaagatcatctaggcctcggtggattctttgaaccccgttttgtttaataggttaaattaaaaamataatacccattccattaccatcttcctttaagccagatcatcatggagtgagactatatttggtacattcagttctctgagagctaccattttaatatattttctttctttccttctttcttttttttgagacagaggcttgctctgtcagccaggctggagtgcagaggcacaattacagctcactgcagccttgaactcctaggctcaaaggatccccccacctcagcctcctgagtagctaggactacaggcaaacaccactatgccttcctaattaaaaaaaaattatagagatagggtatcactgtgttgtccaagctggtcttgaactcctggcctcaagtgat

SEQ ID NO: 359118 - DNA, 614 bp, Homo sapiens
tcaccatcagcccctatcaggcattcttagccacataaaagattgctagtaaatagcctttcttgttcttagaattatttgaatgcttacagttgttctgaatctgccttcttgctttcttaagtcaaagcttatttaataacatacttgatagccctcctgggaccttgtctaatgaaactcctagttctcatcaaagaaacatagactacaattcaacctttagatgacatactaaagaaaaacagcaactacaaatacataggataaagaaatcattttttttttcctcaagtgaaaaattgtacttcatgttttggatatacaataatgtgtcttgatgtacatgaaatattcaccactacagtaaacaagttagagtatggatttttcctcatacttaagggacccagtaagcaagctctaattttattcttttacagtcttgttttgcagggacaggtgtgtgtgtgtgccttggtggtggggtttgtctaaaacccactagagtttagcatttactgtttccaagtgcttttcttgctcaragtactaaataatactaaaatcatttaaagataacagttaccattgcaaccaggcataatttgttt

SEQ ID NO: 359119 - DNA, 614 bp, Homo sapiens
tcaccatcagcccctatcaggcattcttagccacataaaagattgctagtaaatagcctttcttgttcttagaattatttgaatgcttacagttgttctgaatctgccttcttgctttcttaagtcaaagcttatttaataacatacttgatagccctcctgggaccttgtctaatgaaactcctagttctcatcaaagaaacatagactacaattcaacctttagatgacatactaaagaaaaacagcaactacaaatacataggataaagaaatcattttttttttcctcaagtgaaaaattgtacttcatgttttggatatacaataatgtgtcttgatgtacatgaaatattcaccactacagtaaacaagttagagtatggatttttcctcatacttaagggacccagtaagcaagctctaattttattcttttacagtcttgttttgcagggacaggtgtgtgtgtgtgccttggtggtggggtttgtctaaaacccactagagtttagcatttactgtttccaagtgcttttcttgctcaaagtactaaataatactaaaatcatttaaagatracagttaccattgcaaccaggcataatttgttt

SEQ ID NO: 359120 - DNA, 557 bp, Homo sapiens
tcagaataaatatttgagacattgtctctatcctagagttattttttaatgtatttattcatccattcatcccccaacaatgtaatgaatatccttggtgcaaagcaagtggtagagcgtcagaaatctgaaaataaaaatcagagctaggtcctactgatgtaggtagaataagtttgaataagatatatgaattgtgggggcaaagggaatttttcccttccacttctgaaggttcaagtcttctgagataaactgacaatagattaacaggagcaaaagcatacaaattgattaatgtgaacgtgtgcatgggagtcatacaaaatatgagactcaaaagggccagttggttgaggcttacatagcctcttaatctgggagarggaggtgggagatgcaggcaattttgaagggtagtaaatgatttttaggggagtcaaatgagccccaaaagcagaaaatggtctgggacaaggttcctctgagctctggaggtgatggcaaccagttttggaaaggtgaggggtgaaactgcactgtgaacttgtcttatt

SEQ ID NO: 359121 - DNA, 579 bp, Homo sapiens
cctggccatgatggtgccggcctggaatctcagctactcaggtggctgaggcacaagagtcacttgaacctgggaggtggaggttgcagtgagctgagattgcaccactgcactccagcctgggtaagactctgtcaaggaaaaaaaaaagtgggtaagatgggtttcttatgatttttgtctccctggcaattggtatttacgtaccttgtgtattgtcaatactcaggtactcaatacaaatgtgttatgtaattggataaatagaaaagaaaagaagtggaaagaaggaagggaagaggaggaagagagggagggaggaaagaagcaagsaagggccgaaagaaggagggaggaaagaagaaagggagggagggaggaaggaatgaaggaaggaaggaaggaaaaggacaggaggaaaggaaattccagtaaaatagggcatcccactaagaccacagcaactactagtgagtgtaaggcttcctgagaagagaggtgtgtgagttgcctgcccaacacccagatgcaggtacctagagggaataacgataccatgcagagagcaccagagttatc

SEQ ID NO: 359122 - DNA, 579 bp, Homo sapiens
cctggccatgatggtgccggcctggaatctcagctactcaggtggctgaggcacaagagtcacttgaacctgggaggtggaggttgcagtgagctgagattgcaccactgcactccagcctgggtaagactctgtcaaggaaaaaaaaaagtgggtaagatgggtttcttatgatttttgtctccctggcaattggtatttacgtaccttgtgtattgtcaatactcaggtactcaatacaaatgtgttatgtaattggataaatagaaaagaaaagaagtggaaagaaggaagggaagaggaggaagagagggagggaggaaagaagcaagcaagggccgaaagaaggagggaggaaagaagaaagggagggagggaggaaggaatgaaggaaggaaggaaggaaaaggacaggaggaaaggaaattccagtaaaatagggcatcccactaagaccacagcaastactagtgagtgtaaggcttcctgagaagagaggtgtgtgagttgcctgcccaacacccagatgcaggtacctagagggaataacgataccatgcagagagcaccagagttatc

SEQ ID NO: 359123 - DNA, 647 bp, Homo sapiens
ctttcttcttaattatgttgttaatttctgttgctgagctctttccatagacaacgcaaacataaacttgaattgggctcttcaattatttgttactggaatactaataaaaggttgtacatttattgatctagaggcattatcgccaagtatttatatatttatatatttatatattagacatatatccaagtatgccattataaaatgtgtcttctaaacaacagatgcagaataacagcaataaaaaccacagtagagacttcaatgacttttcattaaccagtcaacctctccagctaaactatgattttgcttcaaaagratagcaggttttagatttcaataaaaattgaccccttgtagagatgtttatgtgactattacatttaatttattttttgctttattttatcagaatctttttctgccaaacattgcaattcaatgttttatagatcacacattctgagaccgagttttagttgaggttagtgattaatttgaaaaataaactcactgaagttgcagagtatgggagatacctgatttatagatatagaaaaacaccaccaaaactttggaattcctagataactcttagtctctttccaaagcacaatggggtaaacagaaaatatggctta

SEQ ID NO: 359124 - DNA, 551 bp, Homo sapiens
gaatgttgtctactttattcattgaagcccttagcatattaatcatagttgttttaaattcccagtcttataattcaaacatttctgctgtatcccattcttgtgtttgctctgcctcttcatgttgtgttttttgccattttgtattccttgtaatattttcttgatagctggacattttggacttggtaaatggacagctgtaagtaggcttttattggtggtaagatgtgggtggaggactctatagtcctataagtaggtctcaatctttaatgaatacattggtctctagactgtgaactgcacaagtatttctcaggttttgtttttctccccccaccccagggagaaaaaaacaggayggggtggaatagccagagtgtgccggtgttggatatttccctccccccatttcaggtaggctctgataaaaccccagcaggttagcttcgggttaattcgtttctcctgtgggcacaccttattaagaagaacagagtgctctggtgtatttcaaaatggttccctttctcgtcttcctgcttgaa

SEQ ID NO: 359125 - DNA, 588 bp, Homo sapiens
ttatacacttttggtgagggataccacagaagtaatgttgcagycttctcagcgaatcatatcggggatacatgatggctatacatatgtattgttactggtgacattaaccttgatcacttggttaagataatgtcttctgggtttctccactgtgaagggcctatttttctatttctcattgataaatatcttgggggagatactttcagttaatgttaacatcctatttctcctcaaaaatttgaagtgattttagtgttaattggtggatgttgccagcaactgtgatatttcccaaatggtgattttgtatttccctcggatggcaattatttttgtgttttccttccctaagagaacatatttctatgtatacctagattccaagggaaaagtctaattaaaagttgatgtatttgcaaaatttgttaccgcataaattttttaaacctgctcattttagtctcttagtctttgtccatctatgtatctacctacccacctacctatccatctacctgtcttgtttataaattcatatttatcaactcatatcatttactagactattatagctgataaata

SEQ ID NO: 359126 - DNA, 512 bp, Homo sapiens
taattggtggatgttgccagcaactgtgatatttcccaaatggtgattttgtatttccctcggatggcaattatttttgtgttttccttccctaagagaacatatttctatgtatacctagattccaagggaaaagtctaattaaaagttgatgtatttgcaaaatttgttaccgcataaattttttaaacctgctcattttagtctcttagtctttgtccatctatgtatctacctacccacctacctatccatctacctgtcwtgtttataaattcatatttatcaactcatatcatttactagactattatagctgataaatatatatctctcatcttttcatattgtctatgtaagtgttgtggctttttagctcccgtagtttggggagtaggagggagtggtgcccagcggcttcttctctcctgttgtccaggtagtaggaaggagtgttacagccctttgactcccaccacccacagctcggcgagcaggagagctacagctct

SEQ ID NO: 359127 - DNA, 587 bp, Homo sapiens
tggcctcccaaagtggtgggattacaggcgtgagccaccgcgcccggcagggtgaagcgttttagatccaagctctgtcagtattatttcctttcacatattgtaatgaactgtgacagaaatgccctttaaagtgtattaccttccaaggcctcatctctaaaagtaaaaacaaccttaaaccctctttcccatttaaatctcctttatgttgttcccttggccaccaatacattccttattgtccctgctctcttccgtggttgttgggtctaaatgctcagtctctccatttaccatactgttttcctccttgcatatcctctttacctccagttgctaagtcattagtgaagagaccaatttacatattgatatttcatttgcctttctgattgttattttcagggcaacttctggagttaaaaaataaaatttaaatgctcataagagatataaatttgttacctcaagcggttgcccaggtaccaggaaaaaaacaaaaacaaacaraagaaaactcatgtaactagttattagagcctgcatagttaattggatttggatttgtaggaaatttcagaaaa

SEQ ID NO: 359128 - DNA, 634 bp, Homo sapiens
tttaaatatcaggaaaatataccctttccctgaaattaattgcgtagcacttgtttttgtttttgtttcctctgacaagatgagtgtttttaaataccacatgaactcttgctggaggctgcatgtaaattatgttatcagtcccgtcctaataacctggatagagtatgcaatgaggaacacctggtgctcatacacattaccttcttggggttatctggttggggccattcattttagacacattaaaaatgcctttccataactataaagagcttacatgcccaaccctggccagctgccactcaagtgttgccattaatctgtagcagggaaagatcaagaatgacctggaataacccacttttacaacaagaaaaaaatgtgaatcacaaattccagtagttaaggattgaaatcatcattttatatttggaggaaggcatattgctgtcatcataaataaatttggtgtatttaatgttttaataagcaagagaattgtgrtgcaactatctaaaccagccaacagccacagaatttgattttttgccaattttttttttccttttctttttggttgggtgacacagtgagaagtatttaactaaccattctctatacaattcatttt

SEQ ID NO: 359129 - DNA, 549 bp, Homo sapiens
ttggccacctttgattattctttatgactcttaaatttcaygatttaaaatgacctctgttcaaatctacagtgcttattctggctagataagtcatgattaacagattacaatttaatgagtgaatatttgttgtttgtaatagtgcacattgttgtgaagtgtatatcataatgtaaaatagaataattgatcaaaacctaaagaaaaatgggttaaaaacttgaagaaaaattgtatggaccataaatgatgtaagttgaggcatgctaacatagttcccctttagtgaacatagctgtgtagttcagatcaaaaggccatacaaaacaccccactgtccattttgtaagggcttatttgagtatctagatgacaataatgtcattagtcccagacccagaagtaccacctagaatttgatggcaggtatcaacatgtaatgggatattgggaagtgaatttgatggcatacatcattcactcagtcagtcagcaaagattgatttagtacctcctcttgccaggcactattctagttgctggaga

SEQ ID NO: 359130 - DNA, 549 bp, Homo sapiens
ttggccacctttgattattctttatgactcttaaatttcacgatttaaaatgacctctgttcaaatctacagtgcttattctggctagataagtcatgattaacagattacaatttaatgagtgaatatttgttgtttgtaatagtgcacattgttgtgaagtgtatatcataatgtaaaatagaataattgatcaaaacctaaagaaaaatgggttaaaaacttgaagaaaaattgtatgraccataaatgatgtaagttgaggcatgctaacatagttcccctttagtgaacatagctgtgtagttcagatcaaaaggccatacaaaacaccccactgtccattttgtaagggcttatttgagtatctagatgacaataatgtcattagtcccagacccagaagtaccacctagaatttgatggcaggtatcaacatgtaatgggatattgggaagtgaatttgatggcatacatcattcactcagtcagtcagcaaagattgatttagtacctcctcttgccaggcactattctagttgctggaga

SEQ ID NO: 359131 - DNA, 557 bp, Homo sapiens
agagtaactaatttaagagcaatgtctttggttttaaatgctgcagagaagaacatgtttgggttgatgcagaatccacatctgtgaacaatcacagatggatatatatgatccagatacaaaagagtttgttcccaaggaagcagccagtgtagtgaactgaataaaagccactgtaaagtcagtttacagtgagaggagggactgcccaactctccctataaatgccaagtggagcacctcagatgaagcagctgatatgcttcctatgcaagccatgttggactggccttatgatgactaggatrtttgccccctgaatatgtctgttacccagattatggtaaattctgtgattaaggaagtgccttctacatgggtgccccacacgatgttattcctgcagaaatgaacaacagttcaagaagccttacctgatttgtggtctcaacttccacatatgggtctcactgatactaaggacagtaaagggattaaaaataaaataggaagagaaaaaggggagagtcataggactcatccaagcagggtagaaa

SEQ ID NO: 359132 - DNA, 535 bp, Homo sapiens
aggggagagtcataggactcatccaagcagggtagaaatatttaactggttagtaagaaatggcatgaataaaatggaaattgatggggttaagayggagctcttactacaacactgtggaaggtcaagtggaccggatggagcctgtgatgttcccccagcataaaagggccttgaaccagtttgccatattccctccagtatggagaaacttaaaaagtcagaaggcagagattacaaagagaaatctgatctgacattgcctgaggcatattaatcaaaatacagattggcaaaagggctagtgtccttcggctcaacccctggctgggcacctaaagctttttgcacaagaaagagaagttcctggaactggaacagaaaaatgtaaaggtttatgtgattatgaagttggtatatttcagcatggtttgtgtgaagtggttgtgtctcttttacctgattgtgtcgtgggaatggacatggtaactgattgggggatgtttcccctacctaacactgtaaaacagaaggc

SEQ ID NO: 359133 - DNA, 602 bp, Homo sapiens
gcacttgctagagtagcggtgytgcctacaatctagactgacacagtagcaattaaaatgtcccttccaaaggggaaaaagtttgggtgttaacggagagaaggagaactagtagctgagagtaaagagatgaataaatgggttattaatttaggaaacccaatattaacaccttgaaagaggttcagaccactgtttggtatacttgtctcttaactcaagtattccaaatacctgaaagagtgaagttatatgtttgctgagaccacttctgtttttggatgctgccaagattgaaggggataaatgcttgaggggatggatactccattctccaggatgtgcttatttcacattacatgcctgtatcaaaacatctcatgtacctcataaatgtatacacctactatgtacccacaaaaattttaaaaattaaattagaaaaaaattatgggaaagttaaaaaagaaagattgaaggtaggcctgcaaacctgagtagcctcaccctgggagacattaatacaatataatggactggactagttattaatgactgaatgaggttctagtaatgtggcagcatcttttgagttgtatatt

SEQ ID NO: 359134 - DNA, 604 bp, Homo sapiens
tgttgtactggatgttctaactagcaaaatatggcaagaagaaaaggtcatcttggaaggaaaagaagtaaaactcttttgtttgcagacaacataaatatctatgtagaaaatctagtggaaaaagctccttgaatgaagaagtgagtttagcaaagttatataataaaatatcaatatacaaaaatccaattacgtttttgtatactagcaatgactatttggaaattgatakaaaaagttaaagccatttaaaataacatcaaaaatgtgcacttcggaataaagctgaaacaagtatgcataatttaaaccctgaaaactaggtttcagttggctgataaaaactacaaaatattgctaaaggaaattaaagaagacctaaataaataggtaaatatactgtatttatgggttggaagactatttattaagatatcaatttatccatattaatctgtacagtcaacacaattccaagtcaaatttcagtagacttttttgtagaaattgacaaactgattctaaaatccatatggaaataaaaaatgatctaaaatgataaaatggttttgaaaaagataaacataagggaccaacacta

SEQ ID NO: 359135 - DNA, 571 bp, Homo sapiens
agtctctctgtcacccaggctggagtgcaatgatgccatctcagctcactgcaacttccccctcccgggttcaagcgattcttgcacctcaacctcccaagtagctgcgattacaggcacccgccatcatgtctagataatttttgtatttttgtagaaatggggtttcaccatgttggccaggctggtcttgaattcctracctcaggagatccgcccgcttcagcctcccaaagtgctgggattacaggcatgagctaccacaccaaaagagtttttcttaacatagtctaaggtaaaccaaattaccttagaatatcagggacagctttagagtgatggtaaaaattaaaatctaaattaaaatccaaacctcacatacttgatacttccaacaaatggacacctatttgcagccagtgttgaaaattagagtaggctcttctgaaagaacatagccatgtccctccaaataacaattgagactattgatcaaaatttctagtcatttcagactacagcacttgttttaatgacctgctgggcatccataatcacagtgcaggcacta

SEQ ID NO: 359136 - DNA, 571 bp, Homo sapiens
agtctctctgtcacccaggctggagtgcaatgatgccatctcagctcactgcaacttccccctcccgggttcaagcgattcttgcacctcaacctcccaagtagctgcgattacaggcacccgccatcatgtctagataatttttgtatttttgtagaaatggggtttcaccatgttggccaggctggtcttgaattcctaacctcaggagatccgcccgcytcagcctcccaaagtgctgggattacaggcatgagctaccacaccaaaagagtttttcttaacatagtctaaggtaaaccaaattaccttagaatatcagggacagctttagagtgatggtaaaaattaaaatctaaattaaaatccaaacctcacatacttgatacttccaacaaatggacacctatttgcagccagtgttgaaaattagagtaggctcttctgaaagaacatagccatgtccctccaaataacaattgagactattgatcaaaatttctagtcatttcagactacagcacttgttttaatgacctgctgggcatccataatcacagtgcaggcacta

SEQ ID NO: 359137 - DNA, 573 bp, Homo sapiens
tgaagcacagcatcagttgttgggtaggagcctccctaattgcccatccaggatctccrtcctcaacctgtttctctatgctaagttcagtaagaggcaggcttgatgctaaatactaggaaccttatttcagttttgaggttgactttttctgaaggctagacccagtcactgatacataagaacactgctagtaatactaataaatgtataagcaccaattatcttttatatactacctactttattatctcatcaggacaactttatgaggttgtcttcaagagggtggaggcaatcccatttgtattatgtctatgtaaagtaagttggagttttagagtagtgacttggaaaccaaccctttgggaagacttaattggaatatcttttcttgataatggagtgattataatattctaggactaggggccatttgctatcaaaggaatgaggttataaaaagagatgccacttccctaacctctccccaaatgaaagcacacatctacagacaaatgtaagtggtttgcaatttcattaattccatactgcaccatttcttaaattcac

SEQ ID NO: 359138 - DNA, 522 bp, Homo sapiens
gagtcccttccatcttgttgcataaatgcttccatactgtttcctggaagtctccactctttgccctgtttttcttccattaaaatctygttcatttgatgtagctcaataataatttttccagtcagaataatttcaaactgcatcctaagtgatacacctaacacatatatttaggtataaggctgaaatatttgcctcattccttacagagaatttgttaatttgctcttcctttacttcatttaacaaatactgattgtgcttcatgagctctagagccaaccagaatgcttgggtttaaatagagctaatgtcagttactagcagtatgaccctggaaaagttacctaacatctctcttcctctccttcctcatctgtaaaatggagacattagtacttcatcatagggatggtataaggatttaatgacttaatatataaaactctcagaacagaaccatacacacataagtactgcatatgtcggctatttttattactgttgctactataggtt

SEQ ID NO: 359139 - DNA, 522 bp, Homo sapiens
gagtcccttccatcttgttgcataaatgcttccatactgtttcctggaagtctccactctttgccctgtttttcttccattaaaatctcgttcatttgatgtagctcaataataatttttccagtcagaataatttcaaactgcatcctaagtgatacacctaacacatatatttaggtataaggctgaaatatttgcctcattccttacagagaatttgttaatttgctcttcctttacttcatttaacaaatactgattgtgcttcatgagctctagagccaaccagaatgcttgggtttaaatagagctaatgtcagttactagcagtatgaccctggaaaagttacctaacatctctcttcctctccttcctcatctgtaaaatggagacattagtacttcatcatagggatggtataaggatttaatsacttaatatataaaactctcagaacagaaccatacacacataagtactgcatatgtcggctatttttattactgttgctactataggtt

SEQ ID NO: 359140 - DNA, 494 bp, Homo sapiens
aaaaaggcaaagcacagaagatttttagggcaatgaaaataccctgtatgacactataaataaatgcccatatacatttctccaaacccacagaatgtacggtagcacagagaaacctaacataaactatgragtttgggcaattatgatgtgtcaatgaagattcatcagctgaaacaaacataccattcttgtggagatgttgacaatgggggaggctatgcatgtgtggggctgggggtacatgggaaatctctgtatttcctaccaattttgctgtgaacctaaaactgctctaaaaaataaagtctataaaaaggggaaaatatttggcctaaaatggtctaaagttctgctgtccaatcccatgtggcaactgagtacttgaaatgtgactaatctgaattgagatgtgctataagtatataaatataccttataaaaaaagtctttggatttataaacaaaagtaaaatatcacactaataattttt

SEQ ID NO: 359141 - DNA, 438 bp, Homo sapiens
gaattcaattatagagaataaggaaagattatgctcaatcatatatgcagtggaatacacagagcaactaggaagggcagtatcagagtgagaacactgttttaggaagaactgtaagttcacatgatggagacaggaagagactaaacacaaraagacagaaggagctatcgctgtcatccagcagcaaaatgaagtgttttaggtgaggacaatggtaatggggaaaaaaaaaaaaaccctagaaagacgcctaagcaaaaatgaatactgtcaattgcaactgcaatttaaaccttagcccatcactggggtggtcaggccaacatcacagtcagagctgaggcaccagagaagtgaagccataccttgcctctgccctagctaataccagtaaggtgctatactggataaaaactgctgaagatggcaaactgg

SEQ ID NO: 359142 - DNA, 438 bp, Homo sapiens
gaattcaattatagagaataaggaaagattatgctcaatcatatatgcagtggaatacacagagcaactaggaagggcagtatcagagtgagaacactgttttaggaagaactgtaagttcacatgatggagacaggaagagactaaacacaaaaagacagaaggagctatcgctgtcatccagcagcaaaatgaagtgttttakgtgaggacaatggtaatggggaaaaaaaaaaaaaccctagaaagacgcctaagcaaaaatgaatactgtcaattgcaactgcaatttaaaccttagcccatcactggggtggtcaggccaacatcacagtcagagctgaggcaccagagaagtgaagccataccttgcctctgccctagctaataccagtaaggtgctatactggataaaaactgctgaagatggcaaactgg

SEQ ID NO: 359143 - DNA, 534 bp, Homo sapiens
tggctcattgcaaataagtaatgactatttaaaataagtcatatctactctacaaacacaaacaatagcttaaaacaacctggactagaaatctaacatctttcccattattagcaccacagctcctgccccatcccacagcctctgaaattggctgcttttatctttcagttcattayatgatggggcatatggtttctaaacccaagctgagcttacagccctttcatcgctaagtgttgggcatgtagttttgttggtgctgagtaaacacttaccacatgaaaaagatgcaattcatctatcttttccacctgccacaaacctgaaaagacttgttcacaagaatctttctcacaccacacagaaccagaaatttagaatttatagtgagaaagctgaaaatgagtgagaagatgaaccatgttcccttttcttgtacagtcagtcaaggccatcttctgagaagtatggccctactttctcctcaagaatgatatccagacagtccccaacttaacaatggttcaactt

SEQ ID NO: 359144 - DNA, 534 bp, Homo sapiens
tggctcattgcaaataagtaatgactatttaaaataagtcatatctactctacaaacacaaacaatagcttaaaacaacctggactagaaatctaacatctttcccattattagcaccacagctcctgccccatcccacagcctctgaaattggctgcttttatctttcagttcattatatgatggggcatatggtttctaaacccaagctgagcttacagccctttcatcgctaagtgttgggcatgtagttttgttggtgctgagtaaacacttaccacatgaaaaagatgcamttcatctatcttttccacctgccacaaacctgaaaagacttgttcacaagaatctttctcacaccacacagaaccagaaatttagaatttatagtgagaaagctgaaaatgagtgagaagatgaaccatgttcccttttcttgtacagtcagtcaaggccatcttctgagaagtatggccctactttctcctcaagaatgatatccagacagtccccaacttaacaatggttcaactt

SEQ ID NO: 359145 - DNA, 534 bp, Homo sapiens
tggctcattgcaaataagtaatgactatttaaaataagtcatatctactctacaaacacaaacaatagcttaaaacaacctggactagaaatctaacatctttcccattattagcaccacagctcctgccccatcccacagcctctgaaattggctgcttttatctttcagttcattatatgatggggcatatggtttctaaacccaagctgagcttacagccctttcatcgctaagtgttgggcatgtagttttgttggtgctgagtaaacacttaccacatgaaaaagatgcaattcatctatcttttccacctgccacaaacctgaaaagacttgttcacaagaatctttctcacaccacacagaaccagaaatttagaatttatagtgagaaagctgaaaatgagtgagaagatgaaccatgttcccttttcttgtacagtcagtcaaggcyatcttctgagaagtatggccctactttctcctcaagaatgatatccagacagtccccaacttaacaatggttcaactt

SEQ ID NO: 359146 - DNA, 574 bp, Homo sapiens
tgtttaaatgtttattcttttcagctattggccaacaattgacaaagatggagatgagaagcaacaatcttaatatttgaaagtgttcattctctttttctctgcycagtctggaacaaaatctgaagcatttagttctcttgtgcaatatttcctttgtcctagctgcctctgaaaggaatcattaatacccttttagccttagcttagccctaggctttaacagagtagggagagccaagagaagcagaaagacaataggccggcaagagggggcatcaggtttgaagtccccgttgctcacttttcactagctgaaaggcctgtgtttattatctgcagcacatttgtcagctgtaaaacaaaggtaaatacacatacttatgtatcttatatggaagatatttgtttatattttttagtctttgttgtatctttgcaggtttaagagcatcaagtgagctcatgtattagaagttatttttgaaaattacagattagataaacataagttattaatcttatttttccaacttcagcgggagccaggattccacagtttgaaaaatggaga

SEQ ID NO: 359147 - DNA, 525 bp, Homo sapiens
tgagaagtttggtccttttcaaggcctaattttactgtgagtttataggaccaaacttctgaaagaactgtgagtagatctttagattactctcctaaagagatagcaagacctatccagagaaataaccactgtgtgtgaaggaggaaagaaagcccctatggcagggaagtggagatctttaaagcaatgatttgggaattgtatttaaaaagaaagatacagaatgttctcttatggtaatgtgaaaacttcaatgttagaattaagcacagagttaaaatgagatacaaacataatcagagttacrtttaaaatttgctttgacatatagttggccccacagttaaaagccatttagttgggagccaaaccaaatgccagaagagcttgtttctcctgaatttagctaagagatttttcttagcctttcaaactcacctgtcacaagtaggttccatttttagctccacctctgaaacattctgtgattcaggtgcccagtgctgcctccatgactagcct

SEQ ID NO: 359148 - DNA, 367 bp, Homo sapiens
atcaataagggggaagtcaaaaataccaaaaacatttaggacagcttgcagcatgagtctacctacaggaaacaactgtttgatatggaataaaatggcatatagagttcccagcagtgtgacttaatgactgaattgtgtccactggatrgaacattcaccccaagcctttcatagaagtcattgtgtcttattcgcccagtggtaaaatgacccattacgtctgtgcaatgctccatcaactctgttttcacatctgccctccagcaggctgcaggggtggtgagagtgccagtttacggttgtgtattaagcctcggtctcttgtctctcctcctattgcaagggcttccttagctccttctgc

SEQ ID NO: 359149 - DNA, 596 bp, Homo sapiens
cagcagatcccagttttctgagaagaactggccttagaagattccartatactgaaatgttttatggaatcataatcaatacattttatttttttaatgaggttgatttgaatgtgtttccaaccataatattgtatgaatatctgttaatatgaagccattcatccaagaagtggagcagagaaagcatttgtagcctgtagatggctgatttccacgtggttatttgggtcaggatggatggagtgtgagtgggtgactgccacatctctacactcagagatctcctgtaacctcaaattccttagttcattattgatattattataactcaatgagataattaagcaggtttttaatccatgaatcatgagcactttctagcaagtttaccacacctccttcatcatatacaatttctaatgttataaaggcagctaaattcattctaatttcattcagtatattataattagagtaaatagcttggggaaagattttgaatgcctatcaaaccttgtttgtgttcacaatacattgacaatatttccactcaagtgtttaaaatccattaataatattccttatatggtgca

SEQ ID NO: 359150 - DNA, 608 bp, Homo sapiens
gggcttcacatcgtacatggaatttgagattctccatgccttactgacagtgtctcattaccatctcttatcagacatcctggtctatcagtaaaatatcattaattttttaagagacgtataatgcaatagagcacaatccttccaaaagagttattataaagctctttatttcttgcaagaaaatccctaaatacatatttatartaagtattagaagtctcaaaatgcatatttagatgacaagttatgtgtttagccgtccctgagtacttattttaaaatgttacagagaattagggaaactctcagagacacatctcgacttccacaactgtgatcctagtgagagttattttaagaagcggctgaccttttgtacataggggatagttgggcaccattctaattgccttttaaaaaataggattggaagtgaagtaaacagaatgagttcagagcccattgcacaggcaaagaccctcccaaggtgggctcacattaaatgcatgttaaatagataagataatctctattaaaataaatcaaaatatctaactttttcattcccgttctcccttttctgaccagataatgtcagagaattt

SEQ ID NO: 359151 - DNA, 608 bp, Homo sapiens
gggcttcacatcgtacatggaatttgagattctccatgccttactgacagtgtctcattaccatctcttatcagacatcctggtctatcagtaaaatatcattaattttttaagagacgtataatgcaatagagcacaatccttccaaaagagttattataaagctctttatttcttgcaagaaaatccctaaatacatatttataataagtattagaagtctcaaaatgcatatttagatgacaagttatgtgtttagccgtccctgagtacttattttaaaatgttacagagaattagggaaactctcagagacacatctcgacttccacaactgtgatcctagtgagagttattttaagaagcggctgaccttttgtacataggggatagttgggcaccattctaattgccttttaaaaaataggattggaagtgaagtaaacagaatgagttcagagcccattgcacaggcaaagaccctcccaaggtgkgctcacattaaatgcatgttaaatagataagataatctctattaaaataaatcaaaatatctaactttttcattcccgttctcccttttctgaccagataatgtcagagaattt

SEQ ID NO: 359152 - DNA, 547 bp, Homo sapiens
tggctcatgcctgtaattccaaaactttgggaggccgaggcaggtggatcacctgaggtcaggagttccagaccagactggccaaygtggtgaaactccgtctctactaaaaatacaaaaattagctgggtgtggtggcaggcgcctgtaatcccagctatttgggaggctaaggcaggaccatcgcttcaacccaggaagcggaggttgcaatgagctgagattatgccattgcaccccagcctaggcaacaaaagtgaaagtctgtctcacaaaaaaaaaaaagaaaaaagactttggctgtattaatgtgctgagatttggggttgttaccatgtcattgttagcctgacctgactaatacaaatagtatttgtgatgctctaatgacactaaattactaatatatgtatatatatattttatatatttatctcaagtagaagtttaatgttcttaattttatgatgcagaaaaaatgctatgtaaaaatgattacttggtgccaacattaaagatggatattttaggctgggcatagtgactc

SEQ ID NO: 359153 - DNA, 492 bp, Homo sapiens
ataccttcttaagaaaactcttttaaaagtggtgcaaatgccagaaactccaggaagggtagaaggaagacactgttcatgtgtaggagcctcaggtacccttcagtgctatcacatatgcactatttctgtccctgcatatgtggtactgagcaacttgttgaccctcgcgtgccatgtttccgagatgagaatatccccatacaacttgtgagccattaaaaaaaatctggtcatcttaagcatctagagataatgctttaggtcactttttctgcttcttgctctgttttgcatttgatgatgatgatcatcatagaaaatatttattgagtgcttagttgcttgtcaggcctatgctgaatgctttacaratattttctcattgatgacaaccatgcaatgacacagcagttatactttccccgtttatagatgaggaaatagaagcttagccaggtccagtaacgtgtttaaggtcacacaacgtgt

SEQ ID NO: 359154 - DNA, 593 bp, Homo sapiens
attaaactctgttctgatatcacacaatttaataaataaactgctctctgggccagttcctaagtttatatcttgctttcagacataagctggacattatggaaaccacattgactctgacagtcaaggtaagcagtttgtcgtcagttggcaagggatctcggaagacatacacttcgttttcccagataattctcttctcctccaaccagaaattttgttttaaaacagagacagaaagggtagaattatgttggaagattttttctgcctctataactgccgtaacctggaacataatttccaaaccagctgtgaacttttgaacttataaagcctttattgacacggttaactggttaagacgtcttttatattatctcactaataaattaattcaaattgtttacatttctctgaccaaatttttatagcttttgggatagaaataatgtgcttgagggagctgcttatgccttcctcaaaactgggatttgaaaggaaggaagatatctgygtatattaagtcatttatttaatccattcaattaaatctctaaaataataggtcagtaaagatacatcgagtaacc

SEQ ID NO: 359155 - DNA, 506 bp, Homo sapiens
tagtgtaccaaacagttgaataatggactgatttccatcaagatgtttgtcattgaattgacaaagactcaatrttaaagtaggagaaagtgttgaagataagatgtcttatctagagacgaataaccttttttatctttaacaagctgtcttatctttactaccctgccttggaaactcaagagagtagcagccttgaatacacactgttatttcctccttcatggcctgagactgattcagagaggaaatgccccatcagaaggatggatgtagttcgggctaatgaggcagcaggtagacccatgaggagctgaccttgaatggatgaagaactttctattctggatcaattatcgtaattattctaactccatcctcaattgtacattggatgctaaagagagctagttagaattcttttagccacctccagttcatgagataaaaagagataggggtgaaggctttagttgattgacagtttttaatggtagttttgaggg

SEQ ID NO: 359156 - DNA, 542 bp, Homo sapiens
agaatttcatgaaacggttgttgaatgtgcacagtttggatactgggaccttaatatctaacatgtgatcctctatacaaatgtttatttaactgtacacagatgtcgtaagaggtactattagggttttgatttgttttcattttcaaatggtagtttattttgtgtgtgtgtgtgtatgtatgtatgtaaatttgaatctcattcaaattctattcataaagaaatcttaaggattaacctttataggctaccccaagggcctcacaaaagatcctgagttttatgatggtgaattacactgacatttcctaaagagttacgtgttttgtctttgtaatggaggccttagatttctttagaactgcattctatttagaagaccacccrctcgtgccctccccaattcataatgagagcaaattcaagggctgcctagagccaatgaaataaaaatcaaattatttttcctggcattcatggtagaacatgatttttcttacacttttccctataccgtatgcttctaacaaagagttgca

SEQ ID NO: 359157 - DNA, 557 bp, Homo sapiens
tgtatacatatatatatggaatgagagagtgtgtatatatatatggaatgaaagaacttatatatatggaatgagaaagcctctctctctctatatatatatatatacacacatacatatatatggaattagagcttataagtggagatgacaagaattatatatatatatggaatgagagagagcttatatatatatatatacacacatgcatatatatggaatgaaaragcttatatatggaatgtgaaagcttatatatatatatatggaatatatatatatggaatgagagagcatatacatatacctatatatatggaacaagaaacagtttttaagtagaggtgacttaagaattccacagaaaaagaactaagttatatatatatatggatattatttatatatatatacacacatatatgaaaggagtgtgtgtatgtgtacatatatatatatatacacacatatatatgtatatatacacatatgtacatatatacacacatatttctgaaagttttccaaaagtatctcccttcaatgaggagggg

SEQ ID NO: 359158 - DNA, 557 bp, Homo sapiens
tgtatacatatatatatggaatgagagagtgtgtatatatatatggaatgaaagaacttatatatatggaatgagaaagcctctctctctctatatatatatatatacacacatacatatatatggaattagagcttataagtggagatgacaagaattatatatatatatggaatgagagagagcttatatatatatatatacacacatgcatatatatggaatgaaagagcttatatatggaatgtgaaagcttatatatatatatatggaatatatatatatggaatgagagagcatatacatatacctatatatatggaacaagaracagtttttaagtagaggtgacttaagaattccacagaaaaagaactaagttatatatatatatggatattatttatatatatatacacacatatatgaaaggagtgtgtgtatgtgtacatatatatatatatacacacatatatatgtatatatacacatatgtacatatatacacacatatttctgaaagttttccaaaagtatctcccttcaatgaggagggg

SEQ ID NO: 359159 - DNA, 557 bp, Homo sapiens
tgtatacatatatatatggaatgagagagtgtgtatatatatatggaatgaaagaacttatatatatggaatgagaaagcctctctctctctatatatatatatatacacacatacatatatatggaattagagcttataagtggagatgacaagaattatatatatatatggaatgagagagagcttatatatatatatatacacacatgcatatatatggaatgaaagagcttatatatggaatgtgaaagcttatatatatatatatggaatatatatatatggaatgagagagcatatacatatacctatatatatggaacaagaaasagtttttaagtagaggtgacttaagaattccacagaaaaagaactaagttatatatatatatggatattatttatatatatatacacacatatatgaaaggagtgtgtgtatgtgtacatatatatatatatacacacatatatatgtatatatacacatatgtacatatatacacacatatttctgaaagttttccaaaagtatctcccttcaatgaggagggg

SEQ ID NO: 359160 - DNA, 607 bp, Homo sapiens
ttgagtctagtgttgaaggatctgttcaccagggattgtgctgtgggaagatgaggaggaagaggaggaggaggaatttaaaacagacctatataaatagagaagagagagcgaaaaaaaaaaaaaatccttacaaaggtgtgtgtcataggatrtgagggctggaccatgccttcatccctctcatttcacagaaggataaagaacaactgaacaaagtttcctattgcaattcaaatgcagctgtataagtaagacatcagtttttcaggaaattcttctgtcaaggctgtccacacctgcatttatccttccatctgcctgtccatccaccatttcatccatctctcctaaaggcctcaggatgtgttagaggagccaactccttgaactctctgcccaatacacatgtataaaacagacccaaaccatttaattttattttatgcataagtgagaatagaaccaaatctcaattgtttgtgatcatataggggaatagagatattgactaccccaaatgagcagataatcttcaattcctctctatttggattgtgaacatgcattaatgcttacataaaatggggctgtgcggctggatgcg

SEQ ID NO: 359161 - DNA, 607 bp, Homo sapiens
ttgagtctagtgttgaaggatctgttcaccagggattgtgctgtgggaagatgaggaggaagaggaggaggaggaatttaaaacagacctatataaatagagaagagagagcgaaaaaaaaaaaaaatccttacaaaggtgtgtgtcataggatatgagggctggaccatgccttcatccctctcatttcacagaaggataaagaacaactgaacaaagtttcctattgcaattcaaatgcagctgtataagtaagrcatcagtttttcaggaaattcttctgtcaaggctgtccacacctgcatttatccttccatctgcctgtccatccaccatttcatccatctctcctaaaggcctcaggatgtgttagaggagccaactccttgaactctctgcccaatacacatgtataaaacagacccaaaccatttaattttattttatgcataagtgagaatagaaccaaatctcaattgtttgtgatcatataggggaatagagatattgactaccccaaatgagcagataatcttcaattcctctctatttggattgtgaacatgcattaatgcttacataaaatggggctgtgcggctggatgcg

SEQ ID NO: 359162 - DNA, 607 bp, Homo sapiens
ttgagtctagtgttgaaggatctgttcaccagggattgtgctgtgggaagatgaggaggaagaggaggaggaggaatttaaaacagacctatataaatagagaagagagagcgaaaaaaaaaaaaaatccttacaaaggtgtgtgtcataggatatgagggctggaccatgccttcatccctctcatttcacagaaggataaagaacaactgaacaaagtttcctattgcaattcaaatgcagctgtataagtaagacatcagtttttcaggaaattcttctgtcaaggctgtccacacctgcatttatccttccatctgcctgtccatccaccatttcatccatctctcctaaaggcctcaggatgtgttagaggagccaactccttgaactctctgcccaatacacatgtataaaacagacccaaaccatttaattttattttatgcataartgagaatagaaccaaatctcaattgtttgtgatcatataggggaatagagatattgactaccccaaatgagcagataatcttcaattcctctctatttggattgtgaacatgcattaatgcttacataaaatggggctgtgcggctggatgcg

SEQ ID NO: 359163 - DNA, 607 bp, Homo sapiens
tagttttgaggggatcaattagagctggggaaggtgggaaaaactttaaaggagattctaatgtggttgtgctgaaagatggtagggcaatacttgattacattcacttccacaggcattgcttggtgtgattttggccccccaaaaagatttcagaagtgctttgtgttttacgtaggccttcaggctgagagtttcttttttcttcttttttttttctagccttctacacaaggacataaattttccagaatgttcattctgcctgtaaaataatgtgacacagttagccatatcagacaagtgcatcctgcccatcagtgaagggattctaaaacttaatgaatccttaagtccactaatgatgttggatgttcctgaggctattattccagattgcttctgacatttgtgtgttcatatcagagtaagtttgtatcattcttcagtttccccccagtgaatgttgagcctgcatagcagataagcataagtctatgrgagcaacatgctgacagaaccccttagacccatgctctccaatgcattaactgttagccacagtgtgactttttacacttaaattaatacaaggtaggtaaaattt

SEQ ID NO: 359164 - DNA, 607 bp, Homo sapiens
ctgaactatttatttaccagtttatcttaagattttgtgaactgtttacttttaaaaaaccaattctggcttgggaggcaacaatcaaaagtaagagttaactatttttgaagggctcacagtctagtggggaagacaatattttagaaaggaaaaaacattggacaaatgtgctgcgggtggtatgaaygcacagacacaaaacagtctagctttgacttaaaaagtaagagaagacctcaaagcagaggggacagttgatgcaatttttataggacgtgtagcgactttcctaatttacaaagtggaaagggcactagaaatggtgagaacagcatatgcagagtcactgggcagggaagagcttactgcacatggggaactgcaagtccctcagcattcttgggaaacagtgtaaacttttgggaagttgggtgagagcaggctgacaaagtagcagacatgggtattgggtgagcaggtggaaggaagaagaggggttacgcattgtaacacagtggttagagaactgaagttttacaaaacaggttttatgcttcaaattatccactgctagctttattattgtagacaattttaaagagct

SEQ ID NO: 359165 - DNA, 527 bp, Homo sapiens
ttcccttctgcatgagaatttgaccttcatttaaatttcacgctgggtttccctgttaaggttggctatgctgctaaccagtgttgtttatggtaacacaaatcccatgattaacactggaaggcctatacataagctgtatatatttgataggaagtcacacttggggtcttcctgagtgtgrtgaatttgtaactgccatggcctttgtgaagaccctggaaattatgcctacgttgctgtcaccccaacagataatggctcttgtaggaatgaggcttttaggcacttggctgatgtggatctcatctccttgcacctgggctgtgctgcacagaattcccacaaagactttcacagaaaagaaatacctcaggttgtactgctggcatatttggtttcccatcaaggtccttaagtaagtatgatgtcgagtatctcctagggtaatatcgtgagtctgcatctttagctgagcccaagaaaactctctgtagacattgcagaatatttcaatttattttttt

SEQ ID NO: 359166 - DNA, 527 bp, Homo sapiens
ttcccttctgcatgagaatttgaccttcatttaaatttcacgctgggtttccctgttaaggttggctatgctgctaaccagtgttgtttatggtaacacaaatcccatgattaacactggaaggcctatacataagctgtatatatttgataggaagtcacacttggggtcttcctgagtgtgatgaatttgtaactgccatggcctttgtgaagaccctggaaattatgcctacgttgctgtcaccccaacagataatggctcttgtaggaatgaggcttttaggcacttggctgatgtggatctcatctccttgcacctgggctgtgctgcacagaattcccacaaagactttcacagaaaagaaatacctcaggttgtactgctggcatatttggtttcccatcaaggtccttaagtaagtatgatgtcragtatctcctagggtaatatcgtgagtctgcatctttagctgagcccaagaaaactctctgtagacattgcagaatatttcaatttattttttt

SEQ ID NO: 359167 - DNA, 478 bp, Homo sapiens
aaatttcacagggctaactcaagatgtcagcagggctgtgttccctttggaggttctgggggatagagggaattcatttcctcactctgcagttcctagaggctgcttgcattccccagcttctggcaatctttcaccttcctcygtcttcaaagccagcagcatagcatactcacatctgtccctgcctctgaccctgaccctcctgtctccttctttgatttataaaaacacatgtgattagactgagctcacccaggtaatccaggatcatctccctacctcaggatcctcaatttaatcacatcttcaaagtcccttctgccatatacagtaacagatttatagttccagagattaggaagtgaatatctttggcgggggaggccattattctggcatcctttgtttgcagtaaatttttcttctgtgcaactagaatggtactagttatgtgccatcctcagaagaactgaga

SEQ ID NO: 359168 - DNA, 525 bp, Homo sapiens
tactatcaggacttatttagagctgagtgaagccttggtataaactgacctagcatttaggatgttttccatcccaagaaagagttccacagtggtagacaagaggcctggctttggccatagctctgccagtatccagtgtgtatggaccaaagagcagctcagagagcagaggaaaggaggctgattgtgtgggttactggtgacttactagggggaagcttttatgaactgctgtctggtagaggacytggaatatctcacaacttaagaggaaatatcctcaaaagagaaggcagggcaaaggggttaacttattagaccctagtaaaatgaagaagcaagggccaaattcaggaaggaaagctcatactggaggcaagaatcttcttggaaataatgagaattgggcaactgtagaatttcagctgcatgtgcacctttgcaaactcttgactctgcttctgagttgcatcctcctgcttctcggttattaattgcaaataggagctaaaattgcaaacg

SEQ ID NO: 359169 - DNA, 362 bp, Homo sapiens
ttaagcaaatataatagaagaagaggtttaaaatgtgctcacacagttgggctcactctattgctcttgtgttactgtggtgaaagaccatatactagattgyccactggtagcaggacaatgagggatgtgtagcagacatggatccaacatgcagcttggcatcaagtccagctaagccccactgagatcagccccttccaactgatttccagattcttaaataagattaaataattatcactttaagccactgagttttggggtagtttgtcggtcagtattactatgggaataactaagagagacagtatataaagatcatctaaaagagcttgtgaaaaaacaattgaagtgtttta

SEQ ID NO: 359170 - DNA, 575 bp, Homo sapiens
acaatgagggatgtgtagcagacatggatccaacatgcagcttggcatcaagtccagctaagccccactgagatcagccccttccaactgatttccagattcttaaataagattaaataattatcactttaagccactgagttttggggtagtttgtcggtcagtattactatgggaataactaagagagacagtatataaagatcatctaaaagagcttgtgaaaaaacaattgaagtgttttaagtagggagtgrtagaaaatgaattatgtttattgaagctcactctggctgctgggagagggcattaggagaaaatagttggaatagtccttttggatagaaaagtggcaaggagtaaaatggaagtgaatatatttgaaataaatcttggaggcagaactaataatactcactaatgagttacatacacagagagaggaaagtgaagaactaaagggtgactcccaaatttccagcctaaacaactgggtggagagttaagacacttcgggttttctatgttgctatttttttctacaataatgacttaaatggttatgcagtcagttg

SEQ ID NO: 359171 - DNA, 315 bp, Homo sapiens
tgtgaaaaaacaattgaagtgttttaagtagggagtggtagaaaatgaattatgtttattgaagctcactctggctgctgggagagggcattaggagaaaatagttggaatagtcyttttggatagaaaagtggcaaggagtaaaatggaagtgaatatatttgaaataaatcttggaggcagaactaataatactcactaatgagttacatacacagagagaggaaagtgaagaactaaagggtgactcccaaatttccagcctaaacaactgggtggagagttaagacacttcgggttttctatgttgctatt

SEQ ID NO: 359172 - DNA, 575 bp, Homo sapiens
acaatgagggatgtgtagcagacatggatccaacatgcagcttggcatcaagtccagctaagccccactgagatcagccccttccaactgatttccagattcttaaataagattaaataattatcactttaagccactgagttttggggtagtttgtcggtcagtattactatgggaataactaagagagacagtatataaagatcatctaaaagagcttgtgaaaaaacaattgaagtgttttaagtagggagtggtagaaaatgaattatgtttattgaagctcactctggctgctgggagagggcattaggagaaaatagttggaatagtccttttggatagaaaagtggcaaggagtaaaatggaagtgaatatatttgaaataaatcttggaggcagaactaataatactcactaatgagttacatacacagagagaggaaagtgaagaactaaagggtgactcccraatttccagcctaaacaactgggtggagagttaagacacttcgggttttctatgttgctatttttttctacaataatgacttaaatggttatgcagtcagttg

SEQ ID NO: 359173 - DNA, 572 bp, Homo sapiens
ttttaccgtaacctcaatagttaacctctaagtacattaaagttttgtgtattttagattattttttaggggtgagtgagtggattcctagaaatggaataagtgggtcaaagcayttcagtgatgtcttttttttttctccagagttcatttctcctctaggcagaaagtagaatgtgaaatgtggaagaaataccttcacaaagaacaacgtattttgctttggtgaaatgtcaaagtctccttaaggtggctcctaataatagcaacagtcaacctttatatgatgcttaatatgtgccagacactattctaggcactttatatatgcattaactaatgtagtctcacaacagttctataaagtagagacgaatactattcccattttacatacgagaaaactgagggagagaagctaagttgcttctaagaacatgaacagctttatagaattcactgtgtctgtggaacagatgatgctaagacatttgtttcatgcatttgttcaccgtaggtaccttatttggacccgcagaaaaaaaacattacttacttttgcaccaaataat

SEQ ID NO: 359174 - DNA, 543 bp, Homo sapiens
cctcctgctataaggcaaggcaaacctcaaaccgcatcttcagatagtcctgctcactgaagtcagaatgttggtaacattttactgctaacacagaaaaacacaggcatgagaagcccagtcagggtgatatacatatgttgtaactcagaaatcaattctttttttttttgtcatatgttcatagttgcagagatacagactacattttccagtcttttgtaatgaatatgccaatatgactagactcaggctaattagatgtaagaggcagtgatttgcaaaaagtctctatttatccccaacttaagtcaaacttttatatctactgaggtattataagagagttatttyactgaggagtccaaaagatgttgaccttggaggatttatacattttttattgtttctaaaatatctgactgttttactataataaccaaataataataataaagacagtaataataaatgcatattaagaattcttctattctggtttttctaaagcttaataataaaatacagagttagactgtggtt

SEQ ID NO: 359175 - DNA, 622 bp, Homo sapiens
gcatctgcagtacatctgctatgactctgaggcagtgacacttgtgttgcaggtaattttagcttctctcatagcaaatataacatcaattttgcattttccaaggaagactggagtcycagtaggtccaattaggtgcactcccttgtaggaaagtttgctatgttctctcaatgcctgctccttccccactataaggtaatttcaagggatactgtgagatgaaccatcccatggtaaaggatgggctggccttatggataggcaagtagaaacgaaaattatgtagagaaaggaaaaagaagaccacctagtgcttaaaggtcacaccatgatcatatcatgctatttaaaactcaaaatttaattcagatgtcttaaagcttctacctcaaaagggcctataaaaatcagatacctctgagagtgttaggaaagtaaagttggaataaatttatctcaaatgattcctagaagagtctgctggaatagaacagactgatttacatcttgatagggctggggaaagttacctgtgatactgctatctacccacatgggaccttcaggagaaagtgatgctggaaaggacagtgcagaaggaacaaaggcaaacttcatc

SEQ ID NO: 359176 - DNA, 460 bp, Homo sapiens
gctacccaggtgcctggacttcccttcgaaggaactcaagattttatttccatacttcatttccatccacatttccaagaagggtccctgctcctctcattaattataataatttctttggttaatagatttttctctaaggaatttcaracttcaattattatttgctcactaaattctttccttactgagatgtcatctgtgggaggagagccaaggagggggatgacagacatgtgggctcaggaatgaccagagctccagcagatgcccccgtgcttacccccatgcggtggctgagttagatcaggaacaacctgcacaattcagaggaattcacagctaacgtccaaaatgggacgtgccactgactctgcttcataattggcactcattattgtgccctaatagaagctaatggaattttcagcctcctcaaatcatggaaataagaatatga

SEQ ID NO: 359177 - DNA, 460 bp, Homo sapiens
gctacccaggtgcctggacttcccttcgaaggaactcaagattttatttccatacttcatttccatccacatttccaagaagggtccctgctcctctcattaattataataatttctttggttaatagatttttctctaaggaatttcagacttcaattattatttgctcactaaattctttccttactgagatgtcatctgtgggargagagccaaggagggggatgacagacatgtgggctcaggaatgaccagagctccagcagatgcccccgtgcttacccccatgcggtggctgagttagatcaggaacaacctgcacaattcagaggaattcacagctaacgtccaaaatgggacgtgccactgactctgcttcataattggcactcattattgtgccctaatagaagctaatggaattttcagcctcctcaaatcatggaaataagaatatga

SEQ ID NO: 359178 - DNA, 611 bp, Homo sapiens
ttgatgggtgcagcaaaccaccatggcacatgtatacctacataacaaacctgaacgttctgcacatgtatcccagaacttaaagtataatttttaaaaaggaaagaagagcaaattaaatgcaaagcaagaaagaagaattagtaaagattatacagaagaaaaaaacataataaatcaataaaatcaaaagttgtacatttaaaatatccacaaaattgayagacattttgtaaactgacaaaaaagagacgacacgaattaactaaatcagaaatgaaagactggatgctactactgatgtcacagaaattaaaagaactttaaaggaataatatgaaaaactgtatcaagacaaattagacaacttaaatgaaatgaacaaattcctagaaagacacaagttgctaggactaactcaagaagaaatagaaaatatgaatagaactagaactataaaacataaagaaattcagttaagatttaaattttttcccaaaaagaaaactccaggcctgtcacagaggaattcaatcaaacatttaagaaacaataccaatctttcacaaactcctccagaaaacacaagtagagggaacacttctcaactt

SEQ ID NO: 359179 - DNA, 611 bp, Homo sapiens
ttgatgggtgcagcaaaccaccatggcacatgtatacctacataacaaacctgaacgttctgcacatgtatcccagaacttaaagtataatttttaaaaaggaaagaagagcaaattaaatgcaaagcaagaaagaagaattagtaaagattatacagaagaaaaaaacataataaatcaataaaatcaaaagttgtacatttaaaatatccacaaaattgacagacattttgtaaactgacaaaaaagagacgacacgaattaactaaatcagaaatgaaagactggatgctactactgatgtcacagaaattaaaagaaytttaaaggaataatatgaaaaactgtatcaagacaaattagacaacttaaatgaaatgaacaaattcctagaaagacacaagttgctaggactaactcaagaagaaatagaaaatatgaatagaactagaactataaaacataaagaaattcagttaagatttaaattttttcccaaaaagaaaactccaggcctgtcacagaggaattcaatcaaacatttaagaaacaataccaatctttcacaaactcctccagaaaacacaagtagagggaacacttctcaactt

SEQ ID NO: 359180 - DNA, 615 bp, Homo sapiens
agatttaaattttttcccaaaaagaaaactccaggcctgtcacagaggaattcaatcaaacatttaagaaacaataccaatctttcacaaactcctccagaaaacacaagtagagggaacacttctcaacttattctatgagkctcatatttaataacaaaaaccaatggcatctcaaggaaagaaaactacacgcaaagatctctcataaaggtcaatgcaaaaattcatgacaaaatactagcaagccaaatttagtaaaatattaaagaattatacatcatgatcaagaatggtttatattagaaatgtgatttttatttgaattaaaatttagaaattcaattaacttaagacactatattaattaaactaagggcataatccaaatgatcatcttgatagatgcgaaatcattttacaaagtctaacacatattccatataaatccaacactcattcattgtcaaatctctcaacaagctataagtagaagggaaatatttcaatatgataaaggacagtcaaaaaacctacaactaatatcatacttcatggtaaaagaattaatgtgtcagccctaaaattagaaagaaggccagcacactgacttgc

SEQ ID NO: 359181 - DNA, 554 bp, Homo sapiens
actgtatcaagacaaattagacaacttaaatgaaatgaacaaattcctagaaagacacaagttgctaggactaactcaagaagaaatagaaaatatgaatagaactagaactataaaacataaagaaattcagttaagatttaaattttttcccaaaaagaaaactccaggcctgtcacagaggaattcaatcaaacatttaagaaacaataccaatctttcacaaactcctccagaaaacacaagtagagggaacacttctcaacttattctatgagtctcatatttaataacaaaaaccaayggcatctcaaggaaagaaaactacacgcaaagatctctcataaaggtcaatgcaaaaattcatgacaaaatactagcaagccaaatttagtaaaatattaaagaattatacatcatgatcaagaatggtttatattagaaatgtgatttttatttgaattaaaatttagaaattcaattaacttaagacactatattaattaaactaagggcataatccaaatgatcatcttgatagatgcgaaatcatt

SEQ ID NO: 359182 - DNA, 615 bp, Homo sapiens
agatttaaattttttcccaaaaagaaaactccaggcctgtcacagaggaattcaatcaaacatttaagaaacaataccaatctttcacaaactcctccagaaaacacaagtagagggaacacttctcaacttattctatgagtctcatatttaataacaaaaaccaatggcatctcaaggaaagaaaactacacgcaaagatctctcataaaggtcaatgcaaaaattcatgacaaaatactagcaagccaaatttagtaaaatattaaagaattatacatcatgatcaagaatggtttatattagaaatgtgatttttatttgaattaaaatttagaaattcaattaacttaagacactatattaattaaactaagggcataatccaaatgatcatcttgatagatgcgaaatcattttacaaagtctaacacatattccatataaatccaacactcattcattgtcaaatctctcaacaagctataagtagaagggaaatatttcaatatgataaaggacagtcaaaaaacctacaactaatatcatacttcatggtaaaagaattaatgtgtcagccctaaaattagaaaraaggccagcacactgacttgc

SEQ ID NO: 359183 - DNA, 550 bp, Homo sapiens
tttgtaacaagttaactatatttaagtaccaaaaagtaaataaaatgataggacatacaccrtattttgcccattgagaagaaaacaccaaggaaaagccttaagaaaacacagtgcctctgtgagatgcatgacttactttgtcttctgtgtaaaaattaattagaaacatactctagcaaacctatttgactacttacaatgatgttattaaaatggcaaactactttttctctgtttattagaagagaaattgttttataatattttgcttaaaataaatcactccaattgtttcaaatctgttgtagttttgacattatttccctcaagtgtttaatttctgctgagagtttaattgctaatgtaataattttaaatatagtgagatactttatatagcatataattaaagtatataaattgtgaactgaatttcacatagccagaattaccataacactacatattctcttttatattttataaatttacaacttacaaaacacttatgcaatttactgatcagttactttgcatccgaaaaaaa

SEQ ID NO: 359184 - DNA, 537 bp, Homo sapiens
cacacactttaatagaagtgaaagagacaatgttcacttaaggtagtattttcataatggcttgattagaataattttctacaataatttcaagtcccccttttcaaatctaacatatttgtaatttcacarttactgatatgtgtgcatgtttcttcccctactgcatctccactgtcctgcttccatgatatgcgtcttcgtttggcttgcttccctcctttgtcgcgtgttaagtggatcggagagaggcacctgttggacctttgtccttctgcttctgctcctctcatacttcagacacagtcgggccatgaaggctttaggcgaagcctccagagtgaggagcatcctgcttctctttccttgtgaaagtgagtgggtgtacattataaatgagcaaataattggtacaaaataggaaaaaaatccaactgaataaacacagctgtagacacatacctttatttgaagaggtgaacaaaatgcggcagaatcaaagtgggagctagaatatatgtgacatctaaattgtat

SEQ ID NO: 359185 - DNA, 575 bp, Homo sapiens
attattatctttactcaactgcttattttaccattaaaaagaatagtaaaaatcaagacaatctccagaattttgagaaagcaggctttttctggaaaaaaaattgtaaagtcctgtttctcagtgctgtaagagtacctattacactacatcgtcataacacagaacacatactttaaaacttcactgccattttagtagatggaaatattaccactgtgttgctttaatattatctctttgatgatcataaatggaagctttttcatatggtattagccatatgactttcctccatgtttgatatctctattsatatcctccaccagtgattcacttggagtcttaatggttttttattccatttgtgagatgttgtttacacccctgttttggaaaggggtgtacagtttgaatgaacacttcctgttttgagtttattaatcattcccccaaatttatgctagtttatttgacttttaattttattgttttgcaaactacccaaagttcattttaactgcgtagtagatatggagagacagtagagcatgatggttaagaaagtgtattct

SEQ ID NO: 359186 - DNA, 637 bp, Homo sapiens
atactactcagcactgaaaatcgatgagcatgcagtagtagggatgattctcacrtgaaagaactgtggagtcctatttagggaagaggagtcaggctggagggaccaagagaaagcaaaaagagaaagcagataacttagaagtctgcctttcttcctggtccaggacacatagccctcctgtgcaaataactcacaatctttctgtgctcagccatcaccagacccttcactgacagaaaatgacaagttagcttactacaaccctggtgttatcagtactacgcaaagccctcttcagcatacagcaaaagcaccatcctataaaacctcacagcaaacctttgtctcttggcagttagatcctctctcgccaacttccccatcgctcccttgcaacatattttcctatgttctctaataatatgcctttctttagttgcaactatcttggtaaattctacttactcccaaaccactgaccccaggtagttgctgatggcctgcagccgaagctagattccaaaagctacacactgtatgaatatagctacagaagatatctcggcaaagaccaaattatggagctgagaaaccaaacagtgattatcaggagctgggaatggagacagaggtg

SEQ ID NO: 359187 - DNA, 554 bp, Homo sapiens
cctcttcagcatacagcaaaagcaccatcctataaaacctcacagcaaacctttgtctcttggcagttagatcctctctcgccaacttccccatcgctcccttgcaacatattttcctatgttctctaataatatgcctttctttagttgcaactatcttggtaaattctacttactcccaaaccactgrccccaggtagttgctgatggcctgcagccgaagctagattccaaaagctacacactgtatgaatatagctacagaagatatctcggcaaagaccaaattatggagctgagaaaccaaacagtgattatcaggagctgggaatggagacagaggtggcttgcaaagatgtaagatgaaaatttggggtggtgatgaaactgttctatattttggtcttggtagtggttacatgactatacacattttttaagattaacagaattgtatactacaaagcatgaatttcaccaccagtaaattatacctcaataaaaaaaaagaaaaagaagtttggtagagttacacgggataaaaattgatatga

SEQ ID NO: 359188 - DNA, 615 bp, Homo sapiens
gcataattttaagaacaagatcactgtgccacccacaatactaaccattcctctctaccagctcatttaagtgactgctactactttaccaattatgtttagcctcactctattctgccttcctatagataaggtttataattgagataaccaatcaaaagctttgagagtcacagacaaccacccctagacactgccatggggccgtagcccaaaagtgctccccatggcctctgcacctgcctgtctgcatgcttccactaggggtttgagcagcaaggcgaccgaaggagtgagccacacccctgtcacatgtcctgtgttgcggatgaggaaactttcctgtttcaatagtaagcagctatgttgtggtaaaataccatttcacaattctacctaaagctgagatgaacaataatagaaaagaatattcaaaagcaattaaacagccttaaggcaagctctatttaggtgtgaaatagaaacaaaacatttagcaactggccacaatattcttttaacctcttgcaakttttaggtcttttattatttaagttaactggatagtggaagaaaaaattatttttcctctcccttctagcttctcccactgga

SEQ ID NO: 359189 - DNA, 565 bp, Homo sapiens
taatgtaatggtgaatataagactgagtttttatgtcaaaacttatcatattttatgcttrtaattggtgatatttgtggtatatgaagtatgcatcaatgaaacattaagtaagacatttgggtccaaatggtctccgcatttttccaaacagtggcccatataggtgctaacagctggaaatggttagtgaggagactcccggatgaccaggaacaagaggcatctgcagagtgctgtgttgcatgggtcaggtcaggaggcgggcggtggtgcagctgtgtggtgcatgctataaaaccccaccactgcaggaagtgccaggtgccccctcagcgtgaagacttgtatgctgacaacaagcaatgatagactcttctaataaaacaaaacccagtagccaaatgaaatttcacataaaaatccaatcctgacacttcttttgatatgttgtttgtatcctctgaagtattaaataacaaacctgagagggaatttttaaactgcttctatttggaggggtcctgggctcttctgctggttcagcctgccctgtgctcatcac

SEQ ID NO: 359190 - DNA, 565 bp, Homo sapiens
taatgtaatggtgaatataagactgagtttttatgtcaaaacttatcatattttatgcttataattggtgatatttgtggtatatgaagtatgcatcaatgaaacattaagtaagacatttgggtccaaatggtctccgcatttttccaaacagtggcccatataggtgctaacagctggaaatggttagtgaggagactcccggatgaccaggaacaagaggcatctgcagagtgctgtgttgcatgggtcaggtcaggaggcgggcggtggtgcagctgtgtggtgcatgctataaaaccccaccactgcaggaagtgccaggtgcmccctcagcgtgaagacttgtatgctgacaacaagcaatgatagactcttctaataaaacaaaacccagtagccaaatgaaatttcacataaaaatccaatcctgacacttcttttgatatgttgtttgtatcctctgaagtattaaataacaaacctgagagggaatttttaaactgcttctatttggaggggtcctgggctcttctgctggttcagcctgccctgtgctcatcac

SEQ ID NO: 359191 - DNA, 565 bp, Homo sapiens
taatgtaatggtgaatataagactgagtttttatgtcaaaacttatcatattttatgcttataattggtgatatttgtggtatatgaagtatgcatcaatgaaacattaagtaagacatttgggtccaaatggtctccgcatttttccaaacagtggcccatataggtgctaacagctggaaatggttagtgaggagactcccggatgaccaggaacaagaggcatctgcagagtgctgtgttgcatgggtcaggtcaggaggcgggcggtggtgcagctgtgtggtgcatgctataaaaccccaccactgcaggaagtgccaggtgccccctcagcgtgaagacttgtatgctgacaacaagcaatgatagactcttctaataaaacaaaacccagtagccaaatgaaatttcacataaaaatccaatcctgacacttcttttgatatgttgtytgtatcctctgaagtattaaataacaaacctgagagggaatttttaaactgcttctatttggaggggtcctgggctcttctgctggttcagcctgccctgtgctcatcac

SEQ ID NO: 359192 - DNA, 530 bp, Homo sapiens
taacaaaagccatattcccataccttcttataatcttttaccaaaaatgtgttctatttccttacatacctcgtaagtaaaattgtttctccagttgtctcaattgcatgttacaacattaattcttagcaacttatttatggtgaaaatcctgataagtaagtgattgtaattatgtgctaagtgtggcgcctaggacatcagacagacgagtgggtaaggtctgatacttctcagcatagctaggcagcatggctctccatatgtccccaggccttatttagaatctactgctccaaagtaggtaaattgaacaatctttaaaagtcaaaaaagcagttcatgaccttaaagcattgagcaaatctgaccttaatttagatgaaatgtttaaattttaaatacagttttattttastaataatttttaaagctgtctttatttccaaaaaaattagtaaagtcacatgaacaaaaagaattaaagtttcaatttttctgacaaaatatgatttaagtgcttattttgc

SEQ ID NO: 359193 - DNA, 530 bp, Homo sapiens
taacaaaagccatattcccataccttcttataatcttttaccaaaaatgtgttctatttccttacatacctcgtaagtaaaattgtttctccagttgtctcaattgcatgttacaacattaattcttagcaacttatttatggtgaaaatcctgataagtaagtgattgtaattatgtgctaagtgtggcgcctaggacatcagacagacgagtgggtaaggtctgatacttctcagcatagctaggcagcatggctctccatatgtccccaggccttatttagaatctactgctccaaagtaggtaaattgaacaatctttaaaagtcaaaaaagcagttcatgaccttaaagcattgagcaaatctgaccttaatttagatgaaatgtttaaattttaaatacagttttattttagtaataatttttaaagctgyctttatttccaaaaaaattagtaaagtcacatgaacaaaaagaattaaagtttcaatttttctgacaaaatatgatttaagtgcttattttgc

SEQ ID NO: 359194 - DNA, 613 bp, Homo sapiens
tgttggacaaatagtgtgattttcctggtagcaagacgtggtcaacatggttcttggtctggttcttggtcagcaggagggcattgatggtgggtgatgcaatggcttgttaactgagcccacaacttttttattgtctctctcttataggccaggcactgtctaggcattgggtttggttataatagggatgcctgtgtgaaaacaatggtacaaatgacctcaggccaatagaaacacgttgctaaatctmgatcatgtcaaaatttcatacttcaggagttgttgacatctggaaggcctgcctataaatcctggatccttccgtgctaagccaagattcaggtaagcataaagagcaatttattgttatttattgtttattgtgttagagcaattatttgtgttatttattgttattgtgttagagcaatttctggactagaaagccttctagaaaaataattttttaaatgggcataagccatttgtatagtcaaataggtggtctaacgcacataggcacctagctgaggggtgagtggggctgaaatccaacacttctctgccttccgagtcatgtagcctgggacggggttagatctttccagag

SEQ ID NO: 359195 - DNA, 613 bp, Homo sapiens
tgttggacaaatagtgtgattttcctggtagcaagacgtggtcaacatggttcttggtctggttcttggtcagcaggagggcattgatggtgggtgatgcaatggcttgttaactgagcccacaacttttttattgtctctctcttataggccaggcactgtctaggcattgggtttggttataatagggatgcctgtgtgaaaacaatggtacaaatgacctcaggccaatagaaacacgttgctaaatctcgatcatgtcaaaatttcatacttcaggagktgttgacatctggaaggcctgcctataaatcctggatccttccgtgctaagccaagattcaggtaagcataaagagcaatttattgttatttattgtttattgtgttagagcaattatttgtgttatttattgttattgtgttagagcaatttctggactagaaagccttctagaaaaataattttttaaatgggcataagccatttgtatagtcaaataggtggtctaacgcacataggcacctagctgaggggtgagtggggctgaaatccaacacttctctgccttccgagtcatgtagcctgggacggggttagatctttccagag

SEQ ID NO: 359196 - DNA, 600 bp, Homo sapiens
tcctgcctcaacccataggaagcattgggagtgcctgaaggagaaacatccctgagggcaacsaaagacaaagtggggaagatgggactgtcattcccagccttggaaactctgtgctgtaacttgggcagagaagacaccaaatcagagcagctgctcaccagcaccacactgtgggagatatgttccacaggtcccctgggcatgaacccctagccagccttcccaccacactgctgggatagcccctttatgacctccttaattcagaatgggcagtactctaatcacttactagagtcaaggcaaacatgggcctatggcactctctagtacctataaagaggcagcaacctagtggaaaataaaaaagaaagaaattcaacagataaattagaaggaatctctaagcaaacatatccaataaaaaccaaaacaagccacgtagagaagactggaaaaaaataactaatccgtcaatacaaagacatagatgtaaattcagaatcctggaactgagaaatacatttactaaactgaaaactttattagaggctctcaacagcagaatgactcaagcagagaaaagagtcagtgagc

SEQ ID NO: 359197 - DNA, 497 bp, Homo sapiens
ttgtggctaatttgttggtcccacaaaggcagtgtaggccccaggcaagaaggagatttgccatgggaaatgcctgttatcaactttgttttaaactatacactacaaactaagttcctcccaaagttagttcagtctatgcccaggaatgaataaggacagcttggaggctagaagcaggatggagtgggatagatcagatctcttttactgtctcagttacaattttgcaatggcattttcaatacctccctttgggtttcataacaccttagtcttaaggtgttggctaaggaagatggaaaaagggcaaagaccactctaatttcttcctgctgatcaggggcatagtgggggtaggtgttgaccgaaagtgaaaggagtggaacctctttgcaattggctgagtgtactcatgcaggcctggcaggggttctgaggcttgcatggcaaaggcgttcatactgtcrtctatagttttagtaccacatttaagg

SEQ ID NO: 359198 - DNA, 541 bp, Homo sapiens
tgggtcattaggatcaaaacagtaaagggagtggagatgttgctttcctagtacaactgaacaagtttggtggatcattcatcttatttgaaattggagatatatattgtagttataagtgggcttaatcaacatcatttcaccttcttgtaaagtcttatctagaaatgggaatttgggccttgatgtgactcagtgtcagagaaggggccagggaaagaaggaaagagtattgattgctgagtaagtggcctcactacagaagacccatggtccatcctcacaatgatgataatccaccagccgttacacgccaatttgaaaacaaattgttatagaccttggaagctttctcagctcaaagcagrcctgacatacaactgcatgtgaggacagaaataaatcatatcagatcagaaggtctactagttaacagctaaaaaagaggattgtagtattttcccttcgttttagtctaaactctctctagagggtaggtagtgtaataggagcaggtaactttgtccgtgtacaaattttc

SEQ ID NO: 359199 - DNA, 549 bp, Homo sapiens
atgaaagaaaactaagagaatttgtcaccagcagacccaccctgttaagtcattgtaatatcagagccagaactcttaatgtttttaaacaatgctggttacttagacatcaagagtataactagcacgaagaaggatttatccaggaaataaagaatggttcactattaagaatctattactatcatattaataggtcataggtcatatgatcaacctgatagatgsttcagaagtattcaactggtatccttcatccattcgtgttcaaaaacaaaaatattagcattgcaccaagaatacaaataaagccctagaagaattctctctaataacagaaccaaggaaaaggtgcttactattactactactatttaatgttattccagaagtgtgaccaatatggccactgagatggggggaaatttttaatttttcccagattatataactgtctacctacaaaatgaaaaacggttaggggggctttactcagaattgatggagtattgtgggcttggagcctgagcagtataggtcagaaactgt

SEQ ID NO: 359200 - DNA, 544 bp, Homo sapiens
ttggcagctggcagcctcggccttcttggtcccattgacaaggctatctctacttggcatgccacagggtggtacttgctcctcacagtggcctrcaccctgcctgctgtgtgacttcttgctggggtcatggtctgcattcttgctgcccagggtcaatgagggattcttacacttggtgacacactggcccatggtactggtgtcccggcctctagaatggccccctctggatcagttgccctcactgccgctggcccatgcacctcaacatgtcatcagtcagaggagctagccaacagctgctccagaggttcctccagtcaaaccctttctggaaacgatggcagcatggcgggtccaaccctcctaccatccccgctggggtttccaggctccctacccctgccgccaccaccccttcttccaccactgccaccgcctccttcatctgccaagggaagtgaaccactgggttcatttttagggactgaacctttttatagggaaaaaaggttccttttaatagggaaagcgaaccatt

SEQ ID NO: 359201 - DNA, 544 bp, Homo sapiens
ttggcagctggcagcctcggccttcttggtcccattgacaaggctatctctacttggcatgccacagggtggtacttgctcctcacagtggcctgcaccctgcctgctgtgtgacttcttgstggggtcatggtctgcattcttgctgcccagggtcaatgagggattcttacacttggtgacacactggcccatggtactggtgtcccggcctctagaatggccccctctggatcagttgccctcactgccgctggcccatgcacctcaacatgtcatcagtcagaggagctagccaacagctgctccagaggttcctccagtcaaaccctttctggaaacgatggcagcatggcgggtccaaccctcctaccatccccgctggggtttccaggctccctacccctgccgccaccaccccttcttccaccactgccaccgcctccttcatctgccaagggaagtgaaccactgggttcatttttagggactgaacctttttatagggaaaaaaggttccttttaatagggaaagcgaaccatt

SEQ ID NO: 359202 - DNA, 604 bp, Homo sapiens
gctggcccatgcacctcaacatgtcatcagtcagaggagctagccaacagctgctccagaggttcctccagtcaaaccctttctggaaacgatggcagcatggcgggtccaamcctcctaccatccccgctggggtttccaggctccctacccctgccgccaccaccccttcttccaccactgccaccgcctccttcatctgccaagggaagtgaaccactgggttcatttttagggactgaacctttttatagggaaaaaaggttccttttaatagggaaagcgaaccattggtgtttgtcactatatgtgtgttaagtatttttctggttattatgcggtcttatttcctttattctcctttctttacgtttgttgaacatctgatgattttcttagttccctttctccttggttaaaatggaaattctgcacttttcctgaaaatatttgtcagtgatttttaatatatttttgtaactttgaaatattgattaaataaaaattagggagaaaatgatgtagaaagaaaggtagacaatgaactctgtgcctgagtgttgacactttttctggagttcctagtcttggatgtgaagtacac

SEQ ID NO: 359203 - DNA, 604 bp, Homo sapiens
gctggcccatgcacctcaacatgtcatcagtcagaggagctagccaacagctgctccagaggttcctccagtcaaaccctttctggaaacgatggcagcatggcgggtccaaccctcctaccatccccgctggggtttccaggctccctacccctgccgccaccaccccttcttccaccactgccaccgcctccttcatctgccaagggaagtgaaccactgggttcatttttagggactgaacctttttatagggaaaaaaggttccttttaatagggaaagcgaaccattggtgtttgtcactatatgtgtgttaagtatttttctggttattatgcggtcttatttcctttattctcctttctttacgtttgttgaacatctgatgattttcttagttccctttctccttggwtaaaatggaaattctgcacttttcctgaaaatatttgtcagtgatttttaatatatttttgtaactttgaaatattgattaaataaaaattagggagaaaatgatgtagaaagaaaggtagacaatgaactctgtgcctgagtgttgacactttttctggagttcctagtcttggatgtgaagtacac

SEQ ID NO: 359204 - DNA, 601 bp, Homo sapiens
tggcagttcgtggcaacaattttcattccctttatggtgtattttggtgaacaaaagtttgtagttttataggcaatttagtaattcttttccttttgggctacaatgtttagtgtttctttaaccatatttaacaatcactatacttagttcaaagaacatattctcatacattgaaaaatcttttaattttcttctaagatttgtctttatccatctagaattaattttatgtatggtatgaggtagggatccaatttcattctttttcattatggttacctaaattactcaaaatcttttattgataatttgtcyttttccctataatttgaaatgtcagttttccatatatatggatttccattaataaattttctatgtatatgtgtaacttattttaaggactctctattctatacagttcatctatatgtctaaatctgcaccattattgcttataaattaatatagctttgtgatacatcttgatacatcatcttgttttatccttgaagaggcacctgattatctttagtcctttgattttctacatatattttagaatcagcatgtttccctgtgaacgcctttgggatat

SEQ ID NO: 359205 - DNA, 612 bp, Homo sapiens
tcccagctactggggaggctgaggcaggggaatggcttgaacccaggaggcggagcttgcagtgagctgagatggcgccactgcactccagccttgtgacagagcaagactccgtctcaaaaaaaaaaaaaagattaagggggttatcttatcccccccttaaagtatttctatttatagggatacttacatcttaaaggattgctacttattatttttaagtatttctatttatttcctatatcctaaagggaagtcaaggttcttgttatatagataaatcctccaagtagcaggcttcaraaagaatagatggtaagtatcttttattggaacttaaaacgagtcagactccctggaaaagacctagtaagggaaggagattctctacagatgcaaatggcccccacaagagatggctttgcaggaccatttcaaaatatgtcaaagaaaatatatttttgggtaaaatacttctatttccttcagagcctgctatctgtcatgtgatcctatatcagagtcaggttggaatttggtatctcgttgctacaaagagtctgttttttttctgtcttaaggtctctattttaatattgctggccagttgtg

SEQ ID NO: 359206 - DNA, 568 bp, Homo sapiens
aaaaaatcaataaacaaaaagcacctttctacttactaggcactaacaattgataataaaaatattggtccaggcacggtggctcacacctgtaatcccagcactttgggaggccgaagcaggtggattacaaggtcaggagattgagaccatactggctaacacggtgaaaccccgtctctactaaaaatacaaaaattagctgggtgtggtggcgtgtgcctgtaatcccagctacttgggaggctgaggcaggagaatggcgtgaacccaggaggtggagcttgcagtgagctgagatggtgccactgtactccagcctgggcgacagtgagactgtgtctcaaaaataaataaataaaaatattttaataacatcaaaattcacagtacttagggataaaactgatacagatgtcattagtttttaggaaaacataaagkaaaatcactagatactacagtacacctattagaatatgtagatttaaaaagactttatgttaagcattggtgaggatattgagcaactgaaactctcatattctgatggtagtaatgtaaaatg

SEQ ID NO: 359207 - DNA, 570 bp, Homo sapiens
ggacacacacatgcatatgtatatatatatttatatacatataaaaatagatatatttcatccaatctatagattaaaaatttttgaatgaaaatayattgctggaagtatgaaatctgtgggtatttgctttttcgagtgaaaaaattatctgtcttaattgctgtggtggtaaaccacatgcatatatttatcaaaactcagattacatattttgtaaaaatctatgcattttatgaatgaaaattttaccttagaaaaatattgataaagcatattcaataatgtatacttagacttaagtctaacttacatggtcacaaaggggcaactgagatgctctattagtcatcttatacttttttcgttatgctcactaatgatttgaatgagaatctccatctttaattccatttcctctccacactttcccctcttgcaatctctctactatccatgtgcattataactgcctgtgatgtggttggcagcataatgacccccaaatatgtttgatatgtttatctgtctctgtgaaattttcttttgaatccccagaatctgtgatta

SEQ ID NO: 359208 - DNA, 565 bp, Homo sapiens
taccaagatctccatttttctgacaaagttctttggcaggaagttctccatgaatgattctaaataaagtcagtcccctcaggcttgcataggtcttggtttatggcctacctttcacttttgacagaacctctagtcattgtactagagctaggggtggggaactgcttttcccgatgatggtagcttatggtcttcctggcttgccccttcggaaatggartatttgccctaggagtgagataaaatgaggatgactggggccccagcattcttggcctgcagggcctagagttaagcttccaccctctgggagtgagggggttgacaagtgaagggagattggtcctctctttctcacctagaatagagactctgcaacatgggattaaagtgaggtgagaaacactgagatcctgctctcccaatggtgaggtctggttctgtatccccagaaggcagatgcgggaagaacgagctttatttttggccactgttgtccagagtacagtaccacagttgagatggtggggagcacatcatgactcacatgccacagactcac

SEQ ID NO: 359209 - DNA, 596 bp, Homo sapiens
aatagccgggcatgagcatgcacctgtagacccagctactcaggacattgaagtgggaagattgcttgagccagggaagtcgaggctgcagcgagctgtgattgtgcaactgccctccagcctaggcaacagagaccctctattaaaaaaataaataaaataaaataaaaaataacagtgtaactctcagtgcccctggagtaacaaagtttaagtaaccttaggagagaagccactggaagagtggttccaagtgtcaaaaatatagtcaattactacatcagttaatcatataaatgcctccctattaagggaatttgtatstaaatatttaatgagactgctaaaaagagactttaagctctgaagcatcagatggaaatgagggtaatatgaagaggttttactgaaaattaccaaaaatagcaggatgcttggttcccagtattttagagccagatttaacgctgccaaggcaggaagattggatgattcctctttgaggaattaggtattttttttttaacatgtaaggagagggtctacttaaagtcaagaataggctaccctgtgagccctgaggagtgaacaaccta

SEQ ID NO: 359210 - DNA, 573 bp, Homo sapiens
ttctttcacaagagtttcactgtttagaattactggcaacgaactgaaatccacttgacatagcatactttgaacaatgatgtccaagcttcatgtttcagaaccttgacattggcccaatagcaaatacatatatataaatatatataaatatacatataaatatatatatatatctaaacaccttagaaaaatcaaaacgaggttgctaatttgctgatttcaattccccataaagcttttagaaaaataacataaataattacaaagtcataactcaacagcatttaattcattttataaatacagtactctcagaaacatgtaaaatgttctccacccctgtttatattctcctgctctcaagagacaataaataaacacggtgttctgattaaatttcatgttttctctccttcgtttctgctctgtgccgtgccttgcaaggccgacatctccaggctataactcccaggctttcttaacytccgactaccaagtagatttagcaggaacaggaactgtgggagaaggaaaagtcaagggatcatctccattcctgttccttccctg

SEQ ID NO: 359211 - DNA, 576 bp, Homo sapiens
aaaaactgcagaaatagatactacttattatgagctacatcaaggaataggaaagcaagttttagtttgggtaagttttaaatatttttccgtcatttctccttaatcaatataaattgaaaacagattcatctaatcyacttcaagaacttagtaatggatttggaaggccaattccaggtctcccaggcattgagcaaaaaataatgcgtaaatgctcttctgtcaatgaagctgaggtatataataaaactgtgactcactaaaaaaactgaaagcatccccaactctaagtgtatgtggactccagagagcacctgtctctgcgcacatggaatacaggagaaaaatcagaaaagttcttcatcgtttcaggaaagtgagaagcaaaaaatcagggataactaagagcaaaataggttagtgttggtacgcaaactgttgtcttaaagttaaatgcagtgtaattactgactgaataacgggcatatggattttcttacatctagtattaaaatcacacagctttgcataaaattcattaaaattacattcatagcccaaaatgtttctagt

SEQ ID NO: 359212 - DNA, 595 bp, Homo sapiens
gtgactcactaaaaaaactgaaagcatccccaactctaagtgtatgtggactccagagagcacctgtctctgcgcacatggaatacaggagaaaaatcagaaaagttcttcatcgtttcaggaaagtgagaagcaaaaaatcagggataactaagagcaaaataggttagtgttggtacgcaaactgttgtcttaaagttaaatgcagtgtaattactgactgaataaygggcatatggattttcttacatctagtattaaaatcacacagctttgcataaaattcattaaaattacattcatagcccaaaatgtttctagttatttattgttccataaaaaattactcctctcaaagtggcttaaaacaataataataatttatgttactcaagaatctggaattgactagatttatctagaaagttctggctcagtttctctacgtggccataggtgcaaagcagatggtggttggggctgggttctcttgaaggcttattcactcacacatctggtacctgggctgggaaggcttagacagttggggactagaatgactgggcccctatgggcatccctctctgtcttcgag

SEQ ID NO: 359213 - DNA, 595 bp, Homo sapiens
gtgactcactaaaaaaactgaaagcatccccaactctaagtgtatgtggactccagagagcacctgtctctgcgcacatggaatacaggagaaaaatcagaaaagttcttcatcgtttcaggaaagtgagaagcaaaaaatcagggataactaagagcaaaataggttagtgttggtacgcaaactgttgtcttaaagttaaatgcagtgtaattactgactgaataacgggcatatggattttcttacatctagtattaaaatcacacagctttgcataaaattcattaaaattacattcatagcccaaaatgtttctagttatttattgttccataaaaaattactcctctcaaagtggcttaaaacaataataataatttatgttactcaagaatctggaattgactagatttatctagaaagttctggctcagtttctctacgtggccataggtrcaaagcagatggtggttggggctgggttctcttgaaggcttattcactcacacatctggtacctgggctgggaaggcttagacagttggggactagaatgactgggcccctatgggcatccctctctgtcttcgag

SEQ ID NO: 359214 - DNA, 607 bp, Homo sapiens
aaaatgtttctagttatttattgttccataaaaaattactcctctcaaagtggcttaaaacaataataataatttatgttactcaagaatctggaattgactagatttatctagaaagttctggctcagtttctctacgtggccataggtgcaaagcagatggtggttggggctgggttctcttgaaggcttattcactcacacatctggtacctgggctgggaaggcttagacagttggggactagaatgactgggcccctatgggcatccctctctgtcttcgagaggtcagtctgagtcatcaatccatatagcaacctcagagcagcctgattttagatggcggctaaaggctcccagagtgagtgtcacragataaaccattacaggcagcacggcctttcctaactcagtcttaagagtcatacagcatcacttctgtcattccttttgtggtggtcatcacaaaaggccacccaagttcaagagaacagattccccctcctcgtaaagatgtggcaaagctctcaagagcaaatgggggaaaaaaaaaactgcagctgattataaaaaaatacaatctcctaaaagctggttgggatgag

SEQ ID NO: 359215 - DNA, 459 bp, Homo sapiens
taacctttcttgttttagcatctttcctgacccaagcagaggacacaccttctcaacatcattaagattctgcctctctttatggcagaaggggaggaagacagktgttgttggaaattcaagtggtggtcctgggaatcatggaatcccttagatgaatgccactgtatttaaaagttaaaacatcttttcaaatcatcaggtatctgttttctcatgggacagtgtggtatttgcacaatctttccagcaaataaattgataaaatctacacatgtagtatttgcggaataagattgctttgctattaacatgctgcagagtgagcccacatggtatataggtctgtgttctttctctccgggggattggccagctggccatgagagtattgttggtgccacagtttcagaactttctctgcagtggtggtagtgaggtgcgtggagggttatcaaa

SEQ ID NO: 359216 - DNA, 585 bp, Homo sapiens
tgagacccgctccttctatctgctaaacgcattttcttttctctatcaaactggtccttgacttagtctaggccactcttatctcttacttgatctggaaaagcctcttaatttgagctcttggcttccaatatacttctttctgagaaataatgtctttacatgaaatctatagagaattttgaaaaatctataccagatctgtcactcctctgtctaaaactctacaaggaaatactctttgaccctgagagaattatttaatgtggtttacayattatacacgtttacaagacctacatgtgccagcctctgtttaagtctccagaatcatctctccccatacccttctccccgcaacattctaaaccttacaacatgaatcttaaatttttagctgagcctcactccacacagaggcatttttgtctctgaatggaccacttctcctcatctcttcatctcattaacttctactggatcttcagatctaggcaagtgtgtcatccccattggaagccttctctgattcctctgtggtagcccctatgtttccctagcccagcactgatcattccatggtag

SEQ ID NO: 359217 - DNA, 585 bp, Homo sapiens
tgagacccgctccttctatctgctaaacgcattttcttttctctatcaaactggtccttgacttagtctaggccactcttatctcttacttgatctggaaaagcctcttaatttgagctcttggcttccaatatacttctttctgagaaataatgtctttacatgaaatctatagagaattttgaaaaatctataccagatctgtcactcctctgtctaaaactctacaaggaaatactctttgaccctgagagaattatttaatgtggtttacatattatacacgtttacaagacctacatgtgccagcctctgtttaagtctccagaatcatctctccccatacccttctccccgcaacattctaaaccttacaacatgaatcttaaatttttagctgagcctcactccacacagaggcatttttgtctctgamtggaccacttctcctcatctcttcatctcattaacttctactggatcttcagatctaggcaagtgtgtcatccccattggaagccttctctgattcctctgtggtagcccctatgtttccctagcccagcactgatcattccatggtag

SEQ ID NO: 359218 - DNA, 471 bp, Homo sapiens
gttgttgtagttctgaaagtataatgcctgaagaaaacacaggttgaggaaacaacacaacgtaatgcacgcgttctgtccaggtaatcatgtccagtcagggtgcccgtgcttaagaagcattgccacacagaggtccacgtagccatcttgcgatttagcatcctgaagatattaacatgactttcttccacatatttgaagtgttgacttcttccacgaaggacttctaaaaggacatgtcattcatttctctagtacagaaattttcaattttgcacaaagcaaagtgaggaggaggatgcagcctaagagcgtaactatctgcactcacatctcatagaacactccggaaaatgcgggtatttcagtagaaaggtcaggcgtcttagagaataccagtgtgcgatgtaaacaaggatatggatccacatggaygtttaagccttctctattctgctaccctattta

SEQ ID NO: 359219 - DNA, 491 bp, Homo sapiens
ggaagcacaaatggactggagtagggggtttaaatacaggagctgaaagtagcatcaggcatgacctggccctgtcaattactagctgtgtgcttttgtgccaagtcatttaacctcggtatgcctcagtttccacgactgcaaaacagaaatattaatagcacctagttaattgaattatgaagattacatgatataacaacaaaaaataaagtaaaaatgtcctggtccatagcaagaagtataattgcttaattaaatgaattaataaaatagagcagaaragatctgttttttctgtcctgctttgtcctctgtctctcatctctctttgcctcggggaaaattcattttctatttctatttatacttttatatcgttagcccttgatattcagttaatatctttatattatactttcctttgattaccatgaaaggcagaacatagaggggggaaaaaccttgctattgaaatattcctcctaaaa

SEQ ID NO: 359220 - DNA, 491 bp, Homo sapiens
ggaagcacaaatggactggagtagggggtttaaatacaggagctgaaagtagcatcaggcatgacctggccctgtcaattactagctgtgtgcttttgtgccaagtcatttaacctcggtatgcctcagtttccacgactgcaaaacagaaatattaatagcacctagttaattgaattatgaagattacatgatataacaacaaaaaataaagtaaaaatgtcctggtccatagcaagaagtataattgcttaattaaatgaattaataaaatagagcagaagagatctgttttttctgtcctgctttgtcctctgtctctcatctctctttgcctcggggaaaattcattttctatttctatttatacttttatatcrttagcccttgatattcagttaatatctttatattatactttcctttgattaccatgaaaggcagaacatagaggggggaaaaaccttgctattgaaatattcctcctaaaa

SEQ ID NO: 359221 - DNA, 474 bp, Homo sapiens
gtatgaatatccatcaaaacccaggccacccgctgggtagatggtgataattgttatgattgttcgagtgatgaatacactatgttaaatgagaatttgattaagctggcacctgagtcgaccctgatgcaggcagcaggcagggttatagtgatgatgtatcttactttttttgtttataaaagagaatgttagacaaataacactgcctacaagtttgcaattcaatctttgaggagcatgtattacaatrtctcatttcagtcagcatagaaataacaaccaaactagaattaactagaatttcaaataacattagtagccctgtcagtgataccatagccactgaatcctaacaaatgtgtttagtgaaaaagcttccaacacagtgcctgttaaatcaaatggagatggggaaggagcaaagtttcttgggtagaatattctggagttcttccaattagaatatttggg

SEQ ID NO: 359222 - DNA, 608 bp, Homo sapiens
ggtaatgtggctaaattcctcatctttttgtgtttgtaagaaatggaattagactattataaagtgggaaggggaattatttgccagcagtaacatgagtaaatttagtcaacttttgattgatgacagtgtcttgcctggtgaagagggaaagagagaaattcacatagctggaccctgacatgcactgcaggtgcccaactacataatgccagctaatcataggtggtgagggaaaataactgttgtcagacagtcctaataaagacactaaatcaaacatattttagtatcaaggtgatgatgatgaaagggaaagagtctcccagatatgtggaaagtgattagttatacaataaaggtaaaactatgcctgataaaccatcagacataagttctctaaaacctgcagcactaacaggaggggaaaaataggctaagtaaatcatcaaaacataaacagaccgtcattttatggttctttagtctgcaggctttcaacttctctgttaaacattttgctcagctggaaaaaactcagtagcaagaccagccatggtcctcattcctaccggygatgttatctcaagaatgcactacaccaagcg

SEQ ID NO: 359223 - DNA, 386 bp, Homo sapiens
atgacattttatcaacatactgaaattcaacacctgttccaccaaaggaaagtaacatgaggttcattcttgatgtyaacaacagaaataactcacttgattttcacacttaagagaggcttaaggaattagaatttaacttctttacccttgttcataggatcttaatgttgtcatctctttcttcttcctactgcttggactagaccttgtaacctcctcctaagctattatagcatcctacctcctttaaccacctgaataactatatttttcaaagagcagttctgttcattaccactctgctgctcaaaaacactttcagtggtggctcaggactataggatgaaacccatataaccctgatttcttgtgtctgtccccca

SEQ ID NO: 359224 - DNA, 386 bp, Homo sapiens
atgacattttatcaacatactgaaattcaacacctgttccaccaaaggaaagtaacatgaggttcattcttgatgtcaacaacagaaataactcacttgattttcacacttaagagaggcttaaggaattagaatttaacttctttacccttgttcataggatcttaatgttgtcatctctttcttcttcctactgcttggactagaccttgtaacctcctcctaagctattatagcatcctacctcctttaaccacctgaataactatatttttcaaagagcagttctgttcattaccactctsctgctcaaaaacactttcagtggtggctcaggactataggatgaaacccatataaccctgatttcttgtgtctgtccccca

SEQ ID NO: 359225 - DNA, 573 bp, Homo sapiens
ttcctaaatctcctgttccttgagataaacatcttcataagttcctgcaaatgcatttcataggacacagttgaatttctcttaacagcttgcttaccctcatttagggattttgcccagatcatgaatatttgcatggttttccagtctgccaaatgccatgcagcttttgccacaaggcatataggctggaagcaggcctgtagrtggcagccacaagtgcttctagcaaggcccagctaggcaggtagaccagggtggcaaggcctctgggttagccaggccttttctgaatgctcttgttctgataggctgatactcttcgagcaatccttcagtaaaccaggcataatctttcttattctaaaaataagaaagatgaatataatgctgtttaattgtgtttttctccattttatatttttttagggaagaaaacatttctcaagtactgttcaacttctaatactaatttagaagtgttagaaggtaacttttctggctctcattttctctcttttgaacagcaggggttgccccaagttagacagtgaggttgccagaggttggttg

SEQ ID NO: 359226 - DNA, 486 bp, Homo sapiens
gaggtggcaggatcccttgggcctatgagattgagggtgcagtgaaccatgattgcacctctgcactccagtctgggtgacagagcgagaccctgtctcaaaaaaaaaaaagtgagtagcaatatgatgttgtgtgaagtatatcatatataagacttgagagttttagctttcgcagattgtgatcttggacaaatcgttacacagtcatccagtaacttttttctcaccgaagaaacaatgaargtaacttagtaatttctaaggcccagtctaatagtctctgattgttaataatagcaccataacttgtattgttttgtatattcaaatttttaggttaaaagttctcaaaattaagtacactgacatgaagcttctgcctggggaccatctcttttggattttgtttttataggttgtccttaatgacctggaattgttataacagctgtcaactgaggtaagcttcacagaaggggagct

SEQ ID NO: 359227 - DNA, 540 bp, Homo sapiens
taggaacagcagggagaaggtacatgggaaatttctgaaatgaaatatgaagccccgcagtttgctgcaagagccctattcaccccgtaacatgttctgcttggtcataattgatcctttaaatgaacatactgcctttcttggaaattccttgaagaaagagaggcttcatgacttgtctgtcacatagttyttcctcatacttctccgtgatggtgaatagcaaatgtggcaattctgtgcctccaaaccgcatccctcatgacaacggagccactaatgaagagatgagctccaccttagatctttactcctgacaggagtattaaaagtcaaactggcctcacaaatgtgtagacctccaaagggtaggattttaggtcactaaggctctctgccaaaaaaaaaaaaaaaaaaaaaaaaaaacccttctagcttatccaaaacacaagacaagatttatccccagaaataatcactgcaatattactagtaatgccaaataaaaggcaatcaatgtatatcagtagggcaattatt

SEQ ID NO: 359228 - DNA, 540 bp, Homo sapiens
taggaacagcagggagaaggtacatgggaaatttctgaaatgaaatatgaagccccgcagtttgctgcaagagccctattcaccccgtaacatgttctgcttggtcataattgatcctttaaatgaacatactgcctttcttggaaattccttgaagaaagagaggcttcatgacttgtctgtcacatagttcttcctcatacttctccgtgatggtgaatagcaaatgtggcaattctgtgcctccaaaccgcatccctcatgacaacggagccactaatgaagagatgagctccmccttagatctttactcctgacaggagtattaaaagtcaaactggcctcacaaatgtgtagacctccaaagggtaggattttaggtcactaaggctctctgccaaaaaaaaaaaaaaaaaaaaaaaaaaacccttctagcttatccaaaacacaagacaagatttatccccagaaataatcactgcaatattactagtaatgccaaataaaaggcaatcaatgtatatcagtagggcaattatt

SEQ ID NO: 359229 - DNA, 506 bp, Homo sapiens
ttactgcatattaatacttctaccacttctcagaaaacacaagggtctttgacactttaatttacacagtccgtctccccttgtatgatattgttgtcttawatttatattctagaaacattttaaaccttacattataattgttgttttaaacaggcagtatattgatttatattttttacatacttacccattctcctcattccttcctgaagtttcacatttccatttgggaatattttccttccacctgaagaaatccctttacagttttgggttttttttttttttctgcaaaagatgaattccctaagcttttgtttatttcaaaatgtcatttttgttttatcttcattttgaaaatattttcctcagtataaaatgctaggtagactgttttctttccacactttacagatgccattccatcattacctagctttcatgaattctcttaaaagtcagttgtaaatcatattgctgctgctgtgaacatgtttcttttt

SEQ ID NO: 359230 - DNA, 543 bp, Homo sapiens
cctaactgctgaactacttcgaatatagttgtctaacatcattgtactgttcttagatttgcacattgaccacatctagtaaaagtcttctattgcacagcttacttgttgtatcccattcaggaataagcaataaaccaaaaatatgtaagtgaggaatagggggagaattgcaggcttatttcactcttgcatktacacatacacaaaaaagttcccactttgttgggtgtttctagtaggttatcatctgcatgatgaaggctcaaggcagcaggaatgatagggcacttagcacaacaatcagattagaaaagaacagtttagaccctaaacaactgaccacttcatgaagcttaaagaatccaaaggaaaaaatttagaaattatctgagtatcatttgagttatgtagtgaataaatcaaatacttataatttcttcacttccttattatatttgcccacattccacagtgggagaggatccacggaagatgttgtaaaccaattcctactcttttcatctgtttctaaatgcagtt

SEQ ID NO: 359231 - DNA, 591 bp, Homo sapiens
gccttatgaaaataaatgcaaatttcagcatattttgactcgagggaggatactatgtatatcctcagtgcctgacatgtgaattcttaacaaatacttattaaccggagtattccttcataggtatataattgacaagtaattgttagtcttaatcacgtaggytttatctgctacttcctcttggtcatttcacatgatgtttaccctggtggacctaaatcctggagtctccctggttgggcaaaaaggactcagccaacttaagtccacatggaccaattccaggtgagagatactatcagtacctactcctgaaataaattcaacaattatcgaataaataccagctgagtaaccaccaactgtacccaaactcatttctttggacaaagaaatatggttaaaaaaaatacagttatatgtcactgattaagataaattctaagaaatgcatcattaggcaatttcatcattgtgcaaacatcatagaatgtagttgcacaaacctagacggtttagctgcacatctaagctatatggtgtagcctattgctcctaggctacaaacctcaacagcatgttaccgta

SEQ ID NO: 359232 - DNA, 591 bp, Homo sapiens
gccttatgaaaataaatgcaaatttcagcatattttgactcgagggaggatactatgtatatcctcagtgcctgacatgtgaattcttaacaaatacttattaaccggagtattccttcataggtatataattgacaagtaattgttagtcttaatcacgtaggctttatctgctacttcctcttggtcatttcacatgatgtttaccctggtggacctaaatcctggagtctccctggttgggcaaaaaggactcagccracttaagtccacatggaccaattccaggtgagagatactatcagtacctactcctgaaataaattcaacaattatcgaataaataccagctgagtaaccaccaactgtacccaaactcatttctttggacaaagaaatatggttaaaaaaaatacagttatatgtcactgattaagataaattctaagaaatgcatcattaggcaatttcatcattgtgcaaacatcatagaatgtagttgcacaaacctagacggtttagctgcacatctaagctatatggtgtagcctattgctcctaggctacaaacctcaacagcatgttaccgta

SEQ ID NO: 359233 - DNA, 484 bp, Homo sapiens
gtacattttgttttagagaagtcttttaaatgtttgcagacagcccagatcgtccatccctatttaggcagtggtctccaaacgtttatgtttattcaccctattagtaaaactttctgagcatgcccctccatgtatttatttatgatatatatgtatatatgtatacactgctatatatgtatatactgttttactgatgtaaacattaaaaaccatagcaaacatagacattttaaaagtatattttctggtcctcaatggagtttagagaatgggacaaggagtctttaggcgtagcacccagatgcctrtaattgattagagaatgtgtatataccatttgtggcaaagcagatataaaacaggcatggacgcatgattttaggtcaaggtatttaattatttttacttaaaataggcatttttggttgggaaagagaaggatgaacaatttgatgtcacctttaagactgatgttttt

SEQ ID NO: 359234 - DNA, 587 bp, Homo sapiens
ctgtctgctctcactgccccactcagatgcagccctcctccaacacaactggactgctgggcacaggttaaggctctccttccatctaggctcgtggaacctcattgctcctcctcccatgctgcaggcagagtcatcctcctgaaatacttatctcatggccctgctcagaagcccccagcaagtccttagcctggagcccaggcttcasctggccctgaggtcacatgagaaccagagctgcccaatgtgttcaccttaactacccattctctgcaacaaaaaccctatttcctcttgcttggaacatcttcccaatccaaactagccactccccaaatcccaagtcagtctcattgtctccacagtacttcatcctttcagaccccactgctctctcctttcttagattcctatggcacttgctatctgaactattccctcaatctcgtaaatatatgtggcctcgcatttttttcataactgaagcccctgtagctcaactgtccaactaagtcaagctcccaatgatcaggaacaggtcttatccttaagttgcccaatgatgagggcacagtaaatgctct

SEQ ID NO: 359235 - DNA, 587 bp, Homo sapiens
ctgtctgctctcactgccccactcagatgcagccctcctccaacacaactggactgctgggcacaggttaaggctctccttccatctaggctcgtggaacctcattgctcctcctcccatgctgcaggcagagtcatcctcctgaaatacttatctcatggccctgctcagaagcccccagcaagtccttagcctggagcccaggcttcagctggccctgaggtcacatgagaaccagagctgcccaatgtgttcaccttaactacccattctctgcaacaaaaaccctatttcctcttgcttgraacatcttcccaatccaaactagccactccccaaatcccaagtcagtctcattgtctccacagtacttcatcctttcagaccccactgctctctcctttcttagattcctatggcacttgctatctgaactattccctcaatctcgtaaatatatgtggcctcgcatttttttcataactgaagcccctgtagctcaactgtccaactaagtcaagctcccaatgatcaggaacaggtcttatccttaagttgcccaatgatgagggcacagtaaatgctct

SEQ ID NO: 359236 - DNA, 672 bp, Homo sapiens
cccagttgttggagagcatgactggaatcaaaggccaaattgagatctgtggtgatgggctctcagcttccactacttataaaggaaaaatgttaacatcagaaggtgggatttggctctgaaataacaagatattctgttaaagatgtacatttttgtgccctggctgtaartgaatccaggtctgttgtttttgcttggaaagggtatttggataaatagaataatgcaacacattgaatcaactcagctgagaaatattctggaaaggggctcaagcctcagtttacgtaactgaagagaaactaggagcactctacagttctctccacatggacagcacacaaaaggtcaattcaggaaaagtccaaatcagttaatccaattacttggcatcactgaagcataaccttagtgttcaaaggtagatgcattccaggacactgaattgactggaagcctgccatggttggctacttttcagcaggtgaagctttagaaactccattttacctttcaaaattgctttttggtagactacacattgggtacagtgtacacagctcaggtgatgggtgtatcaaaatctcagaaatcaccactaaataacctatttatgtacaaaaataaataaataagaaaaaaatgctttttggcactcctgttccaaag

SEQ ID NO: 359237 - DNA, 490 bp, Homo sapiens
cacagaacccctgggacccagctcctgcattctagacttcccagkgaagggtacatgttataagctactcacccttaatgattcctaataaagacatggcatagtataaagagaatgccaaaggaagaaagggtgtttactggaatatatgagaatatagttttattagtacagacaagagcaagatcagggcagtaaggagattttcttcaatagctacccagtgctgaggagcaaccaagggaatagcgagaggtttaattacactgcaaaacttgattatactgtaggagtggtcctgccactatgttgctgacctcatttgttcgttccttcatcaaatattttttatgtgtttactatgtaccagtcatcgttctaggtgctagggaaaacttggtgaataagataggcatagttctgccctgctggagctttttgtagtgtgtctatggcacgataaacaaggaaacaaacaggaaagataatt

SEQ ID NO: 359238 - DNA, 580 bp, Homo sapiens
gcagttctcagttctgtcctgggcttgaggattaatcctgcctccaggcagggggagatttacaggagttccaggtcccagcagcaagcagcctttggtgctagttctgattcctgaagctgtgtgctggtcatgagatatcttgctctatgccttaggtctgagaattgagattttgtctaggactaaagacccattcattgttgttttctccttgcagaaaaatatccatttgttgttgttattttcttcttagtttttgtgttatttgcctatgtattaattattgtttcaacaatcttccatttattttggtagttctctctgttctctctccttgaataccttcctccacctgctgatggatctccctgatactacctgcctgttggggctgctgagtttctcctgcatccttcattcccctttataggtaacttaatatctcatatctctttttggattctgaatagggagacacattcatttacccatccatccagaagttactgagtcccccctgtgtgccaggcattatcttctgtgactayactctttagagatcatgttgcacctgaca

SEQ ID NO: 359239 - DNA, 592 bp, Homo sapiens
tttcataagtgagggagctgtctgcttatattcagtattaaatctcagatcttacctatttcaagagacaccaggagtatcccaagtgcccaggaggagcaccccttagctcttttgtgacttttttttttaaagagtcaaaaagtgtaaaataaagctctcagccttttatccttcaragtctcttgactgagggaccattatattcatacaaagcctcttccctcctggagcttataatctagttagggagcaggcagagaaatgagtcatgaagaagcagcacaagacttgagtggcagtacacagcaacttcaaggccatatgggcttaaacaaccaaagagcagttcttcaataattcagagtaagagagaaatctctagggtctggaatggccatggggatgcctggtaaaaggtggaatctgttccaagactggatggattttttttttctttgtgaagaagtgggcagaggccaggcccggtaatcccagcactttggaaggctgaggcaagaggatcacttgaggtcagttcaagacgagcagggccaacatggcaaaatcccatctctactaaaaatacaaa

SEQ ID NO: 359240 - DNA, 588 bp, Homo sapiens
atgtactttagaaaacaagactgagccataaaaagggaggaggaggcacacagaccctgagatctttggtgagtgtgtctcaggyggatccgaagctgacaaaccatgtgagtgtgtatggccatgaaaactttgaattatctgccagacagagtaagtgccctaaaaccaagatacattttaaaatgcttttattctgaatatttattcataggtcaagcctcatatttcattccattaatgcattcatattgcacctgttttcctctcccttaggtgctttacatatccaaatgaacaaataccaattcacttcaggttccttggctgtctcttaactctcggcctctgacactctccctccctcctactgtttttttggctcttcccaatccccaaccctaagtcccatgatccccaccctcagaatcgcccacatgtctctgtttgttttgccccaaaagatgccagactggagataatttttctttgatttaaaatccaggcataaaaaactttaccaattcatccttggccccttagttctagaaagaaggtaattaaaaaaaaaaaaaagtttgttaatcc

SEQ ID NO: 359241 - DNA, 586 bp, Homo sapiens
atgtgtatccataaaaatatgtatgtggaaagtatacggaaataggaaatagttactgagttaggtgacagaataatgaaagataactactttttttccaatttttwaaaattttcgtttattatataagttgaatcatttaaataaatagaaataatttgttaggttgaccaagcaccaaacaattgacaatgtattacaatatgccaggtcatcacttatctgtaattcctcctgaattgtatccaggcaaatcagcccagcagaacacacactgggagagcttccatagctggcaacttacgggtggggatgaaagggaagtgctgagccttcccattctatattcatctctaacacataaacacacataagggatgtgtactcataaagattttttaaagactattgtctacatgatgctatcttgtaagggttttttttttcttttattgtaatcattcagtaattggaaccctgaaatttaagcacaaagtcaaagtcgcttttctcagaggaagaaaaagctaaaatatacccaggataaagacccagaaatagagaccagatagagcctgtcagaatt

SEQ ID NO: 359242 - DNA, 586 bp, Homo sapiens
atgtgtatccataaaaatatgtatgtggaaagtatacggaaataggaaatagttactgagttaggtgacagaataatgaaagataactactttttttccaatttttaaaaattttcgtttattatataagttgaatcatttaaataaatagaaataatttgttaggttgaccaagcaccaaacaattgacaatgtattacaatatgccaggtcatcacttatctgtaattcctcctgaattgtatccaggcaaatcagcccagcagaacacacactgggagagcttccatagctggcaacttacgggtggggatgaaagggaagtgctgagccttcccattctatattcayctctaacacataaacacacataagggatgtgtactcataaagattttttaaagactattgtctacatgatgctatcttgtaagggttttttttttcttttattgtaatcattcagtaattggaaccctgaaatttaagcacaaagtcaaagtcgcttttctcagaggaagaaaaagctaaaatatacccaggataaagacccagaaatagagaccagatagagcctgtcagaatt

SEQ ID NO: 359243 - DNA, 559 bp, Homo sapiens
agaaccagtgatatatatagctttgctactgatagcttggtctgtgtaccagcagtattggtatcacctgagagcttgttggaactctagtgctccatcccagtctcactgtatcagagcctgatttttatcaatatcacaagatgttttctttttctttctttttttttgagatggagtttcgctccaggcccagtcacgatttgaaccctggtctctggtactccccatarcgccacactgcttctaagtatagatttttgatattttctatagtaaaccaaatcgacaataattcttaaacttttaccctattaataaaacctttgaatctatctatcaagaaaagcaataaatgcaagattgcctgataaaatatagttcttggcaaaaaacataataaggtgaagagttgtttttcagttacggaagcagaaggcaggtggcatgataaaaatattcctttttggtcatgagtgagtcccaggggacacactgaatattcactttaaagagaaaatatccttagttagttatttgggggctctagtgtgcctga

SEQ ID NO: 359244 - DNA, 559 bp, Homo sapiens
agaaccagtgatatatatagctttgctactgatagcttggtctgtgtaccagcagtattggtatcacctgagagcttgttggaactctagtgctccatcccagtctcactgtatcagagcctgatttttatcaatatcacaagatgttttctttttctttctttttttttgagatggagtttcgctccaggcccagtcacgatttgaaccctggtctctggtactccccatagcrccacactgcttctaagtatagatttttgatattttctatagtaaaccaaatcgacaataattcttaaacttttaccctattaataaaacctttgaatctatctatcaagaaaagcaataaatgcaagattgcctgataaaatatagttcttggcaaaaaacataataaggtgaagagttgtttttcagttacggaagcagaaggcaggtggcatgataaaaatattcctttttggtcatgagtgagtcccaggggacacactgaatattcactttaaagagaaaatatccttagttagttatttgggggctctagtgtgcctga

SEQ ID NO: 359245 - DNA, 583 bp, Homo sapiens
acaagcagcaacaggaaactaatatggtagtggagaactgggctaatgactgcagatctcttagagtgcatctagttctgggattccttagtccaaactggcttattaaacacttcctcctatatgaataatctccccattagcttcacatacttccaaagaatgtgacagcataaactacttaagtcaagacaaatagacttaatgagttggctcatcttgatttttatgaacattttctcattgatcaaagacagtctttttttccccctctgctctctcagaatagtccagttcaaacayacttcttttgaaatgagttcaaaagtgtatcccctgtacattgtcagtgttttgtgctctaggaccttaggaaattaactttcacatattaccttttagctgccaagatgggtcactgacactttaacagatgagatttaattacagtgcaaacaaaaatgtaccaatgtgctacccaaagcaaaccaatgctggctgaagagggctcaaaatgacactgattctgagattgaattagtaagagggaagaactgagggagttcagggcagggagtcatgc

SEQ ID NO: 359246 - DNA, 528 bp, Homo sapiens
tatgaacattttctcattgatcaaagacagtctttttttccccctctgctctctcagaatagtccagttcaaacatacttcttttgaaatgagttcaaaagtgtatcccctgtacattgtcagtgttttgtgctctaggaccttaggaaattaactttcacatattaccttttagctgccaagatgggtcactgacactttaacagatgagatttaattacagtgcaaacaaaaatgtaccaatgtgctacccaaagcaaaccaatgctggctgaagagggctcaraatgacactgattctgagattgaattagtaagagggaagaactgagggagttcagggcagggagtcatgctgacccaggtctcccttagctgtaaaccccacagggttgctataagaagggatttccctttaaaagcaaccattaggcccaaaacatcctaaaatgattgtttttaaggattaaaatgaatatttatactcagaagataaaaagattgtgaaaaagtcattgagtctattct

SEQ ID NO: 359247 - DNA, 525 bp, Homo sapiens
aaatcttggctctcctagcccaaatctcacagccatcacccaggatctctgccccatatttccctggaaaatgtcctaagtcaaaacaacaacaacaacaacaacaamaacttcatttttaaaaatagggtgccttcacaaatatgggtaagccaacagttcatcgaatactatagggaaagagagagagaacggggatgagacagcaaaaacattaagacttgttctcagcattgctctcctctcactgggcgggggctgaaaacaccagaaaagttgcattaataaaactgcatatagtctaacactgcacagagtgctttgatacaagtatcctcttgctacttcatcttttcaatacatctttgcaaggtttgttttcaaaacgacattacaagttggcaggcttctgcttataaaaatcaatgaaatactttcccttcaactctatgaaacctgccatatacctgaaatttattcttctcaaataaatcaaacataggcaacgtaacactctggagtcaa

SEQ ID NO: 359248 - DNA, 525 bp, Homo sapiens
aaatcttggctctcctagcccaaatctcacagccatcacccaggatctctgccccatatttccctggaaaatgtcctaagtcaaaacaacaacaacaacaacaacaaaaacttcatttttaraaatagggtgccttcacaaatatgggtaagccaacagttcatcgaatactatagggaaagagagagagaacggggatgagacagcaaaaacattaagacttgttctcagcattgctctcctctcactgggcgggggctgaaaacaccagaaaagttgcattaataaaactgcatatagtctaacactgcacagagtgctttgatacaagtatcctcttgctacttcatcttttcaatacatctttgcaaggtttgttttcaaaacgacattacaagttggcaggcttctgcttataaaaatcaatgaaatactttcccttcaactctatgaaacctgccatatacctgaaatttattcttctcaaataaatcaaacataggcaacgtaacactctggagtcaa

SEQ ID NO: 359249 - DNA, 525 bp, Homo sapiens
aaatcttggctctcctagcccaaatctcacagccatcacccaggatctctgccccatatttccctggaaaatgtcctaagtcaaaacaacaacaacaacaacaacaaaaacttcatttttaaaaatagggtgccttcacaaatatgggtaagccaacagttcatcgaatactatagggaaagagagagagaacggggatgagacagcaaaaacattaagacttgttctcagcattgctctcctctcactgggcrggggctgaaaacaccagaaaagttgcattaataaaactgcatatagtctaacactgcacagagtgctttgatacaagtatcctcttgctacttcatcttttcaatacatctttgcaaggtttgttttcaaaacgacattacaagttggcaggcttctgcttataaaaatcaatgaaatactttcccttcaactctatgaaacctgccatatacctgaaatttattcttctcaaataaatcaaacataggcaacgtaacactctggagtcaa

SEQ ID NO: 359250 - DNA, 525 bp, Homo sapiens
aaatcttggctctcctagcccaaatctcacagccatcacccaggatctctgccccatatttccctggaaaatgtcctaagtcaaaacaacaacaacaacaacaacaaaaacttcatttttaaaaatagggtgccttcacaaatatgggtaagccaacagttcatcgaatactatagggaaagagagagagaacggggatgagacagcaaaaacattaagacttgttctcagcattgctctcctctcactgggcggkggctgaaaacaccagaaaagttgcattaataaaactgcatatagtctaacactgcacagagtgctttgatacaagtatcctcttgctacttcatcttttcaatacatctttgcaaggtttgttttcaaaacgacattacaagttggcaggcttctgcttataaaaatcaatgaaatactttcccttcaactctatgaaacctgccatatacctgaaatttattcttctcaaataaatcaaacataggcaacgtaacactctggagtcaa

SEQ ID NO: 359251 - DNA, 536 bp, Homo sapiens
tttatgtcgcaccacttctaagaggtttaaagcgccgtacgaatgttaccacatgaatccccacaacacccctgtgaggtaggtaggtggagagtattgttatccccactttacaggtgggagaaatgaggcacccaatagttaataagagrtttgctcaaaatcacacagctagtcactggcagggcttagaataaaatgtatactgattagcacctagcacagtgctttgcacatagtaggtgttcgtttaatatctgtggattttatttgacttatgtctcaacatacaatatacacacataaagtacaagcagccaccgtaaaacatttttctgatgatatctctcattatttcaaatcctggtggaggaaggaggttcaagaatccatctcaaaattaagacctcagggttgaagaggatcatcataaaaactatcagctgacaaccagctcttacacctgctctaccacacaatattattaatagttttctaatgaaaacaaaaatggatttcaggaaccatgctgacat

SEQ ID NO: 359252 - DNA, 536 bp, Homo sapiens
tttatgtcgcaccacttctaagaggtttaaagcgccgtacgaatgttaccacatgaatccccacaacacccctgtgaggtaggtaggtggagagtattgttatccccactttacaggtgggagaaatgaggcacccaatagttaataagagatttgctcaaaatcacacagctagtcactggcagggcttagaataaaatgtatactgattagcacctagcacagtgctttgcacatagtaggtgttcgtttaatatctgtggattttatttgacttatgtctcaacatacaatatacacacataaagtacaagcagccaccgtaaaacatttttctgatgatatctctcattayttcaaatcctggtggaggaaggaggttcaagaatccatctcaaaattaagacctcagggttgaagaggatcatcataaaaactatcagctgacaaccagctcttacacctgctctaccacacaatattattaatagttttctaatgaaaacaaaaatggatttcaggaaccatgctgacat

SEQ ID NO: 359253 - DNA, 536 bp, Homo sapiens
tttatgtcgcaccacttctaagaggtttaaagcgccgtacgaatgttaccacatgaatccccacaacacccctgtgaggtaggtaggtggagagtattgttatccccactttacaggtgggagaaatgaggcacccaatagttaataagagatttgctcaaaatcacacagctagtcactggcagggcttagaataaaatgtatactgattagcacctagcacagtgctttgcacatagtaggtgttcgtttaatatctgtggattttatttgacttatgtctcaacatacaatatacacacataaagtacaagcagccaccgtaaaacatttttctgatgatatctctcattatttcaaatcctggtggaggaaggaggttcaagaatccatctcamaattaagacctcagggttgaagaggatcatcataaaaactatcagctgacaaccagctcttacacctgctctaccacacaatattattaatagttttctaatgaaaacaaaaatggatttcaggaaccatgctgacat

SEQ ID NO: 359254 - DNA, 609 bp, Homo sapiens
agaagcatgccaatgtctcgcagcagcacctgccagcccttggtcacgaaccagcaataacttggaaaacataggccaacatccaaacacactcatttgctctacaggtatttactcagcacctccctgttccagatccatgctaggcgctgactacacccttggttgctccttttagcatctgtcatgcaggcatggaggacactgagcatatatcctcttcagaaaagttcctaaaatacttgaatactgtaatgaaaacaccccctttgccttgtctcctcgaagctaaaaaatattaattcacagatctccaartacaaaaacaggccaaggtaattcgttccagccctttcctgaaacccaaatctcctcacgacaacctcttcctgaacacttccctccagatggagaatagtaagagtgcaggagtgaggagatatttacatgctggtcaaggagatgcagcattttttccactttttaatctatcaagtattaagtaaaaaggacattcaataaaataaataattgctggtgaaagttgctgaatgaggtttttcctagagcacagaaggttgagctcctcctaattcagaaaatagcatt

SEQ ID NO: 359255 - DNA, 573 bp, Homo sapiens
agtagcaacccctcaatcatgataactaaaaatgcctccagacattgccaaatgtgccctagaggtcaaaatcaccttcactgagaatcattgctttaaagacaaggacagaaaaggttccctttcaatgcaagagaaagtttaccagaatagaaggtttagttagaaagaatgaataagatctagtatttgctaggacaacagggtgactatagtcaaaagtaatttaattgtatattttaaaatagcttgaagagtayaattggattgtatgtaacacaaaggaaaaacacttgaggtgtcgtgtaccacatttaccctgatgtgattattacacattgcatgcctatatcaaaatacctcacgtaacccataaatagatacacctactacatatccacaaaaactaaaaaaaaacactacagaagacaaaaacatacaacaaaggaagaagctgtatacatccaaaaccttgataaaaagtaaaaattacctaaagtaactgatacacatccagaagaaaaaaataaaaaggtgtattttgaaaggaaaggtactatctctccaatttca

SEQ ID NO: 359256 - DNA, 536 bp, Homo sapiens
tgctccctgctgtggccatagcaggtgtcatcagttgatggcaatattttcctgccaagcttagatgcagcttcagattcccctcaacgtcgcactctaggcaaaacttatcactaatcagagttgacatgtgagacaaagtcaatttttcatatctgttacaaatgctgtgattctcttgatgcattctgagactaacagccattttttggcaatcacataaaactgttawctcatggtgagtttatttttctaccagatatctaagcatcgttttatccatgttgatccaaaagccatactagtaagttcaggacactataaaatgttattttactagagaagctcttgtttttaacttgcggttaaacccatggagatatttgaacctggctccaaaacaatagaattaaattacattgccatgaatttgataagaattcttatctcttcattacatcaattaataagaatgttcaattcaacagattcccattgcttgagaaacctcacacttttataccagtccacttttg

SEQ ID NO: 359257 - DNA, 548 bp, Homo sapiens
tccagaaaccttatccactatgtttcctaatctactctcaaagacagaagcaaggttattataacattacttgtttttaatgattatttttaataaatccaattctttactactccctcttgtcaaggttatcaaaactctaagtttatacaaaggtgtttataatctgaagtggtgtttcaaatataaaaacatgtcaatttcaaatgaaatctaccagagatctaaaatctaagtaagatctttccraaacaccgttctaaatcatgtataagacaaaaggcctccgtactttgtctgaagtttgggggcactgacattattgacattttctctggtttctagctttatgcttcagtggaaggcactcagtgaactatcctgccatctgctaggggctaacaaactggaaactgatggttagatgactctccagctgaaatgactagtggcctctaacattaggaaagtttcttggaccaacccaccccacattgtgcttctacttctacaaaatattttaaaattctctctccccttcctttcca

SEQ ID NO: 359258 - DNA, 548 bp, Homo sapiens
tccagaaaccttatccactatgtttcctaatctactctcaaagacagaagcaaggttattataacattacttgtttttaatgattatttttaataaatccaattctttactactccctcttgtcaaggttatcaaaactctaagtttatacaaaggtgtttataatctgaagtggtgtttcaaatataaaaacatgtcaatttcaaatgaaatctaccagagatctaaaatctaagtaagatctttccaaaacaccgttctaaatcatgtataagacaaaaggcctccstactttgtctgaagtttgggggcactgacattattgacattttctctggtttctagctttatgcttcagtggaaggcactcagtgaactatcctgccatctgctaggggctaacaaactggaaactgatggttagatgactctccagctgaaatgactagtggcctctaacattaggaaagtttcttggaccaacccaccccacattgtgcttctacttctacaaaatattttaaaattctctctccccttcctttcca

SEQ ID NO: 359259 - DNA, 548 bp, Homo sapiens
tccagaaaccttatccactatgtttcctaatctactctcaaagacagaagcaaggttattataacattacttgtttttaatgattatttttaataaatccaattctttactactccctcttgtcaaggttatcaaaactctaagtttatacaaaggtgtttataatctgaagtggtgtttcaaatataaaaacatgtcaatttcaaatgaaatctaccagagatctaaaatctaagtaagatctttccaaaacaccgttctaaatcatgtataagacaaaaggcctccgtactttgtctgaagtttgggggcactgacattattgacattttctctggtttctagctttaygcttcagtggaaggcactcagtgaactatcctgccatctgctaggggctaacaaactggaaactgatggttagatgactctccagctgaaatgactagtggcctctaacattaggaaagtttcttggaccaacccaccccacattgtgcttctacttctacaaaatattttaaaattctctctccccttcctttcca

SEQ ID NO: 359260 - DNA, 538 bp, Homo sapiens
aaaaaagcaatgcaaatctattgaaatatgacaactgacatcctgctttagtgtgaggaagataacaggaactgatctggaccatggcaaactgaaaagggcatgccggcctaaaagggacasctgttatttagctacaaaaaaaaaagtgtttgacatgtgagcacactgatctggtcttatgagagaatctgggaatccaaaatgtatgtaaaatctcctaagtttaaaatattggtttattttaatatatgattcatgtcaaagtaaatatgtctgtgggctacataaggcctgggaaaaccagtgggcaaccactgttctaaacaaaaaaatgtgtctttttaagttaattcttgtgccagctgttaagaaaataaaattttcacaagcacccacattatctacattttaaatgccacagaaagcaattcagagagatgtagctagtaatttgtaaaattcagagctgacaaaagaaggagccaatatgaaatggccattgaatttccaagtttgcatcatgcaattcagctta

SEQ ID NO: 359261 - DNA, 538 bp, Homo sapiens
aaaaaagcaatgcaaatctattgaaatatgacaactgacatcctgctttagtgtgaggaagataacaggaactgatctggaccatggcaaactgaaaagggcatgccggcctaaaagggacagctgttatttagctacaaaaaaaaaagtgtttgacatgtgagcacactgatctggtcttatgagagaatctgggaatccaaaatgtatgtaaaatctcctaagtttaaaatattggtttattttaatatatgattcatgtcaaagtaaatatgtctgtgggctrcataaggcctgggaaaaccagtgggcaaccactgttctaaacaaaaaaatgtgtctttttaagttaattcttgtgccagctgttaagaaaataaaattttcacaagcacccacattatctacattttaaatgccacagaaagcaattcagagagatgtagctagtaatttgtaaaattcagagctgacaaaagaaggagccaatatgaaatggccattgaatttccaagtttgcatcatgcaattcagctta

SEQ ID NO: 359262 - DNA, 545 bp, Homo sapiens
agcctgaatctgtgggctactgggcctatttatcactgtcacagcacagccactaaagataaggatgtatcccaagggctaaaaatagcttgatcggattattcaatccaacgcagaagttggttagaaatggcaggccctacagctcaatgacggttttaatcctaagtaaaaactgatagcttatgtaccatacgatgtgcagtgagagcctgaatacgctctgactcctccccataatcctaaatctgaagaactaactataggaaaggcttaacaagttgtcagttgtgtctgctcaggattttctttattttgtagaagaatggacaatctctagttttcataagaacttatgaactgttttcttcrgcaatggactgtgaacatggaataaattgcttagtacttttaccattgatccaatttgtctcagtaatcagattcaaaacccaattaacagtcctactgggatgtgaaaagggaatctgctctacagagggagaggcttaaagagtccctgaacaggatatctgactgtgtga

SEQ ID NO: 359263 - DNA, 501 bp, Homo sapiens
aatcctgtaagtgatgaacaaggtttaatctttcatcgcaagggtacaatcctaaattttctgtggaaatttgtaaggaaagaaaacatttgatagcttttaaaccacagaatgtgtcttaatgaatatcagaaatttcctgttgaacagrctcaatagacagatagtgcaatctcccagagcacacattctcctgaaaacacaagaactcctcttcatgggaaattctgtggatgggatcaatcctttgttgcactttccatctcttgctattttattctcaccgtatttttgcaggtcctgccagttcatgctttttctcctttgtctctccacctttccctgagctctcttgtctctctctagcctttgtgtattgacttcatatgtttatatattcaacatcacttttactttccacttaggacccacattttttttctggtgttttgttttttggtgaaggagtgtcttcatatccactcaggtttttttttaaag

SEQ ID NO: 359264 - DNA, 545 bp, Homo sapiens
ggacccacattttttttctggtgttttgttttttggtgaaggagtgtcttcatatccactcaggtttttttttaaagtttatcaacattttattttgtgtaatattaaggaaggacatcacaaaagtactataactattattttgtaaaagaaagaaaactaacttcaagatggaggcaaggaataatcgaagataaaggacagttccttcccaaaataggacagttagcaaacttatgtcaacatcccaccccctacacacagacacacacacacacacacacacacacacacacacacacacamcacaggagtgactttgtcttaatatttcacattttgctacagaataacaaaacctttaccttggactggtcaacagatgagatgatctctcatgcttttagggtctatgattttataattttaataatgttttattttattctattctttctactttttttattctatgcagtaatctacttcacttttaattatttatttcctaaacatggattatcatataaattttcaaattccaa

SEQ ID NO: 359265 - DNA, 545 bp, Homo sapiens
ggacccacattttttttctggtgttttgttttttggtgaaggagtgtcttcatatccactcaggtttttttttaaagtttatcaacattttattttgtgtaatattaaggaaggacatcacaaaagtactataactattattttgtaaaagaaagaaaactaacttcaagatggaggcaaggaataatcgaagataaaggacagttccttcccaaaataggacagttagcaaacttatgtcaacatcccaccccctacacacagacacacacacacacacacacacacacacacacacacacacaccacaggagtgactttgtcttaatatttcacattttgctacagaataacaaaacctttaccttggactggtcaacagatgagatgatctctcatgcttttagggtctatgattttataattttaataatgttttattttattctattctttctactttttttattctatgcagtaatcyacttcacttttaattatttatttcctaaacatggattatcatataaattttcaaattccaa

SEQ ID NO: 359266 - DNA, 546 bp, Homo sapiens
acctcaaagagaaaggcttttcaaacagctaccctttattctagtcccatgaaatttgataaatcattggtcaggagatgataaartctcataaaataacagaaagaaaaattaatattttttcaatagtaaacaatttgacaggcaccatgtagaattaatgctgatttctagagtcttttataaagttgtttctaaaacatacacatatacaaattatagcaattttatgctatacagttgtagacacataaaaaattgtttttttcccaaaggaggctcttttttattaaatgttatgcccaattaagttcagttaattgttttggtgtaaaatgagttgctgtgaagttgttttccctgagggagtaagcagctctctagctttggagtataggacaaacatctgaaagcaatcaaatattattccagttccacaagaagtttttccttaatataggatcattttgcctagatacagttggttttaataaggctaataaagagtttctttaaatgataatataaccaatccaagccacacca

SEQ ID NO: 359267 - DNA, 609 bp, Homo sapiens
caccagggtattcagcaaagattcctcgatccatcaactctgaaagaggactacyggatttggggtagaatagaggataaataaatggacaagaagagttggaagagttgacctgtggaggataaaacctagacccaaggtttctatgtatgtggaattaagaggcaggtgcacaaagtcctaaaattgaataaaggtcactcagagagacacctggaaatacaacagtgtgattaaacaccaaatatcaagtttgagaaaataattttatttctcatgaaatagcaggattggaagctattcatatacacttgtatggctcagataatagaaattccttgagccagccagtggtggttccagtgattgcatccctgagaaacaagtaggcaagaacagaggaaataaactaagagtgacaattgttattagctgtatgttctttattgctagttctgcagttgctgttctttcagcctagaatgtgcccctccacaatgctctttatctgtatggcatttactcaccatttaagtctcctttgaacaatcatctcttcattcaggctttccagactcttctagcatctctctgcatcttggataacac

SEQ ID NO: 359268 - DNA, 609 bp, Homo sapiens
caccagggtattcagcaaagattcctcgatccatcaactctgaaagaggactactggatttggggtagaatagaggataaataaatggacaagaagagttggaagagttgacctgtggaggataaaacctagacccaaggtttctatgtatgtggaattaagaggcaggtgcacaaagtcctaaaattgaataaaggtcactcagagagacacctggaaatacaacagtgtgattaaacaccaaatatcaagtttgagaaaataattttatttctcatgaaatagcaggattggaagctattcatatacacttgtatggctcagataatagaaattccttgagccagccagtggtggttcyagtgattgcatccctgagaaacaagtaggcaagaacagaggaaataaactaagagtgacaattgttattagctgtatgttctttattgctagttctgcagttgctgttctttcagcctagaatgtgcccctccacaatgctctttatctgtatggcatttactcaccatttaagtctcctttgaacaatcatctcttcattcaggctttccagactcttctagcatctctctgcatcttggataacac

SEQ ID NO: 359269 - DNA, 517 bp, Homo sapiens
ctttaagtcattttctcttttgtttgttttttctttgctcaaatgttggtgcatctatgtgtatgtgggtgtgttgagaataaatcacttgaggttgatttattacatttaaaaaaaaacattataaatactcaaaccaactcacacacgccctagtcatgaatgaaaaaaaattccacaaatccttgccaacctcatataaaatagagggaaaatattttgttttaatctttatttatgaaacttctagacatgattcataatgttttgcatgtttgtctgtcattcttttttagaatttaatttcctgtttttctctgttggaatgattttcatttcataacgaacttataagagacattttatgtattttggtataagaataycaaagcatgactgccataagttataaacatctttcaagacatgtacatcactcaacagctgaagaatacacatttttctcaagcagcacacatggaacattctttagtattgatcacatgttaggtcatga

SEQ ID NO: 359270 - DNA, 504 bp, Homo sapiens
gttcagcagtatctctgccctctacccactaaatgccagtgacttccagttgtgaaaaccagaaatgcctccaggcgtgacaaatgtctcctaaggggcaaaattgccccctgctacattgaaaacaagtgttttaggcaaaacratgttttctcagattggatgctgctgccaggttctgacagggggaacctggcattgtagtagggaattcctgggatgaccagcagtcttatgtgcatagaagagtaatgttcattgctatttctgttcagatacagaggtgctaggggtgatccttgatggtggatagcgttctgcaggttctttatccaggttttcctaagtgtgtagcattgtttatagaaagtgggattgtagtctctctgtcggcagcctctgcaaagggcattacatttctactgtctatctcattaaatctccacaggtcctcactaacgctgtcttcaaaatccttccagcttctgcccacttcctgggcac

SEQ ID NO: 359271 - DNA, 621 bp, Homo sapiens
tttagtttgttcttgtttttctagttccttcaggtgaaatgttagattgttaatttgagatctttctaacttcttgatgtaggtgtttaatgctataaactttcttcttaacgctgcttttgctgaattccagatatttttgtatgttgcatctcattaatttcaaatgattttttaatttctggcttaatttcattgtttaccccaaaataatttaggaaagcattgtttaatttctatgttattttgtgattttgagagatcttcttggtattgatttctatttttattccacagtggtatgggagtatacttggtatgatttatattctttgaatgtattcagacttgctttatgactgagcgtgtgatcaatcttatagtatgttctatgtgcagatgagaagaatgtatattctgtggttgttgaatgaagatctgtgcatgtctattaggtccaattggtcaattgttgaatttaagtcaataatttctttgttatttctctgtcttaatgatttgtctaacattgtcagtgragtgttgatatcccccactcttattctgtagccaactctttctgtaggtctagaagtagttgttttatgaatccaggttctt

SEQ ID NO: 359272 - DNA, 616 bp, Homo sapiens
  misc_feature (1)...(616): n = A,T,C or G
acggtaatttagaaattgttaaaaaaatttaaaaaagaaggaagattttggaaaaaggtaaatgacatttcaaatttccttctagccttttcaattcatattaccttatgtgcaaaactggcaaaatgatccaggaagcattaagtgagatgtgagatgctgaagttctgtaaattcctctaaatctgggtcctctcttacatactagcctatccaccacatactccctctttctggaatgcttcttacttgcttatcttggtaaccagcaaaattctcaattatctgatggataagtgagaactgcctttgttttatttcctcattgatccatcaccccaattttatcacaygaatttgattgctttgccacttgtttgtcttttcttacagaatggatgctccacgagggcaggcacaatattatttcttcactgttagcaccaataaacagttgcccagcaactgacacacattaaattctcaatgtatagtttttgacaaaattaacactatgataaatgtttatgctcctgctcaaacttggatttggccttaagatgtactacagcccactaagcaaggaaaaagagnnnnnnnnnnnnnnnnnnnnnnn

SEQ ID NO: 359273 - DNA, 375 bp, Homo sapiens
  misc_feature (1)...(375): n = A,T,C or G
tactccctctttctggaatgcttcttacttgcttatcttggtaaccagcaaaattctcaattatctgatggataagtgagaactgcctttgttttatttcctcattgatccatcaccccaattttatcacatgaatttgattgctttgccacttgtttgtcttttcttacagaatggatgctccacgagggcaggcacaatattatttcttcactgttagcaccaataaacagttgcccagcaactgacacacattaaattctcaatgtatagtttttgacaaaattaacactatgataaatgtttatgctcctgctmaaacttggatttggccttaagatgtactacagcccactaagcaaggaaaaagagnnn

SEQ ID NO: 359274 - DNA, 453 bp, Homo sapiens
atactgttacatgctatatttatgagcagcatttctttctgcctttctaacaactttcttgaagtataatagaaagacaatgaactgtatataaagtatacaaattggataagttttgatatatgcatacactcatgaaaccattgacacaatcaagataatgaatatattcaccatcccagaaatttcctcctgtcccttcatcatctctcccttctgctaattctgcccaccacttatcttcaggaaactattgatttttctgtcactgtactctagtttgtactaagaactttatacaattttagtatgcattttttggtgtgatttttaaattcagcactattgagacatccattttgttgcatktatcaaaagttaatttattcttattgcaaggtagtattccagcatacagatatactataatttgtttattcatctattgctaga

SEQ ID NO: 359275 - DNA, 453 bp, Homo sapiens
atactgttacatgctatatttatgagcagcatttctttctgcctttctaacaactttcttgaagtataatagaaagacaatgaactgtatataaagtatacaaattggataagttttgatatatgcatacactcatgaaaccattgacacaatcaagataatgaatatattcaccatcccagaaatttcctcctgtcccttcatcatctctcccttctgctaattctgcccaccacttatcttcaggaaactattgatttttctgtcactgtactctagtttgtactaagaactttatacaattttagtatgcattttttggtgtgatttttaaattcagcactattgagacatccattttgttgcatgtwtcaaaagttaatttattcttattgcaaggtagtattccagcatacagatatactataatttgtttattcatctattgctaga

SEQ ID NO: 359276 - DNA, 546 bp, Homo sapiens
aacaactcatctttgtcacttccacccctttttagagcagttttcacttttgacgctaggttctattgttactttggtagcttgttttgtcttgtgtagaataatgcaaatatgagtgttccatcatgatctttctagcattcttccttaagcagagctcccttgagagttcttcaaagagaagttgaatgattaatctgattttgcttccctgggattactcattagtaaggtaacaatgggcactcttctgttttaaagtcctaacatcattgcaattcatcccagaggtgatatgaattgttccattctataagagtctgaagagcagccagtcctttcagaaatgtacctctgtcaaagaaactggaatctgcasgttctcttcttgactagtgaaaagtaatctgtttatttcctatggggctatataattttgtgggtgactaaaaacagtgaagatattatcagcttaatccttggaatagtgtaatatgctttgcaataaaatttgtgactctcataaaatattgaggtctttaatga

SEQ ID NO: 359277 - DNA, 546 bp, Homo sapiens
aacaactcatctttgtcacttccacccctttttagagcagttttcacttttgacgctaggttctattgttactttggtagcttgttttgtcttgtgtagaataatgcaaatatgagtgttccatcatgatctttctagcattcttccttaagcagagctcccttgagagttcttcaaagagaagttgaatgattaatctgattttgcttccctgggattactcattagtaaggtaacaatgggcactcttctgttttaaagtcctaacatcattgcaattcatcccagaggtgatatgaattgttccattctataagagtctgaagagcagccagtcctttcagaaatgtacctctgtcaaagaaactggaatctgcacsttctcttcttgactagtgaaaagtaatctgtttatttcctatggggctatataattttgtgggtgactaaaaacagtgaagatattatcagcttaatccttggaatagtgtaatatgctttgcaataaaatttgtgactctcataaaatattgaggtctttaatga

SEQ ID NO: 359278 - DNA, 633 bp, Homo sapiens
acttgtcaagcctggcatcaatttagcaccaagagcaaatattaaataatgaagatggtttattacaaaaatcccataagtaaccattttaacttcttttacaaagattttcagacatacttaggatagaaaagtagcaaagtaaatgtgaatagctttatggcagttctttcctctttgccacaagagatgtgttccatttatagtttattaagtgctggctttgaaatactgtgttgccayattttatttgttccttcatatactaagggatgaaataacaatatgagagcagtaaatactgcaacagaagatattgatggaaaaatagtataatagaaaaatataattcactttttctatttatatgtcagtattgaaaaacaaatcaaatagaaggggggttctgtgagatgtgacaaattttttaaagtgtgccaattacatttttttcttttacttcctgtttttaaagaccgcattttctttgggttgcttggatacattccatggcatgacacttccagaagttagtactaaaacacaaatcaaaatgacaactttagacactggaaccagtcctgtagaggtcacaaaaggtgattctccaacgtcatttttttctcatttcat

SEQ ID NO: 359279 - DNA, 614 bp, Homo sapiens
tacaaaaacaatcgaaccatacatttaaatgatttatttaactatatttacaacagttattgagtacctgtaggtatcaaatgccagagctagaagaataatctgtctggttccctggttcttgaaaagacatggctctaaagaaaaayaaagaaagttatcaattgaactgagacagatgtatattggaataaacaaaaaacaaaagcagatctgtacaaaactgataaatgctttccttaactcccaaccttcactttgcccatggtatcactccacattggctcccagtctcacacctgactcacccattttctccctaatgcagaccttttctcagataactccgtcttcctgtttccctcttcatggcatcttcatcaagcatgtctgcttcatgttgtattctattagagcacttctatcaatcattagctgtgacagtgaattaattgggtaaatgaatccttactttggtgttaataagaaacaatagcttataagatattcctcccaggtatatgtaccattgtcaccgaactccttttgcagtaaagtgtcaaagtattttcaggaactgaggaaagttgatagaagggcaatttggggacagc

SEQ ID NO: 359280 - DNA, 614 bp, Homo sapiens
tacaaaaacaatcgaaccatacatttaaatgatttatttaactatatttacaacagttattgagtacctgtaggtatcaaatgccagagctagaagaataatctgtctggttccctggttcttgaaaagacatggctctaaagaaaaacaaagaaagttatcaattgaacwgagacagatgtatattggaataaacaaaaaacaaaagcagatctgtacaaaactgataaatgctttccttaactcccaaccttcactttgcccatggtatcactccacattggctcccagtctcacacctgactcacccattttctccctaatgcagaccttttctcagataactccgtcttcctgtttccctcttcatggcatcttcatcaagcatgtctgcttcatgttgtattctattagagcacttctatcaatcattagctgtgacagtgaattaattgggtaaatgaatccttactttggtgttaataagaaacaatagcttataagatattcctcccaggtatatgtaccattgtcaccgaactccttttgcagtaaagtgtcaaagtattttcaggaactgaggaaagttgatagaagggcaatttggggacagc

SEQ ID NO: 359281 - DNA, 614 bp, Homo sapiens
tacaaaaacaatcgaaccatacatttaaatgatttatttaactatatttacaacagttattgagtacctgtaggtatcaaatgccagagctagaagaataatctgtctggttccctggttcttgaaaagacatggctctaaagaaaaacaaagaaagttatcaattgaactgagacagatgtatattggaataaacaaaaaacaaaagcagatctgkacaaaactgataaatgctttccttaactcccaaccttcactttgcccatggtatcactccacattggctcccagtctcacacctgactcacccattttctccctaatgcagaccttttctcagataactccgtcttcctgtttccctcttcatggcatcttcatcaagcatgtctgcttcatgttgtattctattagagcacttctatcaatcattagctgtgacagtgaattaattgggtaaatgaatccttactttggtgttaataagaaacaatagcttataagatattcctcccaggtatatgtaccattgtcaccgaactccttttgcagtaaagtgtcaaagtattttcaggaactgaggaaagttgatagaagggcaatttggggacagc

SEQ ID NO: 359282 - DNA, 614 bp, Homo sapiens
tacaaaaacaatcgaaccatacatttaaatgatttatttaactatatttacaacagttattgagtacctgtaggtatcaaatgccagagctagaagaataatctgtctggttccctggttcttgaaaagacatggctctaaagaaaaacaaagaaagttatcaattgaactgagacagatgtatattggaataaacaaaaaacaaaagcagatctgtacaaaactgataaatgctttccttaactcccaaccttcactttgcccatggtatcactccacattggctcccagtctcacacctgactcacccattttctccctaatgcagaccttttctcagataactccgtcttcctgtttccctcttcatggcatcttcatcaagcatgtctgcttcatgttgtattctattagagcacttctatcaatcattagctgtgacagtgaattaattgggtaaakgaatccttactttggtgttaataagaaacaatagcttataagatattcctcccaggtatatgtaccattgtcaccgaactccttttgcagtaaagtgtcaaagtattttcaggaactgaggaaagttgatagaagggcaatttggggacagc

SEQ ID NO: 359283 - DNA, 585 bp, Homo sapiens
tatattaatctgttcaaaacagttattttacacctactatgtcctgggacagttctaggtgcttgagatacattggtagcaagttagatgaaaatttctttgtggcgtttttgttctggcatgagtaaataacagaaatgattttttaaagtaccatggaaaagccaacgstaattagaagatgcttgaggtggctgcagtttttaataggagataaggagaatatgttgaaaaggtggaattgagcctttgttttttttaataattcatgagggagtcggccatgcagatagttgggaagtgcagtcccgactgagggaagagtgagggggagggtaatctggaatcatgtgaggcctattcaagtgacagcaaggaggccattgtcactggagtgaagtgaatgagaggtagagcaaggctaacaaccttctaaaccattttaaggattttaacttttctctaagtgaaatggaaattgttgtgtagttttgttaaattatgttttacaaaatgtactccagcttctatgttgagggtgaacaaaggtggaaatatggagacaaggtggaaggctatttcact

SEQ ID NO: 359284 - DNA, 581 bp, Homo sapiens
aagtgctatctgcagccaataagctctgtgtattaagcatgccacttagtgagtgacaatatactttggttacrtgctatgtacatagcattctacctagaatattgtagtaagcaatacaggtacttgtcctcatggagcttacagactgaaaagaaaatattcagaactctttacttttgaaagaataacaaccctatatataaataaaacatatcttttatctttctcactggtgttatgagaattaatatgaaatatacctacaacactctccaaaaaataagtacacaggatttagagtctgtgacattgttgtatctaaagcacaaacatgaataaagaagccagaatcttttgaatttgaaataattttagtggtcaatgtaagaatgctcttgtgtgtccttagtggataaaccccaactgctactcagaccaaaacatctttctaatgtctttttctgtcttgtccttgcactaggaatataacatgttccttcctcatgacatcagtgtcactttttaaaataggagcacttttctttcactttcccttttctatttctctacagagggct

SEQ ID NO: 359285 - DNA, 581 bp, Homo sapiens
aagtgctatctgcagccaataagctctgtgtattaagcatgccacttagtgagtgacaatatactttggttacatgctatgtacatagcattctacctagaatattgtagtaagcaatacaggtacttgtcctcatggagcttacagactgaaaagaaaatattcagaactctttacttttgaaagaataacaaccctatatataaataaaacatatcttttatctttctcactggtgttatgagaattaatatgaaatatacctacaacactctccaaaaaataagtacacaggatttagagtctgtgacattgttgtatctaaagcacaaacatgaataaagaagccagaatcttttgaatttgaaataattttagtgktcaatgtaagaatgctcttgtgtgtccttagtggataaaccccaactgctactcagaccaaaacatctttctaatgtctttttctgtcttgtccttgcactaggaatataacatgttccttcctcatgacatcagtgtcactttttaaaataggagcacttttctttcactttcccttttctatttctctacagagggct

SEQ ID NO: 359286 - DNA, 486 bp, Homo sapiens
aataagtacacaggatttagagtctgtgacattgttgtatctaaagcacaaacatgaataaagaagccagaatcttttgaatttgaaataattttagtggtcaatgtaagaatgctcttgtgtgtccttagtggataaaccccaactgctactcagaccaaaacatctttctaatgtctttttctgtcttgtccttgcactaggaatataacatgttccttcctcatgacatcagtgtcactttttaaaataggagcacttttctttcactttccctttyctatttctctacagagggctatgcttgttcctgagttttattgctattagttacaaggaaataaaagaaaataataaaaatcataaacatcaaggaaatcatgaggcttaagaaatgttataacttcctgtagaaatgattccacatgaattgtctgtggttcccttgctgtgatagtgacaggaaacttcctctgatttctgtgc

SEQ ID NO: 359287 - DNA, 486 bp, Homo sapiens
aataagtacacaggatttagagtctgtgacattgttgtatctaaagcacaaacatgaataaagaagccagaatcttttgaatttgaaataattttagtggtcaatgtaagaatgctcttgtgtgtccttagtggataaaccccaactgctactcagaccaaaacatctttctaatgtctttttctgtcttgtccttgcactaggaatataacatgttccttcctcatgacatcagtgtcactttttaaaataggagcacttttctttcactttcccttttctatttctctacagagrgctatgcttgttcctgagttttattgctattagttacaaggaaataaaagaaaataataaaaatcataaacatcaaggaaatcatgaggcttaagaaatgttataacttcctgtagaaatgattccacatgaattgtctgtggttcccttgctgtgatagtgacaggaaacttcctctgatttctgtgc

SEQ ID NO: 359288 - DNA, 486 bp, Homo sapiens
aataagtacacaggatttagagtctgtgacattgttgtatctaaagcacaaacatgaataaagaagccagaatcttttgaatttgaaataattttagtggtcaatgtaagaatgctcttgtgtgtccttagtggataaaccccaactgctactcagaccaaaacatctttctaatgtctttttctgtcttgtccttgcactaggaatataacatgttccttcctcatgacatcagtgtcactttttaaaataggagcacttttctttcactttcccttttctatttctctacagagggctatgcttgttcctgagttttattgctattagttacaaggaaataaaagaaaataataaaaatmataaacatcaaggaaatcatgaggcttaagaaatgttataacttcctgtagaaatgattccacatgaattgtctgtggttcccttgctgtgatagtgacaggaaacttcctctgatttctgtgc

SEQ ID NO: 359289 - DNA, 486 bp, Homo sapiens
aataagtacacaggatttagagtctgtgacattgttgtatctaaagcacaaacatgaataaagaagccagaatcttttgaatttgaaataattttagtggtcaatgtaagaatgctcttgtgtgtccttagtggataaaccccaactgctactcagaccaaaacatctttctaatgtctttttctgtcttgtccttgcactaggaatataacatgttccttcctcatgacatcagtgtcactttttaaaataggagcacttttctttcactttcccttttctatttctctacagagggctatgcttgttcctgagttttattgctattagttacaaggaaataaaagaaaataataaaaatcataaacatcaaggaaatcatgaggcttaagaaatgttayaacttcctgtagaaatgattccacatgaattgtctgtggttcccttgctgtgatagtgacaggaaacttcctctgatttctgtgc

SEQ ID NO: 359290 - DNA, 460 bp, Homo sapiens
cctctggactctctctcctctactcttgctgcatatagtrtggttgtcttgtgtcccatctcatgaggtcactcctctctactatataaaagaaggttgatataagaaaatatttgtgtgttttaaggggatgtggctttattatccattctagagttcacattagtatttaaagaattttctgtgaaataaaagacttaaattaatttaacattaaagactttaaattacggtcaactttttggttataatattgccttctactcatagctgtactttcaaattattaggaattctgggtttttttccatttttttagcaatgaaaataggtcatagtaatcctaagatttaaagagtataaatcttacataattagtttttataatgctcagtctgttcttacataacatgagccgtatttattctaatgtacttcttataagcttctatttgaatct

SEQ ID NO: 359291 - DNA, 460 bp, Homo sapiens
cctctggactctctctcctctactcttgctgcatatagtgtggttgtcttgtgtcccatctcatgaggtcactcctctctactatataaaagaaggttgatataagaaaatatttgtgtgttttaaggggatgtggctttattatccattctagagttcacattagtatttaaagaattttctgtgaaataaaagacttaaattaatttaacattaaagactttaaattacggtcaactttttggttataatattgccwtctactcatagctgtactttcaaattattaggaattctgggtttttttccatttttttagcaatgaaaataggtcatagtaatcctaagatttaaagagtataaatcttacataattagtttttataatgctcagtctgttcttacataacatgagccgtatttattctaatgtacttcttataagcttctatttgaatct

SEQ ID NO: 359292 - DNA, 623 bp, Homo sapiens
acttcttataagcttctatttgaatctttatctacatcacagtcattttcccccaaagattcttactacagccggcaccagcacagaaactgtgtgataatccagattgttttctcagagatctcctaagtactataaattaatgtgcatcacgaggtaaaagaagaagacataagtttaaaagaaattgraaggtatgcatacaagaagaaagactgaaaatcaagaaataattttttacgataaataacaattttctcatggaagaaaaaaatggttctaaagattattctaagtaaaaaggtagtttaaaaaggatctggctggctaacacggtgaaatcccatctctactaaaaatacaaaaaattacccgggcgtggtggcgggtgcctgtagtcccagctactcaggagactgaggcaggagaatggtgtgaacctgggaggcagagcttgcagtgagccaagatcgtaccactgcattccagcctgggcgacagagcgagactctgtctcagaaaaaaaaaaaaaagatctgagacatatctggatcaagtttacacctttctcaaattttgaaatttgtgaaatcttagtttttaatttggagaataccttagca

SEQ ID NO: 359293 - DNA, 425 bp, Homo sapiens
cagacttcaaattgtactacaaagctataataaacaaaacagcatggttctggcattaaaaagagaaacacagacctattaaacaggatagagaacacaaaaataaattcatgcatttacagcagctcattttcaacaaaggcaccaagagcatacactggggaaaagacagactcttcaataaatggtgctaggaaaactggatattcatatgcagaagaatgaaactggaccctcatcttttgccatataccaaaataaaattaaaatgaaataagagctaaatataagacctgaaactataaaatgactgaaagaaaacattgcagaaatgcttcaagacactggtctgggcaaagatttattgagtaagatgtcaaagccataggcaactaaagsaaaaatgaacaaatgatatctgtatt

SEQ ID NO: 359294 - DNA, 492 bp, Homo sapiens
ccttccaattctgactaattcctattcatccttcaaatcccaattcagagcaacttcttcatgaaatcttccatgataactgcctgatacagatttatcagatttagtcttccgagcttccaaaaaactccatttatatgtagttcctcaytattctgtaaacgtcttaaaatctaagactttatttcagttgtaatatttagactgattaacctggatattactgggaaataataaaatgctatgaatgcactttttgtaaatgtgaacttgttatgttttatgcaccccaattaaagtccccagttgtagttatccatacctaattaacaacaccaaataatttcaggcgttgttggggggaatgaacactaacaatttcagaaatacaaaactaggagaaatagcggatttatttttccacacattttattatcgccaggagactatttgtggaaaattatatttaagtacgaaaattttattatatcc

SEQ ID NO: 359295 - DNA, 492 bp, Homo sapiens
ccttccaattctgactaattcctattcatccttcaaatcccaattcagagcaacttcttcatgaaatcttccatgataactgcctgatacagatttatcagatttagtcttccgagcttccaaaaaactccatttatatgtagttcctcactattctgtaaacgtcttaaaatctaagactttatttcagttgtaatatttagactgattaacctggatattactgggaaataataaaatgctatgaatgcactttttgtaaatgtgaacttgttatgttttatgcaccccaattaaagtccccagttgtagttatccatacctaattaasaacaccaaataatttcaggcgttgttggggggaatgaacactaacaatttcagaaatacaaaactaggagaaatagcggatttatttttccacacattttattatcgccaggagactatttgtggaaaattatatttaagtacgaaaattttattatatcc

SEQ ID NO: 359296 - DNA, 553 bp, Homo sapiens
attaacaacaccaaataatttcaggcgttgttggggggaatgaacactaacaatttcagaaatacaaaactaggagaaatagcggatttatttttccacacattttattatcgccaggagactatttgtggaaaattatatttaagtackaaaattttattatatccaacaaatatttaatttcaccaaaatataccaagacctaccattaatcagatattcagggtgtaaagatcattaagatacctctctgtcagtaaattttcttccaatataataaattgatctgcatgaaattgccattttagtaagtcaaaaatagtcaagtatcggcgatttgtacaatattaatactcgggacaatttgatatggttcaaagtagtattatggaaatagatacagaacttaaaatatcaaaagtagaatgtctaaggctttgaatagaataagaagtgcactaagaacaaaggtgtgtaaaaacaatactaatttggggtgaaatttctaaaaagtcacaaataggaattgggctagatcataaagcacctttac

SEQ ID NO: 359297 - DNA, 553 bp, Homo sapiens
attaacaacaccaaataatttcaggcgttgttggggggaatgaacactaacaatttcagaaatacaaaactaggagaaatagcggatttatttttccacacattttattatcgccaggagactatttgtggaaaattatatttaagtacgaaaattttattatatccaacaaatatttaatttcaccaaaatatwccaagacctaccattaatcagatattcagggtgtaaagatcattaagatacctctctgtcagtaaattttcttccaatataataaattgatctgcatgaaattgccattttagtaagtcaaaaatagtcaagtatcggcgatttgtacaatattaatactcgggacaatttgatatggttcaaagtagtattatggaaatagatacagaacttaaaatatcaaaagtagaatgtctaaggctttgaatagaataagaagtgcactaagaacaaaggtgtgtaaaaacaatactaatttggggtgaaatttctaaaaagtcacaaataggaattgggctagatcataaagcacctttac

SEQ ID NO: 359298 - DNA, 553 bp, Homo sapiens
attaacaacaccaaataatttcaggcgttgttggggggaatgaacactaacaatttcagaaatacaaaactaggagaaatagcggatttatttttccacacattttattatcgccaggagactatttgtggaaaattatatttaagtacgaaaattttattatatccaacaaatatttaatttcaccaaaatataccaagacctaccattaatcagatattcagggtgtaaagatcattaagatacctctctgtcagtaaattttcttccaatatawtaaattgatctgcatgaaattgccattttagtaagtcaaaaatagtcaagtatcggcgatttgtacaatattaatactcgggacaatttgatatggttcaaagtagtattatggaaatagatacagaacttaaaatatcaaaagtagaatgtctaaggctttgaatagaataagaagtgcactaagaacaaaggtgtgtaaaaacaatactaatttggggtgaaatttctaaaaagtcacaaataggaattgggctagatcataaagcacctttac

SEQ ID NO: 359299 - DNA, 553 bp, Homo sapiens
attaacaacaccaaataatttcaggcgttgttggggggaatgaacactaacaatttcagaaatacaaaactaggagaaatagcggatttatttttccacacattttattatcgccaggagactatttgtggaaaattatatttaagtacgaaaattttattatatccaacaaatatttaatttcaccaaaatataccaagacctaccattaatcagatattcagggtgtaaagatcattaagatacctctctgtcagtaaattttcttccaatataataaattgatcygcatgaaattgccattttagtaagtcaaaaatagtcaagtatcggcgatttgtacaatattaatactcgggacaatttgatatggttcaaagtagtattatggaaatagatacagaacttaaaatatcaaaagtagaatgtctaaggctttgaatagaataagaagtgcactaagaacaaaggtgtgtaaaaacaatactaatttggggtgaaatttctaaaaagtcacaaataggaattgggctagatcataaagcacctttac

SEQ ID NO: 359300 - DNA, 575 bp, Homo sapiens
tgattcccacaaaataggagaaattccttaaggtccttctccttgaaagaaaaaaaaggattcatttgataagtttaataaatgagtggctctaacagatgaaccttagaacccaatgcagaatcttgattgatttttccacctcaggaygacactaacaacatagaggtgacttgaaataagggacccaatgaggatagacacaaaccatattctttgctaaagagttaaaataagtggaattatttaatctagggggaaaagaacctcaggacaaagaataataacatttgtgtaacatttacagctcttaatgaaatctattttccattattgttgaacatgctatgcttcctttggtgaagtctaaaattagcatagccatttttttctatgtgtccatgtatgtacacacgtatgtatatgtatattcatttatttaacttgaaaacccctatgtggtaactatttttattactaatattatctatgacaatgacaatgatgatccttttatgaaaatgtaaactaaggtatataactcatgtatggagaaatttggatttgaactacac

SEQ ID NO: 359301 - DNA, 575 bp, Homo sapiens
tgattcccacaaaataggagaaattccttaaggtccttctccttgaaagaaaaaaaaggattcatttgataagtttaataaatgagtggctctaacagatgaaccttagaacccaatgcagaatcttgattgatttttccacctcaggacgacactarcaacatagaggtgacttgaaataagggacccaatgaggatagacacaaaccatattctttgctaaagagttaaaataagtggaattatttaatctagggggaaaagaacctcaggacaaagaataataacatttgtgtaacatttacagctcttaatgaaatctattttccattattgttgaacatgctatgcttcctttggtgaagtctaaaattagcatagccatttttttctatgtgtccatgtatgtacacacgtatgtatatgtatattcatttatttaacttgaaaacccctatgtggtaactatttttattactaatattatctatgacaatgacaatgatgatccttttatgaaaatgtaaactaaggtatataactcatgtatggagaaatttggatttgaactacac

SEQ ID NO: 359302 - DNA, 574 bp, Homo sapiens
gttatttacatgttcagtttaagaattgctaatgatccagtcaactagttgttttagcaacatttagccccacaggaccagataggaaacacactattttatattcttaaggtgtgaaaaagagacagcacaagctacatctctttagatatgtttataaatataagtgagatgcctgtgtaaacayaccaactgtacttgctaaatattcagacagtagtaaagatgagaaggcagttaagtgtatattaagacttctttttaaatatagtatcctttgaaatgtcttctaaattgttcagtttgaacaacaatttccttagctcagtaaatctattctactctcacattcaacagtaattgggagaagctgcttaatgaggaactactctccccttgtcttttctcacttcctttcccttcctctctactcctatctcccaatcttttcttctcccctccccttttgttttctcccctcctttcctctctcttgtctcttctctcatcctcctgtctcattttatactgaccttaattaggagcagaacaaacacaccttgcaaggaatgga

SEQ ID NO: 359303 - DNA, 476 bp, Homo sapiens
tcttagaaagcaaactctttaggaaaattgatcacttgtcagaacatggcagtgagaatcccattgctagaaatagatggagtatggatagtccctggcctactgtaatggtgcaattaacaaaactatcaccagtggtaatacgtgacaagacacaggtggaaggggtcacactagctgatgaaattggyacttgagaggtatgagagacacactcactgtgaggacaatgggatagggtgacttgctgaacaccactgattcattagagacaaataaagacaggctcagtatgattaatcatcaattcaagacttattgtaaaagtcagggtgccttgtaggttgcatttaaagttcctcactttctaaagccagaggcaaaacaaagctgaagaccaggtgctggacttaatcaaagtgttgcagagcttcagtgaagggaggatcctcagcccttgtagaatttttacttca

SEQ ID NO: 359304 - DNA, 476 bp, Homo sapiens
tcttagaaagcaaactctttaggaaaattgatcacttgtcagaacatggcagtgagaatcccattgctagaaatagatggagtatggatagtccctggcctactgtaatggtgcaattaacaaaactatcaccagtggtaatacgtgacaagacacaggtggaaggggtcacactagctgatgaaattggtacttgagaggtatgagagacacactcactgtgaggacaatgggatagggtgacttgctgaacaccactgattcattagagasaaataaagacaggctcagtatgattaatcatcaattcaagacttattgtaaaagtcagggtgccttgtaggttgcatttaaagttcctcactttctaaagccagaggcaaaacaaagctgaagaccaggtgctggacttaatcaaagtgttgcagagcttcagtgaagggaggatcctcagcccttgtagaatttttacttca

SEQ ID NO: 359305 - DNA, 351 bp, Homo sapiens
tcttttgattagagagtttagtccatttacatttacattcaatgttattattgataagtaaggacttactccagtcattttgttttttgttttctggtggttttgaagtcttctcttccttctttcytttcttcctgtcttccttttagtgaagatgcttttctctcgtggtaggatttaatttcttgctgtttatttttttggggatcaaatgtatttttttttatttaggttaccatgaagcttgcaaacactatcacaacccattattttaagctgataacaacttaacactgtttacataaacaaataaaaagaaaactaataaaaagtctacaccttaacttcatc

SEQ ID NO: 359306 - DNA, 570 bp, Homo sapiens
cttaattttccctggaaagacagcacttatcacctgccctcagctgctgttgatggctgatgacacgggaaagctgcaggctgctggggtgcagggtgggggacttggcttcatccttggtctgatgggagtatttttgtagcagcgcctctcagcatagaatgctcttccccctccacctatgcctccttcctgctctgttgtggaagaacgatgtaagaggaaagcactggagagggagctggggggtcaggcttccagcccagctctgcccctgccttgctgagtggcctaggacatgccacctacgctctgtgggcctcgcggcgcactgaagcatcgctggccttaacagcttttctccattctgtggttccatctgtgatctggtgccaaygcatttgactgcctgggacgcctggtcttgcccactcaggaagggcctcaggcatagatggagtaaggaggtgggtacctctgtaatgccctgaaggggccccaacaccctctttctgcttgagggtgcccgttagtgagaggctcccatgcccatcccatctcctggcatga

SEQ ID NO: 359307 - DNA, 570 bp, Homo sapiens
cttaattttccctggaaagacagcacttatcacctgccctcagctgctgttgatggctgatgacacgggaaagctgcaggctgctggggtgcagggtgggggacttggcttcatccttggtctgatgggagtatttttgtagcagcgcctctcagcatagaatgctcttccccctccacctatgcctccttcctgctctgttgtggaagaacgatgtaagaggaaagcactggagagggagctggggggtcaggcttccagcccagctctgcccctgccttgctgagtggcctaggacatgccacctacgctctgtgggcctcgcggcgcactgaagcatcgctggccttaacagcttttctccattctgtggttccatctgtgatctggtgccaacgcatttgactgcctgggaygcctggtcttgcccactcaggaagggcctcaggcatagatggagtaaggaggtgggtacctctgtaatgccctgaaggggccccaacaccctctttctgcttgagggtgcccgttagtgagaggctcccatgcccatcccatctcctggcatga

SEQ ID NO: 359308 - DNA, 594 bp, Homo sapiens
ctatgctacaacagttttgtcaagaataacgtctggaaaaatccctcagcaactgggtaagtacgtacaaaccatggagaaatcatattcatctctcttaaaggtttacaatcttaatcatggagtactctttaaacaacgttatttcagttgatattctctgaattgacactgaatgattaattatatggaaactgactactgcacctttataaccttttttgagaggcaccactaatgtctatctgttctacccaaagaaaggcaatgcatacaaacgcaattaataaaagagaatttgtaattcgtaggtataaatttattgccaaggtttgcataagaatgcaacatctgccgatttcctgaagtagctacttcagctcagataagtcccaacatacattttstaattcgaacaattcccagttactgtaaaaggcacatctcagcaatccaccgaatcaaatgttttcctttttcttcacactgcagtgctatcacatgacccagtgacagatcaggatgtggattagtcaggcttcagatcgcccagactaacacccttcatctgaaatcctttttaatcagtcggcc

SEQ ID NO: 359309 - DNA, 556 bp, Homo sapiens
ttgaaccttgctcccacctgacccatctggagtcctgatgactcttcctccttccccatgcaggttcctctggctcacaatatttttggtctcattggccccaatgcagggcttggccttgccataggtaagaagtgccctcaaagaaaacaataagcccctgcatgttggctttgggtctgatgcctttcctcccccttttctcatcagaggaggtaggtgcagaggcagaaggatcaggagggcagctggcagggttgtggagagatgagctcgtaattcccacctggaacaggtgttagtccgaggcagaagacagcagacaaagcaaatggactaaatggrggaggagaggcggggtggtactaactgtgggtggggctgactgtgtcctgtttgctctggccacaggcatggtggattcttctatgatgcccatcatggggcacctggtggatctacgccacacctcggtgtatgggagtgtctacgccatcgctgatgtggctttttgcatgggctttgctataggtatgttggcaggacctggtgcccc

SEQ ID NO: 359310 - DNA, 594 bp, Homo sapiens
ttctcttctgctggagttattgacattctcctgacctcccctgtgtgttcctaccttttctgaacctcttagactcttagaaataaaagtagaagaaagacagaaaaaataactgattagacccaagatttcatgggaagaagttaaaagaaactgccttgaaatccctcctgattgtagatttcctaayaggaggggtgtaatgtgacattgttcatacttgctaataaatacattattgcctaattcagacctggtaaactagatgttgttttatagcacaagagagtgtatgggcaaatagagcaaatactataaatattatcacactttcctacctttttgaaatacttattgggtgatgggatttcaaagaggtgggagacatggcatccccctaagtagctccccatctgtttgggcaaacagggtgtgaacagtgtaaaacatgattaatgctgcaagttagtatacattctgtgttcaagtatgaacaggtgggatgctcataggctgggtgggaaataatggcagagacagaggtaagaagcaggatggagagacccacacagacaggcttttgggatgcctgaa

SEQ ID NO: 359311 - DNA, 522 bp, Homo sapiens
tccctcttcccgtgtggtctactgacacctgatggtaagtaatggaaatgcagcaagagttgcaaggttttttgtgtgtgcgttttcttcttttaattttacttctgttaacaggattaaaagtactgctgcctcttcagacacacggatacctgcacctatggctactctaagtttccccacgtrcactaactgacacagacctgaaacttatgagggctttacgctggggtccatgatggtgctgctgctgggcatcttctttctgttcagggccaggtcagtcccagggcaggcttcagaaaagagtcaggccgggcgcggtggctcatacctgtaatcccagcactttgggaggccgaggtgggcagatcacttgaggtcaagggtttgaaaccagcctggctaacatggtggaaccccgtctctactaaaaatataaaaattagccaggtgtaatggctcacacctgttaatcccagctactcaggaggctcaggcaggagaattgcttgaacctgg

SEQ ID NO: 359312 - DNA, 618 bp, Homo sapiens
cacattctcctcccttcagctcctcatcytcaagactaccctttggttatcttttttacctctaaaaaggggtgtatgtagcactcacttaggaaaagctatgggcccaggagagagggttccagcttcctttgttcatgcagcgacttagagaggagcttggagaggaggatctagcccttcccaggaaccctgaggaaagaggacagggaaggctacgtgcaaattgctccatcactgcagggaggagaggcttacggggccagaggggaagctgataagaacatgatatagttcagcatgcaataaaaagcactaaatctaattttgggggggcaattctaagcaagactcccagctgcactcctagtgccaaattgaatttttatgggttgcaagtgcttttgaccatgacgattaattgagttagtcggtattcagtgcagataattcatcgcctgccctaaggctctgaccactcagggtctcgatactagtgagcagctacaacacagagcagctcctccccagcagcctagggaccattctcagttgccagttaccaattactcagttaccagtcactcagttgccaccatcttttacagctttctcaat

SEQ ID NO: 359313 - DNA, 563 bp, Homo sapiens
aataagcctgggacaccctccatgggctcactgcccaggaccaccttgggactctgctctctgcgtttcagtgcagtgcccctcaactgtgccagccatggctcaagtgggcccagatgtggcctggcctcccactctggagggtgcaagtggtaagccttggtggtgtctatgtggtgcaaattttgcacgtgcgcagaatgcaagagctatgggtgcatgacttcttccacctaaatttcaaaagatgccatgcacagccacttccaagatcacggaactgtaggggcaccagcatggtggcctgcaagcacaagactccaacccatgattgctgctgggtagactcagcccggaaagaccacagacatggggctgcctgatgccttaggggtccaaactccactccagtgtgcccaggattttggacatggagtcaaaggcaattattctccagctttaagacataatattgttttctgttttgggctttggactttcrtgggacctgttacccctttcttcttccctgttgcttccttttgaaataagaatgcctgttc

SEQ ID NO: 359314 - DNA, 528 bp, Homo sapiens
ttaattgtggctttttaccttgcasgctatacaatttctccaatttcctttgtgacttttgtcacttctgcgtaacattaaggattccctttcctcatctacttagctaaatgctgcgtcctctataaagtttttacttttctccctgaggtgagaactattcccctgtttctgctgtgctcccacaaaccctgtgcaggccatagttagagcccttatctcatcacattctaactccaccccctcgcataagactgaacttttgagacaagcagagtctttccctctgtgtcttgtttttgtatgctgggtgcttacaacaatgacttactaaggattcaaaatatttttggttggatgacagtggattatgaaaagttgtataggcacagatgtagtttataaatgcattgaaaaattttgtagctatttgagtgtaccgtattctaatagacatgataacgtagaaaggatttttggtaatgccagagagctaatttaagcttttgtgctatttgactaaaactg

SEQ ID NO: 359315 - DNA, 652 bp, Homo sapiens
ctttctccatgtgatacccttcggctgtattatgacccaacaagaagtccctcaccagatggccaagcagatgctggtgccatgcacttgcgattcccagcttccagcattgtgatccaaatacatcttttttctttaagaattacccaatctgtggtaatatgttacagcagcaaaaataaaacagactaagaccaacttcagttttttaatttgtaaaaaagtagrtatttttcagagtcattttcatctggaatcctaaatggattagcccagtgcgtggaatacaggatactatcagtaaataaaaaattatttgtacaattttactttaaaccattttgatagtcacaaaatgtgtaatccctcaccccttagagattcactgtgaaaaacagatgtttttcatgcaggggtcatgtatctataaatacatattctggagcacctattttgcacaaaatactgctaaaatgtaagctataatcaggtcctaaagaacgagcaacgtggattgagaaaaatctaattaaggaaattttacaccatttaaaatgatgtcaaggaggtgtatctaggaggctgtaggcttcctagaggtgcttacttccacatactagataaacaattgagtagttttaatttttttaag

SEQ ID NO: 359316 - DNA, 575 bp, Homo sapiens
ttaggatatggtgtgcatatttctgaatactctggacaccaacctttttaactctctggattctaaaaatcaattagaaccctccactctctccttcccacttcagttttcacaccaataggatgctgagttaaatagacgtagtttcattttgttttttgatcggatgcaatttctggatgtgctgacgctgatttttgtcagcaatcgaccttctacacagaatttgttgtcctactggggaaatgcaactttaaaatctgaaatgcaagtctattattcrtttccaaattatagtactttttagaatcatttctaaagtattgttttcattcctttcttttattgggaaaacagtcaaggcaaaaaagtgattgggttttgggtttgggtttaattctactcacatagtatattaaagttgcatgctcactgaaaatatttaagtagaagggttctgtccacatattaaatatatagcaataagattatttaattttttattcccttcaatatataatatgtaacaattatattggtaatgtttcttgtattttcttttttttggctacagc

SEQ ID NO: 359317 - DNA, 628 bp, Homo sapiens
gttctgtccacatattaaatatatagcaataagattatttaattttttattcccttcaatatataatatgtaacaattatattggtaatgtttcttgtattttcttttttttgrctacagcttatattttccttacccaactttgctgaaggattattcttaacatatagtatctataacatatagtagtttatatcattcatgcaaatttttcaacaaacatatcacagataaacacatatcatcctttagaaaacatgttatatttgtgccaaaatctgagatagagaagaaaacactctgtattatatagtccgtatgtttagtttaatcatttttagcttatatcatttttaaagtacccttattttgctatatccacatgtaggctgataaaactttgaaacctgtggctttcttttaaaggtagccaattcactaatttggatattatcagaaaacagttcgtatgataatgctagactgtctaaattttttatactttacatttttgttttcctgagacattatcacatccagctgatttaggtatatataaaatagaaacaaatacctcacaaatgacaacaacataattttattttaaaagttttcacttatgtttttc

SEQ ID NO: 359318 - DNA, 543 bp, Homo sapiens
ccaccttaggcaacatagtgaaaacctgtctctactaaaaatataaaaatttgccaggtatgctggtgcatgcctataatcctagctactcaagaggctgaggcaggagatcacttgaacccaggaggtggaggttgcagtgagccgagatagtgacactgcactccagcctgggtgacagagtgagattctgtctcaaaaaartaaaataaaatagaaaaaaaaaggaaaagaaaaatcagtcagagccatccagaattttattttaatatgtgtttttatgatacgtttattttaatataggttttgttgattatattgttattctatgtgtctttgctgctatttccctgtgtttgctaattactactgacaattgctcccacagcttggacgtcttaactactcttacattattatagtcatccaaggcagaggttcacccccttctttgagggtgtgggtaagaagtaggttattggctgctttgagaatctaatttcaattatgtatcctcttcttcataaatatatatgcccaaaa

SEQ ID NO: 359319 - DNA, 558 bp, Homo sapiens
gtgcataactatgtcataaataaaaatgaagttttagtacagaagtgcagcttaattcaaattttgaaagcaaagggcatcattaaattccattagcactcggaaacaattgtattgctgcatcccttttaatctgaatgtgcactcttccaattatttattatttttatttttagaaaaaggaaggtttttagagtttaagtttaatcatggaaattttagtattagcttttcccatatagttaaacaaaaaggtacatatattaacaacctatcaagaactatttttactatgcctctttgaacagaacacttctcacakgcaaaagttttagtagataccattttgctctatatttctttctttttaaaatttatgagtaagaaatacatttatatggttcaaaattcacagtgatatggaaaggtaaacacaaaacggcaagttcacaacttttctagaactcaaagttggagtgctgaagcaatagcacagacatttggtctaaacatctaagaaaaatctagagcctgcagggaaacacatggcacaagcag

SEQ ID NO: 359320 - DNA, 596 bp, Homo sapiens
tcagtcaatttatgaagtttattttgccaaagttaaggatgcacacccgggacactgcctcaggaggtcctgacatgtgcccaaggtggtctgagcacagcttggttttaaaccttttaaggagacatgagacatcaatcaawacatgtaagatgaacattggttcagtccggaaatgtgggacaacttgaagtggtgagggggctttcaagtcataggtagacaagggacaaacggttgcattcttctgagtttccgatttgcctttccaaagtacgcattcagataagcatttatctcagtgagcacagggatgacttggaatagaattaaagggaggtttaccctatgcagttcccagcttgaacttgacttgtccctttagtttagtgattttggggccccacgatttattttcttttcacaacactgacttgattattgcagatttttagtaagtcttaaaatgggcagtatgattccttcaactttattcttatctttctgaattcatttagctattctagttcttttgcctttccttataaatttagaatcagcttgtctatatctgaaaaaaaaatttgcttaaattt

SEQ ID NO: 359321 - DNA, 591 bp, Homo sapiens
ctgtaccatttgggaactgggagatttaagtgtgccatacatatctctatctgcccggaatatgtcccctttcattcccacaggtcatccttctgttcccagttttcaygtcactttcgataactcttctaattcactgtctaggctaactcttccctctatggaatctcactgcaccctgtttttccctgccatattgcttataacactcttttattgtatatctatttttctatttccttattaaactcaagtttccaagatggcatggatttgatccatgtatcttttttgcttgttaaaacgcctggtttattgtaggtatggtgcaaatgttagtcactgcttcccttttccaactctaaatgaatagccaaaaccacacgtttgttagcacgcgtggaatgtcatcagttggtctgccataaatagttacggttgagatactgggaaatggaaaggaatactatgaatataacatgattttaaattccaagtttggacctagaaaaacacaggtgataatgaaaataatattttatatttgtgtacattttgcagtttgtgagcacatatataaatggtgaggca

SEQ ID NO: 359322 - DNA, 370 bp, Homo sapiens
caatatatttctctaaactgttgctgcaaagctattattcatgcagggctacaaccgagttaattttggaagagagctgttcaaagaggcccagagctgtagcgcttatgaacactgccttttctcttatttctaattagtgtgaaatggttccaaacaggagtcagccccacagaagtctgtgtagcacaaagccaggcttgttaacggacacrggaaacagttttgttttgctgaataaacaaatgcgtcataaaagcttttcaaaaggaacacaatctgatttaccacactctttaaatgttgaatgttgtttatatgcctctgagtcctttttattaaaattcgaaaggcctactcttatgagtca

SEQ ID NO: 359323 - DNA, 524 bp, Homo sapiens
actcaacaatttatagacacaaaggactagttgagatgaatcaaatttacacaaaagatgaaaatcttacagtattgtacatattataagattttaaattatgtacaatattataagattttaaattaagtataaaaaatgtttacagcagcaaaatgaaatgataaggtttgattgtggtattaatttatttttgagtagaagtttgaaaaaataattggttataaagtttacagaggatcattagagaagggaataattaatctaaaataatgcatatctaacgttgcattttagaatttgtaaaatagcataaaaatgttggaagtacagttcacccttgaataatgtgggaggtaggggtgctaagcccattaccatgctcacagtaaaaaatcttcttataacttttgattccgccaaaacttaactactaatatsctactgttgaccagaagccttaccaataacataactagctgattaacacgtattttgttttatatataatatatactgtattc

SEQ ID NO: 359324 - DNA, 610 bp, Homo sapiens
ttccatctgggaatattatacacaaccaaaaagaggtataggcttgttgtttgttttgcttttaaccccaccatgtgtatgaaggtggctcaratgcttgagtatgtttcagtcacctgtatagtcttgaaagtattgagtgggattaaggaactctaaagggtcttgtttaatccttaggtacgtgaaaagacagtggtgcagagctagaatcaggagaactataatcagtcttggttttgcattttcctacttatgtgtctttggaaaatcacttacatttcttagcttctgctttttcctttgcaaaatgattataaaatagttgttctataaagatcaagtgccacatctattaaatgcttttggctgttgcaagtggaatacacatttaaggctaattattgtcattgcaatggaaaagtaaaaaaaactggcgtaggaacaaagaaagagaaaaaaaacaaaggaagtgagaaacaatgagagaaggaaaaatgatagatgtttaacttgagaaacggtagaatgaaatgtcaaaattttcaatgtgagggctggttcatctcttggcttgccttaaatccttggttgcttggacagtgaccat

SEQ ID NO: 359325 - DNA, 610 bp, Homo sapiens
ttccatctgggaatattatacacaaccaaaaagaggtataggcttgttgtttgttttgcttttaaccccaccatgtgtatgaaggtggctcaaatgcttgagtatgtttcagtcacctgtatagtcttgaaagtattgagtgggattaaggaactctaaagggtcttgtttaatccttaggtacgtgaaaagacagtggtgcagagctagaatcaggagaactataatcagtcttggttttgcattttcctacttatgtgtctttggaaaatcacttacatttcttagcttctgctttttcctttgcaaaatgattataaaatagttgttctataaagatcaagtgccacatctattaaatgcttttggctgttgcaagtggaatacacatttaaggctaattattgtcattgcaatgraaaagtaaaaaaaactggcgtaggaacaaagaaagagaaaaaaaacaaaggaagtgagaaacaatgagagaaggaaaaatgatagatgtttaacttgagaaacggtagaatgaaatgtcaaaattttcaatgtgagggctggttcatctcttggcttgccttaaatccttggttgcttggacagtgaccat

SEQ ID NO: 359326 - DNA, 522 bp, Homo sapiens
ataaatttcttagagatttgcaggctcctgaaatcattagctgaaactttgagttacagcagccccagaaatgtggcttaaaaacggggaaaaacaacagtgaccaaaaataaaaataagaccaggtgtaccactgttggatatatccaaattccctcttttggcacaattcaaaatacaaaattttcttagtcagatctagttgaaaaaccttggtcaaattatacaatcttattaagtaccaattttctcaacttttaagtgaatctagtatccacacttacagaactgatggagaattaaacaatatacctagcttctagcgtgattccactgtagcaaatattctcaattttgtgttttccctgtcacaaagacccattacttactagtcttgtcatctaccaggggaaaataaaagacckactcctattctcatggtttctctctccagcctttttctatcatctttcttctatttttttttattcttaaagaatcctgcatatccttctatccctc

SEQ ID NO: 359327 - DNA, 587 bp, Homo sapiens
ggcctctgtgttggccttatgttgtttatttcttcaaagcagtctgagacactgagacctgccatagtcaaactcaattttctacacatccaaaagttttaaatatagccaaacatacagatttttaggcatttataatcttcctgttttgtatacctctggaaactatgcccaacatctgctagctatagataaaactctgagactattaaaacaataacaacaacaataaaggccactgatatggtttggctgtgtccccaaccaaatctcaacttgaattgtagttcccaaaattcccacatgttatgggagggacctggtgggaggtaattgaatcatcggggcagttacccyctgctgttctcgtgatagtgagttctcataagatctgatgattttatagggggctgttccccctttgcttggcacttctccttcctgctgccctgtgaagaaagtgcctttcttcccctctgccttacaccatgattgtaagtttcttgaggtcttcccagccatgcagaactgtgagtccattaaacttcttttctctataaattacccagtctcagctatttcttcgt

SEQ ID NO: 359328 - DNA, 587 bp, Homo sapiens
tgagaatatagggaaatggaagattattatggtccttgaggattcagcaatttttctaaaatgtttttgttttttttttcatctttgctatagcagatatcggttttcctagaatatgattattccatcaaaaggattttctcttccattttactctgggaaaaaaaagttggcagtgggtttgtaacacattctcctcttctctgggcacttgagctcttacagacctctactagacatctttgtgaaatgtcattggcagttactgacaagaagataaccaggggagttcttatttaaatatgtttttttccaaaatatacttgytgtgattagggtgtttattatgaataactagaaatgtgtaatatataaaatgcaactggctggagagtagaagttggtaatatacattctctatctacataacaaatggagtgtaaaaattaatatgcttcagacttaaagtgtgtcctctgagatgacattgaacacatactttgtaaactcttctttgttactcctaaaccaaaatatgttccagtaggaaaaaggcccaggcatgacccacttttgttttattgaat

SEQ ID NO: 359329 - DNA, 616 bp, Homo sapiens
gggggaacagaaacattgacccgttattgacaaaaagtggtagaaatctagcttctattgacacccaaaggtaaggaaagttcacctttattgccaggaatattggaagctcctggtcctcatgtggtctccactgacatggtggcaagagtggcctcattacaactgggcagtagtaaatgttatgactctccactaggttgcctttgacaccattctagtggggaaaggggaaagcctccttgtttctatcyagcagggatgaaattcccactcctacttggccttctcctacataaacccagtggagacattgaattccctcattacaaccttacaagagtgaagtctaaattcttcactcggccttggctagtgtggtaggggtggggtgacatttttcttctatgatatttggctagactagagtagtgattgtctaaaagttttttgttctgcctggttacccctttcattttactttggctagagagagcaggcttttgtctatgttcattggtatttctgtgttgccagtttctttagcttcaagtctcagatataggagacaaaataaaaacccagagtagttatcactgttacttctgtttcccag

SEQ ID NO: 359330 - DNA, 590 bp, Homo sapiens
atcccctgctttaccaacaagtgtccaagaagtacaaccgctttctgcaaaaatggttgtctctcaataccatgcctctccaagaactgtttcagtcccatgcactgtcaagcttgtttatttcaattcacaagtagctagtgatctcatatgaatattttgtcactagagtcccattctccccttcttgaaacatttgcctacttatttcatcatgcataacctctctgctttcctgacttctttgctgcatcatcttccaactctttatgtcaawgagggttctgaagtgagttctactggaatgagtgttcatttttctacttagataaaagttgacgtttgtggtatttcttgactcttagttacagacataggttatgcatggttttattttatctctttgttaatctgtatgatgggttttcttttttctttctttgagaatatatgaacaaattttactttaggggtccccgttatcttatgggtactcagaattcctgaattaattattgtattaaagtataaaaaattactacatttttctatagtctgcatgtaatccaagtgccacttgaatctctggc

SEQ ID NO: 359331 - DNA, 590 bp, Homo sapiens
atcccctgctttaccaacaagtgtccaagaagtacaaccgctttctgcaaaaatggttgtctctcaataccatgcctctccaagaactgtttcagtcccatgcactgtcaagcttgtttatttcaattcacaagtagctagtgatctcatatgaatattttgtcactagagtcccattctccccttcttgaaacatttgcctacttatttcatcatgcataacctctctgctttcctgacttctttgctgcatcatcttccaactctttatgtcaaagwgggttctgaagtgagttctactggaatgagtgttcatttttctacttagataaaagttgacgtttgtggtatttcttgactcttagttacagacataggttatgcatggttttattttatctctttgttaatctgtatgatgggttttcttttttctttctttgagaatatatgaacaaattttactttaggggtccccgttatcttatgggtactcagaattcctgaattaattattgtattaaagtataaaaaattactacatttttctatagtctgcatgtaatccaagtgccacttgaatctctggc

SEQ ID NO: 359332 - DNA, 590 bp, Homo sapiens
atcccctgctttaccaacaagtgtccaagaagtacaaccgctttctgcaaaaatggttgtctctcaataccatgcctctccaagaactgtttcagtcccatgcactgtcaagcttgtttatttcaattcacaagtagctagtgatctcatatgaatattttgtcactagagtcccattctccccttcttgaaacatttgcctacttatttcatcatgcataacctctctgctttcctgacttctttgctgcatcatcttccaactctttatgtcaaagagggttctgaagtgagttctactggaatgagtgttcatttttctacttagataaaagttgacgtttgtggtatttcttgactcttagttacagacataggttatgcatggttttattttatctctttgttaatctgtatgatgggttttcttttttctttctttgagaatatatgaacaaattttactttaggggtcmccgttatcttatgggtactcagaattcctgaattaattattgtattaaagtataaaaaattactacatttttctatagtctgcatgtaatccaagtgccacttgaatctctggc

SEQ ID NO: 359333 - DNA, 624 bp, Homo sapiens
aagggacactagagatcaagtacattaagtgattttcaccctacactaatgtaaaaagtaatcccttcagaaaatatgccattaaatggtttcattttattttgccataatgtttttttwaaataaagagttaaatgtgttcttatttttgagggagatgtgtaacattaatctattttagtgtcctccaaatctcttgcaataacgttccctgtggtataaccaattcactgcagtctaacacctgacacttgcaatgtaacttcagattatggtgcgcaattagctcaactgtttccccctgtgacatcaacacagtatttggatggaaggttatcctgatgtgtttcatctagaacaaacttggtactgatagtttaccctcctattgatctagaataatcccaaaccaagaaatatggacaagagaaagcaatatcagagtactcatcaaccggagactaattggactttgggtgggaaatacaggttttaaagtaccgacgaggtggatgccagagattcaaattgttcttaaggggaaaaagttagaagtcagatggtaactctcttaatttggatgctatgctggatttattgcaagaatgcaagtagcattgcagt

SEQ ID NO: 359334 - DNA, 624 bp, Homo sapiens
aagggacactagagatcaagtacattaagtgattttcaccctacactaatgtaaaaagtaatcccttcagaaaatatgccattaaatggtttcattttattttgccataatgttttttttaaataaagagttaaatgtgttcttatttttgagggagatgtgtaacattaatctattttagtgtcctccaaatctcttgcaataacgttccctgtggtataaccaattcactgcagtctaacacctgacacttgcaatgtaacttcagattatggtgcgcaattagctcaactgtttccccctgtgacatcaacacagtatttggatggaaggttatcctgatstgtttcatctagaacaaacttggtactgatagtttaccctcctattgatctagaataatcccaaaccaagaaatatggacaagagaaagcaatatcagagtactcatcaaccggagactaattggactttgggtgggaaatacaggttttaaagtaccgacgaggtggatgccagagattcaaattgttcttaaggggaaaaagttagaagtcagatggtaactctcttaatttggatgctatgctggatttattgcaagaatgcaagtagcattgcagt

SEQ ID NO: 359335 - DNA, 636 bp, Homo sapiens
gaatttcaagctttaattacatcacacatgttctgttttggcaggtttttatattcattccattcaaaatattttctaatatgtcttgttattgcttcttgacacatctttgtaagttatttagaagtattttgtttaattttcaaatatttggagattttccaaatatcttcattttttttttcaaatttaatttcactggagtcaggtaaccctctctgattttaatatatttaaatttattcccagtatggcccttcttaataaatattstatgttcctatgttcagttaatagaatgcataaattgttgttcttaggcataatactctaaaataccaatttagttagtagtgttgctcaagtcttcaatattcctaatatttcaaaaaattaagaggtgtgttaaaatctcataattatgaatttatctatttttcaagtccttcaatttttttaaatgaatatcttttgaacctctcatataaaatgcatatatttcagtattatttttcccttttttattttgaaatgtttctgataatattctttgtactgaagtactttgatattatcataaccacctcagtttttgttgttttttaatattgtttacagggtatctttttccatcct

SEQ ID NO: 359336 - DNA, 342 bp, Homo sapiens
aaaaaaaaattacccaatctcagatagttctttataacagtgtgagaatgtactaatacaggaaacaaacaagacaaaagaacaactgggaagggatggaatgtccaaaagtttctccatcacatatgatggctgtaagtatgaaggctctattgtgttaaggaaattgcttctatgcctagtgttgaaattttgtgatcataaaaggtattgaacttcataaatacatttaggacatctatcaacatactgtactgacatatyttttccttttttaacattaaaaaatatttatttatttatttgacacagagtcttgctctatcacccaggctggaatgc

SEQ ID NO: 359337 - DNA, 598 bp, Homo sapiens
cctgggttcaagcaattctcatgcctcagcctcccaagtagctgggattacaggcatgtgctaccactcctcgataatttttgtatttttagtagagacagggtttttccatgttggastggctggtctcaaactcctgacctcaagtgatcactcaccttggcctcccaaagtgctgggattacaggcgtgatctctctgcccagccataattttttctttagtgtagtgatgcattgcctgatattctaatgataattcatccttgaatatttggattaaatatttatgtagtgtaatgtattgtcatgtattttacatagcaagtacactataaaatttatactattttactaattttacctttactttagtccagtttcttcagactacctttatattgctggactgaatttattgtagaggccacctcaaatcattttttcagaatcaggtggggtgtaaataatcatatactttcagcactgaaatataaacagaagagaaatactgatcattgtgcttgtctcattcagatgatagttaataattgcatccacatgatatattactatcactatatcaaacagtgattctc

SEQ ID NO: 359338 - DNA, 542 bp, Homo sapiens
acctaaatttcttaactttgaacctttctgtttataattcttgttacagtttgtaactatgtatttattttaagttatattttaactaccatttctatttatctccccactatattctaagcttcagcaagtctgttatatcaccattctwttttagcagaatactgaggacatagttggaactcaaaaataaatgaatcaaagctttagtgttatacatcactttacagtatggtgtacatgtgaaaattttatttttttgaaaagatattactaaattaaaatacttacagatagtaattacattaatgatttaccagttgtttttatttttaatagcaaaatacaaggaatgttttcatcaaatataggtaagtctagctagaatataagggattataatataaaacttggaaatacctagaacagcgccttacaaaaactaagtgtataataaatgataaacaagattgatgatgattacaataaacgattataaaaaagaaaataaaggaatgccttttagccccatgatttcattc

SEQ ID NO: 359339 - DNA, 542 bp, Homo sapiens
acctaaatttcttaactttgaacctttctgtttataattcttgttacagtttgtaactatgtatttattttaagttatattttaactaccatttctatttatctccccactatattctaagcttcagcaagtctgttatatcaccattcttttttagcagaatactgaggacatagttggaactcaaaaataaatgaatcaaagctttagtgttatacatcactttacagtatggtgtacatgtgaaaattttatttttttgaaaagatattactaaattaaaatacttacagatagtaattacattaatgatttaccagttgtttttatttttaatagcaaaatacaaggaatgttttcatcaaatataggtaagtctagctagaatataagggattataatataaaacttggwaatacctagaacagcgccttacaaaaactaagtgtataataaatgataaacaagattgatgatgattacaataaacgattataaaaaagaaaataaaggaatgccttttagccccatgatttcattc

SEQ ID NO: 359340 - DNA, 582 bp, Homo sapiens
tatatcaagtactctctcagaccacagtggaataaaattgtaaatcaactccaaaaggaaccatcaaacccaggcacatacatggaaattaaataacctgctcttaaatgattgttgggtcaacaatgaaatcaaggtggaaatttaaaaattctttgaactggatgataatagtgacacaacctatcaaatcctctgcgatacagcaaaagcagtgctaagagaaaagtttatagcattgactgcctacatcaaaaastcggaaaaagtgcaaatagacaatgaaggtcacacctcaagaaaccagagaaacaagaaaaaatcaaacctaaacccaacagaagaaaatgagtaacaaagatcagagaagaactaaatggaattgaagcaaacaaaaaaatacagaagataaatgaaacaaaaagctggttctttgaaaagataaacaaaattgatagatcattagcaagattaaccaaggaaaaaagatccaagcaacctcaatcagaaatgaaatgggagttatcacaactgataccacagaaatacagaggaccattcaaggctactatgaacatcttt

SEQ ID NO: 359341 - DNA, 582 bp, Homo sapiens
tatatcaagtactctctcagaccacagtggaataaaattgtaaatcaactccaaaaggaaccatcaaacccaggcacatacatggaaattaaataacctgctcttaaatgattgttgggtcaacaatgaaatcaaggtggaaatttaaaaattctttgaactggatgataatagtgacacaacctatcaaatcctctgcgatacagcaaaagcagtgctaagagaaaagtttatagcattgactgcctacatcaaaaactcggaaaaagtgcaaatagacaatgaaggtcacacctcaagaaaccagagaaacaagaaaaaatcaaacctaaacccaacagaagaaaatgagtaacaaagatcagagaagaactaaatggaattgaagcaaacaaaaaaatacagaagataaatgaaacaaaaagctggttctttgaaaagataaacaaaattgatagatcattagcaagattaaccaaggaaaaaagatccaagcaacctcaatcagaaatraaatgggagttatcacaactgataccacagaaatacagaggaccattcaaggctactatgaacatcttt

SEQ ID NO: 359342 - DNA, 532 bp, Homo sapiens
actgctcctgtgtccagctcaaaataatctcggtctttctggttgatacacattctgacctgggaattcattaccgaactggccatcaagctttggaacaaataacaatttattatcatttagatttatgttttttgtttcccatgagcccaatcactgcaccttgcacactgcaggtatacagtagaygtggatgaacaaatgaatgaataaatgaattcaatgctaatatactagaataaatggaactgcacagataaatttctctactcctgtgcatgcttctgtagtgaaaattagctcatagtcagtaaatagaagaatcatgttattataatgtggaaattgtgttagttcataagcaattttttccccagaattttaatgatgtgtcaccaaaataataccagccaatctccacatacaccagcccagcggagctaagcatgctaggcaggagctccaggtgtgcacagggaccttcctagcatttgttctttgctcagttttaccacatgctctgtttggaagt

SEQ ID NO: 359343 - DNA, 532 bp, Homo sapiens
actgctcctgtgtccagctcaaaataatctcggtctttctggttgatacacattctgacctgggaattcattaccgaactggccatcaagctttggaacaaataacaatttattatcatttagatttatgttttttgtttcccatgagcccaatcactgcaccttgcacactgcaggtatacagtagatgtggatgaacaaatgaatgaataaatgaattcaatgctaatatactagaataaatggaactgcacagataaatttctctactcctgtgcatgcttctgtagtgaaaattagctcatagtcagtaaatagaagaatcatgttattataatgtggaaattgtgttagttcataagcaattttttccccagmattttaatgatgtgtcaccaaaataataccagccaatctccacatacaccagcccagcggagctaagcatgctaggcaggagctccaggtgtgcacagggaccttcctagcatttgttctttgctcagttttaccacatgctctgtttggaagt

SEQ ID NO: 359344 - DNA, 518 bp, Homo sapiens
agtttaacatatcactttttcccttatatccctcaaatggctttctactgaagtagagtaacagctacatttttgtcattgcatacaaaaacctatgtgatccggtccctggttatccstgtagtacctaatctaactcaattattttatttgtaatgtatttttaaaaaatctaccttcctgcaacataagatttttgagggtagtgacgataacaatttcacttattattgtatccccagcacctaacattctgtttgatacatgataggcacacaaaagtatttggtaaatatgtaagaaaatttttctctcctatttcacccaaatattctccacttgaatctaatgcttgatggcattctgtgacattctttcctttctgcaaattattatatttgctatttcactaagtatattaagtagaaatctttcaatatttccttctcttttggtatttctatttgatttttctactttctatctccacatcctcacttcccaccttgaagggaaga

SEQ ID NO: 359345 - DNA, 518 bp, Homo sapiens
agtttaacatatcactttttcccttatatccctcaaatggctttctactgaagtagagtaacagctacatttttgtcattgcatacaaaaacctatgtgatccggtccctggttatccctgtagtacctaatctaactcaattattttatttgtaatgyatttttaaaaaatctaccttcctgcaacataagatttttgagggtagtgacgataacaatttcacttattattgtatccccagcacctaacattctgtttgatacatgataggcacacaaaagtatttggtaaatatgtaagaaaatttttctctcctatttcacccaaatattctccacttgaatctaatgcttgatggcattctgtgacattctttcctttctgcaaattattatatttgctatttcactaagtatattaagtagaaatctttcaatatttccttctcttttggtatttctatttgatttttctactttctatctccacatcctcacttcccaccttgaagggaaga

SEQ ID NO: 359346 - DNA, 560 bp, Homo sapiens
accaataaatggaatatagacccagaaacctataaaatcatgtatagatatttattttctggctaatctgacacttcagagatgtgggacgtaaatggtctttttagtaagtgatgtggagaaaattggatttccttatgaaaaaaaattgcttttgagtctatctcatgttaattccaggtcaattatagctctaaatgtgaaaaccatcaacattgatttcagaagataactaacatctttttaaaagggttttgaamattttcttagagtatataggaaacattaagcatataggcaaaaactggtaaataggactatagtaaagttaagaacctcaactcctcaaaagtgtcattaatagaattaaaaggcaaatgacagaatgtgagatggattgtatatcactagccaagtactcatatccacaatatataaagaacatcttttgatagaaaataggtagacagcctaattgataaatgatcaagaaacttgagtagattgttcacagaaaaacatatccaaatggccaataagcatatgaatatatgctcaac

SEQ ID NO: 359347 - DNA, 505 bp, Homo sapiens
aaaacgaaagtgtggtgtaataattcaggatagtgattagtttgatggaggacaaagtgcatggggattaggaaggaacatatgagggatttctggggtgcctacaatattctatagtttgaccgagatgagggctgcactgtcttcttacgatgacaactcattgagccatacacggatatttggtgtacttttctgtgggttattcytagtaataaaaaaatttttatcacagaatataaatcaatcagtagagaatgttcaagcttccttccaccatgccaattaacttaccagcaactacactcatctctgtcttcctaccaaacactactgataaggccagcctctcaatcatgcactagatttcatcccttcctgtcacctccaaaaacatggcagagttcttaaaattttctaagaattctttcatgtctccacatcattaacattttcaccttcaccaacagcatccaaataaacattacatattctattgaaaaaa

SEQ ID NO: 359348 - DNA, 505 bp, Homo sapiens
aaaacgaaagtgtggtgtaataattcaggatagtgattagtttgatggaggacaaagtgcatggggattaggaaggaacatatgagggatttctggggtgcctacaatattctatagtttgaccgagatgagggctgcactgtcttcttacgatgacaactcattgagccatacacggatatttggtgtacttttctgtgggttattcttagtaataaaaaaatttttatcacagaatataaatcaatcagtagagaatkttcaagcttccttccaccatgccaattaacttaccagcaactacactcatctctgtcttcctaccaaacactactgataaggccagcctctcaatcatgcactagatttcatcccttcctgtcacctccaaaaacatggcagagttcttaaaattttctaagaattctttcatgtctccacatcattaacattttcaccttcaccaacagcatccaaataaacattacatattctattgaaaaaa

SEQ ID NO: 359349 - DNA, 567 bp, Homo sapiens
tagtggttaaataacttacctaaaatatcaatatgaagttkcagaactagcatttgaacccatatctgtctgtctctagagcccaaagtccaaattactacgtaaactgtctcctgttgcagttcagcatgcaagatacaaatccccagacacaagtgcataagtgaaatattgaggaatgttcattaagaactctatatgcaggccaggcacagcggctcatgcctgtaatcctagcactttaggagtctgaggcaggaggatagcttgagctcagtagttcaaaaccagctgtggatacatagccagaccttgactctactacaaatcaaaaaaattagtgggatgcggtggcacgtgcctgtagtttcaactacgcggtaggctggatgggaggatcatttgagctcaggagtttgaggctgcagtcagctatgattgtgctgctgtactccagcctgggggacgaagcaagcaagacactgtctgaaaaaatttttaaaaaaagtatatgcaagtgagttaagtcacaaggaagatttctatgttcattgactcatcaagtct

SEQ ID NO: 359350 - DNA, 567 bp, Homo sapiens
tagtggttaaataacttacctaaaatatcaatatgaagttgcagaactagcatttgaacccatatctgtctgtctctagagcccaaagtccaaattactacgtaaactgtctcctgttgcagttcagcatgcaagatacaaatccccagacacaagtgcataagtgaaatattgaggaatgttcattaagaactctatatgcaggccaggcacagcggctcatgcctgkaatcctagcactttaggagtctgaggcaggaggatagcttgagctcagtagttcaaaaccagctgtggatacatagccagaccttgactctactacaaatcaaaaaaattagtgggatgcggtggcacgtgcctgtagtttcaactacgcggtaggctggatgggaggatcatttgagctcaggagtttgaggctgcagtcagctatgattgtgctgctgtactccagcctgggggacgaagcaagcaagacactgtctgaaaaaatttttaaaaaaagtatatgcaagtgagttaagtcacaaggaagatttctatgttcattgactcatcaagtct

SEQ ID NO: 359351 - DNA, 567 bp, Homo sapiens
tagtggttaaataacttacctaaaatatcaatatgaagttgcagaactagcatttgaacccatatctgtctgtctctagagcccaaagtccaaattactacgtaaactgtctcctgttgcagttcagcatgcaagatacaaatccccagacacaagtgcataagtgaaatattgaggaatgttcattaagaactctatatgcaggccaggcacagcggctcatgcctgtaatcctagcactttaggagtctgaggcaggaggatagcttgagctcagtagttcaaaaccagctgtggatacatagccagaccttgactctactacaaatcaaaaaaattagtgggatgcggtggcaygtgcctgtagtttcaactacgcggtaggctggatgggaggatcatttgagctcaggagtttgaggctgcagtcagctatgattgtgctgctgtactccagcctgggggacgaagcaagcaagacactgtctgaaaaaatttttaaaaaaagtatatgcaagtgagttaagtcacaaggaagatttctatgttcattgactcatcaagtct

SEQ ID NO: 359352 - DNA, 579 bp, Homo sapiens
ctgtctgaaaaaatttttaaaaaaagtatatgcaagtgagttaagtcacaaggaagatttctatgttcattgactcatcaagtcttcctgctacttacttaccctggtctacacaagaccttgattactggggtgatgcttctgatgcctaatcaatgccatttcaagttccgggctatttgcctctgttaacctcactttggggtatattttagtaaaatgttgctttagttttgggactcagatatatccaaatgcattttgtttgtgatgtctcttccattaacttgaccccagagctagtcaattcatttctacccttgtaaaacacaagtttctcccctaacacaaaatactcactctacattagtacagttctccattttttcatctatcattctcttttcttttgtttaagaaacktcttttctttctgaatttataaattattcattgctactttaaaattatataatgaacattcctcatgaatatttgtctgcagctttaattaaagtagattttctgggtgaaacaacatggaaattcttaaaggtttttgaaatctgatgccaaatt

SEQ ID NO: 359353 - DNA, 575 bp, Homo sapiens
aaaagagattggataacagaaagaacaggacagatcatcctaatacagagtgtcctttgagctggactgcagagtacagaatggatggggccatggtaagattagaggtagggttgtcagggacaaggtgattgtagcaatttagctaaaacagaatagtggcctacaccaggaaaatggcagtagagttggaaataaatgaacatatttgagaaatagagcatgcaacagactgcacctgatgatgcttatgtgtgtgggagaaagagatgaagaggtaggsattcaattacttgagggagagaatacaggaggtggaagaggttgtagtggaaagaaatgatgagaaaaagttatgtattttcaataattcagcatctaattgtgtgtggttgacatgtgaattttattataaacactgaaacatggtggtatttcttagaagtgctgttgaacaggtgagaaaattctctcttgaaataaaatacacattttcacatgaaattggtaaaatacattcctactcatttacttttgatttgtcagtctttggccacaaaagcaataaatgacta

SEQ ID NO: 359354 - DNA, 575 bp, Homo sapiens
aaaagagattggataacagaaagaacaggacagatcatcctaatacagagtgtcctttgagctggactgcagagtacagaatggatggggccatggtaagattagaggtagggttgtcagggacaaggtgattgtagcaatttagctaaaacagaatagtggcctacaccaggaaaatggcagtagagttggaaataaatgaacatatttgagaaatagagcatgcaacagactgcacctgatgatgcttatgtgtgtgggagaaagagatgaagaggtaggcattcaattacttgagggagagaatacaggaggtggaagaggttgtagtggaaagaaatgatgagaaaaagttatgtattttcaataattcagcatctaattgtgtgtggttgacatgtgaattttattataaacactgaaacatggtggtatttcttagaagtgctgttgaacaggtgagaaaattctctcttgaaataaaatacacattttcacatgaaattggtaaaatayattcctactcatttacttttgatttgtcagtctttggccacaaaagcaataaatgacta

SEQ ID NO: 359355 - DNA, 608 bp, Homo sapiens
caagattttaacatggtgagaaaagaaaatagaaaatgttttgatgctacaggtggacaaaataaatgacagagcaagctttaagaagatgcaagggggcagcatccaaagcatagaaagtgctggtttggatatggacaaactgaaagctcaaacgtgtgtctcttaaaatgtagatactctgcttaaaaatctttgaaagagtagataaaatgaatggatggaggaaagacaaatggacttaatctttcaaagtcttcatttatttccttaaaaatagggatagaaatgcctgttttattggggcaatgcaatagttatgaatcgagactgcacatgtaaagtagttagcaaaatcccttacccatgacaggttccagtgacttgtaggtcttattcttactactggagacatctattagctttcaatccatcagtaatgattattgccctcagcatygcattgcatttttcaccaagctaggttcataactcatgtactctggcaaaagcaacagcagaaaggaaatgatgcagttagagtttagaatgtgtcccagggaaggtaaagagtaagtaaattcgtctttgttgctttgaaatcaccc

SEQ ID NO: 359356 - DNA, 591 bp, Homo sapiens
tttaggaccctagaacacttgagtccatggtggtgaggttgacccaaactcaagttctgatggctgggatgggtgactgccctctggctagggctggtctaaatgttccttctgtgggtcctggctgagttctgcctggttttggcagcactgcatcctaaggcaaagtcccccaattggtgctcttttcctcccctaagcacacagattctccatgctatgtggtcacctctagcggatgggagaggagaggtgtaggcaattcaagactgtcttttctaccctcttcagtgcctatttccagtgatattaaattaaaactaggaactgtgatcactcatctgatttttggttcttaaaaaagtgcttttttgtgtagttaggtgccaaatttggtgttcttgtgcagagaacaatcagtagagggttctatttgggcatctttctccacctccttccttgagctcgagatctagattaattcttaattcataacttagtcattgcataatagcaattgcgtgctttkttcaacattaaaaaaataagagttggagcaagatgcagatttctaggtgatactagaagagt

SEQ ID NO: 359357 - DNA, 544 bp, Homo sapiens
tgccaggttttggtaccaggatgacactggcctcataaaatgagttagagagtagtccccacttttcaattttttggaatattttcagtagaaatggtaccagctattctttgtacctgtggtagaatttagctgtgagtctatctggtcttgggcatttttggtttggtaggctatttattgctgccttaatttcagaactcattattcgtttgttcagcaattcaattacttcctggttcagtactgggagggtatatgtgtccaggaatttatccatttcttctgtattttctttatttttatttctatttatttatttatttygagatggagtctcactctgttgccgaggctgcagtgcagtggcatgatctcgggtcactgcaacctctgcctcctggcttcaagtgattctcctgcctcagcctcccaagtagcttggactagaggcacatgccacaatgcccagctaatttttgtatttttagtagagatgaggtttcaccatgttggtcagactggtcacaaatttgtgacctca

SEQ ID NO: 359358 - DNA, 595 bp, Homo sapiens
gggcttttgaaacctgaatcaagtctcttatgcccttgctgaaaattctgcaaagaccttccattgttcttagaatccaaaaactgtaaacacattactgtagtccccacaatcctaggtgaactggcccccaccaccagatctgaccccaccttctatcactgtgtccctcaacagccacaaaaagcggaacttttttctgttccttgaactagcaagcttgttctctaccctatggtgagaactttgtacttgctcttttccctctgcctggagtattgatgtttttgttttacctgtttattgtctatctttcttcctaaaatataagaccctcgaaagcaatatttgtctkatatagacatacctcattttaattcaccttgttttattgtgcttcacacatactgcctctgttacaaatttaagtttgtggcaaccctgcactgaacaagtctataggccccatttgtcccacagcatgttctcactttgtgtctctgtcacattttggtaatttttgcaatatttcaaactttttcattattattatatctgttatggtgatctgtgatcagtgatctcagatgttaca

SEQ ID NO: 359359 - DNA, 547 bp, Homo sapiens
agacagtcctgtctccacccagcagccccacagtgaggtgggattatgtggcaggtagggtgagctcagtgtccaaaacctgctgtcaccagcagggagaacttgggtcaacttctcagccattctaaactccagttacccactgaaaaacgggataacaatccaactaaattcagttttatgatgagaatcaagtaagatcaactatctcaagagatggagctcaccaggtgcctctactaatcctttcagaacctgaagcgagcataggctctacagagtctaggatttttttaccttaaaaaacagagagacaaagatgtgcttaataatgtagacctaaaaagtgtgactgtactgctttttcaggggaaaatgatgtgattctrtgccttagggttagtgaatgctggttgaatacagagaaataacctgagaacatttcaggatcccagatctgatccactattaaagggaaggagggttggaagcatgctgcctttgaggtgttcccctcctcaccttcttgggaatctcagccatgtgc

SEQ ID NO: 359360 - DNA, 537 bp, Homo sapiens
aagtgctagtataaaacaataaaagctagcagctaagggtttagcttttctgttgatgggaaggataaagaactctaaggtccttgtaagattaacccctggagtgtagctgtgatgagggagttcctgaaagtctaggtgcagagaggacctggtggctgggatttttcttttttttttttttttacatcccactggctgtaatttgggagatctcagtaaagggtgccctgtgtgagtgaatggtggtggagatctctggggaggagtgtttagatgaatgtgaaaggcagttcaactttcacagccaagaggaaccctgtgagcctggatgtcatgagtcctccttgcaaatgaaggcatctggtgcatccctgttttgagaagttctacaggtggtggtacattctctttgaggcataattctcctagaagcagtgtgastcattatcagtcagtatctcttgggagaaactcatctaggaggttactcactccaaagtaggttttgaggtgtgaaagcccaggggtgtttag

SEQ ID NO: 359361 - DNA, 595 bp, Homo sapiens
tcaagattgcaaacacacagagtgtgagtagaataaaatctaagcctaatgtcagctccgtagaccagaggagaggktagggagatccccagcacaacaggagagtggaaagttgcagttgctcatcattccaggttcatgcccctggagatactgcagttgtggcagccagtaggctctcaaagaagacaggtccttcagcattcttttggaggaggggagatagtgtttctgcccctgggtctcagcagttactagaacagtagcgtggaccaggggcatacaaggatatctatgctgtcctagagagattgtcaatgtacccttcctatgaggccaactagtgtagagaattttgatggaggtgatcaggtctttagccacaggattcctcccacctctcacatctttgttaccaatgagtcaccaacctttttgaaatgtgtaaattaaagcagattgcactcttacatttcaatcgtggaatttatattcaaatctaactgctgcattataatcgacttacagacttcagctaatttagggaatgactagacaatataaagaagaaaggctcattatgatgggccccagc

SEQ ID NO: 359362 - DNA, 218 bp, Homo sapiens
accaggtgggccgagcctccctgcttgcccggggcggggaaggagctcgctgggccggcctcagggcctgagcggccgggcccggatctggggcaaggggcgcggcgagcagggccgacgcctgggtgttcccgtccccctttcctcgagccttccccctgtagggcccgggtggacgyggccgtcctggctgacctgtccctgcccccgcaagccgc

SEQ ID NO: 359363 - DNA, 472 bp, Homo sapiens
tgcttgtctaccatgtgggattgataaaggccacacctgcaaatacagaaagaaaagcaattactgcttcagagacatgaacacgcaatggttaagcgagaaatgcaccagcatatgtgaacttgaactggcctcctatttaactgtgggtagatggggtggcacttgcaccccccgaccccaccatctgcacatctctctgtgactctacacccagacccctatttcccaccttgtggaagggtgtcctcccccaccccatccccctagctatgcctcaaatgttcaaacccattctggcctcagaagaatctccccctcaygttaatctccattcacttaggtatgctttttttttttcagttgcagtaaaatgaaacacacctaacttaaaatttaccatctgaaccattctgaagtatattgctctgtagtgttaagcgcattcacaccgttctgcaagcctgaccac

SEQ ID NO: 359364 - DNA, 551 bp, Homo sapiens
agtaaaagaagttgaggataatagtcgctcaactgccttttttagtttaatccttactctttatagtttttcatgtttttggaatctttacatcaaatgttgtataatgttttagactgtaaaagccagtctaaacattaattttggcttgttacttaaattgaaaagtgaatctcaattatataagttgagttttaataatgaaaatatgtaaatattggctgggcrcagtggctgacacctgtaatcccagcactttgggaggctaaggtgggtggatcacctgaggtcaggagttcaagacgcctggccaacatggtgaaaccccatctctacaaaaatacaaaaaaaaaaaaaaattagctgggcatgatggtgggtgcctgtaatcccagctactcaggaggctgaggtgggagaatcgcctgaacccaggaggcgaaagttgcagtgagccaagatcgcgacattatactccagcctgagtgaaaagagcgagactccgtctcaaaaaaaaagaaaatatgtgaatattagaagctatgcttctt

SEQ ID NO: 359365 - DNA, 551 bp, Homo sapiens
agtaaaagaagttgaggataatagtcgctcaactgccttttttagtttaatccttactctttatagtttttcatgtttttggaatctttacatcaaatgttgtataatgttttagactgtaaaagccagtctaaacattaattttggcttgttacttaaattgaaaagtgaatctcaattatataagttgagttttaataatgaaaatatgtaaatattggctgggcacagtggctgacacctgtaatcccagcactttgggaggctaaggtgggtggatcacctgaggtcaggagttsaagacgcctggccaacatggtgaaaccccatctctacaaaaatacaaaaaaaaaaaaaaattagctgggcatgatggtgggtgcctgtaatcccagctactcaggaggctgaggtgggagaatcgcctgaacccaggaggcgaaagttgcagtgagccaagatcgcgacattatactccagcctgagtgaaaagagcgagactccgtctcaaaaaaaaagaaaatatgtgaatattagaagctatgcttctt

SEQ ID NO: 359366 - DNA, 551 bp, Homo sapiens
agtaaaagaagttgaggataatagtcgctcaactgccttttttagtttaatccttactctttatagtttttcatgtttttggaatctttacatcaaatgttgtataatgttttagactgtaaaagccagtctaaacattaattttggcttgttacttaaattgaaaagtgaatctcaattatataagttgagttttaataatgaaaatatgtaaatattggctgggcacagtggctgacacctgtaatcccagcactttgggaggctaaggtgggtggatcacctgaggtcaggagttcaagacgcctggccaacatggtgaaaccccatctctacaaaaatacaaaaaaaaaaaaaaattagctgggcatgatggtgggtgcctgtaatcccagctactcaggaggctgaggtgggagaatcgccygaacccaggaggcgaaagttgcagtgagccaagatcgcgacattatactccagcctgagtgaaaagagcgagactccgtctcaaaaaaaaagaaaatatgtgaatattagaagctatgcttctt

SEQ ID NO: 359367 - DNA, 551 bp, Homo sapiens
agtaaaagaagttgaggataatagtcgctcaactgccttttttagtttaatccttactctttatagtttttcatgtttttggaatctttacatcaaatgttgtataatgttttagactgtaaaagccagtctaaacattaattttggcttgttacttaaattgaaaagtgaatctcaattatataagttgagttttaataatgaaaatatgtaaatattggctgggcacagtggctgacacctgtaatcccagcactttgggaggctaaggtgggtggatcacctgaggtcaggagttcaagacgcctggccaacatggtgaaaccccatctctacaaaaatacaaaaaaaaaaaaaaattagctgggcatgatggtgggtgcctgtaatcccagctactcaggaggctgaggtgggagaatcgcctgaacccaggaggcgaaagttgcagtgagccaagatcgcgacattrtactccagcctgagtgaaaagagcgagactccgtctcaaaaaaaaagaaaatatgtgaatattagaagctatgcttctt

SEQ ID NO: 359368 - DNA, 390 bp, Homo sapiens
taccatttcggccgggcatggtggttcatgcctgtaatcacagcactttgggaggccgaggtgggcagatcacctgaggtcaggagttcgagaccagcctagccaacatggtgaaaccctgtctctactaaaaatacaaaaaaaaaaaaaaaaaaaaatattgccaggcacggtggtgggcgcccataatcccagctactcgggaggctgaggaaggaraatcgcttgaacccgggaggcgaagggtgcagtgagccgagattgtgccactgcactccagcatgggcgacagagcgagactttgtctcaaaacaaaacaaaacaaaacaaaacaaaacaaaacaaataactccaattttgtgacatagaagaacataaagtagaaggaga

SEQ ID NO: 359369 - DNA, 579 bp, Homo sapiens
tttgggactggaaggtgattgaggaatataaatagctggccaatcagtggcctcaacatagctgatgcaagagttgagagtgtggcaacagaagaaggagatctttacccaaccaaaaatacaaggcagtggggaggggaggaatgtgcccagccagtggcaccctgccatgccctgctaggctgctagcttcaccactggatttcccagagccaggcacagtgcctggtacacacaagatggtaaataaatatttattgaatgaaaaaaggaaggaaggaactggarccctgaccagcagatagttgctgagtagagcagttcaataattcgtcctttcacttgctcagattccagctgccttagccaccttcagatgataaatttgcctttcagtaaaggctctcctacaaagaggaatgccctggcctctcaattacaggtcgcttgacagttatgtttctcacttccaattaatatatctgctttaagcatcagttccttttgccagccggcttcttacatattcatgtgtttgtctcatcaatggagtggtggagtttctgcataggagtcatt

SEQ ID NO: 359370 - DNA, 587 bp, Homo sapiens
tgaggttctttcttataattgccatttcatctatcagcttctgtatcattttattataatccctagattccttggattaggttttgactttctctcctgtatgtcaatgatctttgttactgtccatattctgaattttattcctgtaatttcagccatctccacctggttaagaactatttctggggaagtagtatggtcatttggaggtaagaagacactctggctttttgagttgccagagttcttgtgctggttctttctcacctttgtgggctaatgtttcctttaatcttagaagttgctgtgctttggttgagttttttctcttttatcctatttgatgtccttgggagtttggttgtggtataaggtgggttctgtcagctggcttcatttctgaaagattttcagggccaaaggctcagctcaggattcctgaattgcatgctctaactcttaggagtgggtatcatgcccctggcttttttctctggccccttgaggtttggaacctgctgcactagagaggccaaagtgttcycagaatgctggtgacaacactctgatgggtgatgtcagccaga

SEQ ID NO: 359371 - DNA, 616 bp, Homo sapiens
tgaaaaagtgatcaaaataattagtcttcagagaaaagcaaatgaaaaacataatgagatatgaattaatatacactagactggctaaaattgaaaagactaaaaataccaagtactggaaaggagctggagccaccaaaaccttcacacatttctgattggaatgttagatggttcaagaactttgaagtgaattttggcagtttcttataaaggcaagcataaacctactttgatccagcaattgcactcctaggtatttatcaaaaagaaatgacaacaaaaaatatgtccactaaaagttttagaagactgcttacagcagcttcattcataatagctccaaattggaaacacatcaaatgtttatcaacaggagaatgcataaactgcataaaaaaattgtggtatattcacacaataaaatactacccagctatagaagggactgaattactgatatttaaacaatatggaggcatctcccaracgttatgttgagtgaaagaagctagacatactgtattataccattttatatggagttctaaagctgccagtgagagactggaaagtagcataaggaagatttctggggatatgaaaatgtcaaata

SEQ ID NO: 359372 - DNA, 283 bp, Homo sapiens
tctcctgtttcatttcttagtgaggtcatttggattttctctcttcttggttaatcttgctaatagtctattaatttaatttatcttttcaaagaaccagctttttgtttcatttatcttatatttttttttttgcttcaatttcacttagttctgctctgatcttggttatttcctttcttctgctggatttgggtttggtttgttcttgtttctctagttccttgaggtgtgaccttasaatgtcagtttgtgttctttcagtctttttgatgtaggtgtt

SEQ ID NO: 359373 - DNA, 578 bp, Homo sapiens
aaaaaaagggagaagatccaaataagcgcaatctgaaaaggcaaaggtgacattacaaataatcccatgtaaatacaaaagatcctcagagactattatgaacaactctagatgcagaaactagaagatctagaggaaatggatacattcctsgaaacaaacattctcctaaaattgaattaggaagcaattgaaaccctgaacagaccaacattaagttccaaaattgaataagtagtgaaaaacctaccaacctaaagaagacctggaccagatagagtcacaattgaattctaccagacatacaagaagagcttataccaattctactgaaactattccaaaaaaatcaaggaggaaggactcctacctaactcattctatgaatccgatgaatccagcatcaccctgataacaaaacctggcaaagacacaatgaaaaaagaaaacttcaagccacttatgatgaacatagatgcaaaagtcctcaacaaaatactagcgaaacaaattcaacagcacatcaaaaagttaatttgccatgatcaagtaggtgccattactgggatgcaaggata

SEQ ID NO: 359374 - DNA, 600 bp, Homo sapiens
gtgtggaatgaagaagatctggagtctggttcatattaaaacatccctgttaacaaataattcagcctagcgttgtgtctaaaatagagcctcagagaatacatgcagcttcattgatacaagtaaatacctgctttatgaagctctagtcttaacaatgttaaagatttaaatatgatattgaaggccattgtggaattaaaaaaaaaaaacgaggtcaacttattgtattctaaatatactttaatttctaaatggatttaaaatgaatagtatggatctgaagtccgtctatacagcaggaaataggtaagtaattacagcttgcagtaragttacttggagtggtaaatgattttattggaggtcaaatagctgtcaagagataacagctcatattaggttctcacagtgtgtaccttttttggaatatagagaaagcaggtgcttattgtgcaaaagttatcagctgaggctgatttttttgtgggggagggtgtgaaaggtggtaaaatgtttgattccaaagtaaaataacagatttgggcgactctgattacttaacctaatatactgtttatctgtaataaagtgatatct

SEQ ID NO: 359375 - DNA, 527 bp, Homo sapiens
tgaaccaaaaattgcactgtatagctgggaaagggaagtctgatatgattttctattaatacttagtcctctgatgaacaatttggcagtatctttttgcactaagctcccagaatcccttaattgaagttgactttggtgatgctcaagccactgcactgtaattttaaatttcttatgaacaaaaatctattaactaaaaggatagccaatgttytgaacaaatactgttgattcacatttattccaaatgattatttgtatcaccttgcatatgtctatcttaccttatttcttagatctcaaaatgtctactgggtatattttcttttatgttgttgttgtgctttttattattattatttcattcctttttgggaaacaggtagtgtttggttacatggataaattctttaggtatgatttctgagattttggtgcatccatcacccaagcagtgcacactgtacccagtgtgtagtcttaaatccctcagccccttcccacccttcctctcaagtccccag

SEQ ID NO: 359376 - DNA, 327 bp, Homo sapiens
gtgtgctttcacttccagaagctgtgattgtcttttctttatgatatctattactctggagactttttcatccatattttgttattttctaaaaatttctttaagttgtttttcacctttgtctggtgccccttgagtagcttaataatcaaccttctgaattctgtatctgcaattcagagagttcttcttggtttggatccactgctggagagctagtgtgatcttttggggttttatagatccttgttttgtcatattaccagaattactygtctggtttcttcttatttgggtagactgtttcagtggaatgttctggaactc

SEQ ID NO: 359377 - DNA, 300 bp, Homo sapiens
tattcatgttgcaggaaacgaattacatttccgatattaaagtcctgatatatatttaagagttgttacttacattacttcatcgaaatctttcctatagcaacattattttgaaaagggaaaaatgttttacttgaataatatcttgtacttcaatagtcaaaaaaygctacacatcccatactcttgaaaaaaacaaaacatcttaacttcaaacagcactaatataagttatgctttggcccaattgttgcttactggattgggtgaaaaaaatcttaatcttactcatattagaga

SEQ ID NO: 359378 - DNA, 545 bp, Homo sapiens
aagcagccacaatgagatacagaggaagatctttctagcagaagggaaagcaactgaaaagcctctaagttgagaacaaatctggagattttgagaaacatgaaagaaaaaagctggggcagttaagtcttaatgaaccaggggataaaggtgggggtgggatgatggagaagatgggggacaagcaggcasagtctgtggaccatgtgaaaagccaggttgatttaaagtgtaatggagcctgtaatcccagcactttgggaggctgaggtgggtggatacttgaggtcaggagttcaagaccagcctggccaacatggtggaaccctgtctctaccaaaaaaaatacaaaaattagccagtcgtgggggcatgtgcctgtaatctcagctattcaggaggctgaggcaggagaatcagttgaacctgggaggcagaggttacagtcagctgagatggcaccactgcaccccagcctgggcgacagagcaagaccctgcctaacaataaataaataagaataaactgtgaaggaaagctatgac

SEQ ID NO: 359379 - DNA, 570 bp, Homo sapiens
gttttttcgatgggcccaacatgttagcaactagaagaaaatactaataactcctaatatacacataaattccaaactgttttgctaaaagtccacaacgagtttctaaacatatacatctgcctttgtaaatagagacattcaacaaatagtcattgtgcactgacttatgtcttctcctcaccaaccacacctccccagggtctcatgatgactaagtaggacagarggaaggagtctacacactgtaagagctccatttcctcctccaaatctcaggagtcaaagatcagacatcaccatccactcctctcacgtaaacagaaagtcaaagaaacatttatgaagtgccttgctaacgtcaggcaatgactgtatctggcaatgaggatacaaagataagtaaggctaagttgctagtggaagcaaatctaatgctgactgctccagagacatatcacaaaggtttccagggagtcgagagaaggaaggcactctgccctctcatattccaatataagattacttccaaccttccttctgactcctttgtttacctgctgtataaaa

SEQ ID NO: 359380 - DNA, 596 bp, Homo sapiens
tgtggtttggctctgtgtctccacccaaatttcacgttgagttgtaatccccaggtgtcaaggaagggacctggtgagaggtgatcagatcatggaggcagttccctcaggctgttctcatgatagtgagtgagttctcacgagctctgacggtttaaaactgtgtgactttcttcactctctctcctgcggccatgtgagacgtgcctttcttccccttcaccttccactatgattctgaatttcctgaggccttcccagccatgcagaattgtgagtcaattaaacctcttgtctttataaattacccagtcttgagtagttatcacagtgtgaaaatagactaatacacatggccattgatattctgattctacagactatccatggaattgtcttgttaaactaaaatgtcccaacactaaagaatggctcctgtgccttcccctttgaggtgggaaaaaaaaargggttttcttcaggaccttctggtaaccttctacaaagatcaggtaacctttaaagggcatagcaatttgtcgtatcttgaagaaaaaatgtctccaaatcatggttttatttacgaagcagactat

SEQ ID NO: 359381 - DNA, 484 bp, Homo sapiens
cacaactttttttccacaaagtcttgcataagaatacactgtagggaagcagacttttaatgttctagttgagagaatccccagtaaagaaattaatccccatgatccagaagaggatcaaggtttgggtaaacaaaaagaaaattgccactgctgtcaggaaattttacagatgagaaattactgtaaaatacatcaagctcctaaataatgtaaatgtgttcttagtgatcggtttatggttgcatccacacttgggttttttggccacaaaatcacaattttattctcctggagttttctctgataggactatagctctaatttttaacaggaagccagtgaggagaaaatattattccaagtctaggactccttccttttatatacagttctattgttstatgtctactctagtaacacctatggccatgtattctggagtcataacgatcaaatattagttccttttattatataaagt

SEQ ID NO: 359382 - DNA, 577 bp, Homo sapiens
tgatctcaaactatactagaagaccacagtcaccaaaacagcatkataccagtataaaaataagcacatagaccaatggaacagaatagagaacccagaaataaacccaaatacttacaaccaactgaccttcaacaaagcaaacaaaaacataaagtggggaaaggacaccattttcaacaaatggtcctgaaataattggctagccatgtgtaagagaatgaaactggatcctcatctctcaccttatacaaaaatcaactcaagatggattaaggacttaaacctaagacaattctcaaaagaagatctacaaatggccaacacacatatgaaaaaaatgctcaacattactaatgatgagggaaatgcaaatcaaaaccatagtgtgataccaccttactcctgcaagaattgccataatcaggccaggcataatggctcacgcctgtaatctcagcactttgggaggccgaggcaggcagatcacgaggtcaagagatcgagaccatcctggctaacatggtgaaaccccatctctactaaaaaatacaaaaaattagccgggcatggtggc

SEQ ID NO: 359383 - DNA, 523 bp, Homo sapiens
tgcatgttaagtaaaaacttagaatgggctggacacagtggctcaagcctgtaatcccaacactttgggaggccgaggacggtggattacctgaggtcagcagttcgagttcagcctgaccaatatggtgaaaccttgtctctgctaaaaatacaaaaattagctgggtgtggtgccatgcacctgtagtcccagctgctcgggaagctgagacaggagaattgcttgaacctgggaagyggaggttgcagtgagctgagatcacaccactgcactccagcctgggtgacagagtgagactccttctcaaaataaataaataaataaatataaataaaaacttagaatggttatatccataagcattttctcccatgaactgggcaggcagcagaatgtgggcatttgaagcagcctgcccagatggcactgttacttctccagaagcacatggatcctccatggcttattgctaagtcagtgcaatcaatctgtcagttgatatctgccagatcagtctaat

SEQ ID NO: 359384 - DNA, 533 bp, Homo sapiens
agaaaaaatgaaagttaatgtcagagagaagcaggagagaacaaaatattgaacatgtagtctcgaaagttgaagttcaacagggattatgattaaagtcaaatccacaaagtgtgtgaatgtatagaaaatggagtttctcaacaaatcttgatttaatatactggctcattgggtcctaatccttcttttttaaaaatattttaatcaattcactcttctcaaacagtcactaaataactcatcatatctcaagtaattaaaaaaaatcaagagtctcaaatacaaatggtttaccaragaaaatttaattttacataatttgtattttcttaatgaaaaaaattcaatcaataggcagggagtggggaggacttctaagatgtggcagcttttaatctaacaatatgtgccctgggaaagcacataaccttctctaaactgtattttatgatttaggatcttaaaagtctactctgtagagaattgagagagtcctgtatggcccttatcatagtttgaaatcttatatt

SEQ ID NO: 359385 - DNA, 606 bp, Homo sapiens
tccaagttttgttaatgaactctaaaccaagtccggtaaattaaaatccaaagaagtctaactatttcaggatctttygaaaatctaatattcaaattcacaaaaatggaatacaatatgtatgttgtctcagcaataaaagttagtatgggacgtcaagccagggcattaattagaatgaaatattataggggtgagaatattctattcctacatggatataagtataatcataaaacttgagttattgcaaatgattttgtttctaaatggcaagagagggaatagattaatttagagaagcgttgatggtcattcaaagctaaatgtagtgacgatccatttagaaagcagactgagggtattataaatgtcaaattgccttagattcgagcaaagcagtattaaagcctaatatatcagaaagactgtgtgaaacaggtgaattttgagagtttgattgtaacaatgctgaaatatatctggatcagcaacctgaaagataggcaggctcatctgcaaatacagatacctgcaagtgacccacaaaataagcaaggcactacctttcctttaatcaaaactttcaaataaaaataataacat

SEQ ID NO: 359386 - DNA, 584 bp, Homo sapiens
gcagcaatatgttcacttgcatggttgtggtaatggtttcatggtgttcacatatgccagcgtctcaaattatatgctttaaatacatgctttttattgtatgtaaattattcctcaatagagctgctaaaaatcaacaacaaaagtaagaaaaagcttcaccaataatctagagactttagatgtcaggaaggctgacatggtgaactggataagaaaaaaaattcaatattcaaagagcatgatattcccttaagtaagaacacaagggggttattagaaacaacaatrtttgatcaaactgaagtaatgaagtctgctgtgagactgctgaaagagaactgccaatgatgaagcccccttaacacctcttcaaggtttttcttgctcttattcttccctttctttttgttttatttatttatgagttttaccttgtattaatattaaagttaaggaggaaaaagtggaacactttgtgactaatggattacaagatgcaaactgtaggaggcttccccactgctgataaagtaaagatgcccctgtggagaaagcaggggcctcactgggagcaagataat

SEQ ID NO: 359387 - DNA, 564 bp, Homo sapiens
tgtgctcaccacatacttttgtgttgtgttgacaacaataatacttactgtgaagttagccagaattatttgtgcatttatgtgtgtgtctgtcactaggaaaaaaggatatttttgtgctgcactgaaaattaaaaaatgagaaaaatctaattatttctctacctttcccacaaattacattgaaaaagaatgagcaaaagctacagtcrttatgtatacacattctaacccaaatatattaagcaaaacatcataatcaccattcctatgtaaggctaacatatgtaattttgtattttacaatataaaatggggctacgataaaactttctgatatctgcttaaaaggcacacttttcattaaaataagtgcccaaatttgtttctttatagttatttctgacttgtgaatcattagttataattttgttgttacaattttcctatttcattttgccatcaagcatcatgttcatcatcattaactgaggaatgggggcccacaggaaaaaaaaagatggagtcagaaatcaataatcctaataaaaatctgctcatgtt

SEQ ID NO: 359388 - DNA, 599 bp, Homo sapiens
ctccatacaataataaatacaataagcatatatttttcaaatttagtcatcaaaagactgatttagatttgatttacaaaaaaaaaaaatctagcattaaattgtccacaaaagacaaagaaaggttgatggaagagatggacaaaaaatacataagtattaaccaaatgaaatattaagtagcaatttaaatagtacagtaagcaatttcaggagaaaagatacataatttgttcataagaataatatattaataagatataatactagtaagtatacatacatgtgatatgtaactactaactgacagaaatgtggggagaaacatataatctttcattagaaattgtaatacatctttyagaaacgtatcaagtagaaaaaactaagccaatatgaaaagaatgtgaatgacaccagtaacaatctaaaatatatgtatatacagtaaaaactttatccaataaatcttactcattcctttcaagaatatatgaatattttatgtattagaccacaaaggacgtctcaaaaaagtctccaaagaatcaacctatgcaacctctaagtaaaattcaatacaattttaaattagtaat

SEQ ID NO: 359389 - DNA, 510 bp, Homo sapiens
cattaggattaagaaacatggttgctatccttgtacatctagataatactgaccaaccttataaggcattcttcccaaattatgacatccacatatccagggcatagggatgttcacacagtctgtaattgttggtattcacacccagagggttacaacccttttcctagcaagtataaaccccaagagttaatatggcacatcttactggagctttgatgtaactaaattttttttggggggtggtgaactaaaataagcatgaatgtataacagaacagaagwttcctttttttttttttttcggtacgaaacaagagtctttatgaagaactgcttcaggcaagagatccagggaaatttgtgattcttcactaccattactggctcttccatggaaaagcatgaaaagatctgcttgataggttgagaagaaaacaaaacatgttatagggtgaaaaagagtagttagtatatctgtgaagtaaacttattcctactcaatccact

SEQ ID NO: 359390 - DNA, 572 bp, Homo sapiens
actaggagttgaatgggaacatttatggattacctgtgtatccagggaggcacactctatgttatttactctcttaaaaaaaaaaaaaaacaaactgtaagaagagtaatgaaaagaaaacggataactcattgagttcccacactgcaaattacctactgtttctcgtttaattctcagtaaaatcctatatgtctcactagcaccatttaaacaacttaaattaaataaattattctgtgcagaacacttagtgggggctgaawttaaaaatcagatccccttgactaccatgacttcacagcttaggctgtttcacattcaccttatttcagaatcttcatttctacataaagacttgcatttattcataaagccaacattgtgttttgataactctggacatgtttataacaggtctgtatgtatttaatgagtgttctgaaatactatggcaataaattaaagatgaacatattcttctgaaatattcatggtaggcaaaacaaagagcaccaaatccagaaaaattgaatggcgatttttttttccaccttattgacaaatgcaag

SEQ ID NO: 359391 - DNA, 572 bp, Homo sapiens
actaggagttgaatgggaacatttatggattacctgtgtatccagggaggcacactctatgttatttactctcttaaaaaaaaaaaaaaacaaactgtaagaagagtaatgaaaagaaaacggataactcattgagttcccacactgcaaattacctactgtttctcgtttaattctcagtaaaatcctatatgtctcactagcaccatttaaacaacttaaattaaataaattattctgtgcagaacacttagtgggggctgaaattaaaaatcagatccccttgactaccatgacttcacagcttaggctgtttcacattcaccttatttcagaatcttcatttctacataaagacttgcatttattcataaagccaacattgtgttttgataactctggacatgtttatamcaggtctgtatgtatttaatgagtgttctgaaatactatggcaataaattaaagatgaacatattcttctgaaatattcatggtaggcaaaacaaagagcaccaaatccagaaaaattgaatggcgatttttttttccaccttattgacaaatgcaag

SEQ ID NO: 359392 - DNA, 519 bp, Homo sapiens
ttttggtgttaatgctgaggaattgcttgagtggttagttgttaccaatttctcttttgaacctttggagctaaggatgctgagtctagagaaatgctagtctcaagccctgttaagtccctctgtttctagcccgtagttcatagcatcagtgaactggagccacaacagcaaattctatcagctgtgtaccatacagcttgtgctgaaggcgaatttcttgagccattactcagtataaagcactgagttctatctttaggatttatctttaaragcaaatttctggtcagctgtgcttctgcaacctaaaatatttaaagggaggtaggtgtgggcaggaggaggaatgataaattgggccagggcaagaaaaatctagcttcatataatttgtctgggactatacaccctatataatgttagttttacagaagtaatatgacttttgattgctacataccacaaagagtttatgaactgagatcataaagggcaactgatgtgtgaagaaagtag

SEQ ID NO: 359393 - DNA, 524 bp, Homo sapiens
aagtgggctgcagagctttcgggtaacgcacagacctttgtgttatttgggggtggttttttccttattggtctttaataaaattaataatgaatatcatttagggcttcattgctttccctagttctatcaaatatatatrtatatatatatatatatatatatatatatatatgtataaaacatgttatttgattcaagccttgtgtatcttataactttgtgttgtcctttacttttatgaagctggctagagcccagtcccattgtgagacagtgatgttccttggctatccactgtgaccctgacagtggtctctcctccagcaatgggtcatgagggatgcctgcatctgtgcccatctgctgctgccactgccactctcatgtaatgcgaggtcggtgtgagctgcttctccagcctctacaatacacatcctgctcaagaggtagcagccatttgagagatgcatcccaggtggccgtcagccctggcatggcatggtgggatggatgcacatcgg

SEQ ID NO: 359394 - DNA, 524 bp, Homo sapiens
aagtgggctgcagagctttcgggtaacgcacagacctttgtgttatttgggggtggttttttccttattggtctttaataaaattaataatgaatatcatttagggcttcattgctttccctagttctatcaaatatatatatrtatatatatatatatatatatatatatatatgtataaaacatgttatttgattcaagccttgtgtatcttataactttgtgttgtcctttacttttatgaagctggctagagcccagtcccattgtgagacagtgatgttccttggctatccactgtgaccctgacagtggtctctcctccagcaatgggtcatgagggatgcctgcatctgtgcccatctgctgctgccactgccactctcatgtaatgcgaggtcggtgtgagctgcttctccagcctctacaatacacatcctgctcaagaggtagcagccatttgagagatgcatcccaggtggccgtcagccctggcatggcatggtgggatggatgcacatcgg

SEQ ID NO: 359395 - DNA, 553 bp, Homo sapiens
aattatgactattcggtttttaagttgctgaaraaacacatttctctcttgccacagccacctttctatatgaaaaactgcaagtgttattgcagttccctcccccaccctcaccctccatgtacctggtatctgggaacatgcccagaaccctttgaaaaaaggcgaacaggggaaggaatcatagcagaggggagagtagcttccaaatagaataggctgcatatgccagcagcagggaggctggtggaggaagggctgcctctggagagtgttaagaggggttgatggtctcttgactgtgtatttttttccatcatcaaaataacagcatattgagttggaagtcattaccttggtcctggattaatttcttcagcaaaactagctttactgactgtagaaatcagtttccaatttgtttatattagctgcttgtgcctaggctgcccgcttaaacctgattgctgcactgcaatctggtgctcccctagctgaagggtacatgtgaaagaggaggagaagcttttgcagctgtaactaatgggtagtt

SEQ ID NO: 359396 - DNA, 669 bp, Homo sapiens
actatagtttatgtcaattctatacctatggtgatactgacaaccttcagaatacctttttaaaaagtaataataacatatacacatcacttgcttttaaattatctgtacctttgagacgtactctgaagtcattttagggatgattcttccttttaataaaaagtacaaaagattctgaaattggaattcaggcatcagaatatcaacttattaaaaccatgattcacttgggttttttccatgtcataaggtttcaagttatttcaatatgagtggaacttgacagatatttgaaaaataattatgttttcattaggcatttgctcaatttcaaagactcattatatgcatattagatattagcactgtacttcaaataagtcaggtagatgaatcaattctttagatcagcagaagtcagaaaataaaagtacagtgaatctaactcaactatyaactttacgtactatgaaaatgaccttatcttcagaaaagcaacatccaatgaaacaatccacctacacacaaattaaaaacaacattgcctaaaatgcaaaaatatctaaaaattaaggaggtcatcatctaggtcttagccaactgtaatacagagttgaaacacgagagggcaacgaagattaaagaaaaaaaaaaatcacagttgga

SEQ ID NO: 359397 - DNA, 565 bp, Homo sapiens
agaatatcaacttattaaaaccatgattcacttgggttttttccatgtcataaggtttcaagttatttcaatatgagtggaacttgacagatatttgaaaaataattatgttttcattaggcatttgctcaatttcaaagactcattatatgcatattagatattagcactgtacttcaaataagtcaggtagatgaatcaattctttagatcagcagaagtcagaaaataaaagtacagtgaatctaactcaactattaactttacgtactatgaaaatgaccttatcttcagaaaagcaacatccaatgaaacaatccacctacacacaaattaaaaacaacattgcctaaaatgcaaaaatatctaaaaattaaggaggtcatcatctaggtcttagccaactgtaatacagagttgaaacacgagagggcaacgaagattaaagaaaaaaaaaaatcacagttggatcccataacctaaggttcttggaaatagttgcacatttttacccgaattataaacatctgstacgtgaacaaagatactgtgattattttagagt

SEQ ID NO: 359398 - DNA, 596 bp, Homo sapiens
tcaactattaactttacgtactatgaaaatgaccttatcttcagaaaagcaacatccaatgaaacaatccacctacacacaaattaaaaacaacattgcctaaaatgcaaaaatatctaaaaattaaggaggtcatcatctaggtcttagccaactgtaatacagagttgaaacacgagagggcaacgaagattaaagaaaaaaaaaaatcacagttggatcccataacctaaggttcttggaaatagttgcacatttttacccgaattataaacatctggtacgtgaacaaagatactgtgattattttagagtaaaattttagatagctgttccacgaaaaaggataagattatcaactaatatttcttgaccacaattctgtcagctttggaaaactgaatacttaccctgaaacactgaaggttgggtaagtatggagacaaataaataatcctgacatatttgtagttattagactgttcttcaccaaaatattagtgtgattcaatgtctaaatatgaagtataaagacgaaggaagtgtactgcaaagttgaaattcactytactagccatcaccaaaacccatgcaac

SEQ ID NO: 359399 - DNA, 661 bp, Homo sapiens
ggtcatttccacaaaatgctagctcaacagatacttgattgattgattaattgatgaacctctccatttctcagggagcctctaaacagttatcaacaagagtatgtttaattccagtctctgtctatatggtcttaggtgaggtgtttggcagtttgtcatctataaaataaagggatagcaccgaatagctcctaagttccttccagtgcaatttctgaatctcattagacaaaacaaaacccaaagacagcactacctctattcacgttagcaytgtactttttttggaggaaaggagtcagcagccttgtgggcccaaatgccacgagtggagccgtgatttggtggggagggggacagaaagtagatgaagcaaagaaaaaataaatggaagtgagtgacagatgagtagaatcactaaaatgccaccaggtgtcacaattgttactttgccacacattgttttccggtaccttttgctatgttcaggatccttttacaaaagcagcaatagccgggtatgtgggtatcccaattttcccatgacacccctgctagccgttctagaaccctggacttttacactaatctccctaatataacagtaataatgtaatacttggggtccccaatcatcacatggaacacagcagtggaa

SEQ ID NO: 359400 - DNA, 583 bp, Homo sapiens
cctaaatttatgttttaaatacctacaggtcagccttttcagctgaagtggactttcctacccactccccctccatacaaatcaaattagggagctttcttgtctttctcattctagagtgggaagacaagggaagatacagctaactcctttgctgtcaaagcatatgggatgagaatgacatcaatagcgcttttccaatcacgtggcaacaactgttcttgagtataaataatgcccagacccaagaaaccagtccaacatatacatcaccaagaaggaaatacatttaaaatattttaaaacacacatctatgattaggaggaagggccaactctttgcacacttttacattttgggtaaatcttgctttargaaagcaaaatatgtttatggaaacagaaactgtaaaagggcattccatagaaactgaatacatatttgagagtccctttaaactcttataattccttaccagcaaaactccctggagtattatctgatttacaagatatttaatttccacacaactctgaagacaccgttttacaaacaggtatacatggtgcctctgccaatagc

SEQ ID NO: 359401 - DNA, 560 bp, Homo sapiens
gcgttataggatgtttagtagcatccctagcctctaaccactagatgcctaccagtagcaccgctcccttcccccaagttgtaacaaccaaaaatgtctccagaaactgcaaatatctcattgggtgcaaaatcatacccttactagtctaaaaaaatctgaaagttccttccaacactcctgttcaatgacaaggttccatataccactgagccacaataatcacagaacatccaatgttccttcttcagcgagattccattaataagccaattccccatccacttaaaataatggytttaaatgtgaaaatgaacaagaaaaatttatttgtatgaatattcacatctcagacaataaatcttctaacagcatgctattatcttatcaggacataaggacatacaaaatgggatgtgtctttgaggggaaaaaaacaccagaggaatctgagaattagaaaacacagatcatggtctttgctatgcagttataccttagtgttctcttgttctctctacacaaatgagtatcaacctacacgttctcaatgcttgttt

SEQ ID NO: 359402 - DNA, 560 bp, Homo sapiens
gcgttataggatgtttagtagcatccctagcctctaaccactagatgcctaccagtagcaccgctcccttcccccaagttgtaacaaccaaaaatgtctccagaaactgcaaatatctcattgggtgcaaaatcatacccttactagtctaaaaaaatctgaaagttccttccaacactcctgttcaatgacaaggttccatataccactgagccacaataatcacagaacatccaatgttccttcttcagcgagattccattaataagccaattccccatccacttaaaataatggttttaaatgtgaaaatgaacaagaaaaatttatttgtatgaatattcacatctcagacaataaatcttctaacagcatgctattatcttatcaggacataaggacatacaaaatgggatgtgtstttgaggggaaaaaaacaccagaggaatctgagaattagaaaacacagatcatggtctttgctatgcagttataccttagtgttctcttgttctctctacacaaatgagtatcaacctacacgttctcaatgcttgttt

SEQ ID NO: 359403 - DNA, 360 bp, Homo sapiens
ggtcatgcttttaaaactaaaatcagattttagttttaggaacattagactacctccaccagatcctgcacagtattctaccttgatcatactacacagagttggagcagacagctagstgttgttcttgcctgccacgctaatttcaaatattttgctatgcctagtacatttctagcttctctgaataaccacccaattttaagtgtgccacaaacttgccttatcctgttttggggggcccaggggagacagggtcttccatagctcaggcttagagtgcagtggtgccatcacggctcattgtagcctcagcctcctgattagctgagactatgggtgtgcaccaccatgcccggc

SEQ ID NO: 359404 - DNA, 648 bp, Homo sapiens
gatgtggcttctgtgaaagaattgagataatacaggtaaaaaaaaaatcagttgtggacagttcaatagaaagtcctcaaacaatgttaagctattactaccacagggacttctgagcycacggacctacagttaagtgcatcatcccacttctgaattattaaataggtgacgtatattcaaagaaaaaaaccaaacaggagtagatcctgatgttgtttgcaggtggaagaaaagaatcaatgaaaatgtcatgatttgggggttctggcatagcctcatttgtcaaggatgctgataagaatctggaaaatttagaaatgcagaaacctgggcttgaactgagtgacatcaggtaagtgacctagtttttctaggtcttcattttccctgcatttgaccagggctgttgtgacactcagttgtaacatgtaaaataccagacacacagcaggtatcgctagcatatattattattaccattgtccaaacaagctcatctgcattttcagagactttcaatgtgctcaggatgaaaaaataaggcagtatttctcaggagggcacattccacaatcatgtgttactaggagttggactaaggtcgcttgttatgagaacacacgaggaaaacataaggaagtattc

SEQ ID NO: 359405 - DNA, 476 bp, Homo sapiens
ttcctcttggccactgcagttcggattggtctgtaatcagtcaggacccrtaagtctttttgccagtgcttctgtgagcaagcactcttctcctgtgggcctgaacctggaagaacgtgtggctggagctgctatagccatcttgctgttctaattggtgaggcctatccaagaatggggctcagacagtgaaaacagagctaagaggggagaaggaagaaatcaggttctggtgtcacttttttttttgagacagagtttcgctcttgttgtccaggctagagtgcaatggcacgatctcggctcactgcatcctctgcctcccgggttcaaatgattctcgtgcctcagcctcctgagtagttgagattacaggtgcctgccaccacgactggctaatttttgtatttttagtagaaatggggtctcaccatgttggccaggctggtctcaaactcctgacctcatgtgatctg

SEQ ID NO: 359406 - DNA, 552 bp, Homo sapiens
ttgatcaattattctataatacagagagcatcacagtctgtatcattttcaactgtaaaaaaatattagcactttgtataagtcgtctaatattgaaataagcaaagtataaagaaataaggtacattctaattttctcagaccttgtaaaatcagtaatttttgaggtaatttacatgactgtgtcttatgaaaataatttctaaatagtatacaaaccttccttgaatatttttgtaaaactaaacaaacagcaataattacataattaaggcattgatttggtgaaaataattgtaacataattttrtatgatagttataagaatataattattatactatcataactgaccttttcttactttattatcaaatattttagggtcagacgtgatggcttacatgtgttaacctagtgctctgagaggcttagttgggaggatcactggaggccaggggtttgagaccagcctgggctacatagtgagactctgtctcaacacaaaatgaaaagttttatttctcaaatgtcaaataatttaaaaattcc

SEQ ID NO: 359407 - DNA, 604 bp, Homo sapiens
tgttgtacctctaatattattaaaaattgatgaatattttacttaaagtcaaatgaattacttttccagataaagaagtttatgttagatgatctcctatgggccaagtgttatactgaggaatgatgtaagttttatctcagatggccatgaggttggccctgatcccagctcacctaggaattccaaatcttccagctgattttagcagcattcatatgtaatttccctaactgagctccaaagacatttcaaggttgtttcctgaatttaaagtcctctgtttcctcgaaaggagttctcttcacagtatattcatctttgctgccacaattaaaccactcttttaaataactatgggagctaaaataattctgtgctctttgatctttctctgctcagacattctcaatctgataattactattttgttttgtttacatggagataactgtataccttggacaatatgcaataaaacytaaagaacacagtacttcttacctggaatgattgcaaggagaaaaactgcaaagataggattatggaggtggttatttaacctgattgggagactggttgtatataggaacagtgggggaaa

SEQ ID NO: 359408 - DNA, 504 bp, Homo sapiens
cctgttctttggcagaatttactcagttccctaaaatctaatgtttaataaggaagcaaaagcatgtattaattaaaaaaaaaactattttgcctttgtatgctgaagtttattagattctcaacttttaatgctaagtctagctcaaacccttcaaactcagaaagacaagagctcatgactttctcaaatgtcatgatctcatttcatgagcattggctgcawaccatcgttaacttctggtgccaatttctacaacagtcaaggttcatagttagacaactcactatagtttgtttaatatggatcacatctgttacaaaatataatttaactaacaggattgttgagaggaaaaaagcttggcacctagtcagaaagaaacaacactggtattctgggatgctatcagccatgaccctataggtgcttccctagggcacagccactgaagttcaccttgtcatctctggccattgtatccaccgtcactgtcactgccac

SEQ ID NO: 359409 - DNA, 597 bp, Homo sapiens
aagaaaagatagtccattggtggaaatgtaaagatctctctcttgtgtatatgtaaaaaaaagtccagtttgctaaaaataaaagaaatgtaaattaaaattataccacaaaactattttttactgaggaaattatcaaaaagtccaaaaatttactgattatatggcaaggctgaagaaaaacaggcactcttatatgttgttagtgtgaattgcaaaatagtacaactcttacaaaggagttgtaacacttgaaccaaaaaaaacttatcctaaagatgcatttgtaaaattataaaaatcatacacatgtgttcagtattttcagcacttcttgtaataatatgattttataaataacataattaattgtcagttattagggtaccaattaaatacattatgtaaaatctctaatagtatactaggcagcttwaaaaatttaaagagaaatatcaaaaggcacaaacatggagtgatctctggagtttagtattaaatgtgaaaacaaagagtggtgaaacttttgtttataatgctagtattaaacaagaaaatcttcagtctttatttgcaatataaggtagcacaaaacat

SEQ ID NO: 359410 - DNA, 597 bp, Homo sapiens
aagaaaagatagtccattggtggaaatgtaaagatctctctcttgtgtatatgtaaaaaaaagtccagtttgctaaaaataaaagaaatgtaaattaaaattataccacaaaactattttttactgaggaaattatcaaaaagtccaaaaatttactgattatatggcaaggctgaagaaaaacaggcactcttatatgttgttagtgtgaattgcaaaatagtacaactcttacaaaggagttgtaacacttgaaccaaaaaaaacttatcctaaagatgcatttgtaaaattataaaaatcatacacatgtgttcagtattttcagcacttcttgtaataatatgattttataaataacataattaattgtcagttattagggtaccaattaaatacattatgtaaaatctctaatagtatactaggcagcttaaaaaatttaaagagaaatatcaaaaggcacaaacatggagtgatctctggagtttagtattaaatgtgaaaacaaagagtggtraaacttttgtttataatgctagtattaaacaagaaaatcttcagtctttatttgcaatataaggtagcacaaaacat

SEQ ID NO: 359411 - DNA, 531 bp, Homo sapiens
ctctctgctttaataattgaagtcatcagtgtatgaaaatgtgtgttttgcaaacactgatccattgaccaagctgtrtgttggtacactaattaatagtatctatattaaaatgctttcataaaaaaggtggtgctataatataaaataacagagttacagcacattatttgcaatgtaaatatataaactagtggaatctataaataactttaaatatatagtgagctgtatttattgcaatagaaaattttaagcaaggcaatcacctgtcacctttttccgcctaaggatttgtttggtgcaaaagatgccatttaaatcattctcctgaatcaataaattttaacaagacagagtacttttctgtatgttttatactatgttagcaaggtcatgagaaaggtcaatcaaagttagagaaggctttgaagaaaatatatgaatatatgagttgacttgtttctataagtcattttctaaacaggtaagttatagaatttcatagacaatgagaaaaatgaataataa

SEQ ID NO: 359412 - DNA, 562 bp, Homo sapiens
gcaggcatgtcacatggccagagcaggagcaagtgagaaagagtgggagcgcatggtaacacacattttaaaatgaccagatctcaccagaactcgctgtcatgaagacagcaccaacccacaaggatttgcttctgtgtttcaaacacctcccaccagaacccagctccagcattggagattacaattaaacatgagatttgggtgaagacaaatattgaagccatatcacaatgtctacttcccacttataagtgagaatatgtagtatttgatattctgttcttgtgataatttgcttaggataatgkcctccagccgcatctacgttgctgcaaaggacatgactttactgtttttaatggctgcatagtatacatgttccacggtttacatgtaccacattttctttaatcaatccaccatttataaggacccagattgattccacatttttgctatcgtgaatagcactgcaacgaacgtacacatgcatgtgttttttggcagaataatttattttcctcctggtatatgcccatttattggtttgttgggttga

SEQ ID NO: 359413 - DNA, 569 bp, Homo sapiens
agtatctttataacagtgtgagaacagactaatacaacaagttaactagtgccaaaagactaaaacttgataatttgcaattagtataatttagttctaaatagctgagatttttcacatattccttactctgcccacaggaaatgaccaaattaaactattatttataatttctaagaaattataaatttttgatcattgttgatttacagtctgttttttcctgaaattagaatgacaaccatggcttttttctgctttttatktgtttggtacatttttctccattcctttactttgagcccatgggtgtcatggcatgtaagatgggtcttttgaagacagccatcctacggccatgtaatcttcaacaaagctgataaaaacaagaaatgggaaaggactacctattcaataaatagtgcagggataactggctattcatatggagaagagtgaaacttgaccccttccttttactgtatataaaaatcaattcaaggtggattaaaaacctaaaactataaaactacttgaagaaaacatagaggatatcatttcagacatag

SEQ ID NO: 359414 - DNA, 569 bp, Homo sapiens
agtatctttataacagtgtgagaacagactaatacaacaagttaactagtgccaaaagactaaaacttgataatttgcaattagtataatttagttctaaatagctgagatttttcacatattccttactctgcccacaggaaatgaccaaattaaactattatttataatttctaagaaattataaatttttgatcattgttgatttacagtctgttttttcctgaaattagaatgacaaccatggcttttttctgctttttatgtgtttggtacatttttctccattcctttactttgagcccatgggtgtcatggcatgtaagatgggtcttttgaagacagccatcctayggccatgtaatcttcaacaaagctgataaaaacaagaaatgggaaaggactacctattcaataaatagtgcagggataactggctattcatatggagaagagtgaaacttgaccccttccttttactgtatataaaaatcaattcaaggtggattaaaaacctaaaactataaaactacttgaagaaaacatagaggatatcatttcagacatag

SEQ ID NO: 359415 - DNA, 551 bp, Homo sapiens
agtgagacacatccaaactgaccagaaacaatgtgtgaagagactccgatgccttgcaaggaaccttttacttgtttcagtataaattgaacaatgagaacacttggacacagtgtgaggaacatcacacacaggggcctgtcgtggggtgggggaagcgggacggatagcattaggagaaatacctagtgtaaatgatgagttaatgggtgcagcacatcaacatggcacatgtatacatatgtaacaaacctgcatgttgtgcacatgtaccctagaacttaaagtataatttaaaaaagacaccatacaacttcttcatttttttttacagttcagttactttaaaatttaaaattactctttttatmatgaattataacacatatgggtacattttatgaatcataaagatatagctcaatgaattgtcagtcccatgtaactatttccctggtcaacggttagaataatactgacaatccaggaaattcaccattaatcctcttcaattctcaaagttaaccataatccttactttgaaagctaaa

SEQ ID NO: 359416 - DNA, 500 bp, Homo sapiens
ctcactgcagcctcaactgcctaggctcaagcaattccctcacctcaacctcccaagtagctggaacaacagacatgtgccaccatgcccagctaattaaaacaacaaaaaaaagtatttgtagagatgaggtcatgctgtgttgcccwggctggtcttgagctcctgggctcaaaggatcctcctgcctctgcctcccaaagtgatgggattacaggcatgagtcactgcacccaacttctttctgaatatttttgatctgtggttggttgaatcaacacatgtggaactcacagatatgaaaggttgatgtgcaaagaaatatttacagataaatgcatatacacaggttagtatacacatacattttcttcctctgacagctgagaaggtctagaagcaaccacatccctgtagcaatgagcacacttagtgcctagatcttgtttctaataccaatctccagtaaaagtaaccagagacccttagagaaatggcag

SEQ ID NO: 359417 - DNA, 622 bp, Homo sapiens
taactagcaattacaatattacttttatggtgtgtggcagtaaggactttaaaaaaatgtaacaagacagtttcactagcaacaaatagatatgcaactcaatgtaaaagctgctctgcatacccattaaaatgagcaaataacataaaacccactcttagtatggctttcaggagacatgcctgctggtggcactttaacatgattcaattttcygaagtacaagttggtaaatgtaacaaaagctataaaactgcagctgggaaaatagccaagaaataaaagaacctcgtaattatttttacaagatatctatatcttcttgctgctattgtaatttgagaaaaaaagatatatcagtactacagtatttgtaatagtgagaaatgactcaacgtcaaagattaaagaaatagctaaacaaactacaatatattaatcatggtagaccttctggctataaaaaatgtaaaaaaggaaaattattttaatatatgggatatgctgttaaataaaatagaagctaaaataaaatatgcatgctgattagacttatgcaatcaaaagttaaaagggaatatatgggattggaaatggttaaaatctattgctcgttaggtta

SEQ ID NO: 359418 - DNA, 622 bp, Homo sapiens
taactagcaattacaatattacttttatggtgtgtggcagtaaggactttaaaaaaatgtaacaagacagtttcactagcaacaaatagatatgcaactcaatgtaaaagctgctctgcatacccattaaaatgagcaaataacataaaacccactcttagtatggctttcaggagacatgcctgctggtggcactttaacatgattcaattttctgaagtacaagttggtaaatgtaacaaaagctataaaactgcagctgggaaaatagccaagaaataaaagaacctcgtaattatttttacaagatatctatatcttcttgctgctattgtaatttgagaaaaaaagatatatcagtactacagtatttgtaatagtgagaaatgactcaacgtcaaagattaaagaaatagctaaacaaactacaatatattaatcatggtagaccttctggctataaaaaatktaaaaaaggaaaattattttaatatatgggatatgctgttaaataaaatagaagctaaaataaaatatgcatgctgattagacttatgcaatcaaaagttaaaagggaatatatgggattggaaatggttaaaatctattgctcgttaggtta

SEQ ID NO: 359419 - DNA, 536 bp, Homo sapiens
tcatcttcagacaatactttaactaaaagatctgtatgaccaggaaaaaaatgtatattttagatttctatgtttccttccctagccttatgttaaataaagtagttctaatatagtctctccttagcattaagaagagtaaaagtactggtagatctagccccttttatggtgcaatcaagcatagtaaacattcctaaatcataactggcccacacctgtctcagtgtctcctttgccccataaacaaacagaaaagctacaggtgagagatggttggtcacagstgcgagttccctcttgtcttcctgctatgggtgggaacagggaaccagtttcctggaggaggagccacctgcctgaaaagtcatgcacccagaacactgggcaaagaaactggttaaaaacaaaagaaaatttatggcttcaagtcaaatgaatgctaataataatttttaaaataatttaaaacttaactcatttaggaccttgcccatagactgcagagaagggaaatggcattgaagcaaaagcgt

SEQ ID NO: 359420 - DNA, 415 bp, Homo sapiens
gaactcacgtggaagttactgtgccaggcctcgcttacctgtgcttatcttgaactttgggtttatgcataatttaaaacacttaaacattatttctgtgcaatatttatcattgagctttattgaataccagcagtgctgtagagtcatgggacctttaaaaggtcaaaagaaagctgaggatcattttagtctagtctcctcagaaagcttagctcctgagagaagtagcttgatttgagctcatatsaagtggcccagtgcttcctgtcatttaccacacttgccagaacgactgattcactgagttaaaacttggcattgctaagtcattcttacctagcttttaaaatgacagattcttatgacctctttgagagcagagatatgcctaagtctgcttgcttggcattgt

SEQ ID NO: 359421 - DNA, 659 bp, Homo sapiens
tatatatatatatagagagagagagagagagattgatgggctgtttcactttttttatatatatattcattatattgaatataatattgaacatgaatattatatggctataaatatataaaatatgagtacatagtatgtacatttaatttaatatagtacatacatttaatttaatacataattaaatgtatgtatacatttaaaatatcccaacctggcattatttagtcttaaagaagtctcatcttcttacttaaaattaaataagatatatatakagagagagagagagagagaaagagagaaagaaagagagattgatgggttgtttcactttttttatatatattcattatattgaatataatattgaacatgaatattatatggctataaatatataaaatatgaatatatagtacatacatttaatttaatatataattaaatgtatgtatacatttaaaatctataattaaatgtatgtatacatttaaaatatataacatgtatatatgtgttaatatatattaaacatatgtgcaagtcacagtcaaatctgttgcatgcacaaaattatgaaaaatattatataaaattacttttgggctatgtgtataggaaacataaatgaaatttgtctatatgtatatcag

SEQ ID NO: 359422 - DNA, 521 bp, Homo sapiens
tgtgtcctgatagtagtgtataaggtaacactataaagaaaaacaagaaaagagtttaaggcaaattcaggatagtgtttacctccagtacagagggagagtgatgccatctcacaggataccatggggcttcaaagcttttgttaatgtgttgttttttgggctgggtgttgggtatgtgagtgtttgttctattttctttacatggtaaggacatgttgtaaaagattatgaggtatctacttatatacttaaagaaacctctggtttttagtacttgaggaaacagtaaatactrtattttgtattcaacattttctgcttttttttggcttgtatctcttgcatctttctaggaccagttttttaaaataccccttttgatacctggctcacccatcagaattatttttcacttcctatacttgtgttaacataagatccaaggcttgtgattccctaattgctgcatgaatacacagaactggagacttgcaagctcaactttgggactagagtga

SEQ ID NO: 359423 - DNA, 552 bp, Homo sapiens
gcagttattgttttaagtttaacattgctgaaggcacatactaggtgtatgtgccaatcccctgggcttgcagtattgtttgcttgggcttggagttcagcattatctttaatctatggtttctttgtaagaaatgatttcagtatatattataactttattgctatttgtatgcttgttaagtggatttacagattatattatctacttttaactaaattaatcttcaccaaggaggcaaatgattcatgaatagggagaaaaactaggttgtagcttgctatggtttgaatgtttgtatccccccaaaattcacattctgtaacctaatcaccaatgggatggaattaggaggtcatgggggcagagccctcatgaatggaatttatgcactcggagaacccagagaactaccttgccccttctatcatgtaaagacatagctagaagacamcatctatgaaccaaaaaatgggtcctcagcagtcactgaatctgctggcattttaatcttggactttccagtctccagagctgtgagaattaaatttc

SEQ ID NO: 359424 - DNA, 690 bp, Homo sapiens
aaaaataattttatgccacacaagaacctaactaaaccaaaaaattattattattatttttggaataaaatgggagttygggacaataaaatacatattatcttgagaagtgatcattacattggataaaaatctattaaagaaccaatgagtactgtgatgtactcgttcccctccagaactgaaggatttatttccccacctgttggaaggctgctggttgacaggtacaagcttgagagagccgccttgcccaaggtcagacctggcgggggtgggtaggcagctagcagccactgaatgttcggtcagtgtggaagtataaaaaccagaccctctccctcccttaccccttgccacaatgtaagacaaatgttggggtttggatctctgtccccaccaaatctcatatcaaattgtaatccccggctgggcacagtgactcatgcctataatccagcactttgggaggccaaggccagtggatcactgaggtcaggagttcaagaccagcctggccaccatggtgaaactccatttctactaaaaatatgaaaattagccaggtgtggtggtgggtgcctgcaatcccagctactcaggaggctgaggcaggagaatcgcttgaactgggaggcagaggttgcagtgagccgagatcacgccattgcactccagcctgggcaacac

SEQ ID NO: 359425 - DNA, 574 bp, Homo sapiens
tctggtttaaagcaaagaagttgaaattaatttcagcctagatatgatgagtgttaatcrgaatattaatttagattagatgctgcatgctttgatcacttctacaatgattctctccctccttttttcttctacttgtcctgcaagactttgattaccttctggggtcatgttagggctctgaaattgactacttttccatattgggaatttaagtattgtcattttttaatttgccctatttttgtcattttcaattgtccctattttatttctggttctctgcttttaggattctttccaaagcctacaaactaaaaatatgccaaacccatcaggtgcttcccccagtgtattggttatctattgctgtataataaattaccctaaaatgtagcagcttcaagcaatagacatttaatatcagtggtccagggacctgggaatggctcagctgggtcctgtgctttaggatctctcacaaggccacagtcaaagtgtctggtgggtcagtggtctcatctgaaggcttaactggggaaagatccactcgtggttatgggcaggattcggt

SEQ ID NO: 359426 - DNA, 574 bp, Homo sapiens
tctggtttaaagcaaagaagttgaaattaatttcagcctagatatgatgagtgttaatcagaatattaatttagattagrtgctgcatgctttgatcacttctacaatgattctctccctccttttttcttctacttgtcctgcaagactttgattaccttctggggtcatgttagggctctgaaattgactacttttccatattgggaatttaagtattgtcattttttaatttgccctatttttgtcattttcaattgtccctattttatttctggttctctgcttttaggattctttccaaagcctacaaactaaaaatatgccaaacccatcaggtgcttcccccagtgtattggttatctattgctgtataataaattaccctaaaatgtagcagcttcaagcaatagacatttaatatcagtggtccagggacctgggaatggctcagctgggtcctgtgctttaggatctctcacaaggccacagtcaaagtgtctggtgggtcagtggtctcatctgaaggcttaactggggaaagatccactcgtggttatgggcaggattcggt

SEQ ID NO: 359427 - DNA, 574 bp, Homo sapiens
tctggtttaaagcaaagaagttgaaattaatttcagcctagatatgatgagtgttaatcagaatattaatttagattagatgctgcatgctttgatcacttctacaatgattctctccctccttttttcttctacttgtcctgcaagactttgattaccttctggggtcatgttagggctctgaaattgactacttttccatattgggaatttaagtattgtcattttttaatttgccctatttttgtcattttcaattgtcccyattttatttctggttctctgcttttaggattctttccaaagcctacaaactaaaaatatgccaaacccatcaggtgcttcccccagtgtattggttatctattgctgtataataaattaccctaaaatgtagcagcttcaagcaatagacatttaatatcagtggtccagggacctgggaatggctcagctgggtcctgtgctttaggatctctcacaaggccacagtcaaagtgtctggtgggtcagtggtctcatctgaaggcttaactggggaaagatccactcgtggttatgggcaggattcggt

SEQ ID NO: 359428 - DNA, 621 bp, Homo sapiens
gtctgttctttcatggcacttatattttattaggaggaaacaagactggtataaacaatattagtctgtgatgtgatatgtagaaaattcagatagtgttgtgagaactagggctrctctgaatcaaatgatcaggcgaggcctcagctgacacttaaactggaagtgaagtgggattcctccagcagcacatttagaaaccagggttgacgctcacagtagggctgacctacatcaagtgacattagccaaagctcagacacctctggcttcagtgttgctgtagcagaaatcaagataaacattttccctgtctgtataattgctaaggtcatcaaatgtgacatacaggatttgttcactgtctcagtacttgttacaatcagggagaatttttatatcttgagaaactcttgccatgtttaagtggagtttctacgaaatgaaattcccagatgcccttcaaatcagtaaagaaaaccttcagctttaattttcaggtaagtgctttttgactatgaaatacttagtgcagtgcctcaaaggtggtttcaaactttgggttctacacacaggaaaagtacctgtatccttctctattccagttgacttaacaggaat

SEQ ID NO: 359429 - DNA, 645 bp, Homo sapiens
tgcttgcctgaccatgagtgcctggcatatttttaacagttaaaagaattagccattgttgaattgacaaacttaagtgaagttattcttatgyggggagagggtcactataacttacctataaacatctgttataatgctaaggacattctttggaaagcattgtagcagggtagcttccttcagtaataacatgggtattagcaacctacatttgtttgcttttatcagcacaactgaaaaaatgctgtgtgtctagttctatactaaagaatatgaaaaagactgttcttgaatttgtaatctaataaaagggcctaatgtacataggtcacttttataacccagttgtttaaaacaagttacatttcttaaaaggatttgaaatttaaatcggctccatgagaaatgtgaaacttggaaattcttgaatggtttagctattgtaaaaatttttaagactgattcctttacattgaaatatgagttatgttaccattttagtcacttttttcctcctacctagaaaatattttaaaaatactaaggattttggttaaaaggttgcctcagtaattatagacatagcttacaaagggcaagtatttacccagatgttataatttataagctaaggcttgaaat

SEQ ID NO: 359430 - DNA, 520 bp, Homo sapiens
attattatttttgagatggggtcttacatgttgcacaggttggtgtgatcatggctcactgcagcctcaaccttgcaggctcaagtgatcctcccacctcagcctcctgagtagctgggtccacaggcacacacgagcatgccaggctaatttttctttcttctttttttttttttttttttttttttttagttttaatagagacaaagtctcactatgttgcctaggctggtctcaaactcctgggcttgaactatcctcccacctaagcctcccaaagtgctgggactacaggcatgagcttctgcacctggcctgtacttctttgtagtacattttatatttcttgtaattcacttactctttctaactccagattataagtatttatttacacatstatatttgtcattatacttaaacttcctgaaaatagagactgtggtttactcatttgtatgctcctcagatcctaagtgtttaattaaaatcttaattaatgaaatgaaatgaaacgtac

SEQ ID NO: 359431 - DNA, 403 bp, Homo sapiens
gggtaagtggaaatgctgtctgtgtgtttgtgtgtcacacgtgattgtggatgttagttccaagagacctttatggctctgctcagggaacacaactgctttttcccacaggtcttttggccccactgtctcctgtctcctgtgtagaygccagcacttacccagggctctgtaattgttgatctatttgtctatcaaccctaatagggtacaagctgctgatgtgcaggaccagtgtcttagaaatctttgtattccatgtgcttggccattgtgacctctctataataataaatctatggaataataaatctatgagctcccaagtagaagagagggtggaaccagaggagggagagtaaggaactgagtttgctccagagtccagactaagcggcagcct

SEQ ID NO: 359432 - DNA, 587 bp, Homo sapiens
caccaatatattatgtaatggtcttatggtcacttgtgttcaggtacttcctaaaagtccttatattcaaataggaaagggcttcagctcaatgttacttactgatagagatttttcacagactgttcagtgctagtcaagctgaaatatggtccttctgacttcagatcatcagcctcccctcggcagaagcccacccgagctggaagctgaagctggacattgtaagactctttggggcgggttccaaggaactgcaggccgttggcaggataaagaaagagggcgtagctatcagacccatcagatgccaaaactgcctggaaagtgttcagctgtgaggaaaaaaaaaaaaaaaragagagagagagagagaaacatcctgtaaaaaacaaataaaagaagaaagaaacagaatgcaagcaaagcatcataacgtgcaaagaacttcccctttttcaggattcctccaaattgtttttaaacataaccttctttaaaatttcctcttcaagttaacaatataatttcataagcaatattatttattattgcaaataccatttgtcaatttagattaatagttg

SEQ ID NO: 359433 - DNA, 589 bp, Homo sapiens
gccgttggcaggataaagaaagagggcgtagctatcagacccatcagatgccaaaactgcctggaaagtgttcagctgtgaggaaaaaaaaaaaaaaagagagagagagagagagaaacatcctgtaaaaaacaaataaaagaagaaagaaacagaatgcaagcaaagcatcataacgtgcaaagaayttcccctttttcaggattcctccaaattgtttttaaacataaccttctttaaaatttcctcttcaagttaacaatataatttcataagcaatattatttattattgcaaataccatttgtcaatttagattaatagttgaaatacgcattggtaaaacataggttaaaaaatatatactttgtaaggtttcaaacttctctcatgtaaactctttcagagctaagagcaatcagcaaaattaacttgtccatcctgcagtcactgccctagtttataaccctaggcactcagcatctctcatttgcatcattcattcattcattcattcatccatttattaaatgaccactatgggcaggcactgtgttaggcactagttggtcaaaaggcctccttactg

SEQ ID NO: 359434 - DNA, 589 bp, Homo sapiens
gccgttggcaggataaagaaagagggcgtagctatcagacccatcagatgccaaaactgcctggaaagtgttcagctgtgaggaaaaaaaaaaaaaaagagagagagagagagagaaacatcctgtaaaaaacaaataaaagaagaaagaaacagaatgcaagcaaagcatcataacgtgcaaagaacktcccctttttcaggattcctccaaattgtttttaaacataaccttctttaaaatttcctcttcaagttaacaatataatttcataagcaatattatttattattgcaaataccatttgtcaatttagattaatagttgaaatacgcattggtaaaacataggttaaaaaatatatactttgtaaggtttcaaacttctctcatgtaaactctttcagagctaagagcaatcagcaaaattaacttgtccatcctgcagtcactgccctagtttataaccctaggcactcagcatctctcatttgcatcattcattcattcattcattcatccatttattaaatgaccactatgggcaggcactgtgttaggcactagttggtcaaaaggcctccttactg

SEQ ID NO: 359435 - DNA, 558 bp, Homo sapiens
ctgtgaagggcagtttactggttcatagataaggatggcagctttggattgagaaacttctattttgtcatattacacctctgctacattatgagggagaggatgcatttcagtgtaataattatgactaacttataatgtgttttgcttcttgtaaactgttactgccctaaataggatgaatggaacaaagagcataaatgaattcacaaaagacacctaagctgctctgaggatatgggagggacttaaagaggcagcaaggaaacaaatcgaatttggggtaaatggaaaattagggaggggaaatgggtaaatatgatacgttagaagccatccgttctcttttataaagtgactttttatttaaaagaagaaacaaaagtcttcctytgaatttcagcccagcccttaaacgatttccccacaacagaaaattgatatttttctaaaatattttgtgactaaatgctatttggaaaaaaaagtggtatttctttaaattagtgctttgaaaggaacacatacttagcctgaatcacttttgcctacatatgt

SEQ ID NO: 359436 - DNA, 628 bp, Homo sapiens
ttaaatatctttgcttttaaggacctcatggggggcctgggagagaaaacagactgtctgggaaattttaagctcttgataataaaaatggtaataaaatctcctccagctcctgaggcttcgcagaggggatgtttatggtggatggggttccccttctcctgcgcagctggtttcgaggttgtgcggtttccagtcctgcggagcagctcaggttaccgcctccgtggccgcgggggagggcatctccgacggccgcagcaatgggcaagagatcagggtcttcccatccccgcgactcgcccctttctgcctggtaaccaagcgggatgcctcatcctactccccaaacggagcggatcacacacagtagtrtttcatggtctttcctgctgcggttttcccgggggaaggtacttccagagggtggccaagtcttccctagcggccggccttcgggagggggacagaacttaggagtcagccctctgccttcgtacaaaggctcgcttctcctcagggcgtctctgggtggagcgaagcggccgaggggaccacgacaatgtccctttgcttttcggaccgatggccaggcctccagagccaggagcgcccgggaccccagggc

SEQ ID NO: 359437 - DNA, 584 bp, Homo sapiens
tggcaaacagtaatctaatttgcttgaaggactgagttctacatggcgttcttaaaktttggcttactaactttatattgcaaagttactggaaactggaagattcaaagcaatggcatctttgccattaaaaacaattgcagttggtgccctttttctccatggatattcctgtcaggtgtgaccagatgttgcacctgatattgcaggaatgtcaaggtgtaattgtatctgaaaaaaaaatgtgaacaaatagtgtttgtcaattcagttaatctgagatttcttgaactctcataggtagttcacagagcaaaaaagttatggtgtagacctttgaaatacttattgatgggagacatagaggactaatgtttagctgtgctttttgtggggaaagaggagtgttttgtttttgtcattttagggatggggttagagacagctgagttatatagatctctgtaatgtggggaatgttttgtttatctggaatttaagtcaggttgaaagggctaaaaagaatggatattgagaatgaggtatcaagagagattgttctgagcaaaaacatgacccaggag

SEQ ID NO: 359438 - DNA, 586 bp, Homo sapiens
aaatccacatgaacatgatgagtacccacccaaatgaaggaaaatcttttgttcttatacaattyagtgaagtttttattatcttattaggcatggactgttattcctcattgactgacttttgaggaaattccattgcttgggagaatgtgagcatagtgttttgtacaaatatcagaggagtatacaaactggcatattcaacctaaccagactcttgttcactcaagttttcccatatttttagaaatcatatgtagttgttctctttagggtataccattgactctaaaataatgggttattgggatatttggaaactcaatggagttcatgttcttttctcatggagaaaacgagagagctgtttccagaagtctttaaaagacttctaagctactttcttatttgctccttaactttttcagtgcaaaaacaaattttttaggttttggcatttgtatttatttgaatttttttacattgactcaccattctttgtggattagggaattaatcagttcaagtgaataaacaatgaaatgtctttaatattctgtagagtaatgataattcagatgcttat

SEQ ID NO: 359439 - DNA, 551 bp, Homo sapiens
aactgaacctgatcttaatagcctttcaggttttytgtttttttgagacagggtctcactctgccacacaggctggggtgcagtggttgcaaccaaagcccactgtaacctggaactgctgggctcaagtgaccctcctgcctcagcctactgagtagctagaagcacaggcatgtggcaccatgcctggctaagttttttagaaaagggttttgtagaggcagggtctcactatgttgcctagactggtctcaaactcctgggcttaagtcatcctcctactttggccttgcaaagtgctgggattataagtgtgagccaccatgcccagctgtctttccgttttaaaataagttgttcaccttctaggaaggtgggtgaatggacacttttgttacatttgttacaatgactgtttcctttttatttagactaagcaacctggggatccctggagtgtgggctttccatatcggcagcacttccccgttggacaatgtcaggccagctgcagttggagacctttccgctgcccactcttctgttcccct

SEQ ID NO: 359440 - DNA, 551 bp, Homo sapiens
aactgaacctgatcttaatagcctttcaggttttttgtttttttgagacagggtctcactctgccacacaggctggggtgcagtggttgcaaccaaagcccactgtaacctggaactgctgggctcaagtgaccctcctgcctcagccwactgagtagctagaagcacaggcatgtggcaccatgcctggctaagttttttagaaaagggttttgtagaggcagggtctcactatgttgcctagactggtctcaaactcctgggcttaagtcatcctcctactttggccttgcaaagtgctgggattataagtgtgagccaccatgcccagctgtctttccgttttaaaataagttgttcaccttctaggaaggtgggtgaatggacacttttgttacatttgttacaatgactgtttcctttttatttagactaagcaacctggggatccctggagtgtgggctttccatatcggcagcacttccccgttggacaatgtcaggccagctgcagttggagacctttccgctgcccactcttctgttcccct

SEQ ID NO: 359441 - DNA, 551 bp, Homo sapiens
aactgaacctgatcttaatagcctttcaggttttttgtttttttgagacagggtctcactctgccacacaggctggggtgcagtggttgcaaccaaagcccactgtaacctggaactgctgggctcaagtgaccctcctgcctcagcctactgagtagctagaagcacaggcatgtggcaccatgcctggctaagttttttagaaaagggttttgtagaggcagggtstcactatgttgcctagactggtctcaaactcctgggcttaagtcatcctcctactttggccttgcaaagtgctgggattataagtgtgagccaccatgcccagctgtctttccgttttaaaataagttgttcaccttctaggaaggtgggtgaatggacacttttgttacatttgttacaatgactgtttcctttttatttagactaagcaacctggggatccctggagtgtgggctttccatatcggcagcacttccccgttggacaatgtcaggccagctgcagttggagacctttccgctgcccactcttctgttcccct

SEQ ID NO: 359442 - DNA, 617 bp, Homo sapiens
ctgaaaaaaaaagttgtcctgtagggtaggtacaatcatccttcccattttacagagatggaaactgagcttggaaatacttagtgacttgtctagcaagggcaaagactgcaacaaagtcatgaagaaattagagaaagctgtagggtgacagagagtsaaaggcactgtccaggagtgtcactgctgttggggaagtctttgtgaggaaggaggggcttgagccaggcctggggtcaaagtctgagagggagaatgtgtgaaaacattatgaacagagaagtgacaagagcggagttgcagagatgggaatgaggagggaggaaaggagggagagagacagagacaaaggttgattaaggcagtggggtgagagagttgccagtgagggcttcagctgcctgggaccatgggactgcctgtgttgtgagtagaaaggaatgaggtttactgataggggtcttagttattcttaagcctgctgaggcagtgctatacgcagcttaatttaatctcaatctgcatgatgagttaggaggaaggacacctggctttcagaaacctcatgtagtcccactccacttttggccttgtgaaaggctgcaggagtgtgttgc

SEQ ID NO: 359443 - DNA, 584 bp, Homo sapiens
ctgtcacctttacaacctccattgtcaatgattttagcagctgttaatctgaatatagttatttaaaaattaaagcatagctgtttakgtttgaaaagatggtttggagtggagtggattttgcaccggggctgtgaaaagaaaacatctgttgcagttcctggatgttttgagttaagttttgtaattttgagcttttgtagtaagtagttcttagacttaccaaaaagcacattttctgattttctttaaattttagacagacattgtgtgtcttatatccccaaaaggcaacggtagaaatttcttgatattaaaaaaaattgttggttttcttccaagtatccattctttttaaaacagttaaagaattcttagaatattcacttaaaaatttatcttcctgtggtgtttacttgaatggcatgaaatttttactatttctgattatctgcaacatgcattcatatctgatttttaaaaattctacatctgccaaccatttgtcccattgaagcatcatactagtgagaaaacattgagtttttagaccctccacttctgggacccttgaattaagcaga

SEQ ID NO: 359444 - DNA, 584 bp, Homo sapiens
ctgtcacctttacaacctccattgtcaatgattttagcagctgttaatctgaatatagttatttaaaaattaaagcatagctgtttatgtttgaaaagatggtttggagtggagtggattttgcaccggggctgtgaaaagaaaacatctgttgcagttcctggatgttttgagttaagttttgtaattttgagcttttgtagtaagtagttcttagacttaccaaaaagcacattttctgattttctttaaattttagacagacattgtgtgtcttatatccccaaaaggcaacggtagaaatttcttgatattaaaaaaaattgttggttttcttccaagtatccattctttttaaaacagttaaagaattcttagaatattcacttaaaaatttatcttcctgtggtgtttacttgaatggcatgaaatttttactatttctgattatstgcaacatgcattcatatctgatttttaaaaattctacatctgccaaccatttgtcccattgaagcatcatactagtgagaaaacattgagtttttagaccctccacttctgggacccttgaattaagcaga

SEQ ID NO: 359445 - DNA, 519 bp, Homo sapiens
tctataaaaggaccaattaccgaaccacacccaaaccaattaaattagaatctcctggggtatgattcaggcatcagtattttttaaaaagaatttttcagttcattccgatgtatagccaaggttgagaaccacygtcctatgggaaggagtttacttctgctaagtctcatcaggtatgtgctagagagtgaagagagagctcttctttctctacaagtaagatgagcaaatacccatggacattttcccattatcctaaatctcctttgtaaaatttgatgcctagtaatggaccacaggatttaatcagctcctgctcttctttcaacagccttaattcttcttctttcttcatgactgagatcactaaagcgaccttaccgtgctcctttgccatcttcctcttctcctcttttcttgcttcttctttttcactctcttgctgaaaaagcacaaagcaacaggtgggcacaatacctgctgagagaagtaaggtggcccatggattgtcaaatc

SEQ ID NO: 359446 - DNA, 511 bp, Homo sapiens
gaatgagtcccctgggtataatccgtccactgacctgtgaactaaagagacaagtcgtctggctccaacacactgaaaataatatgaygggacttgtgcaggataattatagacaattatagcacaaatagtgaaaaaatgggaggtaaaaagcaaccactagcttataaaattctgaaatagagcaaagcaaatgtcgattttttttttcaaggcctgtgatgtggttgggatgtgtgtccactccaaatctcatgtcgaaatgcaatcccccatgttggaggtgggacctggtgggaggtgttgtatcctgggggtggttcccttcagcacccccttggtgatgagtgagttctcactctattcgttcacatgaaagctggttgtttaaaaaagcctggcatggctcttgctccctcttttgccgtatgatacccccctgctccccctttgctctcctccatgattgtaagcatcctgaggccctcactaaaagcagatgccagcacca

SEQ ID NO: 359447 - DNA, 556 bp, Homo sapiens
cagtctccttggatttatctgttcttccattatgaacatgtggtttttgttttgctggtcatgagatgactgctacacctccagagattgtttgcattccagggagacaaaggagggaaagtgaaagacgaggggacgtgccagctgaattggttccattttattagaaaaacaattgcttcaaaagacaggcactccatccccatcccagcaactcagtttagatttcatcagcaataactgggtcataatgcaagtcagtcttgcaaggtgaatattttagctgtgcacaatgccccaaaggaaactgggattctgttaataacaatggaaagaagagatactgagagggccgaaaggtttcacccacttgtagrcatagctgtggggcacatgaagactttccaagaaaatcttggaaatcattttccagtttttcaacttccatggatatagtgtgttctaaaagtgatctatctacaaaagcatctgaggcgaaggcataacaacaattctattttaccgtccccactttttaagcagccctcttcccacc

SEQ ID NO: 359448 - DNA, 584 bp, Homo sapiens
tctatgtaatacgtgaatttgacttattccatagatgttggggataataaagttgccagattagaggaaacttataacgtgtgcaaggtggacagaacacctcttctttccagattgttgtttgcaagttagtgattatctacagttgtgcccgtaccatccacttttatcagtttattttatgctttgaattgatcaatctaccttaaaaaaaaggatatattgcaacagcatcccacatgagaagaagtacatgcaagttcttcataaattgtcctaaacttttttataattattattctgtttcattttgcatcccattatgatgctgataccaaatagcctctgcatttttaaaaataagaatcctgagacaaaawaaaattctcaaagtcatccaaagttagtacaaatgataaatggtagagttggtatttgaatgcagacacttatgtctctaaaacagtaattgtttcttttctggttctttaatttcccctctacccatgatgcatcttaattagtgcagtttcacccagctaaaatgctttctacactgcaaatgcatcttccagttttcagtg

SEQ ID NO: 359449 - DNA, 498 bp, Homo sapiens
aatcacatggcaatctgacaaaagttttggagaaaaaggtaatactcaataccgaccccagtgtaaaactttcatagtcttttccggtaggagcataagttggcaccacttttctggtggacactttagcagggagtctcagaaacattttatgaaggttcaaaattctgccattatgggctgaatgtttgtgtcctcaccccaaaaattttgtgttgaaatcctagctcccaaggtaatggtagtaggatttgggggagggtttgggaggtgattagatcatgagagtggaggccccatgaatcggattagtgccactacagaagaggccctggagggctccctcgccccttccaccatgtgaggacacagcgagaagatgccatctatgaaccagggagcaggccctcaccaggcaccgaatctatcaacaccttgaycctggactttctagcctccagaactatgagaaagacatttctgttttttataagccat

SEQ ID NO: 359450 - DNA, 645 bp, Homo sapiens
ataaactatggtcactgctctcaaagatctttcaatcaagatcttttattcaagatctccatagcattcaaccaattttaccattcacttatgagtwctattaggtagagaaacaaaagggaacactaggacctgaagttactggagaaagatcagagacaagggtgatttgatcttgagggtggtaagatttggacaatgcatttctaccaattatttctaagaagtcagaattatgtagtgaatccctttatttgcacgctcaagaggtcaaaatgaacaccctatattctgtggcatgcaggtgaactgaatttattaaagaatgatagcctgcttcaaaccttgccctccctttggagaatttcacaaataaatgaaatctttaaattttgtgaaattcttttattgctaagaattattttgctgtggatgtagtcagtaacttgtttgtactaagacagtgagctcagttaaaccagagaaaaggggatgggaaatataaatgaaactattcacattcacagaggcaccaggaagcatgtcaatacagaaaactggaccaattcctaaccacttaagaccaattgttttacctatgaattcaatttcaggataaatgtcctagctccaaatggttctata

SEQ ID NO: 359451 - DNA, 561 bp, Homo sapiens
ttatatatttgggtgctacactgttgaattcatatatacacatagatacaattattatgtccttttgctaaatttatacctttatctttatgtactgatcttctttgtgtctttgtatagtttttgatttacaatctattttatctgatataagtgtagttactcctacttgttttggtttctgtttgtgtggaatatatttttccaattcttcattttcagtctatatgtcttaacaggcaaagtccagtttctcataggcagcatatagttgggtcttgtttttgtttattcagctagtctatattttttaattggataacttaatctgtttacattcaaggtcatttctgttggcaagaaactactcctgccattttattaattgttttattgttwttttgcacatttttatttctttcttccttatctatggtttatctttatgctttggtagttatctatagtgataagagttgattcttttctctgtctcatttgggtgtctttaccagtgagttttacagcttcacatgtttttatgatggtagtcattgttcc

SEQ ID NO: 359452 - DNA, 621 bp, Homo sapiens
tatgattttcccatctttcctccttctggaaaacccacaatacaaagatttgtttacttaatggtgttctgttggctttcttaatttttttattcttttctttttatctattatttcaaaagccctatctccatttcagaaattctttcttctgtttgatctagttggttgttgaagctcttgactttattttttatttcattcattaagtttttcagctccagatttctatttggtccttttcaatgatatctatctgtttgttgaatttctcattcagatcatgaattgtttttgctgattttgtataattatttatttttattctcttctatgtcattgagtttccttaaggtcattattttgaattactgcaaaggaatttcatagattttttccttggagtctgttaatraggaatttttggaggtgtcttttttacttgctttttcatgcttcttgtgtacatacattgatatctgcccatctggtgaaatagtcacctctttcaattttatgaagtagctttagtagggaaaaacttgttcttataggtgtttcctatcgtgtcagttgggtaaggtgctttggttttgattttgggtaggtgcagtagtttag

SEQ ID NO: 359453 - DNA, 547 bp, Homo sapiens
cagtgtggttttgatttgcatttctcagatgtttagtaatgttgagcattttaaaatatacctgttgttgatttgtatatgttcttttgagaaatgtctattcagatcattttcctctttctaaattagacaatttagggtgggtttttttttcttatgaattgtttgagttctttgtatattctgcatattaattctttgtcagatgaatagttcagaagtattttctctcattactcaggtkgtttcttcactctgttgattgtttgctttgctgtacaggagctgtttagtttgatataatcctatttgcctgtttttacttttgtttcttttgttttcggggctttgtcaataaaatctttgcctagaccaattccggaagcattttccctatgttttcttctagtacttcttatgtttaggtctttaatccatttcacattttttttaaaaatatggtgctagattgggctctcatttaatcttctgaatatggatatctagttttcccagcagcattattgaaagactatattgtgatgcc

SEQ ID NO: 359454 - DNA, 541 bp, Homo sapiens
cccagttactcgggctcaggaggctgaggcagaagaatcgcttgaacccaagaggcagaggttgcagtaagccaagatcatgccattgcactccagcctgggtgacagagcgagacttcatttgaaaaaaaaaaaaaaaaaaaaattaaaaagaattcagtgggagcaaagctggctttactttgtttycccctctgcctttgctgtctttcatcctctggccaagcacttcttagtgatggcctctttgtcttcaagagctccatgtacattcccactctccctcctgctgaggcatctctctgcctgaaatgactgtccttctcttctctggtaatccccagtccaagtctcctgactcctccaggaaagtttccctatatgtcttccacttctgacctcaactcctgcagtgcttagggcggtcattcatttggcatcatgactcttgcttgtgaggcacctttttatctctccatctcttctccttggctgaaaatctcttacaagatgctctcataaaaagaataggaaagaaatt

SEQ ID NO: 359455 - DNA, 556 bp, Homo sapiens
gctttttatcttttcaggaacctgcatattcagaaaaaaatttttcagatctggggacactgggattcaccacttcctcctgctgaattctagtgcctgaatgagatctgcaaacattcactccatacagttttgagtttgctacattagcaactcccttagatcctagaacagttctgttccttccctcttcagtgccactttcactggaactttccgttacttcaagatcccattcgaattggcccttcaggtaacctcctttaactacgtaaacatgcaaaaacccatctctcctccatctraattcatgctacacatgctctctgtttgagtcactgggtccctaacatgcacctcctagtgttgttattcactaggtccctaacatgcacctcctagtgttattattattattattattattattattattattattattattatttgagatggagtctcactctgtagcccaggctggagtgcagtggcatgatctcggctcactgcaacctccgcctcctgggttcaagtgattcttctgcctcaacct

SEQ ID NO: 359456 - DNA, 618 bp, Homo sapiens
attcgattctccagggtcaatagcttggtgaagggcaccatttccccctcatacaaaaaagcagggtgattttcttgagcattcgagtgtagtctacaactgagggtctgtgatgagatggtggttactcagccaaggaacaggaaagagcttctagacagaggccccagcatgtgccagggctgaggggcccaaatacrgggtagttgtgaggaattgcaagtgatgacgctaaggacagacacagggacgagattggagcaaagaatggaagtagtgacgagacttgagttaggggtggacgtagacaattcagagatggccttgtatgtcatatgtctctttattctgaagggcgttgaggaggcgtggacaggatttaagcaggtaagggacatgctgagatttgtgctcttttgaatatcctattgaatttggtatatcatacaggatttgtcatcagatgcatcacaaggaaggactctattattgttgcctttatttgaattataacaaggaaaggccatgagggtgtagatatagaaaacactggtggttacttcccagtgttaatcttttctttcttctttagtaatagaatctatggacagagggaat

SEQ ID NO: 359457 - DNA, 547 bp, Homo sapiens
atgacactatgggagatctggaggacctcttagacatcatgtggtctatctcttgtactttatgaatggcctggcaaggggaaggggctttctcaaggtcatacagtcagtgatgcacacagaactgcaatccaccctcttggactcctctcggactatagtgttccttctgctgcacaactgccttaactatggaactacccattttattaaaggaatttagaaacacctttgaggtttgcactctcaacttgctgcaccatacttggcctagacacacactcactaaatgtttgtcaaactggaccacagaatttgatctgtgcttggtgctcactgaaacctttccctgccacatctgcacccttggtggtctcttcccaatttcagactccttaggaatgacaggtcayggtagaccaactgctgggtcagaatgacctgtgaatttccagaagtggagacgttttctgggctggagatgatgatctccaaagacacaaatatgcaagttgcctccgctgccagggccagcagctaagaaaga

SEQ ID NO: 359458 - DNA, 606 bp, Homo sapiens
ccttgccccacaggtgagtttcttcctcttctgtgctcagtttcaatgtcacctcctctgtgaggccttctctgattgctcaaggagccccaactgcccctcatcctggattttcacatgacacttgtcccacagactgccaacgtgcctgtctccctaattagaccctgggcttcyttgaggacacagacctgcctggttaattatgctgctccgttagcctgaaccactcttctccagaagtctgcccccatggctgtaatcaatctatatcagtgttacttcttatgtacctgttgcttccattagaccatgaactccttgagtgcaggggctacgtcttgttcagctctctaaatacctgagtgaatgagttaagtcagggaggtggaggctgttgaataccagctggcctggaggcagaggactggaggcagacagaatcaggaaagggactgggaggggtggagaggtgaaagcaggctgtccatgccccctgccgctgagccatgctggctgagcaagagcttccctgtggtcccacctgagcagacttccctaggaagggagactctgcttcttgtggacttcctttcctctgtgaga

SEQ ID NO: 359459 - DNA, 606 bp, Homo sapiens
ccttgccccacaggtgagtttcttcctcttctgtgctcagtttcaatgtcacctcctctgtgaggccttctctgattgctcaaggagccccaactgcccctcatcctggattttcacatgacacttgtcccacagactgccaacgtgcctgtctccctaattagaccctgggcttccttgaggacacagacctgcctggttaattatgctgctccgttagcctgaaccactcttctccagaagtctgcccccatggctgtaatcaatctatatcagtgttacttcttatgtacctgttgcttccattagaccatgaactccttgagtgcaggggctacgtcttgttcagctctctaaatacctgagtgaatgagtkaagtcagggaggtggaggctgttgaataccagctggcctggaggcagaggactggaggcagacagaatcaggaaagggactgggaggggtggagaggtgaaagcaggctgtccatgccccctgccgctgagccatgctggctgagcaagagcttccctgtggtcccacctgagcagacttccctaggaagggagactctgcttcttgtggacttcctttcctctgtgaga

SEQ ID NO: 359460 - DNA, 597 bp, Homo sapiens
ggacagggtgacaaagtctgaacagggttggttccaggacagctctggtttgctgccgagtaaaacacctggtccttggggaagcgagacctgagggcaacctgaccagctcctctcctcaacaaggagcctttctttaactgtggtgggaggggggcagtggggtccaggctgggcagtcccagggcaccmactgccaggcatcaaggttgttgaacttggaagtgtacatgcttccctccgctcagcagagcaacccacagctcgctcagtgctcacacagagtgatcagatacaggctgtgctttatggtaacttcagtgagaagcgggtgttgggctgggcttcctggctggggggtggggcgagtgggctgcaagagactatccacgtcccctccgctcatcctctgtgtccagtgtaggctcaggctatgaaactcaggtcttcctccctgtggccgtctcctggggaattcctttgttgagtgtcaaatctatatccttggggtgaggcaggggccgcaggatatgattttgtcctgagggctgtttgaatatctcccaaccctttgagatgcgtttttagatcccttgt

SEQ ID NO: 359461 - DNA, 597 bp, Homo sapiens
ggacagggtgacaaagtctgaacagggttggttccaggacagctctggtttgctgccgagtaaaacacctggtccttggggaagcgagacctgagggcaacctgaccagctcctctcctcaacaaggagcctttctttaactgtggtgggaggggggcagtggggtccaggctgggcagtcccagggcacccactgccaggcatcaaggttgttgaacttggaagtgtacatgcttccctccgctcagcagagcaacccacagctcgctcagtgctcacacagagtgatcagatacaggctgtgctttatggtaacttcagtgagaagcgggtgttgggctgggcttcctggctggggggtggggcgagtgggctgcaagagactatccacgtcccctccgctcatcctctgtgtccagtgtaggctcaggctatgaaactcaggtcttcctccctgtggcygtctcctggggaattcctttgttgagtgtcaaatctatatccttggggtgaggcaggggccgcaggatatgattttgtcctgagggctgtttgaatatctcccaaccctttgagatgcgtttttagatcccttgt

SEQ ID NO: 359462 - DNA, 608 bp, Homo sapiens
tctccattgccctcggaataaagttcaaatttgttatcctgattccctaagtctctttttggtgtgatcccagccaacgtgtccaccctcatctcctagtggacaccctcaccaggaggggaccctcatcctcctccatctcagtttgcactgcagtcctccagtacctggaatgggcccttcttttttgcctccaggccttccttgctgtgctctgtgtctggraccccacccctttgcctaggacacttgctgttcctttgtctggccagtcagataatccttcaggtgtaagtttagatgccacatcctctgaaaaggctcccttgtcgccccttgtgccacaggcccatgtgatcccatctatcaacccaggctatagttgtctctgtttccagtcagcctgagagttcaccaagtcagaaactgagtatcttgtattcccagtgcccagcacaaggaattcgttctggaattctgagtccatgaatcaccataatgacattttgtctgaaggatcaggaatagaatgttccattctccattcattcaaaacgaatgaacacggatgaatgaagtataaggaccagaactccacaccacagaca

SEQ ID NO: 359463 - DNA, 608 bp, Homo sapiens
tctccattgccctcggaataaagttcaaatttgttatcctgattccctaagtctctttttggtgtgatcccagccaacgtgtccaccctcatctcctagtggacaccctcaccaggaggggaccctcatcctcctccatctcagtttgcactgcagtcctccagtacctggaatgggcccttcttttttgcctccaggccttccttgctgtgctctgtgtctgggaccccacccctttgcctaggacactygctgttcctttgtctggccagtcagataatccttcaggtgtaagtttagatgccacatcctctgaaaaggctcccttgtcgccccttgtgccacaggcccatgtgatcccatctatcaacccaggctatagttgtctctgtttccagtcagcctgagagttcaccaagtcagaaactgagtatcttgtattcccagtgcccagcacaaggaattcgttctggaattctgagtccatgaatcaccataatgacattttgtctgaaggatcaggaatagaatgttccattctccattcattcaaaacgaatgaacacggatgaatgaagtataaggaccagaactccacaccacagaca

SEQ ID NO: 359464 - DNA, 608 bp, Homo sapiens
tctccattgccctcggaataaagttcaaatttgttatcctgattccctaagtctctttttggtgtgatcccagccaacgtgtccaccctcatctcctagtggacaccctcaccaggaggggaccctcatcctcctccatctcagtttgcactgcagtcctccagtacctggaatgggcccttcttttttgcctccaggccttccttgctgtgctctgtgtctgggaccccacccctttgcctaggacacttgctgttcctttgtctggccagtcagataatccttcaggtgtaagtttagatgccacatcctctgaaaaggctcccttgtcgccccttgtgccacagrcccatgtgatcccatctatcaacccaggctatagttgtctctgtttccagtcagcctgagagttcaccaagtcagaaactgagtatcttgtattcccagtgcccagcacaaggaattcgttctggaattctgagtccatgaatcaccataatgacattttgtctgaaggatcaggaatagaatgttccattctccattcattcaaaacgaatgaacacggatgaatgaagtataaggaccagaactccacaccacagaca

SEQ ID NO: 359465 - DNA, 667 bp, Homo sapiens
agatgataaataggacctctttccttctttctttcttccttctatcctatctcttcctctcttcttttcttttctttttcctttgttttcttcttctatctttcattcaattattaaataagtcatcactaaagaactaccatgtgtcaaccactctcctaggccaggctatataaggtgaatgtagtcagttgtggcccacgactacatgaagattgtggtctactggggaggccgacataatacacatgaccacaccctatatgcacatacacacgaaraaaccacaaacctgcgaaggtctatcagagagagagagagagacatttagcaccatctcacaccagttagaatggcgatcattaaaaagtcaggaaacaacaggtgctggagaggatgttgagaaataggaacacttttacactgttggtgggactgtaaactagttcaaccattgtggaagtcggtgtggcgattcctcagggatctagaactagaaataccatttgacccagccatcccactactgggtatatacccaaaggattataaatcatgctgctataaagacacatgcacacgtatgtttattgcggcactattcacaacagcaaagacttggaaccaactcaaatgtccaacaatgatagactggattaagaaaatg

SEQ ID NO: 359466 - DNA, 600 bp, Homo sapiens
tccgtttggagatcaggccctgtgaatcagggaagcagtgcctgtctgcgggcggggacttcccaattcaggagagcycaacccatccttcctatgggtcaagtgcagggaggcaaccacaccaaagtggaccctggaattcgtctaacacacatttaatgctcacctacgctgtgcaaaacccttgggatgaggaatggggtggcagaggaaccaaagtttagagtcagaaaaccttggccttgtcacttcattactcatgtcagactcgtgtcagactgagattcaacaaacacttcttgcacaccaaccgtgtgttggccatgcatgagcaattttatatagttcatttctctatgtaatggatgcaaaaccaagaccctgagaacatatgtcatttgtccaaggctacctgcattttcttatatgtaaaataggttcatagcagtacctacctcataggattattgtgaggacacatgagttacttcatgtaatgttattaaaacagtgcctggcacaaagtaagtagtcaataaatgttaactaatatttaatgaccttgttataaattctgttcataggaacagcagaaactga

SEQ ID NO: 359467 - DNA, 574 bp, Homo sapiens
tgcaatgtgagagtgaggagcggtgggggaggtgaagtcggacactggaaggggcagcttcgagggagggcatgctcctttctcttgatcatgaggacatggcaggggaaacatcaccttgctggcttcacctgggaccaggacagcatcacttgtcctccctctgaaccccagggctggctctgcaagggacactaggtttgtgaatctgattctatttggcctttctttttaggccaaattactaatgccatgctgtccaatcgttttaggctttgtgtctacgccttcgatcatttatatgttctaggtcactgacctgggtgtggggaaacatcagtgactgagaggtctcttccctagaggagggcacagtccagtgtttgtaagtttctaaagtgtgacttttggcccatcatggacctctsccagcctttttcctcatctgtgaaatgatcactgaaaggtctactcaaactgccctatgctggcttctgtccttgagtgaatcactgcttaactgagcccttgtgagtggtggtctcatctccctctgcacggcatgaagatcttg

SEQ ID NO: 359468 - DNA, 537 bp, Homo sapiens
aagatttggcaatggagggaaagaggcacagtgggcgctggcgtagtcttctctatttgtattggaagccactccttgtgtaccagcactcaccccagatttcagttatccaattgcacactgctgctaaaactgcccctgggcagatgagctggctgtgggccctcactccattcattccagcagcccctccctacattgctctggctccctccctgtcaccaaggagctccccgctcttcccacagcgggcaccgcggaatctgtccaggtcaccaggacggtagcctgaaatagctgagggggaggaaactccctaagaaaaacacttgtgcttgtgagcggtttcaggtcagacacctctcttcctgctactcttgtgtstgcgcaatgcttgcattccctgggctagttctcaaccaggggtcattttaccaaggcaactgcaaaggaaggtatttgtaatctttgggactggggctcacgacgtcacctgccaggtgctggaattgatttcaaaggtggataatttgcccc

SEQ ID NO: 359469 - DNA, 591 bp, Homo sapiens
gcagtgcacatgtctgtcatgacttccttgttccaagaggatatgggaaaaaactcctagctccccacctcaatcccacagtggtctccaacaatattatgattctccagttctactactcatgatatattttgccagccgcaaatggggcctaaattacatattgtagccaccaaacttccggcacaggcccacagaacaaggcctgagggaaattagatgaggccaaagggaactcaggcctggaagagactagaaaacagaaagggatgtatagtccattagcaggacccttctctcttttaagtgttatayaggtgagcggggttcaacgctgcaggcacagagaggccacagaaggtgaaggaaaggagagcagagaggccaagcaagagtaaactcaggattaaagagtcaaaccaccactggttattttagtcccagctctatctgtctctggagtatggccatctacaaaccttttcacctgtccatctgtttttctgaaaactatggtcctttctgtctcaagtcctggactaaacatagtggtggatagggaggtaggaagcagtggtagaaggcatctgc

SEQ ID NO: 359470 - DNA, 535 bp, Homo sapiens
cgggagcttgaagaggtggagttacttgtcctaattcacccagctcatgagaagctgggctgggagtctaactctgatactaaccacaagactatttcagtgtcactgttacagacaggaaaactgaagcctccagaggacaagtgacttactcaaggtcacacaaggagtcctcctttccaagtccttcattcaaacataaactcagagcttcctaggaaccaggctctgtctagctcaggcctctggtaacttctggactattccatagcctccttactggccttcctgcctctagcctctcctttctagtccacctccctcccacactgaatccagagtggtccttctgagatccaagcaaaccttgcagagctcccaatgccccaggaaacactctatcatggaaggcccttcacgatctggctccaaccgaatttccyagccttccgttccccaccatccctgatgcaccctttattaagcttctccctggccctgatcaccatgtggtttcccacagggactcttgctt

SEQ ID NO: 359471 - DNA, 650 bp, Homo sapiens
atgcacctttttttggtgtatggttctgtgagttttgatgaacatgtacagtcatgtaaccacccaaattgagatataaaacagttccaacactccaaagaattcgtgtccctctgtagtaaaccctccctcctccycagtccctgacaatcactgatgttttctgtctctatagtttttccttttccagaatgtcatataaatgaatcatttttcggtctgacttcttttcattcagcaccatgcatttgagattcatcaatgttgggcctgtatcagtagtttttttccttttgttgctgagcagtatttcattatttggatacaccacagtgtgttgtattgtctccccagtttagggatatttgggttgtttaaatttggggtagctacaaagaaagccactataaacatttctgtgtgaacagaggttttgatttcacttggttaaatacctgcaagtgggatttctggatgtggtaagtgtatgtttaatgttataaaaactgcaaaactgatttccagagtggttgtaccattttgcattcccagccacaatgtacaagatttgtaatagctccttaatctcatcaacccttgctattatcggttttaattgtagccactggattaactgtactgtagtactc

SEQ ID NO: 359472 - DNA, 650 bp, Homo sapiens
atgcacctttttttggtgtatggttctgtgagttttgatgaacatgtacagtcatgtaaccacccaaattgagatataaaacagttccaacactccaaagaattcgtgtccctctgtagtaaaccctccctcctcctcagtccctgacaatcactgatgttttctgtctctatagtttttccttttccagaatgtcatataaatgaatcatttttcggtctgacttcttttcattcagcaccatgcatttgagattcatcaatgttgggcctgtatcagtagtttttttccttttgttgctgagcagtatttcattatttggatacaccacagtgtgttgtattgtctccccagtttagggatatttgggttgtttaaatttggggtagctacaaagaaagccactataaacatttctgtgtgaacagaggttttgatttcacttggttaaatacctgcaagtgggatttctggatgtggtaagtgtatgtttaatgttataaaaactgcaaaactgatttccagagtggttgtaccattttgcattcccagccacaatgtacaagatttgtaatagctccttaatctcatcaacccttgctrttatcggttttaattgtagccactggattaactgtactgtagtactc

SEQ ID NO: 359473 - DNA, 585 bp, Homo sapiens
atgacatggggtagtttgtttttgatgtagatcaaaaggcagatgttagcttgttttttgtctattaaatgtaagaaatttgcctccagaaagtgctcccatccagaaaattctctcatccagaaaattttatgggcaatttttttttgaaaggagtatgagaggagtgtggagagggtagaggaggaggggaaaagagaggctttattttttttatgattacttttcyggtgctaagagaaggaagaaaaaaaagttttctgagttatttatgaagctacgtttattttttaggccaggatagatattcgagatgttattttatgtttttttcctctacattttccccatttccttccctgctttgagcaggtagctagtctttatgcttctttgcccgaggatttgtggtaagatagagagtaggggctacccacatcttcctttcctgacttttctccaccaaaaatccaagcctgctgaagaaatcttgctggatgtcctgaggggtagaagtgagggatagcgccctttgagaagcatcaagcaagagactgggtaggggataaagatttgtgagtccct

SEQ ID NO: 359474 - DNA, 649 bp, Homo sapiens
ggttcactctatgcaaacgcagtagtggcccatcaccagtctgattggttgtaggaggggaccaatcagagtgaagagtaggcccatgaccagtctgattggttatgggaagggaccatttagagatattgtcatttttcatctgccacccagaaaaaggaggggttgaaaaggaagtagcctctgatgtccagtcagcatgaatyggccttaggttccctgcctccagaccctattctctgcctcagttggtagaggtttggagaaaagggacaaataattgtaacacagggcatttttaggtcagtgaaactattttgtgtgacactggaagagtggatacatggcattaagcatttgtcaaaattaataaaactgtacaacccaaaaaatgaaccctatggtaaactataaaccttagttaataataatgaatcaatattggcttatcagttgtaacaaatagcacaaatgcaagatattaatcataagagaaaccatgtgtgcatggggagggttttcatgggaaatctcagtttctgtacaatttttctgtaagcctaaaacaactctaaaaaataaagtctattaaaaatcgttattaataaaattcaatatctattcctgtttaagtgtctttgttttatca

SEQ ID NO: 359475 - DNA, 579 bp, Homo sapiens
tgcctcagttggtagaggtttggagaaaagggacaaataattgtaacacagggcatttttaggtcagtgaaactattttgtgtgacactggaagagtggatacatggcattaagcatttgtcaaaattaataaaactgtacaacccaaaaaatgaaccctatggtaaactataaaccttagttaataataatgaatcaatattggcttatcagttgtaacaaatagcacaaatgcaagatattaatcataagagaaaccatgtgtgcatggggagggttttcatgggaaatctcagtttcygtacaatttttctgtaagcctaaaacaactctaaaaaataaagtctattaaaaatcgttattaataaaattcaatatctattcctgtttaagtgtctttgttttatcaatgaaaggttacgttttgaatgtgacagattctacctatctttagccaccagtcaacaattactctatcatttcttctctcctctttactgtaaaatttcctgaaagtgttggctatacccactccactttctcatcttctagcctatcctaattcttcacgatcataat

SEQ ID NO: 359476 - DNA, 554 bp, Homo sapiens
ttaccttctcactatatggctttctgtactacttgactatttttataatgagcatacattacctttacaatatacattgtgtgtgtgtgtgcgtgtgtgtgcgcttaaagcgagtcagtagacttggactgatggaatcatccaccttaggcctaatctcacygatactccctacactcatacactaaaattctactcaggttttattcattcatccattaacatttaagccccactgggtaccaggcatggtcattggatgcactaccctgttgaaaaccttcagtgacttactatcagccatgactgtctgtgatccaggccctccccaccccaaacccttgctacttcacactcgaactgtatactttggcaatgccaaactgttaatcattccctgctcaccagtgtctggtactatcttcctttctgcaccttcttcatggagtactctcatccagccatcctctcccaccctccgatgctgaactcctactcatcatgtactgactcagttgaagaagcatctcagacaggaagctttccccaagctc

SEQ ID NO: 359477 - DNA, 619 bp, Homo sapiens
gcacacagctgaatagcaggagtcagaaataggcccagggatgtgaccccaaaacccggacccagcccctgtgcaacagtcgcctcttgaatggaaagctcagtaccaccattcaaagcttggtttttaacttctctccagcctcccctgatcactctctaatctttgacttagaaatgaagcacccatgaaacttttattgtatgaggcacatacaggtgccatttccttgttccaccaaagcttcctaaagaggactccagatattgctcatttctgttaccctggtgatcagcctagagctaaaaacccaagagctggcactaaggtattttctgaagcaaagaagaaaaggagtgagagaaggagcaaacaataagtcttccatcctccaccccctttgtcactgccaacatgtactcacatgtgtacatgcacatgtgtgtgtgtgcacacacacacagcccttggatctcacctcttccaagtatttcagtgycaggggaaaaaaccccttgaaaatagcatctcatcttctttcctatggttttctttataaagaaaaccaaatggtcctatcattctgccacaattcctagctgcagcaaagcacctcaaa

SEQ ID NO: 359478 - DNA, 578 bp, Homo sapiens
gccttgaattgcttattttgatgaaaaaagaaatttttaaatgggggtccaagctaaaacggggcctcctaatcccatcatgtggaacatggcacgatggttaacatactggcacagctcaggactttctttctgcccacaatccctgcctgttaccctctcaaagaggaggataacaaagagctcccaaatgggcacaaggacagaatggagactttaggatgtaaaattaggccataaggctaagagattgtgtctgaagggactgcataartcctttcttggcctcttctgcacctctttatgttctgagttttatctatctatccatctacctctagttctatccctatcagtttcccaggcagctggtaagatatgaaggccctgtgcctgatatagcttaggtccttccaaaatggcaacatggcaggggtaagaaggaaggaaacacaaggaaagctgctcagaccggcctctagtctgggctaaaaaattgacctcaacacttataggcgtttcagcccaactacagtaagacccacaaaggaatttatggacaacagcccatgtggtaa

SEQ ID NO: 359479 - DNA, 578 bp, Homo sapiens
gccttgaattgcttattttgatgaaaaaagaaatttttaaatgggggtccaagctaaaacggggcctcctaatcccatcatgtggaacatggcacgatggttaacatactggcacagctcaggactttctttctgcccacaatccctgcctgttaccctctcaaagaggaggataacaaagagctcccaaatgggcacaaggacagaatggagactttaggatgtaaaattaggccataaggctaagagattgtgtctgaagggactgcataagtcctttcttggcctcttctgcacctctttatgttctgagttttatctatctatccatctacctctagttctatccctatcagtttcccaggcagctggtaagatatgaaggccctgtgcctgatatagcttaggtccttccaaaatggcaacatggcaggggtaagaaggaaggaarcacaaggaaagctgctcagaccggcctctagtctgggctaaaaaattgacctcaacacttataggcgtttcagcccaactacagtaagacccacaaaggaatttatggacaacagcccatgtggtaa

SEQ ID NO: 359480 - DNA, 622 bp, Homo sapiens
gaggagcaagcaggtaagagaatgtgtggccagtccttggcgcctctgtgagaagcatctggacagagcagtggcttccaactgtgctcaccccaggcccagctgcatcagtcacatctgtgagtctggggaagaactgggctgtttttcaagtcctcctcttgtcccaggagattcagaatcacaggcagcactgaggacaattctgttctccaaaakaagatccagcactagaagtccacggtttgctcttctgtttgaaacttgcctcttagccaaaggaagatgaaaatctcagaggaaatatcaaagtgacctaaaagtcagctacaagtattaaacacagtcaaatacagttaaataaataacaggacttggatcttcctcagactccagatgaaatggaaataaattcatagctaaaggggagattttattctccaaccattggattttcagatcctactgacatttactaaggccttgcatttggcaaatgctatgctggaggctgtttatatttcagttcatcttcacaaccaccatgtggaaacatcacatgtctccattctagagatgagaacgaacactgatactcagaaatgatgatgtgactgtccta

SEQ ID NO: 359481 - DNA, 673 bp, Homo sapiens
atatccccaaatgctgctcaatattcctgtccagttcttgtaaatagtatgctgattcatgagaacctttggaaccatatatttaaaaaaaaagaaacatttcctaatgattgctgggcaatactataaaacagtgcattttaggcaaaaaactattgcattcatgctacctaacaagaaagacttgacaaaatagctattttgcctttctctttacttaaagcttctgctactcaaatcctctgtccattcaaaaraggcgtttattttgacatgaattgaggcaaactcacaaaacttcaagcactcatattcagttgccttttgagaatatagggcaagagatatggagatgcacttccccgagacttgaatggtggtaatcataagagctaatctttaggataatgggtcacaatgtgccagggtgatcactggattctaagtgaaagagatatccatgtgctctttaataaattttatttcagtggtgttttatcttctatagaaacctctcttgccccatttgaaggatgatactctttctaaggatattattttgatactaaagatgctatttcctttcatcatcttcctgaagagcataccattgtcaaggtaaataagcatctatgcaatgtgacacaataaaaatttaaatttgtattgttaa

SEQ ID NO: 359482 - DNA, 673 bp, Homo sapiens
atatccccaaatgctgctcaatattcctgtccagttcttgtaaatagtatgctgattcatgagaacctttggaaccatatatttaaaaaaaaagaaacatttcctaatgattgctgggcaatactataaaacagtgcattttaggcaaaaaactattgcattcatgctacctaacaagaaagacttgacaaaatagctattttgcctttctctttacttaaagcttctgctactcaaatcctctgtccattcaaaagaggcgtttattttgacatgaattgaggcaaactcacaaaacttcaagcactcatattcagttgccttttgagaatatagggcaagagatatggagatgcacttcccygagacttgaatggtggtaatcataagagctaatctttaggataatgggtcacaatgtgccagggtgatcactggattctaagtgaaagagatatccatgtgctctttaataaattttatttcagtggtgttttatcttctatagaaacctctcttgccccatttgaaggatgatactctttctaaggatattattttgatactaaagatgctatttcctttcatcatcttcctgaagagcataccattgtcaaggtaaataagcatctatgcaatgtgacacaataaaaatttaaatttgtattgttaa

SEQ ID NO: 359483 - DNA, 673 bp, Homo sapiens
atatccccaaatgctgctcaatattcctgtccagttcttgtaaatagtatgctgattcatgagaacctttggaaccatatatttaaaaaaaaagaaacatttcctaatgattgctgggcaatactataaaacagtgcattttaggcaaaaaactattgcattcatgctacctaacaagaaagacttgacaaaatagctattttgcctttctctttacttaaagcttctgctactcaaatcctctgtccattcaaaagaggcgtttattttgacatgaattgaggcaaactcacaaaacttcaagcactcatattcagttgccttttgagaatatagggcaagagatatggagatgcacttccccgagacttgaatggtggtaatcataagagctaatctttaggataatgggtcacaatgtgccagggtgatcactggattctaagtgaaagagatatccatgtgctctttaataaattttatttcagtsgtgttttatcttctatagaaacctctcttgccccatttgaaggatgatactctttctaaggatattattttgatactaaagatgctatttcctttcatcatcttcctgaagagcataccattgtcaaggtaaataagcatctatgcaatgtgacacaataaaaatttaaatttgtattgttaa

SEQ ID NO: 359484 - DNA, 673 bp, Homo sapiens
atatccccaaatgctgctcaatattcctgtccagttcttgtaaatagtatgctgattcatgagaacctttggaaccatatatttaaaaaaaaagaaacatttcctaatgattgctgggcaatactataaaacagtgcattttaggcaaaaaactattgcattcatgctacctaacaagaaagacttgacaaaatagctattttgcctttctctttacttaaagcttctgctactcaaatcctctgtccattcaaaagaggcgtttattttgacatgaattgaggcaaactcacaaaacttcaagcactcatattcagttgccttttgagaatatagggcaagagatatggagatgcacttccccgagacttgaatggtggtaatcataagagctaatctttaggataatgggtcacaatgtgccagggtgatcactggattctaagtgaaagagatatccatgtgctctttaataaattttatttcagtggtgttttatcttctatagaaacctctcttgccccatttgaaggatgatactctttctaaggatattattttgatactaaagatgctatttcctttcaycatcttcctgaagagcataccattgtcaaggtaaataagcatctatgcaatgtgacacaataaaaatttaaatttgtattgttaa

SEQ ID NO: 359485 - DNA, 560 bp, Homo sapiens
gtgtcaatatattcataaccatgtttatataaatccatattcagacaaacatccccatattgaatagtggaaatattattataatctatattaatactcaattatgttttcatatataattgaaaattttttacagagcccagattctttctaagaagctatatgttacactgatagtttattttccatttgttaataaaacctggctattattcattaagctgatttcatggctcactgataggttgggtctgcagtttgaaagacactgttctaagcaactctcatctgtctcctctactcctttacaatgccacttccttagtttgggccttcattacccctcacctaatctagtaccatgattgcctaatgacctccttgtctctgggctcacartcctctcaaccattcttcccattgctcgctgaggtaatatttctaaaaagcaattctggtgtcttcacttctttgcttaaaatccttcaatggctccctgttacttctagggtaaagactttgcttagaaatgtggcttcagccggcctctcttttctcat

SEQ ID NO: 359486 - DNA, 498 bp, Homo sapiens
gataaatgcttcacttatcacttttattgccagattcaaatgatttccagatggttttagyacttaatttgcattcagcactcaagtattgagcagttaacatgcattccgtgcatatttccgatagtttctcaataaaacaaatgtggatttaaataatctatgttctgtttttcttcctaaagattatatccgcaaagacttactctgtaaattacatttctattcatcatatcctcctcctcctcctttcttctgctccttcttctcctccttctcctccttctcttttgaaataatgtttgagattatttcaaaataatccttccattcaaaatccctttgccatgtcctccagcacagaagaataaggcatgaataattacagcatagttttttatacatggcgtatcaaagtctatgtaaatacatatataagtaacaataatgctccttggatacagacattcaggttcacactcaacttcaaacagcaga

SEQ ID NO: 359487 - DNA, 609 bp, Homo sapiens
tgtcagcctatcttaatggaaagacctctcaacaaaactaaataatttatgtgctcacatgccatttccatcaagcttgtgtggccaaggctgctggtttatgacatgcaaagtcagaatgcattctctggtgggagcaggactggaagaatgcatagaatttggtgaacagcttggacagaggagacatttctggtgagggaaactgcctgggtgaggggattcatttataaaacattaatttaattgtttattcaaacaactttatagagcttctcttttgtgcccatcatgcataggtgtgaatatgcagagatgaacataatacaggtcctaacttcgagtggtacctaastttgtgggacagagagacaaccaacatataattatagcactgtgtgataggtgctggacccagggcataaatgaggtcctaggggaacaaggagaagctcataactctgtgagatgctccaatgagtgatgttatctttctttcatttcacacttttttattaagccacccacttagggcaggtatggtgctaagtgctggggatatcatgattggaaagatgggcaaggaaatggacatggtgtgtgataaaa

SEQ ID NO: 359488 - DNA, 498 bp, Homo sapiens
gataaatgcttcacttatcacttttattgccagattcaaatgatttccagatggttttagcacttaatttgcattcagcactcaagtattgagcagttaacatgcattccgtgcatatttccgatagtttctcaataaaacaaatgtggatttaaataatctatgttctgtttttcttcctaaagattatatccgcaaagacttactctgtaaattacatttctattcatcatatcctcctcctcctcctttcttctgctccttcttctcctccttctcctccttctcttttgaaataatgtttgagattatttcaaaataatccttccattcaaaatccctttgccatgtcctccagcacagaagaataaggcatgaataattacagcatagttttttatacatggcgtatcaaagtctatgyaaatacatatataagtaacaataatgctccttggatacagacattcaggttcacactcaacttcaaacagcaga

SEQ ID NO: 359489 - DNA, 577 bp, Homo sapiens
atccttccattcaaaatccctttgccatgtcctccagcacagaagaataaggcatgaataattacagcatagttttttatacatggcgtatcaaagtctatgtaaatacatatataagtaacaataatgctccttggatacagacattcaggttcacactcaacttcaaacagcagaaagcatggcactatgaaacgagcatgaactttagatccaggcaaccaagtgatggaaccccagttcttccactggctagtaatgtgacattgaaaagtctaattagattctctgaaacttaaggcttcattggtaagatgtggataattgacatttgctttaggttaatttaaaggattaaagaagacaaagactataaatctcatgcacattgccttacccattgtgcatggttaattttatgtgtcaacttcactggtctaagggatacccagatagctggtaaagcattattgctggrtgaatctgtgatgatgtttctggaaaagattagcatttgaattagtagactgagtaaagaaagttcaccctcaccaatgttggggggcatcatccaata

SEQ ID NO: 359490 - DNA, 577 bp, Homo sapiens
atccttccattcaaaatccctttgccatgtcctccagcacagaagaataaggcatgaataattacagcatagttttttatacatggcgtatcaaagtctatgtaaatacatatataagtaacaataatgctccttggatacagacattcaggttcacactcaacttcaaacagcagaaagcatggcactatgaaacgagcatgaactttagatccaggcaaccaagtgatggaaccccagttcttccactggctagtaatgtgacattgaaaagtctaattagattctctgaaacttaaggcttcattggtaagatgtggataattgacatttgctttaggttaatttaaaggattaaagaagacaaagactataaatctcatgcacattgccttacccattgtgcatggttaattttatgtgtcaacttcactggtctaagggatacccagatagctggtaaagcattattgctggatgaatctgtgatgatrtttctggaaaagattagcatttgaattagtagactgagtaaagaaagttcaccctcaccaatgttggggggcatcatccaata

SEQ ID NO: 359491 - DNA, 567 bp, Homo sapiens
taatataaaatagtaaataaaaaaatcagaaaaggaaaaatagggaatagygggctccaactttccaattagagaactctgttgttatcctctgcatagatcttagaagaataaaatattcacatttccatttaataattccttaaatttttctcgtgatctgggaactctgtacacgtactaaatattaagactgtctggcttgcagaactctagaatccaggctaataccattgcattggatgatgtggtgtgccacctagatctcccttcatgactaaaaatcttctctcccaggtgccagaaattgtgtcagcagacaatcctcagctgtcagccctgctcaagaatgtctcagctgaagaatccccaagttcaaagcaatagtctgagctactacttgtcaaagcccagtgactgatcaatgtgaaaatataaaggtccagccctcttcatctcaatgcagaaagcccattccagcttcaaaactctcatagggtcagcagaggtcttcattgacaatgcttcatagtccaaattctctttgtccaattctgctttttcccc

SEQ ID NO: 359492 - DNA, 567 bp, Homo sapiens
taatataaaatagtaaataaaaaaatcagaaaaggaaaaatagggaatagtgggctccaactttccaattagagaactctgttgttatcctctgcatagatcttagaagaataaaatatycacatttccatttaataattccttaaatttttctcgtgatctgggaactctgtacacgtactaaatattaagactgtctggcttgcagaactctagaatccaggctaataccattgcattggatgatgtggtgtgccacctagatctcccttcatgactaaaaatcttctctcccaggtgccagaaattgtgtcagcagacaatcctcagctgtcagccctgctcaagaatgtctcagctgaagaatccccaagttcaaagcaatagtctgagctactacttgtcaaagcccagtgactgatcaatgtgaaaatataaaggtccagccctcttcatctcaatgcagaaagcccattccagcttcaaaactctcatagggtcagcagaggtcttcattgacaatgcttcatagtccaaattctctttgtccaattctgctttttcccc

SEQ ID NO: 359493 - DNA, 555 bp, Homo sapiens
ttaattcaaaaagcagatgcctttctatggactaaacacaacctatccaaaaaaagaaataaggaaattaagaaaacaatcacgtttacaataatgtcaaaaagaataagatacttgggaataaatttaaccaagaaggtgaaaaacctgtacactaaaacctataaaacattgatgatataaattgaaaataaatggaaagatatcttgtgtcaaggactgaaagaatcagtattgttaaaatgcccacgctgtccaaagtaagctacatattcaatgtaatccctatcaaaattccagtaacatttttcacagaagtagaagaaaaatcctgaagtttttatagaaccaagaaagaccatgcacagctacagcaatcttgagcaagaacaaagctaggggtggcacacttactgatttgaaattatattacaaagctatagtaaacaaacagtaygcactggtgcaaaaacagccacatagaccaatggaacagaatagaaagcccagaaataaacccatgcatatacttccaactaatctctgacaaaaaca

SEQ ID NO: 359494 - DNA, 567 bp, Homo sapiens
agagaacctgaatggattaaaaacaaacaagacccaataatctgttgccaacaaaataaacacttcacatataaagaaatacacagactgwaaacaaaaggatggaaaagtatattccatgccaatagaaaccaaaaaagagcagaagtagctatacttatatcaaacaaaataaatttcaagacaaaaactataataagagacaaaggaggtcactatataatgataaaggggtctgaattgctaaaaaggatataacaattttatatatatgcatccaacactgaagcacccatatatataaaacaaatattattagagctcaagagagagatagactccaatataataatagctggagactctaacaccccactttcagcatcggaaaggtcttccagacagaaaatcaacaaagaaacattggacttaatctgcactatataccaaatggacctaatagatatttacacaacatttcatccaacagctgcagaatatcttttcctcagcacaaagattatcctcaaggatagaccatatgttaggtcataaaataagtcttaa

SEQ ID NO: 359495 - DNA, 576 bp, Homo sapiens
ttttgaaacttggagtttgattttgagatgtccgttaaatgttagacgtttaaaacacttaatgttatgaaatagaattccaaattgccacaaattatttattttgccaaaataatgatttttttaaaaacscttttattagcctttactattacgtgaaaatcctgttcaaagtcaaattatacccttgcattagtttattaatgttaaccctgatttgtttaaataaaaccttatttaaattccatctaatcttaaccaatttgaccatgtggtgaaatctttacaaactctataaccccttttgctaaaggcagattaccatcttagaacaaccttttttgtgcttttattttaatgctcaatttatgaaaagaccatataatactcctttgaatttagttaatgtttatatattttttgtaagattaatttttacaatctttccacaacttacttaaacgtttggctttatcttattaaatttaagataatcccttatccctaggcaaaatttacatttccatgtttcttataatcttttactaaaaaacacatttcactgtttttatatgc

SEQ ID NO: 359496 - DNA, 625 bp, Homo sapiens
ggattagctggcaccgcccagaccaataaaatggcttatctgattttgtggccctcatccaggaactgacttagtacaagaagacaaccaccactgtaaaatgatggagactaaaacaaagtattgccacatagttacaggtcatgttcccaaagacatgaaacaagacagaggcctgtagccatgtttgttaactgaaaatttgtttgactggcttcaacagtacgcttatggggtccygggcctgcattctaatttaaggtatcctttattttgacagaaccatacagaaagacacacaaagcacaccagattagctacagcttaagaccaacctcacaaatcctttttcattaattaaaactttacagagaatacaaacaataatccttattatcccttttactggtttgcactggaagagagaagccaaacgcccgactggtaaaaaatgtttacccttttgccagcatgtcaggcttctggtttcccttctccctagctcaactctaagccaagcattctaaggtttggaaaattaacttttcccaggttggaagaatattataaaagagacatttgaaactatgaaagaaggaaaaacaccacagacatgagttaaatt

SEQ ID NO: 359497 - DNA, 619 bp, Homo sapiens
agctgggcgcggtggctgatgcctgtaatctcagcactttggggagccgaggcgggcatatcamgaggtcaggagattgagaccatcctggctgacacagtgaaaccccatctctactaaaaatacaaaaaattagccaggcatggtggcggacacctgtagtcccagctactcaggaggctgaggctggaaaatggcatgaacctgggaagcagagcttacagtgagccaagattgtgccactgctctccagcctgggtgacagagagagactctatctcaaaaaacaaaacaagaaaaaaagtggagctccaaagctgtaagaatcagggataatttgtggcccaatggagggaatttagtacttctgaaccagaatatgcatataattttttgagagaagacaaaccattggtttccaatgccagggacaaccctttcctcctcattccctgaagtctttacaataaactagttcaactagaaagaagaataataaagtttccacagacaacaaagttggttcacaaaccccctaactaaactcagaaggattctcaaggttagttcttcaaccaaaagcttctttgttacatagaaaaccaggtttccccctccc

SEQ ID NO: 359498 - DNA, 490 bp, Homo sapiens
tacaactgtacaggctccatggtactcctatgcttttacgtcattctcagcaaatsttttcatagttatcaccatatgccattagcagtgttagttaccatgcaccatgtgaaagtggcattcactcatgaatgaaaaagtggtgtgggttcactcattccagtctgttttgtgctgctattacagaatacctgagactgggtaatttatcaaaaacaaaaattgactttctcacagttctggaggttggaaagcccaggatcaaggcactgccatcttgtgagagccttcttgttgtgtcttcacattgcagaagggacagatgggttaaagagggatgaacactgtatcctttcatggcagaagagagcaaacccattcctgtaaagcctttttataacagcatgaatccattcatgacagccgtcatgatctaaatacctcccattatgtgccacctcccaagacagttggagattcagtgcccaac

SEQ ID NO: 359499 - DNA, 490 bp, Homo sapiens
tacaactgtacaggctccatggtactcctatgcttttacgtcattctcagcaaatgttttcrtagttatcaccatatgccattagcagtgttagttaccatgcaccatgtgaaagtggcattcactcatgaatgaaaaagtggtgtgggttcactcattccagtctgttttgtgctgctattacagaatacctgagactgggtaatttatcaaaaacaaaaattgactttctcacagttctggaggttggaaagcccaggatcaaggcactgccatcttgtgagagccttcttgttgtgtcttcacattgcagaagggacagatgggttaaagagggatgaacactgtatcctttcatggcagaagagagcaaacccattcctgtaaagcctttttataacagcatgaatccattcatgacagccgtcatgatctaaatacctcccattatgtgccacctcccaagacagttggagattcagtgcccaac

SEQ ID NO: 359500 - DNA, 490 bp, Homo sapiens
tacaactgtacaggctccatggtactcctatgcttttacgtcattctcagcaaatgttttcatagttatcaccatatgccattagcagtgttagttaccatgcaccatgtgaaagtggcattcactcatgaatgaaaaagtggtgtgggttcactcattccagtctgttttgtgctgctattacagaatacctgagactgggtaatttatcaaaaacaaaaattgactttctcacagttctggaggttggaaagcccaggatcaaggcactgscatcttgtgagagccttcttgttgtgtcttcacattgcagaagggacagatgggttaaagagggatgaacactgtatcctttcatggcagaagagagcaaacccattcctgtaaagcctttttataacagcatgaatccattcatgacagccgtcatgatctaaatacctcccattatgtgccacctcccaagacagttggagattcagtgcccaac

SEQ ID NO: 359501 - DNA, 490 bp, Homo sapiens
tacaactgtacaggctccatggtactcctatgcttttacgtcattctcagcaaatgttttcatagttatcaccatatgccattagcagtgttagttaccatgcaccatgtgaaagtggcattcactcatgaatgaaaaagtggtgtgggttcactcattccagtctgttttgtgctgctattacagaatacctgagactgggtaatttatcaaaaacaaaaattgactttctcacagttctggaggttggaaagcccaggatcaaggcactgccatcttgtgagrgccttcttgttgtgtcttcacattgcagaagggacagatgggttaaagagggatgaacactgtatcctttcatggcagaagagagcaaacccattcctgtaaagcctttttataacagcatgaatccattcatgacagccgtcatgatctaaatacctcccattatgtgccacctcccaagacagttggagattcagtgcccaac

SEQ ID NO: 359502 - DNA, 660 bp, Homo sapiens
cccaggaaacaaggctagcaatttctctctgctaactcagcactgctgaaagaagttaacagctctagtcttctctcagaaaagtacaggaaactgttctggagatgggggtggcatctgggactagtcagcctaaggtgtgggacttttatttcattacttgtgcctttattyattcattaaatatacatttacctggcagccactgtgtatactaggcaaattttatgttatgtatagtttatcacaatttaaaaaaagaattaaaaaattatgtgtgtagataaacttggaaacacaaaaaacacttgctacattactgggggtagtaaggttgtgggtaaatttcttctacatgtctggtgctagaaagtatttgcaaagcataaaaaccttaaagaaaaaaatggacaaaaaactaaaatagatttttctagaaaaaacctatatacacaaatggttaacaaatgcatgaaaagatattcaatatcattagccattaggaaaatgcaaatcaaaatcatatgatactacttcaaacacataagatggctatgataacaaaatgacaaaaagtggaaaatagcatatgctagcaaaggtgggggaaaatcaaaactttcatacatgactggtgagaatatattaataagatggtgc

SEQ ID NO: 359503 - DNA, 580 bp, Homo sapiens
aaggtaatgtgcccaaggccctgtagctggtaattgcttatctgccttcaagcctatgtgatttcctctccaccttgcagtcttcttcggtgatctaattaggctattgtcccaggcaacatgacaattggcagtcactgattcctttgctttgtcctaggtcatacataggacaaaacagaaaacaggcagatgataatttgatgaatacactcaaaaccagactctagagagcctttagatgctcttaatactcacttatgtttagtgctttatagttcacaaaccttgtcacatttcttagttgacctttatgaaaatcttgaagcagatgttcctattattctctctccacagaagaagmagccaggtcttaggaggcccaggtaagtttctgaaaggcacagtgaaggagtggaacagaaaccctcagccagatcattttactcctagagaaacgcacatccacagactctgctgccctatttaggtcaaggacaggaagatactggcaaaatgttctgttatgttactatcttcttctctgcaagtgggctacaggccccttggctctccctca

SEQ ID NO: 359504 - DNA, 598 bp, Homo sapiens
ggcaaattctaggaagtttcctgcctgaattcttgttaggaggasataaacaggaatgtgaacacttaaggaaagcccagagaaaatagtaaaatctctattaggattgagagattgggctatacatagaattattagcaggcactgggccaagtgctggagcccagaggtgatcaagacccagtctttgccttcatggtgctcacaggccaggtgctcttcatggaagagaaggcaacttccaaagcaaatagttccaatacagtttgctcagtgttgtaatagatcgcatatcaaaatccataggaaggagagagtaattgctgaacggtaagcttcatgaaggtaaacatcctgtctgtcttattcactactatttacctaggacatcgcagggtgcctgggatgtaatagctatttatatgtatttgttaaatggaattgattcatttactccaggtatatcaaatggtttgactcattgctgtgattattcattgatttatttagtcatttattcactccttaaatagtattagctattcataggtagtaagcaacttattatcatttaatttgaatataaagttatattcaa

SEQ ID NO: 359505 - DNA, 574 bp, Homo sapiens
agcatggtagattttttaaaactatatatatactataataaaaattaggtgtctgtagtgcatatcgttcacatttttgctgacaaatgcctactcagttcaaatagcacctcctcagagatacatcttcccccaccttctccaggcagttaagtgttctattcaatgctccacagtcttttgttcccacctcaaaaatagtatttgtcttcttgttttctaatttatctacttatagaccgctccttaccaattstcattgctcaactcaactgattctcccagaaaaagggcatatttcctcagaaactatcacagtgcctggcacacagtaaccttccaattttttttttaggttcatgaatatatactccatctactctatgttaatctactaaactataaagaaaagtttgggtaacaatcttaacctgtgtgactgaaggacatttactaaaacattttgccttctaagtttcctgttttgaatcaagacacctttgacatgcaaccaaccttccaaacagaaaaatggtaagataagtttgcaaggaatcaaaacttagtaacaaaa

SEQ ID NO: 359506 - DNA, 614 bp, Homo sapiens
tcttaacatgcagccaaagccaggactcgggctcactgctgcaggggtgtcctcgggaagtcccgaggggggaaaggcgcgcaagcctgaaatggagatgaaaataaacaggcataatatttgctacctcactgcgttgggcgtagtagtaactaattcttaaaaaacgtcttagatgacatataagtagtaaagccgttgtatgctaatctagaatttttgagaaaaacttaatcacccaaatgtttgctataatgtgatraagatagcatccatcggcagtagccaggatcaaatgacgagtagatatggttataaatggggcccatgcagtataattagtatatgaaaccaagatgtcagtcctcacacagaatttgtgtaatgatatgcatttgggaggcttcaggccttttcagctatttgatacaggttgattcttactgaatacagaataataaaaaatgaattactggtctcaccattttcattattactatttggaccaaaagactaccacttttactccaaagattgattgtagactcaatagccaatgacagaaaattaagcacaagtctaaatgaagccgaggatctagtagaaagaacaca

SEQ ID NO: 359507 - DNA, 572 bp, Homo sapiens
ttcattagttaagtcagtgtatttgttctttaaattaaagacttacttgttatccagcaattgtagtgagcttctcttaacattggrctctatttttctcaagtagctctctttttaaagactaataaaaatttgtgagagaaagtaacatctggacaaactttagactctaaaaaagggaacaggcagcaattagttttacctcctctgttgatttctgagggcaggggaggcgccatcatgtttgtgtccatcggctgagagccatcctgggtcatggggtcttcaggaggcaggtaagcaggtgggggcgtatcagctacaaagtttttaaagaagttatttcttaacccttagtaaacatacatgctcaaaacacgtatcctcttctgtactgaaattctcaagagatcaagttgtcatttcaatctccccattaaaagactaaaggctacaggcactgccttgatgtacaatttctgaaaagtattaaccatgccacaatcatatacatttttgtgaaaattcagtgggaggaaaagaattatactatatgccagttccagaagctg

SEQ ID NO: 359508 - DNA, 617 bp, Homo sapiens
caatcaatatgtgtgagatgtacattggttcggtccagaaaggtgggacaactcgaggcaggggaggaggcttccaggtcataggtagataagagacaaaaggttgcattcttttgagtctctgattagcctttcactgaatacacagtttaccagaacagtcacctatgccttagttaggcttagtgaaaaacagggcgaaggaagcaattggatatgcctttgtctcccatgagcagagggatgactttcagttctgtctgtcctttgtccacaaggaatttccctgtgggcagaatgtgagggaggtattcagcttaaaaaaaaaaaaatctggccaggacggtggctgatgcctgtaatcccagcactctgggaggctgagacaggcggatcacctgaggttgggagttcgagactagcctgaccaatatggagaaaccccgtctctactaaaaatacaaaatagccaggcgtggtggtgcatgcttgtaagcttgtaatyccagctactcaggagcctgaggcaagagaatcacttgaacccgggaggcagaggttgcagtgagccaagatcatgccattgcactccagcctgggcaactagagtgaaactc

SEQ ID NO: 359509 - DNA, 473 bp, Homo sapiens
gcaacacgatttgtgtgcccaggaagactgaccctgtcttattagtgtggccatccctctccccagatggccttgcctgagttacactttactgatcctaggccatctatgcttctgctgtgctaggctgcctttcttgtgaatctctgagcctcagagcatgtagagtggcctctgaagtccccacaactccaagagctggctggttcttgcccttcctgagtcctggttcttcgacgcytccttggattcaggacatcctcagtttgcttaagtttgctcaagttcatttctgttatttgtacacagaaacctttaacaagttcaaggtataagtcgttcatcatggatggggtgtgtggtgggaggtaggaacaccgctggaggggtagacagaggctatggatgagagggtcttctgtgtcacacttaaggatttgatggtcagtgtcattgacagagtattaataatt

SEQ ID NO: 359510 - DNA, 473 bp, Homo sapiens
gcaacacgatttgtgtgcccaggaagactgaccctgtcttattagtgtggccatccctctccccagatggccttgcctgagttacactttactgatcctaggccatctatgcttctgctgtgctaggctgcctttcttgtgaatctctgagcctcagagcatgtagagtggcctctgaagtccccacaactccaagagctggctggttcttgcccttcctgagtcctggttcttcgacgcttccttggattcaggacatcctcagtttgcttaagtttgctcaagttcatttctgttatttgtacacagaarcctttaacaagttcaaggtataagtcgttcatcatggatggggtgtgtggtgggaggtaggaacaccgctggaggggtagacagaggctatggatgagagggtcttctgtgtcacacttaaggatttgatggtcagtgtcattgacagagtattaataatt

SEQ ID NO: 359511 - DNA, 430 bp, Homo sapiens
cctttcttgtgaatctctgagcctcagagcatgtagagtggcctctgaagtccccacaactccaagagctggctggttcttgcccttcctgagtcctggttcttcgacgcttccttggattcaggacatcctcagtttgcttaagtttgctcaagttcatttctgttatttgtacacagaaacctttaacaagttcaaggtataagtcrttcatcatggatggggtgtgtggtgggaggtaggaacaccgctggaggggtagacagaggctatggatgagagggtcttctgtgtcacacttaaggatttgatggtcagtgtcattgacagagtattaataattccctctctcaagaaaccaataacttgtaggaatcatcgtgttatgccaacaatggaaataggaataagaacaacagcagcaacaata

SEQ ID NO: 359512 - DNA, 473 bp, Homo sapiens
gcaacacgatttgtgtgcccaggaagactgaccctgtcttattagtgtggccatccctctccccagatggccttgcctgagttacactttactgatcctaggccatctatgcttctgctgtgctaggctgcctttcttgtgaatctctgagcctcagagcatgtagagtggcctctgaagtccccacaactccaagagctggctggttcttgcccttcctgagtcctggttcttcgacgcttccttggattcaggacatcctcagtttgcttaagtttgctcaagttcatttctgttatttgtacacagaaacctttaacaagttcaaggtataagtcgttcatcatggatggggtgtgtggtgggaggtaggaacacsgctggaggggtagacagaggctatggatgagagggtcttctgtgtcacacttaaggatttgatggtcagtgtcattgacagagtattaataatt

SEQ ID NO: 359513 - DNA, 548 bp, Homo sapiens
cttttgtttttgctgtcttggtttggttaaagcaggggttcccaaccccctggtatcaggtctgtggcctgttaagaaccaggtcacacagcaggaggtgaacagtgggtgagccagcaaagcttcatctgtatttacagccacaatctgagctctgccttccgtcagatcaacacagacgttcgattctcataggaactcaaaccctattacaaactgcacatgcgaggaatctaggctacgtgctccttatgaaaatctaatgcctgatgatctgtcactgtctcccatcacccccagatgtgaccatctagttgcaggaaaacaagctcagggctgtcactgattccacattgtggtgagttgtataattattttattatatatcacaaygtaatagaaataaagtacacaataaatgtaatacacttgaatcatccctaaaccatcgcccccacccccaggtcagtggaaaaatggtcttccatgaaaccagttcctggtgccaaaaagtgtggggactgctgtgttaaaggatccttctaata

SEQ ID NO: 359514 - DNA, 602 bp, Homo sapiens
caaaatttactgtccagaaataaactattatctttaaagtcaattgattttaaacaaagctgccaaggtaattcaatggagaatggagaatcttttcaaaaaatgatgctgggacaattggtttatctatatggaaatagaagaatttacacatacacaaaaattagctcacaatagattatagatctaaatgtaagagctaaaactgtgaaacttctagaagaaaactcagaaggaaatatttgtaagttgggtttaggtaatgagttctatatatatacatatatatacacacgtatatatacgtatatatgtatatatatatagaactcatatatacgtatatatgtatatatatgtrtgtgtgtgtgtgtgtgtgtgtgtgtatatatatactttaagttctaggctacatgtgcacaatgtgcaggtttgttacatgtgtatacatctgccatgttggtgtgccgcacccataaactcgtcatttacattaggtatatctcctaatgctatccctctcccttccccccaccccacgacagactccaatgtatgatgtaccccatcctgtgtccaagtgttctcattgttcagttccc

SEQ ID NO: 359515 - DNA, 602 bp, Homo sapiens
caaaatttactgtccagaaataaactattatctttaaagtcaattgattttaaacaaagctgccaaggtaattcaatggagaatggagaatcttttcaaaaaatgatgctgggacaattggtttatctatatggaaatagaagaatttacacatacacaaaaattagctcacaatagattatagatctaaatgtaagagctaaaactgtgaaacttctagaagaaaactcagaaggaaatatttgtaagttgggtttaggtaatgagttctatatatatacatatatatacacacgtatatatacgtatatatgtatatatatatagaactcatatatacgtatatatgtatatatatgtatrtgtgtgtgtgtgtgtgtgtgtgtatatatatactttaagttctaggctacatgtgcacaatgtgcaggtttgttacatgtgtatacatctgccatgttggtgtgccgcacccataaactcgtcatttacattaggtatatctcctaatgctatccctctcccttccccccaccccacgacagactccaatgtatgatgtaccccatcctgtgtccaagtgttctcattgttcagttccc

SEQ ID NO: 359516 - DNA, 602 bp, Homo sapiens
caaaatttactgtccagaaataaactattatctttaaagtcaattgattttaaacaaagctgccaaggtaattcaatggagaatggagaatcttttcaaaaaatgatgctgggacaattggtttatctatatggaaatagaagaatttacacatacacaaaaattagctcacaatagattatagatctaaatgtaagagctaaaactgtgaaacttctagaagaaaactcagaaggaaatatttgtaagttgggtttaggtaatgagttctatatatatacatatatatacacacgtatatatacgtatatatgtatatatatatagaactcatatatacgtatatatgtatatatatgtatgtgtgtgtgtgtgtgtgtgtgtgtrtatatatactttaagttctaggctacatgtgcacaatgtgcaggtttgttacatgtgtatacatctgccatgttggtgtgccgcacccataaactcgtcatttacattaggtatatctcctaatgctatccctctcccttccccccaccccacgacagactccaatgtatgatgtaccccatcctgtgtccaagtgttctcattgttcagttccc

SEQ ID NO: 359517 - DNA, 619 bp, Homo sapiens
ttgctaggtcccctactgtatgaaggaagtaatggggaatcggcaggttaaagtctaatctttattcaatggagccaaattggtgtatttaacctccatggagctttcacaacaaccctactccttggaggtcaactggctatraaattttcctggtcaataaggtcatggagtcagtggggaaccagcagcaatatttatttcactctgagtcaggtgctcatttatttctgggttacaacctaaggtaacatgcaggtcaaacccaatggcagtagatgcaaaaatgttgatggacgtcgccagggggacattacacctggcagatgagccatgaaggcaggcagcatgatggtgactcagcatgtcacacaattgtgagtttggtagcatcaagagaaatcctgactgctttggagcagtagttaacttaaaaaatatattccgtaatacttagctgaccaactttttctaaggccaatttttgatcagaaagaatgtgaagactaagccagagctgatatagatgtacaaaatagcctgatgtatctgtatttccatgaataatttctcacttgtcattatcaatttctgaggactttgattagaaacagtcagt

SEQ ID NO: 359518 - DNA, 259 bp, Homo sapiens
aaaacatttaaggcaatgcctaattccacctgtaatacagaagcagccaatggcatatgcaagtgattattattttagtaatcatctatgcagcaagaatcctgtttattttgatatttggtattttgaaattacttgatataggaatagtgctayactctgtcattagggcactgatgtattttcaacattccctaaaggaaagcatgttagactaacagctaggaggttacttaacatttgggcagctcatatatat

SEQ ID NO: 359519 - DNA, 510 bp, Homo sapiens
aaccaaacactacatgttctcacttataagtgggagttgaacaatgagaacacatggacacagggaggggaaaaacacatactggggactttgggaagatggtatggtagggagggagagtatcaggataaatagctaatgcatgcagtgtttaatacctaggtgatgggttgatagatgctgcaaaccaccctggcacacatttacctatgtaacaaacctgcacgyactgcacatgtatcctggaacctaacattaaatttttaaaaaagatattgttttcctaatgaatttctgctgtgcttttgtctagttatttgaacatacatgtgttggtttatttctagattctctattctagtccactgaactttatgcctttgctacactagtatgttacaaaggacgtaatacattggtattatttttatttggaagagtaaatatatataagaaacatgtttgaattaataaaaaaatctattcacatatttaccatttttggcattg

SEQ ID NO: 359520 - DNA, 525 bp, Homo sapiens
attaaatttttaaaaaagatattgttttcctaatgaatttctgctgtgcttttgtctagttatttgaacatacatgtgttggtttatttctagattctctattctagtccactgaactttatgcctttgctacactagtatgttacaaaggacgtaatacattggtattatttttatttggaagagtaaatatatataagaaacatgtttgaattaataaaaaaatctattcacatatttaccatttttggcattgcctattcttttgtgtacattcaaatatctcctggtatcatttccttcttcctgaagactttcctttatgatttgttgtagtacaaatctgttatgaaatttctcagcttttgtttgcctgaactcgtctccatttcacctttatttttgagagttagcaggattttttttttttcagtagcttgaggatgtgactttattttcttctggcttgcmtaaagcctaataagaagtctgctatcattcttgttggtgaacgtcagagaaaca

SEQ ID NO: 359521 - DNA, 410 bp, Homo sapiens
gggtagactaagagcagcctctaatctaagactaatttagtcccgctactagggccatacacttctgaggactttattcaattcccgttgtattaaaaagtcttaccactttactggtggaaagataaactattcccgggcctgtgtgaccaccaggaattgtttttaagcttattcctaatayttatttctgtggacatgggtagcttattcgcatgcatacacagattggtactcataaagagttaaaggcactcatttacagatctccagggttccttctgtgtgaagctccttcctctctggtactctgctctgtgaattctagcaatcttggcctcccaaactctaatctctgtctcttcaccttgagaagataatgtttaggttcctttttgctacagcctagg

SEQ ID NO: 359522 - DNA, 688 bp, Homo sapiens
atcgtaataaccactactatcgagttttggaattcctgggaagaacaggcctgtgttttattccatttttctaccttttctgttgagcacagtgactgtcaaatagtatgaattcaggaattatttttagtttataaattstatgtgtttgtctctaccaacagtgtttatttagatggatggaattttggttggggagctctatccatgtgccttggttctcagtagcagtagagatgatgtaaattgcctttggatctacaaatattgcctactcaaagactcctggaatatgccctctcagcaagttgaatttttctgttgccacttgcttttcccccagactatatgtttaattgataatgatttcatggctattgtcttcaggtgcaatggcttacctaagaggagagatgccacctcattacaaaatagaatacctccttcttcactgccctgggctgccctcagtcttccccaggggccccaagtctacaacagtaaactcttccatgttcaggtgctcaaaggctataaaaccttcacatttccctgataagcatgaatatagataactccttaatgtcttgaatatgctatatggattagtccctaagaaaacaacactaggtacctattttccaaacacgcaagttcagaatcagtaaaggaaaccaggggactctcc

SEQ ID NO: 359523 - DNA, 538 bp, Homo sapiens
cacttgtctttttctatctcagctttctatcacacagcgagccgccctcgttagttctggaagttgatattgagtgtctaccccatgccagactagctctcctttctgcagataaagraacaagtcacctttggaaaaactaaggcttagattatactgcttttcaaataactgacacatttggaaatttttggaacctctcctcggtaaataatgttgtagagagcaaactgaggcagaggaagtaccccacacagactgatgtaaatccacatcaaagttctgccttcaaatgaagtggcattcctattcaaatgtaaagctttatatgcataaaaattaggtgatcaccagaggaaaataaagtaattttcaaaatctaatttaattcacttaataagaccataaaccaaagaaaatgaaagatgccaaggaaaagagaagatatataccaaccaataacaggtttcatttcctactaagaaaaaaaaaaaaagagtgctcagtaagatttgaacagagaatgaggccaattcat

SEQ ID NO: 359524 - DNA, 603 bp, Homo sapiens
gacggcgcagaggatatgtgaacagggcaagagctaagaagcaaggccacatcagaaacaatgtgtatcagacagggtgaatgaagaaacaaggtttatattaaccctgagaggaaggtagcatgtgaatgtactttcccttgcctctatctcagggcagcctcaaaggccctaaggacattcacataaagaacaaacatgtatcttaaaatgtaatcagtgtaatgtccactgaactatgatccaaggtaaatgactgatcttagcmccttccacatgtatgagaaataactgtactgctcaacccaagacaaatggctatgacaagaacaaaggcaaccttccctcatgtccagggaaccttgtttgtttaaaccctgccagcctgagaacacagtgtcataaaactttccagtcttgctcttaggaaaatagcaaaggaaatgcaacaactgatatcctggttaaacttcttatttcgtagcacaaaattgaaagcctaaagtaaattctgctaagacagtttccaggaaccaaatccattaatcaaacaagccttgtatttgttgtagcacaaaagttttaaattcaggttatgtgttg

SEQ ID NO: 359525 - DNA, 562 bp, Homo sapiens
aatcaaatgtcaagatcccatcctggtctgcgttgaatatttttgacatacacactttcagtgccttgtcttaaacaaatttcaaggttgcatcacccatagcaaaaggaaaaaaaacaaactttaaaagtaatttttaaattatatccaaagcaatatattaaaaattcttcaaaatttcytcaatcaacattatacattggagaccatggaatatggtgttcagggagaagaatacgacgataacatatttttttcctgtttatatttttttaaagacagcattcataatttgatttcagaatttccaaacaatttaaagtcatgtcaaaaaatctaaagatgatttgttaaatggctctccaactctaaactccagtctcctcaagatgcctaagatagttcaagcacagatgatagagcagagtgggaaaggaaacaggagtatgagaagggctttacacaaatccccagttcagtcttcttgtgagccaagttaaactgggtgaacaactacttttgcccatactcaagtggcctaggtgctggcactgaaggcagt

SEQ ID NO: 359526 - DNA, 612 bp, Homo sapiens
gtaacacgaaaaaaaattagctcatctccctattatctaactccattaagtctgaagttcttccccttaaaatgagaaggttaacatccataccataggattattgtgagaattatgtaaaggtactcagaacgtgctcaatagtaaaaataaataaataaaaaatttaatatcccttttgcyaggtacggtggcttatgcctgtaatcccagcactttgggaggctgaggtgggcagatcacctgaggtcaggagtttgagaccagcctgaccaacctggtgaaaccccgcctctactaaaaatacaaaaattagctgggcttggtggcgggcacctgtaatcacagctactcaggaggctgaggcaagagaatcacttgaacctgggaggcggaggttgcagtgagccgagatcaggtcattgcactccagcctgggcaacaagagcaaaactccatctcaaatactactactactactaataataatatcccttttgtttctcttcctgtgccaaatctcagttcttacacagacagtgagtaccttgccattgctcagttctggctcttttttctctaatattgaaatgcctcaggattcagcacagc

SEQ ID NO: 359527 - DNA, 565 bp, Homo sapiens
aacacgaaaaaaaattagctcatctccctattatctaactccattaagtctgaagttcttccccttaaaatgagaaggttaacatccataccataggattattgtgagaattatgtaaaggtactcagaacgtgctcaatagtaaaaataaataaataaaaaatttaatatcccttttgctaggtacggtggcttatgcctgtaatcccagcactttgggaggctgaggtgggcagatcacctgaggtcaggagtttgagaccagcctgaccaacctggtgaaaccccgcctctactaaaaatacaaaaattagctgggcttggtggcgggcacctgtaatcacagctactcaggaggctgaggcaagagaatcacttgaacctgggaggcggaggttgcagtgagccgagatcaggtcattgcactccagcctgggcaacaagagcaaaactccatctcaaatamtactactactactaataataatatcccttttgtttctcttcctgtgccaaatctcagttcttacacagacagtgagtaccttgccattgctcagttctg

SEQ ID NO: 359528 - DNA, 565 bp, Homo sapiens
aacacgaaaaaaaattagctcatctccctattatctaactccattaagtctgaagttcttccccttaaaatgagaaggttaacatccataccataggattattgtgagaattatgtaaaggtactcagaacgtgctcaatagtaaaaataaataaataaaaaatttaatatcccttttgctaggtacggtggcttatgcctgtaatcccagcactttgggaggctgaggtgggcagatcacctgaggtcaggagtttgagaccagcctgaccaacctggtgaaaccccgcctctactaaaaatacaaaaattagctgggcttggtggcgggcacctgtaatcacagctactcaggaggctgaggcaagagaatcacttgaacctgggaggcggaggttgcagtgagccgagatcaggtcattgcactccagcctgggcaacaagagcaaaactccatctcaaatactactactactactaataataatatcccttttgtttctcttcctgtgccaaatctcagttcttacayagacagtgagtaccttgccattgctcagttctg

SEQ ID NO: 359529 - DNA, 521 bp, Homo sapiens
taagccaatccatcttccttctctgatggggttaccacaataatcaattattaatgtaagcctcatcacaaggaagaggacattgaaataattcaggcaaagtcccctctaataaagattttgcaataacagtatttatatcatgtaacacagccaagtgtttgatttttccatgacataaattccatatgtacatttttttaaagtttgagatgttctacacttagctttcaaagctctgaaaaatatagtatattttatttgtagatgactggcaatttatttatagatgactttsttttctgctgtatgctgcctttgcaatgatgactattaaatatctagaacaacagacagctttaaaaatattctggaaatcacttggagtttaacaagttcaaaagttcctccttggattcagtgaatacttctgagataacatactgtgtcatggtttaaaatgttgtttcagtttgcagcaaaggagaaacgtaacttctaatttacagaaaataaatcct

SEQ ID NO: 359530 - DNA, 592 bp, Homo sapiens
cactgcactacctcctgggcgacagagcaagacaccatctcaaaacataaaaaaaaaaaaaaaaaaagaagtcctcttaactaagtgtagttatactaaatgtaggaatttayctagaagaaacacctagaaatttgcaaagatatatgaataaggatataccttgcaagcgcaggtggttctaatcaaaaacttagaaacaatctaaatgaccatcaatggtgtattggttagataattatgttaaatccaatcaataaaatcctacttagttttcagaaagaataagatttacatgcactaaattgagaaactgcctaaacattttttgtggaaatatatcctttctatatatttacataaataatagctaatatcgattaagacttcatcatgtgccaggcacagttataaatgcttagcatatataaactcatcaaattttggaaaccaccctctggggtaagcactattatttccactttacagatgaggaaactaaggtacagaaaggtgtggtaatctgactaatgtcacaaagacagtatgtgacaatcagaattcaaatctacactgggagcggagtctatga

SEQ ID NO: 359531 - DNA, 366 bp, Homo sapiens
ctcccaaggaatcaaattataatcaaaagaaaaactttaattaccatctccttcaaaatgatatattgtcagctactgaacacagtccaaaagaaaaaaaggaactgacaggggcttttatttaaattattcttatttctagagtgcccatgtaattttaccataatttttaaaagaaaattttgtgacagagaatgttctttctgaaaagaaaaaaataaagtatattttaattgaaatatactttattgaaatattgaaaatgaatgggagataaattttagctatagcctacragactgacatttttaaatttggagtattgggaatgacttccaacgaaacacaaagatgaaagttgtttta

SEQ ID NO: 359532 - DNA, 548 bp, Homo sapiens
ttggttaggggcctcaggacttaagcaatgatattacagtgagttccacgggatttttcttgcctcctataatgtcccaaactgggtgccacagaatttctcaatgcagcaaagcaccaacaaaaaacagcacccagggaaagccaaagaacctggaacagggtggcccagccataccaacctgttctgggggtgaataccacaaaaatgtcatgctcctcccccactagaagaatggtacagtagggaatcagtgagaaacacccttcatccccactcagattccatgggcaaaaccctgtcttccactcatacccccacatcagtagggatggcatcccttcccccatggggcctatggtttgaattaacttscaactcccataaagtaaataggagatgcctctcccctgcagagcccatggttgaaactttggcttccactccccattgcaataatatttgtgagaagggtgtgaatattaatgggtaacctgagggagtttctttgtggtgatgaaacagttctatatgatgtttataatagt

SEQ ID NO: 359533 - DNA, 548 bp, Homo sapiens
ttggttaggggcctcaggacttaagcaatgatattacagtgagttccacgggatttttcttgcctcctataatgtcccaaactgggtgccacagaatttctcaatgcagcaaagcaccaacaaaaaacagcacccagggaaagccaaagaacctggaacagggtggcccagccataccaacctgttctgggggtgaataccacaaaaatgtcatgctcctcccccactagaagaatggtacagtagggaatcagtgagaaacacccttcatccccactcagattccatgggcaaaaccctgtcttccactcatacccccacatcagtagggatggcatcccttcccccatggggcctatggtttgaattaacttgcaactcycataaagtaaataggagatgcctctcccctgcagagcccatggttgaaactttggcttccactccccattgcaataatatttgtgagaagggtgtgaatattaatgggtaacctgagggagtttctttgtggtgatgaaacagttctatatgatgtttataatagt

SEQ ID NO: 359534 - DNA, 532 bp, Homo sapiens
caaaaactggggaaagagtatatcaaaattataaataatagtggtaatactcatgcctttccctaagaaacagaacrtagaattctgtattgttgtgtctttttcaagtggcacaattaaatgtgcctcaggccagcatggaaattactagtagggtaaaaatcataaattaggagccatattctccattcagtatctttggctccacagtgaagtcagactgtatttctagctaaatctctgaacactcctttgagcaagcaatagttgacactagaatatcaccccttagtcatacgacttccggaagattttctgccatcacaatgccactcactaagcaagacacttaggcaatttgtttaatctaatttcttctctggtagttttgagatatttaacaactctatgttactaaataggttaagatgtcaagaactatacattgtgatggaccaatcaccttgtatatagacttccccaaaggggagatgttattaatggaatctgtgctttcctcctgtctttactt

SEQ ID NO: 359535 - DNA, 532 bp, Homo sapiens
caaaaactggggaaagagtatatcaaaattataaataatagtggtaatactcatgcctttccctaagaaacagaacgtagaattctgtattgttgtgtctttttcaagtggcacaattaaatgtgcctcaggccagcatggaaattactagtagggtaaaaatcataaattaggagccatattctccattcagtatctttggctccacagtgaagtcagactgtatttctagctaaatctctgaacactcctttgagcaagcaatagttgacactagaatatcaccccttagtcataygacttccggaagattttctgccatcacaatgccactcactaagcaagacacttaggcaatttgtttaatctaatttcttctctggtagttttgagatatttaacaactctatgttactaaataggttaagatgtcaagaactatacattgtgatggaccaatcaccttgtatatagacttccccaaaggggagatgttattaatggaatctgtgctttcctcctgtctttactt

SEQ ID NO: 359536 - DNA, 532 bp, Homo sapiens
caaaaactggggaaagagtatatcaaaattataaataatagtggtaatactcatgcctttccctaagaaacagaacgtagaattctgtattgttgtgtctttttcaagtggcacaattaaatgtgcctcaggccagcatggaaattactagtagggtaaaaatcataaattaggagccatattctccattcagtatctttggctccacagtgaagtcagactgtatttctagctaaatctctgaacactcctttgagcaagcaatagttgacactagaatatcaccccttagtcatacgacttccrgaagattttctgccatcacaatgccactcactaagcaagacacttaggcaatttgtttaatctaatttcttctctggtagttttgagatatttaacaactctatgttactaaataggttaagatgtcaagaactatacattgtgatggaccaatcaccttgtatatagacttccccaaaggggagatgttattaatggaatctgtgctttcctcctgtctttactt

SEQ ID NO: 359537 - DNA, 532 bp, Homo sapiens
caaaaactggggaaagagtatatcaaaattataaataatagtggtaatactcatgcctttccctaagaaacagaacgtagaattctgtattgttgtgtctttttcaagtggcacaattaaatgtgcctcaggccagcatggaaattactagtagggtaaaaatcataaattaggagccatattctccattcagtatctttggctccacagtgaagtcagactgtatttctagctaaatctctgaacactcctttgagcaagcaatagttgacactagaatatcaccccttagtcatacgacttccggaagattttctgccatcacaatgccactmactaagcaagacacttaggcaatttgtttaatctaatttcttctctggtagttttgagatatttaacaactctatgttactaaataggttaagatgtcaagaactatacattgtgatggaccaatcaccttgtatatagacttccccaaaggggagatgttattaatggaatctgtgctttcctcctgtctttactt

SEQ ID NO: 359538 - DNA, 632 bp, Homo sapiens
tatcatgacaatgcaacaaaatatgcggcatttctgccaaaaactgggtgaccagcaataccgacaatatacagaatgactaaaaatattattcagcctttaaaaagatggaaactctgccatctgcaacaaaacgaatgagcctggagaacaatatgctaagtgaaataagccagttccaggacaaacactccacttgcatgaggttttcaaaatagtcaacctcataaaagcagagaatataatggtggctgtcaagaaatggagasggggaatgcaaagttgttattcaataggcataaagttttagttacgcaaaataagttccagagacatgctgtataacatagtgcctatagttaataacactgtattatttacttaaaaatgtattaagagggtatatctcatgttaagtgttcttaaaacagcatcaacaaccaaaaaaaggccacaaaaaaaccttttagacttgatggatttgtctgttaccttaattgtggtgatagtttcatgggggtatgcctacgtccaaattcatcaagttgtaaaaatatatgcaagtttttctaggtcaattttacttcagtaaagctgttttttaaaaaatgtagacatatattccactaagc

SEQ ID NO: 359539 - DNA, 636 bp, Homo sapiens
tttgtgggtgaagtctgggaatccaggctcaagataagtgacagtttctaaggatatagggctctgaaaagcagaaatgagaaatatcaaccataccatgttctaagaaagtgaaagcagcacattgaaatttgtggcagcaatgaaccacattgggatgttgtgagtatcaacacacatggattccaattttaggtaaataagcagaaagtggattggtattcagatgtacccttttttgtttatggagcattgcccatttatgtggcacacacagctggtgccatcagtattgattccaccagttatttttgggtctgtgacagagctcatcaaatcaccactatgaaggaaatacttaagtagcttcaattctcatcgttagataaaatgtagtgcaactcttctctctgatatatgtaccaactatatatcaatttatactctgtttctcagtgatattatccttttctagtacaaggtatctgttaacatgtgatactgattgcttttccagtctgtggctttggaacagtatggagagtccaacagtgcagtttgytaaagaagtctgccaaaacctagtgttgatttcttccagagcacaatctgtgttataaatgttgtagctagttt

SEQ ID NO: 359540 - DNA, 584 bp, Homo sapiens
ttgcattttgcacttgcagggcacttacagattcattggtggccatgaagaaatgaccatttgtactattcttagtaggaagcagtcccaaagtcacctgtgtctactctgatacagtcatggggctcaagctttaggttctgaagcagcctcctaggccatgttgctttaaattccagctgaatataagatgattacatgtgagacayctttaatatgttattctgatttccagagatggaagttaacaacaaattaattccgttgtaaaactgcccctctacaacaaaaacaaaaaccttttaatttagtgatttttcacttggaggacatatacaacatgcagactggaaaattttaagtattccttggcagttgtagaaaataaagccatctggcataaattattcccctatatttggaataaggaccattctaagatattttcaaattacttttcagacttttgaatgctctactcctcagccaggaggaatatctgtagggtggctccactgagaaagtgtatttctctactattatgttgataaattgtggccaatatgttaagctaaatttataat

SEQ ID NO: 359541 - DNA, 382 bp, Homo sapiens
caacccacctctgggactttgcaagccagctctttttgtgcacctacgttgggacgatctcattcatcctaacctcactttccaagaagggaaatggaggcttgaagagacaaatcaaatctctcaagcaggcagaactaagaggccaggtagaatctgaaggcagacttttggcctccagatccctcgtatttagccaagtggggatgctggcctgcctcctcgtgmtgatgtgagcctcagacaaatcctcctgtgccaggcttgatgccaagtgcttctaagaggtaggaagatgagcgagacagggagacacagacacagacctggagggcttcctggaagcagtggtacttgatggatgcaagaagtgaggagggca

SEQ ID NO: 359542 - DNA, 565 bp, Homo sapiens
atttttctattcctgctcgtccaactcaaaaataaacattgttgaaatctctatctgatgtatccaaccttgtattcccagtgcctacacagcagcaattggttcatagtagacactaaaaactttgggttgaagaaatgaataaactccttctctggkattaacaattagggatttgaagccaatagaagaaataatataatgtaaggggagcttttcttagtcactttaaaaaatatcaatgcctaaaatactgtacattttctacctggtgtgctggaaaaagttgaatagtaaccaagttactcatacaattgacaataggaataaatgcaaatcaaaaataaacccccttttgctcagtaaaccatttgttttccaggcagtcttttactttgtcactgattgcatagtccttaggttctaccaaaccatgaggatataacagagcacagcacaacatggttgatttggtgttttacactaattcatattgtatgaaataattatgatatttatgtaaatgctgacactggtgtggtcaatgcctggtcaaaaatttctg

SEQ ID NO: 359543 - DNA, 507 bp, Homo sapiens
tctatttttaaaaatgtatcaagatgtagtttaagttatcatcatcttgggttcaattttataataaaacaacatgtcctatactaaaacgcaatacatatgtttagacctcacatggattataattgagaagatctgaggtgggtcccaggatttaattttttaagaactttacagacattctggggaacaactctggatttttaaaaatcagtgttttaaaggaatttgatttgtatgtttttgaatttactgcaacttttaattttatttaacatcaattgcagtttattttacctttgaattactccaatcaccttccaggmtattttctctggatttcttaaaaattcaccaaggtttcttcatcataaaaactcaagggaaaaataaagttcgccaaggttatcatatcactctttatttagttttattttgtccttatctatattaagtattttctattgtattgtgcttatctctgtagcagtttcaaattatttacga

SEQ ID NO: 359544 - DNA, 631 bp, Homo sapiens
cttgcagtctgttgccacggaatagttttgaaggttgggaaactataaatgacacatatcccatggtagaaatgaagatagagcttaggggcacaccagagtaacatgcgaaaggaagttgtaatgaacataattgtaatcagcttcctgcctaaggatgttagaaccattatagcttagcttagtattatgcaagttaagacataccaccgtttaaaccatctctttcaatatatagcaacaacacatagggaaaccttgttagaacattgcaatacctttcctaactgggttccctacgtctgatctccattttaggcaatttcaggcacagacactagattttcttcatcaacctttatcatattcaatggctttcaatttttagagaataagttctataaaattatagaaataaaatagtacagatacagtgaactgtacgttgtataatttataatttatttcttttgtaattatagttagttatataaataagtttttaatataataagttcattcctccaatcagcacttgttaagctgctaccctstttcaaggcactaggttcttgggatataaggatgtttagagtacactcccttctttccagagtatataggttagtgg

SEQ ID NO: 359545 - DNA, 598 bp, Homo sapiens
ttattgttcccaatttatagatggggcatagagtagttaactacatttgccacagtcccacagctaggaagtggcagagttgagatttgaacctgtgttttggttctggagcctacagttttagccratgctgtatatatatcttctcttatgattaaaagcaatagcaggtgcattgtgaaagaaatggattagaaacttacagaagcatataaaatgataaaccagattctccttaccattctcccccatccatgacattattcataatgttgacttctcataatggagacttcctacaaccatttttgatttttgtttattttgtagttgctaaattttgaaaatcatcaaacttcactaaaagaaagatgatgtgaaagttatcacaccccgacttccttctttctttccctttacagctcttcataatctatgaccttctttcagatatattgatacattagctattttatattatcaagagttgtagcatttgcattgttttgtaatcatatatttttaatgctttaataagttactctaaagctaggaagtgaattaagagcattacattaatatgatacgtaaatattat

SEQ ID NO: 359546 - DNA, 520 bp, Homo sapiens
aagaatgagaggaaaaatttctctcttcagaaatataagttaggattttaataaaatcatcagcaaacacaagccaccaatatggttaaaacgtatgaaaagtgatgtttagygatttatttattctttatgtttcccccctgccaagtgagggagagcctagaaaaaaatctggatcattatcttaattgtaaaactatacagtcaatataatcacatctgaccatatcacaacagaaattattttgaatgctaaatcatgaatttttattaaactgtccccattaagtttatatgcttacacagcaccataaattcagctcattacagtcgtgcacatgaaatccatcctctccttgtctgttatccatgaagccaattatatttatgagtttgctttgtagttttatatgcaatcttatcctttcctaaattcttaccttgagatattatttcccacctttacccttgttcctgctgtacagtgtgttaaacttttcctttcatgtgagtcctgctc

SEQ ID NO: 359547 - DNA, 520 bp, Homo sapiens
aagaatgagaggaaaaatttctctcttcagaaatataagttaggattttaataaaatcatcagcaaacacaagccaccaatatggttaaaacgtatgaaaagtgatgtttagtgatttatttattctttatgtttcccccctgccaagtgagggagagcctagaaaaaaatctggatcattatcttaattgtaaaactatacagtcaatrtaatcacatctgaccatatcacaacagaaattattttgaatgctaaatcatgaatttttattaaactgtccccattaagtttatatgcttacacagcaccataaattcagctcattacagtcgtgcacatgaaatccatcctctccttgtctgttatccatgaagccaattatatttatgagtttgctttgtagttttatatgcaatcttatcctttcctaaattcttaccttgagatattatttcccacctttacccttgttcctgctgtacagtgtgttaaacttttcctttcatgtgagtcctgctc

SEQ ID NO: 359548 - DNA, 525 bp, Homo sapiens
ccagctatttacctgttttttctcagctctaagttcatgcttctaccctttgctctatgaagcccaggccagagctctgcctactggcttcctattaakcccagatgatgtaaggagcaaaaatgaaaccagaaggcaggaggagataaaaaggacttctttcctattattccaacatgttcctgtcagagtcactcgagcaggggctgtgggtctagcatcagcatgtgactacagccagcttctcagccactctcagaccagccttggcagcctgggtccggcggctcatcagaaacctgaatacccactggatggggcttgcattcccagctcctaatttggggcgattcctttagttttcctcagttccaagggtggtagctattttttattattatctcagttttgcctttatgctctttgagcccactaacagctgtgtaatgtattttctatatgaaatcctgactgtcggcaattcctcgtaccacataaggtgctccactttccaggctggatcct

SEQ ID NO: 359549 - DNA, 525 bp, Homo sapiens
ccagctatttacctgttttttctcagctctaagttcatgcttctaccctttgctctatgaagcccaggccagagctctgcctactggcttcctattaagcccagatgatgtaaggagcaaaaatgaaaccagaaggcaggaggagataaaaaggacttctttcctattattccaacatgttcctgtcagagtcactcgagcaggrgctgtgggtctagcatcagcatgtgactacagccagcttctcagccactctcagaccagccttggcagcctgggtccggcggctcatcagaaacctgaatacccactggatggggcttgcattcccagctcctaatttggggcgattcctttagttttcctcagttccaagggtggtagctattttttattattatctcagttttgcctttatgctctttgagcccactaacagctgtgtaatgtattttctatatgaaatcctgactgtcggcaattcctcgtaccacataaggtgctccactttccaggctggatcct

SEQ ID NO: 359550 - DNA, 633 bp, Homo sapiens
acacataaatagcagaaaccagataaatgactatccctctatattcagyctaacaattgcagataattagcttatgatgtctgaatcattcaatatgctttcaaatttcacaacaaagccatccaaatgattacaactcatttgttataagtcaaggttcgccagtaaaatgggagtgaggattctgggtttgaggttgtgaggaaagaaatatagaaagatagcatcagcaattataccatacccttaaatcatatgtttctacatatttccacaagacaggcttcctattaaggttgtctattttctaattctaagaaaactagttttatacagaagttttctatgttatagccaatatgtctccattacaattctttaatttctgtaacaacataaagaccaatcaagtaatatgcaaattcttattaaatgtctactatgaaacaaagcactggaggaggggatatgggcattgaggagacaacaatgtgttcttggcaagaaacttgcaaacaagagaaagagaaaatacagaatactacaactttggctttggaagggactttggaggtcacctaatacaatcttctagtctgtggataattcaacccctgcaactctccccaggag

SEQ ID NO: 359551 - DNA, 633 bp, Homo sapiens
acacataaatagcagaaaccagataaatgactatccctctatattcagcctaacaattgcagataattagcttatgatgtctgaatcattcaatatgctttcaaatttcacaacaaagccatccaaatgattacaactcatttgttataagtcaaggttcgccagtaaaatgggagtgaggattctgggtttgaggttgtgaggaaagaaatatagaaagatagcatcrgcaattataccatacccttaaatcatatgtttctacatatttccacaagacaggcttcctattaaggttgtctattttctaattctaagaaaactagttttatacagaagttttctatgttatagccaatatgtctccattacaattctttaatttctgtaacaacataaagaccaatcaagtaatatgcaaattcttattaaatgtctactatgaaacaaagcactggaggaggggatatgggcattgaggagacaacaatgtgttcttggcaagaaacttgcaaacaagagaaagagaaaatacagaatactacaactttggctttggaagggactttggaggtcacctaatacaatcttctagtctgtggataattcaacccctgcaactctccccaggag

SEQ ID NO: 359552 - DNA, 556 bp, Homo sapiens
tgaggagacaacaatgtgttcttggcaagaaacttgcaaacaagagaaagagaaaatacagaatactacaactttggctttggaagggactttggaggtcacctaatacaatcttctagtctgtggataattcaacccctgcaactctccccaggagtgttcagcttctgcttaaagctgcttaaacagggaaacagaattcactgccttagaagcctgtctattccatttttgtactgcttttatttttagccagatctttgtgcaaaatcaaaaaatgcaccattacaatttctactcactggtcctttttctttctttacgaacaatagcccttcaagtatttaaagtccctatcatatcccctgtcctttttttatggacggcattgccataggatgctttgtgaygggaaaaaaaaaagagtattccatggtgaaataaacttagaaaaatagagtatattctaatcctgttttgaaaatacactttttgttccttgaaactatgagcattctagcagtaagaaaacccatctacctgcactacagcaagc

SEQ ID NO: 359553 - DNA, 613 bp, Homo sapiens
cttttctattgagcctttttctatgtatgagttggcaatgttagaatatgaatgaatacaaaagaatataagagcttttgtcttgcccttagataactgaaaagtgatgtgttcgaaatttccatccctatctgtcaggctaaataatggtcccccaacccccaaaggcatctagattctaatccctgggagctgtgaatgttaccctgtatgaaaaagacctttgtggatgttatcaaattaaggatccagagatgaggttatcctggattagccaggtaggccctaaatacaatcacatgtgttcttacaagaggaaagtagagtgagtttattagactacagacagaaggtgagaagagcaygtgaccaggaggcagcaattagagtgatgtgactgcaggtgaaggaatgccacagtcgccagaggctggacgaagcaaggaatagattctcccccagagcctccggaggtagcatggccttgctaacaccttgatttcagtccagtgaaactgatttttatcttctggcctctagaactgtaagagaatacatgtgtggtgttttaggccaccaaatttgtggtaatttcttacagcagtaataggaa

SEQ ID NO: 359554 - DNA, 606 bp, Homo sapiens
gcttttctattgagcctttttctatgtatgagttggcaatgttagaatatgaatgaatacaaaagaatataagagcttttgtcttgcccttagataactgaaaagtgatgtgttcgaaatttccatccctatctgtcaggctaaataatggtcccccaacccccaaaggcatctagattctaatccctgggagctgtgaatgttaccctgtatgaaaaagacctttgtggatgttatcaaattaaggatccagagatgaggttatcctggattagccaggtaggccctaaatacaatcacatgtgttcttacaagaggaaagtagagtgagtttattagactacagacagaaggtgagaagagcatgtgaccaggaggcagcaattagagtgatgtgacygcaggtgaaggaatgccacagtcgccagaggctggacgaagcaaggaatagattctcccccagagcctccggaggtagcatggccttgctaacaccttgatttcagtccagtgaaactgatttttatcttctggcctctagaactgtaagagaatacatgtgtggtgttttaggccaccaaatttgtggtaatttcttacagcagt

SEQ ID NO: 359555 - DNA, 578 bp, Homo sapiens
gtatgaaaaagacctttgtggatgttatcaaattaaggatccagagatgaggttatcctggattagccaggtaggccctaaatacaatcacatgtgttcttacaagaggaaagtagagtgagtttattagactacagacagaaggtgagaagagcatgtgaccaggaggcagcaattagagtgatgtgactrcaggtgaaggaatgccacagtcgccagaggctggacgaagcaaggaatagattctcccccagagcctccggaggtagcatggccttgctaacaccttgatttcagtccagtgaaactgatttttatcttctggcctctagaactgtaagagaatacatgtgtggtgttttaggccaccaaatttgtggtaatttcttacagcagtaataggaaactaatacacccatatctaaacaacagcaagaagtaagcacccagcagcttcaaaaacaattccaagctgccaagtattcctcagcaaaggggttctctcagagccttgagccatagatctcacaagttccatatgcacccattgcaagacccaaaggaatgcacaattcacc

SEQ ID NO: 359556 - DNA, 491 bp, Homo sapiens
gtttaactcttcagtgtttttatccctgctagtgtttttatcactgaagcatagatcatgctgtctaccttctcacccagaggagtccctttggcaacatcactgctgggcttcatctagcctcagcttaacgattccagtaacaggaggctcattgctttcagaggcagtgcttctgaaggcactcctttggtaattgttaaaacaaagcagccatgtttgttcttgtttgttctaattccatcctctggggcatgacagagtatgtctcctttctctccatggttcaaatgtagggtttacagaagagcaaacawccttcgtgtttccattcctctctctgatcattgctcctccctctcttttctgctcctctgatgacagtcgcaaatcctaatgatccaaccatactttcacttccacaagttctgcacctttgccaactctctcttcagacttctcccatgattactatttgaagttggaaaaag

SEQ ID NO: 359557 - DNA, 550 bp, Homo sapiens
tcaccaaaagcaatggcaacaaaagtcaaaattgacaaatgggatctaattaaactaaagagcttctgcacagcaaaagaaaccaccatcagagtgaacaggcaacctacagaatgggagaaaatttttgcaacctactyatctgacaaagggctaatatccagaatctacaatgaactcaaacaaatttacaagaaaaaaacaaacaaccccatcaaaaagtgggttgatatgaaaacagagattttttaaaataaaaatgtttttctgttaacatataatcgatttacattgctatttaaaaatggattaatcaataaatatttaaaaaatttctactttaatttttaatatggcaaatattgataatataattcacatgaacaaaaactctttgggatactccataatttttacctgtgtaaaatgaccatgggaccccaaattttgagaatagctgttctaagtcgattatatttctgaagaactactttctattattgtgaactctaaaaaaatgtactatagtttctgaaggcaatttccaagg

SEQ ID NO: 359558 - DNA, 550 bp, Homo sapiens
tcaccaaaagcaatggcaacaaaagtcaaaattgacaaatgggatctaattaaactaaagagcttctgcacagcaaaagaaaccaccatcagagtgaacaggcaacctacagaatgggagaaaatttttgcaacctacttatctgacaaagggctaatatccagaatctacaatgaactcaaacaaatttacaagaaaaaaacaaacaaccccatcaaaaagtgggttgatatgaaaacagwgattttttaaaataaaaatgtttttctgttaacatataatcgatttacattgctatttaaaaatggattaatcaataaatatttaaaaaatttctactttaatttttaatatggcaaatattgataatataattcacatgaacaaaaactctttgggatactccataatttttacctgtgtaaaatgaccatgggaccccaaattttgagaatagctgttctaagtcgattatatttctgaagaactactttctattattgtgaactctaaaaaaatgtactatagtttctgaaggcaatttccaagg

SEQ ID NO: 359559 - DNA, 610 bp, Homo sapiens
tgaacttctgtaacatcatgagatgtcgatttttctttatgaaacaattataccttcaaatttcatcatttgcagtagttatgttccctgaagtctccatgaacatggagttagcaaatactgaactactgctcctaggagaaatacaggattaggttcctgtgagtctctggtcacatgtacatcaagcaatcaatatataagctcgttttatktgtgtttctgttttaaaatatattactcagtatatatcattgttcaattaacatttaaatcatggtaaccgcactataactcatgcctagatgaaacttatctaacacatattttctccagaaggcatatcatgggcttagaaatactaaacagcacttcagccctacagagggggctgataaacagcaaagtcaccaaaaaaagtacaaaactgccaaaaaaaaaaaagtggtactataaagatgacttgtttatagtatgagagctgaaacaaaaagacagaatgtcatcttgttcagtctcagctaggaaggcatgtttcaggtggctcacattttttagtgctctgtgcatgctcagaaataattgtgaaagcaccacaactattgatttg

SEQ ID NO: 359560 - DNA, 604 bp, Homo sapiens
taatcaaatactaataaaataaaaaatggaatactaaaaaaacctgccaataaaatcagcagctttcccccatagctaattccaaactttcctctgactttctaagtattttcattgatgccctagtccagtgctcaattctggctattcatcagaactactaggggagaatttaaatttttattagaaaataatatatttttatggtaaaaaatgttcaaatggttcaaatagcattacataaaatgtaaaattctgccatcctttttatattcctcagagctttgtaccttatgcctgtcttttcccctccctccctccctccctccttccttccttccttccctccttccttccttccttccttccttccttcttccttcatcaaagatttattaagcatgtgctatatatcaggcactgttcaaactgggggggacacagtgaacaggacagatgaaattcttgtctakcggggcttactataacttttgaaataaacaaataaaaggataatagatggaaagtatgaagaggtatgggataaaaagagcataatggacaggaagcgactgtgggacggagtgagataagccagaaacta

SEQ ID NO: 359561 - DNA, 510 bp, Homo sapiens
agattattctcaattgttcaaaagtctaaaattayacaggtagggctgattgtcagccagggtatcctctagtgcagtggtccccaacctttttggcaccagggaccagtttcatggaagaaaatttttccacagatggtgggaggggatggttttggggtgattcaagcacattacatttattatgcactttatttctattattattacattgtaatatataatgaaataattatacaactcaccataatatagaatcagtgggatccctgagcttgttttcctgcaactagatggtcccatctgggagtgataggagatagtgacagatcatcaggcattagattcttataaggagcatgcaacctagatccctcacacatgcagttcacagtatggttcatgctcctatgagaatctaatgccactgctgatctgataggaggtggagctcagcttcactcactcacccgctggtcacctcctgctgtgtggcctgattcctaacag

SEQ ID NO: 359562 - DNA, 510 bp, Homo sapiens
agattattctcaattgttcaaaagtctaaaattatacaggtagggctgattgtcagccagggtatcctctagtgcagtggtccccaacctttttggcaccagggaccagtttcatggaagaaaatttttccacagatggkgggaggggatggttttggggtgattcaagcacattacatttattatgcactttatttctattattattacattgtaatatataatgaaataattatacaactcaccataatatagaatcagtgggatccctgagcttgttttcctgcaactagatggtcccatctgggagtgataggagatagtgacagatcatcaggcattagattcttataaggagcatgcaacctagatccctcacacatgcagttcacagtatggttcatgctcctatgagaatctaatgccactgctgatctgataggaggtggagctcagcttcactcactcacccgctggtcacctcctgctgtgtggcctgattcctaacag

SEQ ID NO: 359563 - DNA, 510 bp, Homo sapiens
agattattctcaattgttcaaaagtctaaaattatacaggtagggctgattgtcagccagggtatcctctagtgcagtggtccccaacctttttggcaccagggaccagtttcatggaagaaaatttttccacagatggtgggaggggatggttttggggtgattcaarcacattacatttattatgcactttatttctattattattacattgtaatatataatgaaataattatacaactcaccataatatagaatcagtgggatccctgagcttgttttcctgcaactagatggtcccatctgggagtgataggagatagtgacagatcatcaggcattagattcttataaggagcatgcaacctagatccctcacacatgcagttcacagtatggttcatgctcctatgagaatctaatgccactgctgatctgataggaggtggagctcagcttcactcactcacccgctggtcacctcctgctgtgtggcctgattcctaacag

SEQ ID NO: 359564 - DNA, 641 bp, Homo sapiens
tagggggtggacagcaacaggtggccaacaggctccactgtaagtgatagcattgctactactatcactggaactaccatccagtggcacaaccatccaaaagtgcacaaactccctttctgattatccttttggtcccaagggcttcccaggtaaccaatgggtccaggagaggagtgacctccttttgtgacattgtacctatcaaggaactgaagacgagggaagccatttactcctgtaagttgaatatgccaggaggcccagaatttactctactctgtaaatctcatttttatttcaatgagaagggctttgkggccatgacagcctccatgacccaagacataatgggcagctagctgcagagagtcacaggaaccatgggagcctccatttccagaagcgcctagtatgtggccaagagctgtcattccagcagtgtgttatgtaggttgaaagggcagtttcttgcacccacgaacaacttatggccttcatcgttgtccagaatctccaggagccttgaaagaagcttaccaaaatatctacagggaaggaatctctagggggcactagtgtatgtactgcaatttggatagattttagagccttttgttgtaagggatcccagtcaaaat

SEQ ID NO: 359565 - DNA, 621 bp, Homo sapiens
tattcagtaataaaaatttttcccctcgtttccctggaaaagtaatgtctaagggatctatcctttgatycctgaatctccagaaatattcctagtgccaggagcagagattcaatctctacatgtgcaaaagataaatggttagaaaaatatctgaaggcttcagcagagtgcaactcggtgattttaaataccccaaattgatttaccctatgcttaggctagaatcaggagtaattaggaattgcttttgcactttttctcaatcaagagtgaatacatttttttaattttaaaaggaaagttagaaacttactattttttgtaatctagaatctggatgcaaaagaatgcaaaaactttcagagaaataatacattttgttgtcattaaagcgattacccttttcagggggggaaaaaaataactttccaaattagatacctcaataaagacagaaagttggtctgtaaagaacacaagtcttgtttttatgccatcaccgactctgagggtttccggcctaatcgtttttgatttttttcttcccagccaacttaaaagatttcttcacaatcaatgagatcaactatctggtccattcagcgtagttattatgaa

SEQ ID NO: 359566 - DNA, 621 bp, Homo sapiens
tattcagtaataaaaatttttcccctcgtttccctggaaaagtaatgtctaagggatctatcctttgattcctgaatctccagaaatattcctagtgccaggagcagagattcaatctctacatgtgcaaaagataaatggttagaaaaatatctgaaggcttcagcagagtgcaactcggtgattttaaataccccaaattgatttaccctatgcttaggctagaatcaggagtaattaggaattgcttttgcacttttyctcaatcaagagtgaatacatttttttaattttaaaaggaaagttagaaacttactattttttgtaatctagaatctggatgcaaaagaatgcaaaaactttcagagaaataatacattttgttgtcattaaagcgattacccttttcagggggggaaaaaaataactttccaaattagatacctcaataaagacagaaagttggtctgtaaagaacacaagtcttgtttttatgccatcaccgactctgagggtttccggcctaatcgtttttgatttttttcttcccagccaacttaaaagatttcttcacaatcaatgagatcaactatctggtccattcagcgtagttattatgaa

SEQ ID NO: 359567 - DNA, 553 bp, Homo sapiens
ggtaacaaaatctctcagctttcatttatctgggagtttcttaccttctccttcactttggaaaaacagttttgctggatataggattctagattgacagttatattcttctagcacttttagtatatcagcatactgccttctggcctccaaagtttctgatgagaaatctgctgttaatattgtgaatctcttttatgtaacaagtcagttctctcttgctgtttgcaagactcccttttgtctttgtctttcgacagtttgaatacaatgtgtctcagtgtaggtctctttaagttaatcattcttggtatttattgaaattcttggatgtttatatttgtgtttttcatcaaacttgggaagttttcagtyattatttcttcaaatattctctttgccctattctctctcttctccttctgtgaggacagggtcttttttgcccactctgacttctgcaaacagtgtgcaagctgcttcaggaacgtgtggggatgggtagctgccattatgctaagggctgaaattaaccaccatttgcctactattc

SEQ ID NO: 359568 - DNA, 553 bp, Homo sapiens
ggtaacaaaatctctcagctttcatttatctgggagtttcttaccttctccttcactttggaaaaacagttttgctggatataggattctagattgacagttatattcttctagcacttttagtatatcagcatactgccttctggcctccaaagtttctgatgagaaatctgctgttaatattgtgaatctcttttatgtaacaagtcagttctctcttgctgtttgcaagactcccttttgtctttgtctttcgacagtttgaatacaatgtgtctcagtgtaggtctctttaagttaatcattcttggtatttattgaaattcttggatgtttatatttgtgtttttcatcaaacttgggaagttttcagtcattatttcttcaaatattctctttgccctattctctctcttctccttctgtgaggacagggtcttttttgcccactctgacttctgcaaacagtgtgcaagctgcttcaggaacgtgtggggatgggtagctgccattatgctaagggmtgaaattaaccaccatttgcctactattc

SEQ ID NO: 359569 - DNA, 597 bp, Homo sapiens
tgtctaggtggggagacagattcctggtgcttcctacaccactgtcttcccagaatcctatcaccayggctccttttattaaagatttgtgtttagaaaccaatatctggcagctaaacattagagtttcttggttgtcttggtagatagagctagaatgtgaatgtatatattctagcccactgtattagcctgttctcatactgctataaagataccatctgagactgggtaattcataaacaaaagaggtttaattgactcacagttctgcatggctggagaggcctcaggaaacttacaatcatggtggaaggtgaagggggagcaaggcacaccttatatggcagcaggaaaagagagagagtgacaggggaaactgccacttttaaaatcatcagatcttgtgagaactccctcattatcatgagaacagcatgggggaactgctcacataattcaatctcctcccgccaggtccctctctcaacacatggggattataatgggagatgagatttgggtagacacacagagccaaaccatattattttgtccctggcctctcctaaatattatgtcctttttacatttcaa

SEQ ID NO: 359570 - DNA, 630 bp, Homo sapiens
tgtgctctccctgttgcaggccttgggtggtaggagagctgctacagttgtggtttctcctgggcaatgagacttgcaactggggccagcttggagacctggaactgatctgtgtgtgtcattgctggctgccccggcctgctcctctgagattgtggtgcagtggggccctgtctgctccacacccaggcagatctctaggcattcagaacccctgcttgcctggttcagcagcctgagcctcccccctcttcttggacatagattgtggtgcagtgagtcccccttcactctacccccagkcagaactccaggcatttggagcacctgcttgcctaagccagcatcctgagctgccccacccttcctgggcatagattgagatatagcaggccctctccactctatgtgcagctagatctccaggcattcaaagcaactgcttgcccagattggtagcctgagctgtcccacccttcctgtgcagagatcatggggaagcagggccctctacactccattcccaggccaatctccaggcatttggagcatacacttatctgaatcagcagcctaaattgcccatgcctcctgtgcagagggccatctctgttttacacccaggcagat

SEQ ID NO: 359571 - DNA, 583 bp, Homo sapiens
atttaagttggatcaccctatttctatgcttaaatccctgcaatagcgtagtgtagttgctaagagcatagacctgacagctttgggtcaaatcccagctccctcactcctgtacagatgcttcagttttctcaactgtaaaatggggataataaatagctaactcctaggtttgttatgaggtttaaatgagtttatataatrcatatagcagggtgtggaattatgtgattatttgataaatgaaatagtgtgctgtcttgcttagaataaacaggtaagccctctcttctcttatgcctccttcacttcactccagccatcttggctagcttgctttggaaattagagctgaataatgagcacaccaagcctgcccccacctctgctattgccccaagtacatgcacaatttattctctcacttctattccggtctctgatcgaaacctccctcatcagtagttttcactgagcataagcagtataacaacctttgtccccagacactccttctccaccttgcgttgctttattttcttcatattgctcatcattttctaacatattatgaatttacttg

SEQ ID NO: 359572 - DNA, 581 bp, Homo sapiens
tatggctttgattgacttttcaaaatttgtgtagctcaggaaacaaggtttcattattcttgctttttaatagatggtaatgctacaattgatttttaaagataatatactcaggtattcaggtaataaaattatttttattgctgaattcaaatggggaaaaatttttaatttaaagatctattcagtttctttccttaaaacttgcaagaaacataaaagagtttcttttctttagtaatgaaatcctgtttagaaaccagattctgaatatttgaacatcttcataaagaaaaggaaaatgtgttctaattttttgtgtaagcctaatggtacataagatgtttgtgtaaatcatattaggctgctataatttgagaggatagaaacttcttcactattggaattagaactgatgaaatgtggaartgtacagtggcaagtgacaagcaattttgtccctctttctctttccatccaatctggccatctagacttcctggaacttgatgcttcagagagggaatttctactgagcttaaggggctcagtcttccaggacctaggtggtctggcttttc

SEQ ID NO: 359573 - DNA, 541 bp, Homo sapiens
ttagtttattacatttaaaagaatggcaccaaggcagataaaatagataataatcttttgactgtggttagctttgcaatgtgtgggcatttcactaaattatttcaatatttctttgtcccttattaataagatgtcacttgtgacttacrggtgggttacaaaaaatatgacttaacaattgaattattgttgaatcaatggaaaaaaatttgcacatatcccatttggattgggtcataaatgggaaatacaaataagatgaggtattttcttttggaaatagtatatgcagagaatgctaaacagcatgccatgtgagctggattttggtttcagctcagtttcagagtggttattcagtttgcttttctgaattttacttttaccacttgtaaaatgaggctgttggactagatcgcatcttagttcttcatagctattaaattctacaatcataaattacagtttaaaaagggcgaacaggaagatacatttgcattagagctacagaaaattctttttcaataaacgttataga

SEQ ID NO: 359574 - DNA, 541 bp, Homo sapiens
ttagtttattacatttaaaagaatggcaccaaggcagataaaatagataataatcttttgactgtggttagctttgcaatgtgtgggcatttcactaaattatttcaatatttctttgtcccttattaataagatgtcacttgtgacttacgggtgggttacaaaaaatatgacttaacaattgaattattgttgaatcaatggaaaaaaatttgcacatatcccatttggattgggtcataaatgggaaatacaaataagatgaggtattttcttttggaaatagtatatgcagagaatgctaaacarcatgccatgtgagctggattttggtttcagctcagtttcagagtggttattcagtttgcttttctgaattttacttttaccacttgtaaaatgaggctgttggactagatcgcatcttagttcttcatagctattaaattctacaatcataaattacagtttaaaaagggcgaacaggaagatacatttgcattagagctacagaaaattctttttcaataaacgttataga

SEQ ID NO: 359575 - DNA, 541 bp, Homo sapiens
ttagtttattacatttaaaagaatggcaccaaggcagataaaatagataataatcttttgactgtggttagctttgcaatgtgtgggcatttcactaaattatttcaatatttctttgtcccttattaataagatgtcacttgtgacttacgggtgggttacaaaaaatatgacttaacaattgaattattgttgaatcaatggaaaaaaatttgcacatatcccatttggattgggtcataaatgggaaatacaaataagatgaggtattttcttttggaaatagtatatgcagagaatgctaaacagcatgccatgtgagctggattttggtttcagctcagtttcagagtggttattcagtttgcttttctgaattttacttttaccacttgtaaaatgaggctgttggactagatcgcatcttagttcttcatagctattaaattctacaatcataaattacagtttaaaaagggcraacaggaagatacatttgcattagagctacagaaaattctttttcaataaacgttataga

SEQ ID NO: 359576 - DNA, 494 bp, Homo sapiens
aattttttcaagcaggtaatttagaaaaaatacaactttaaaaaccagcttctacattaattttcatgatatttctttttggaagtctttatttttaataatttcaacttgtcttttagctttagggggtrtaagtgcaggtttgttacatggatatattgcctgatgttgagatttgggatacaatagatccgatcacccacatagtgagcacagtactcaataggttttcaaaccttgcccccctacctcctctagtattccccatgtctatcactgccatcttcatgttcatgtgtacccagtgtttagctcctacttataagtgagaacatacggtatttagtgttttgttcctgtattgattcgcttaggataatggcccccagctccaccatattactgcaaaggatgtgatttcattcttctctatggccacgtagtattttatggtgtatttgtaccacactttccttatcaatccacgactgatg

SEQ ID NO: 359577 - DNA, 613 bp, Homo sapiens
aactatgtagttttgagagacctcagaattgatttctgtttttattccactatggtccaagattatggttgctgtgatttcaatttttttaaatgttttgaaacttgctttatagcctagcatgcaatcaatcttagagtatatctcatgtgcagttgagaagaatgtatattctgtggttgttggatgaaatagcctgtagatgtttattaaatccaattggtcaagtgtcaattttaagtccagaatttctttgtcagtttctgccttgatgatctgtcttacatagtcagtgggtgttgaagttcctcactgttattgtgtggctgtctgagtcctttcgtaggtctagaagtacttgtttcatgaatctgggtgctccaatattaggtgtatatatatttaagatagttaagtctccttgtgaattgaaccccttatcattatataatgcctgtctttgttcctttgtacttttgttggtttaaaktctgttttatctgctgtaagaatagtgaccgctgctcttttttaatttcttgtttgtgtgatttttctcctaccctttacttagagcttatgtatatcattacatgtgaaatcagactcttga

SEQ ID NO: 359578 - DNA, 651 bp, Homo sapiens
ctcttcagcatctccctctgacttttgcgtgtaaggatcctgtgggcccacctggataatcgaggwcaattgctcgatgtcaagatccttaacttaaacacatctgcaaaatcattttgccataagagagaacgtagtcacagggtctggggattaggatgtgaacatcttgttgggagggggtggcatttttcagcctaccatgtttggctaatgtaaattcaaacaaaaaggcaaaattgaagggaaagtaacttgacatacagactcactcactctaccgtgccgtaatctgaaggacaaatgaatctgcagataagcaaatgtgggaaaatcatgagggttgcagagggctcatcttctaggtagtcagtggcgtttggtgatgtatgatgattaattacaatctgcaaaggctgtcccagatgtaaagacctcataaagccagagatgacatcaatggtttattagttttcatgatggaagcatcttaaacggatgtggcctaattgtccatttttcatctatttctgtttaacagttgggggcttgcatgcatgtttgtcaaacctctctatatatgtgagagttttttcttgaaaagttgtgtgtacactaatttttcaaaaattaaatcctcatttgaatgaa

SEQ ID NO: 359579 - DNA, 431 bp, Homo sapiens
cctcctaaggatgaataattcctgcagttctttcttcccttctccccttcattgctctgtcagaaagcttattaacatatgtatattcctggcttttccgctatatgaacgattcagaaacaaattaaaatgtcaagttctccatggcttcctggtaatattaaaatctaccagtttctattaaatttccatcaaataatattattcagagacaaaagatcaattaatccctgttctgctccygaaaaacactgatcacaggagacccagtgatgtgagctcttatttaatcaacagagtcaatggtgccctggaacataggagaaaatgagacccagacataaagacttgagccatgccctctttatcaactccacatattgtatgagaaaggctggttcagaaggtttgatagatactcactcaagtat

SEQ ID NO: 359580 - DNA, 401 bp, Homo sapiens
agaatagaaccaatgccacatccagaaggaaatgtatctttgtaatagatacatcaacratttccccttctctggatgggccctggtttgcaaggttgtctgtccctggaacccaggccctgtggcccttgctgattggttttgggtgtaggcatctgaaagaaatgctgccagtctttgcacttctgtgaattttcatgtggtggtcaccaaggggagcccctctctggctgtgagagccacaggagcttgggtggctgtgctttctacaatgtggaggaagctagtctccaggagagatgggagcagacctgaaaaacaaagacagcaagagcccaggcagctttcgagttgtctctgaggctcagctttaccccacccttcctgtgtcctacaagact

SEQ ID NO: 359581 - DNA, 556 bp, Homo sapiens
acccttcctgtgtcctacaagactttctcatataccttggacaaattctcttttctttccaagttagtttgatttggacatttttctttgtaagttgatgaatcttaatgaattcagtcttgttcaggtagtggttcacaggatcacaggaccaaaagctctggtggtgtggtgtgtagaaactagcacttrtgaatgttttactgcttttgtaggttagaggacagtcaaggttatatgcgtaattgaacatcatttatacttgcacacattctaacatgttttcttgaggatgagagagggagtggcgttatggtaggtgcctgggagttgggtggattctgtgaaaatgtgtcatgcatctggaagatgtggccttgtcatgtccattaccataaatttgctgagtgctgcagcctattctgggctccagaatcttcatccaatttgtccattggatccacctggttaggacatccagctttagagacatatgaaatgttctttaagctctcatttttataaagccaatagtgtataatgaaatgttttgggg

SEQ ID NO: 359582 - DNA, 556 bp, Homo sapiens
acccttcctgtgtcctacaagactttctcatataccttggacaaattctcttttctttccaagttagtttgatttggacatttttctttgtaagttgatgaatcttaatgaattcagtcttgttcaggtagtggttcacaggatcacaggaccaaaagctctggtggtgtggtgtgtagaaactagcacttgtgaatgttttactgcttttgtaggttagaggacagtcaaggttatatgcgtaattgaacatcatttatacttgcacacattctaacatgttttcttgaggatgagagagggagtggcgttatggtaggtgcctgggagttgggtggattctgtgaaaatgtgtcatgcatctggaagatgtggccttgtcatgtccattaccataaatttgctgagtgctgcagcctattctgggctccagaatcttcatccaatttgtccattggatccacctggttaggacatccagctttagagacrtatgaaatgttctttaagctctcatttttataaagccaatagtgtataatgaaatgttttgggg

SEQ ID NO: 359583 - DNA, 615 bp, Homo sapiens
tcccccacaagaagctctgtaaggcagtgtttttcagggcaggattcctttggttctcttttaaaatccagaagaggaagagaggcattctcctttctttcgtatggaagacagcctggctgtggtattttgaggactctggaagacagggatgctcctgtgtttcctagtcctgtgtttcagggggtgatgagagccagcacatggcagcaaatcccgcatatcttctgggaactacaggaaatagctgggaaagaccttgaggagcrttggaggtcttgtaaggtggatgggtcaacagtcagatgggggaaaatggctactgctttattgagtgcttgtcattcacccaagtgacctatgtgttttataacttcccatctgccaagatgcaaactaaaatattaggggttgatatttctctcctgtcttctggctagcttgtgttctcaaatgagggtaggctaaagttcttttcctcttcagggaaagagggaaagtggaggagaggctaatgctaggttaggaaatggaagacaaccttggctcaggaagctggaaggcagagacccaagtactcttccagcctagtttctccacaaatgacaaaatggg

SEQ ID NO: 359584 - DNA, 572 bp, Homo sapiens
gttaggaaatggaagacaaccttggctcaggaagctggaaggcagagacccaagtactcttccagcctagtttctccacaaatgacaaaatgggtaccagttaactctttgtcttggaaatcttggttatacrtagaactcaaaattatctctgttaatatagaaaccagagaagacatttgccatcaagtgctaacaagctgtagctaggatagaggtggatttgagtttcatagctggactcttagtatttgcagccagctagttgcacaggctggccctatcatttgagtaccctttcaacatgacttatatttatatgcccagttgaaatttggggaccctacttattacattatggtggagttttaatcttctctacagttctgtgaagtaggcactacttttattcccattttaccagcatgaaattctaagattaagtaatttgctcaaaatcacacagctagcaagtgtgaactcagggaatctaagaccataatgtgctcttttaaagaaattgtttattagtgagtaatatacatatagaaaagtatacatgtcctaagtgt

SEQ ID NO: 359585 - DNA, 572 bp, Homo sapiens
gttaggaaatggaagacaaccttggctcaggaagctggaaggcagagacccaagtactcttccagcctagtttctccacaaatgacaaaatgggtaccagttaactctttgtcttggaaatcttggttatacgtagaactcaraattatctctgttaatatagaaaccagagaagacatttgccatcaagtgctaacaagctgtagctaggatagaggtggatttgagtttcatagctggactcttagtatttgcagccagctagttgcacaggctggccctatcatttgagtaccctttcaacatgacttatatttatatgcccagttgaaatttggggaccctacttattacattatggtggagttttaatcttctctacagttctgtgaagtaggcactacttttattcccattttaccagcatgaaattctaagattaagtaatttgctcaaaatcacacagctagcaagtgtgaactcagggaatctaagaccataatgtgctcttttaaagaaattgtttattagtgagtaatatacatatagaaaagtatacatgtcctaagtgt

SEQ ID NO: 359586 - DNA, 599 bp, Homo sapiens
ggtttaatgtgcaaatcctttgtaagaaaggataattatcatatttgctttggtgtcagtgtgcagggtgatattaaataatacagttttattaaaattttcatatattcaacagtgtgagatccacccataaaacacctactttgggtctcagtaaaatacatgaaaagacaatagattatcaagagtttgcctttgaagctctaatgaattgtcttgatcttggactatttttgctccacaactttgaagtgaccactcaaatgtcattgtttaaaatgtagcaagaaaagcccgccctgctatataggagtggcttgcttctctggagagggaaactttggatggctccatgaaagcattctgggggtttggggaataagggtaggaaactgattgctcctctgcatatagaaagagaatgaaactcttttctgtttgaatttacatttaattttcatcaasctgactttgtcctggaagatgtggatattacaaagttttcacctctgggactcatgatgacaatccatcccttttccccatatttaaaggcagaattggcagcattctctttatttcatgaactgcttttaaat

SEQ ID NO: 359587 - DNA, 569 bp, Homo sapiens
atagatgttccatacacactttctttcagaaaccacacccataatgcatctgcaatgatttcctgcacattattttttattgagagttttttaaaatctgagagcaaagttattttcaatgcttatgtctttcaatctgttgcaattatctacccatcttcagttcaacagcatgattctcttgttaattaatctttattccatctttctgatgcattcaacttagtttctatagaaatgcctctctttccacactcgtatttcactactttaaataatataaaattgaacaataacttcacattacaaaccagtttcaagcaacatgaacaagtgagggaaaaatacagctgactcctggtaagaatacaacaaacatactttaaatagaactgaggcaggaaaataggatctggaggcagggaacctaaggtagattcgcactgacttctagaactagatcaaaaggaaaaccccaacttttcaggcccaagtaacaaaagaacagaggctactccctttgyaaccccctcctcccccgccacacacacacacacacacaaacacac

SEQ ID NO: 359588 - DNA, 592 bp, Homo sapiens
cagcttctttcagcaatttgtgtgtgattttcatccatgttgttgcataaagctgtagttcactcatttttattggtaaataatggcctattgtgtgacaagaccacaattcatttctccattctattgataggcttttggttgtttacagttttgggtgctaagaacgttattttacatgtcttttkgtacataagagaacactttttttgctgttggatatgttaaccaggattgaaattgctgggccatacatagcgatgcgtttgtaaaccagctcactgaataagaaagccttgattagcatttgctaacatctgtgatgttaatactcctaccatggccaatttccagctaccaataatgtaatgacccactcacagaagcccttttaacaatcgctctcatgagctgctcggaactggctccaacaatgctgactcaacccaccatacaacccacactttacctgttcttgactttagcagacgatgtcaaactgtttgtccaaatgattggatgaattaatactccaccaaaaatgtatgtgttcccctcgttccatagactcaccaaccctcagtattgtcag

SEQ ID NO: 359589 - DNA, 532 bp, Homo sapiens
taagggtttttattgttagtatgtattaaatgttaccaaattattttgctcttttcttctaatgtggtaaattacactgatttttttaaatgctaaactaaacttacattcctataataaacccaattggtcattatatacttttattacyttttatacttttttattacctttattacttttttattactttatatacttttcattatattatatttacactatatacttttgaaacctagtttcagtctgactatatattgcttagaaatttaacatcaatgtttatttaaaaaattggcctgtaattttttttcttttaatgtgatttttaggctttgatatcaaagcatatgctagtttcatgaaattattgggattgttttttctattctctgcaagagtttgtgtaaaattggtgttatttcttctttaatatttattagaattagccattaaaactatcttggctggagttctctttctggtatataatcacagaatcaatatttttaagtattataaatctctt

SEQ ID NO: 359590 - DNA, 532 bp, Homo sapiens
taagggtttttattgttagtatgtattaaatgttaccaaattattttgctcttttcttctaatgtggtaaattacactgatttttttaaatgctaaactaaacttacattcctataataaacccaattggtcattatatacttttattactttttatacttttttattacctttattacttttttattactttatatacttttcattatattatatttacactatatacttttgaaacctagtttcagtctgactatatattgcttagaaatttaacatcaatgtttatttaaaaaaytggcctgtaattttttttcttttaatgtgatttttaggctttgatatcaaagcatatgctagtttcatgaaattattgggattgttttttctattctctgcaagagtttgtgtaaaattggtgttatttcttctttaatatttattagaattagccattaaaactatcttggctggagttctctttctggtatataatcacagaatcaatatttttaagtattataaatctctt

SEQ ID NO: 359591 - DNA, 532 bp, Homo sapiens
taagggtttttattgttagtatgtattaaatgttaccaaattattttgctcttttcttctaatgtggtaaattacactgatttttttaaatgctaaactaaacttacattcctataataaacccaattggtcattatatacttttattactttttatacttttttattacctttattacttttttattactttatatacttttcattatattatatttacactatatacttttgaaacctagtttcagtctgactatatattgcttagaaatttaacatcaatgtttatttaaaaaattggcctgtaattttttttcttttaatgtgatttttaggctttgatatcaaagcatatgctagtttcatgaaattattgggattgytttttctattctctgcaagagtttgtgtaaaattggtgttatttcttctttaatatttattagaattagccattaaaactatcttggctggagttctctttctggtatataatcacagaatcaatatttttaagtattataaatctctt

SEQ ID NO: 359592 - DNA, 532 bp, Homo sapiens
taagggtttttattgttagtatgtattaaatgttaccaaattattttgctcttttcttctaatgtggtaaattacactgatttttttaaatgctaaactaaacttacattcctataataaacccaattggtcattatatacttttattactttttatacttttttattacctttattacttttttattactttatatacttttcattatattatatttacactatatacttttgaaacctagtttcagtctgactatatattgcttagaaatttaacatcaatgtttatttaaaaaattggcctgtaattttttttcttttaatgtgatttttaggctttgatatcaaagcatatgctagtttcatgaaattattgggattgttttttctattctctgcaagagtttgtgtaaaattggtgttatttcttctttaatatttattagaattagccattaaaactatcttggctggagttctctttctggtwtataatcacagaatcaatatttttaagtattataaatctctt

SEQ ID NO: 359593 - DNA, 621 bp, Homo sapiens
ctgctggttggatggcctgcttcctcccctaggccttaaaggaaatctttgctggctgggacaaaccatgcctattcacctttttatctcaaagcctagtggagtgcccaataagaattcaagaaatatttaataggtggaagagtgaatggatgaatgaacggagcgacaatgcatgaatagtggtgttaatcagttttccctccaaacctgctcttctctgtatcaaacaaggtccagttagggggaaaaaataccataaacaagaaacctgacaaactggatatttaaagcaaaggggaatagatgtcattaatcgcacaccattggaagaagtgctgaggtgactgacatgcataaccacaggaattagttactaatctaggactaggaaagagaaaggaagaggtgggttagcagaatctggggaygcctcagtgttggcgatcagaatcccaagaagggtcaaggtcaggtgagtgctggacctccagaggagtgtggcctaatgggtgcttatgcctctgaggagagggcatgatctggtgaatgcagaccatggaagggcctggctccatgggtgaggaaggatggcatggctagcactgaactcccaaaagt

SEQ ID NO: 359594 - DNA, 558 bp, Homo sapiens
tgttttttaagatacaggcttttgctctgttgcccaggtgcacacaccatatccagctgatagattttttaaaattccattttttcagagatgggggtctccctgtatttcccaggctgatctcaaactccagggctcaagctctcctctacctcagcttcccagagtgctgggattacaggtgtgagccactgcacccggccaagacttcttacctgaaagccttcattctttaaggggcctgaattcccagaggtcttgcatttattgagttgatatggttttccaaaatgttgcaccgaggagtataagagacacccttagaagaccacaggctctgggactagttttctctgtcttcttgagtagtagaacccaattttcccagccagtataaaattcctttttagccttttggtttagtagcatyagaagcttcaaatggtcatctacgcctacgtggaatactttctctttgtaaatgaaaattcctaaatcaacagagctcaaaggtgtagagacaggtaacaaacattatctcagtggattgctagtgta

SEQ ID NO: 359595 - DNA, 595 bp, Homo sapiens
gcctacgtggaatactttctctttgtaaatgaaaattcctaaatcaacagagctcaaaggtgtagagacaggtaacaaacattatctcagtggattgctagtgtagctgtaggagaatccattcccaagttctgccccttgattctggctgtgggataaattgcaccacacattgatcactggttcaaagcatgtatttcactctattggatagaaccccarcctttcagggttttctcttccagctggcctctaattggccattctaccatttgatcagagcagctgcttctgggagatgtggcacatggtaagaccatgtacatgggcccattgctatacttcttttgccatggaataaattccttgtttagaagcaaatattgtctgggtatgccatgatgatgaataagatgtaataaaagtccaaggataatgagatggcaaaaacataacaggaaagagaaatctgtactgtaatacatatactttctaatgagcacacgtggctggctgccctttatgatgaagagtttcaatatgagtaatcagctaccaggtggttctctggtttcctggaaaaatgatagtatat

SEQ ID NO: 359596 - DNA, 391 bp, Homo sapiens
aagaccatgtacatgggcccattgctatacttcttttgccatggaataaattccttgtttagaagcaaatattgtctgggtatgccatgatgatgaataagatgtaataaaagtccaaggataatgagatggcaaaaacataacaggaaagagaaatctgtactgtaatacatatactttctaatgagcacacgtggctggctgccctttatgatgragagtttcaatatgagtaatcagctaccaggtggttctctggtttcctggaaaaatgatagtatattaatggctcccttttggtttctgctcttggcaggttagacacttagtagtagcaattgtcagttcagccttggaaagtgtgattccctgctgccaagctcctccacac

SEQ ID NO: 359597 - DNA, 518 bp, Homo sapiens
tctgaatattgagagcctcttcttgtagcagatattccctgatgaccccatgacaccctcatttcatgaaatcataaataaagcagtgattggagcagcagcatactataaaaactcagcagtggctgcctctctaagctggggtgatagtgggagatgttgccgttgtgatgaggatgaagggatcctaygggggcagagcacaagcactagcatttaattgccagtaaaaaggtatcatcaaagtagaagtagttaatagcaacagggatatattgatagtcaggatacttatatctacaaggtctttggtggtggctaatcaatcacctgtccatagaaatgaaagagataggcagcctaccagagtattacttgatctttataactggaaaaattcctagtgtagtggatagaaatctgacttgagttgtcacaatagggagtcataacctatcaactggttctgtgctctaagcccatccaaagatactgaacttttttttcccattctgttc

SEQ ID NO: 359598 - DNA, 555 bp, Homo sapiens
ctgacgggactgtatgtgtgttcccctggagggacacaggagtaaagcaaatcggaagaattgggttattagtggttttcaggaacagactaactaaccaaggaaaatgcctttcagagaagcagggtcacaagttactctccaaagcataataatgtttttcttattttcctctaaatatagaactatcatggctgacacttcttttggaaaagaatgaagcaatacatatcccttgtgtttttgacattgtaaagataactttagtagaaatggctttctattccagccattaactcaaccacaccaaaattaccttggctcccttagactgagggtggagaggggcactgataatgggcattatctagcacaaggattttttgtttctcagcttgaagccaatggaggtattagtattgctttgtcctcttgagctgggcagtgtattcrtatgttagcattcatggagctgtacaccaaggatgtgcatatggctgtgtgtaagttgtagcttgatgaaatactgtcagcacaaaaaaaatggaaaacaaa

SEQ ID NO: 359599 - DNA, 432 bp, Homo sapiens
tgggtccacgaggaactcagagggagagaaattgtcattgtctgcttaggctgccgtaacaaaacaccatagactgaggtagcttaaacaacagacatttatttctcacagctctggagtctggaagtctgggatcagggtgccagcatggttgatttctggtgagggctctcttccaracttaaaaacttctgccttctgtctgtgtccttaatggcagagagggggcaagctctctggtttctgttcttagaagggcataattccatcagaagggcgccaccctggtgacctcatctaaacctaattatctctcaaaggcctcatctccatagtccatgacattgggggttagagctttaacaaataaatttggcgggtgggaacagaagacacaattcagtccataacggaaggtaagttttgggcacc

SEQ ID NO: 359600 - DNA, 432 bp, Homo sapiens
tgggtccacgaggaactcagagggagagaaattgtcattgtctgcttaggctgccgtaacaaaacaccatagactgaggtagcttaaacaacagacatttatttctcacagctctggagtctggaagtctgggatcagggtgccagcatggttgatttctggtgagggctctcttccaaacttaaaaacttctgccttctgtctgtgtccttaatggcagagagggggcaagctctctggtttctgttcttagaagggcataattccatcagaagggcgccaccctggtgacctcatctaaacctaattatctctcaaaggcctcatctccataktccatgacattgggggttagagctttaacaaataaatttggcgggtgggaacagaagacacaattcagtccataacggaaggtaagttttgggcacc

SEQ ID NO: 359601 - DNA, 505 bp, Homo sapiens
ttgtcttgccaagcatgaatccagcctattatacagaacatttctatgaagccaatattcaaaaggaagtaaaaattgcgtagtttgttcatgatactgtatgtgttttcattacagtgcaagcgaatttctctctcaagtatttggaggttaatggtcctgaaagtacgtatgagaagaaacattctgacaatttcagaagccaggagactatttagaacaagataaataaagtactaaaaatcattgctgctgttcaatatttgtggctttcaatatrcaatcaattttattatcaaaattataatatgtccaactggccattgcttccttcattttattgcctataagaattttacacatcttcttcctaaattagaaaataataataattaataaaagttgttcgttattaaggcaagagtccttttccagccatattttaactggtaaatatgtaatgcttatatatcattcttctaagtgcatagatattatttagctt

SEQ ID NO: 359602 - DNA, 505 bp, Homo sapiens
ttgtcttgccaagcatgaatccagcctattatacagaacatttctatgaagccaatattcaaaaggaagtaaaaattgcgtagtttgttcatgatactgtatgtgttttcattacagtgcaagcgaatttctctctcaagtatttggaggttaatggtcctgaaagtacgtatgagaagaaacattctgacaatttcagaagccaggagactatttagaacaagataaataaagtactaaaaatcattgctgctgttcaatatttgtggctttcaatatacaatcaattttattatcaaaattataatatgtccaactggccattgcttccttcattttattgcctataagaattttacacatcttcttyctaaattagaaaataataataattaataaaagttgttcgttattaaggcaagagtccttttccagccatattttaactggtaaatatgtaatgcttatatatcattcttctaagtgcatagatattatttagctt

SEQ ID NO: 359603 - DNA, 515 bp, Homo sapiens
ccaccatctaattaggttaactcaaagccccacaacaaagacttagcaaaaggaaagatgtggccaatcaaggcattaagagtatttacacaggccaggcacagtggctcacacctgtaatcccagtactttgggaagcctaggtgggcagatcgcttcagctcaggagtttgagacagactaacctggacaacatgggaaaamccgtctttacaaaaaatacaaaatattagccaggcttggtggtggcttgctggtattcccagctactctgggggctgaggttgcgggatcgcctgagcctgggaggtgaaggttgcagggagccgagatcgagccactgagctccagcctggtttgatagagtgagactctgttacacacacacacacacacacacatcactttctaacagcctacataagatgtttggttttcaacaacgacaacaaaatgatgaggcatacatacatgtaaaaaaaaataagcaacagaaccctaagaaacaaagcaat

SEQ ID NO: 359604 - DNA, 580 bp, Homo sapiens
caaatgggagaaattaaacaaaactaaggggctacaagctccatgcaagtctaaaatccaataaggcggtcattaaagcttaaagttccaaaatgatctttgactccatagctcayatccaagtcacactgatgcaagaggtgggttcccacggccttggcagctctggctctgtggctttgcagggtactggctccctcctgttgctttaatgggctttcattttgtgtctgtggcttttccaggcaaatggtgcaagctctcagtggatctaccattctgaggtctggagaagagtggcccttttctcacagctccactaggcagtgccccagtggggactctgtgtgggggctccaaccccacatttcccttctgcactgccctagcagatattttccatgagtgccctgcccctgaagcaaacttctgcctggacattcaggcatttctatacatcctgtgaaatctagatggaggttccataacctaaattctttacttctgttcacccacaggcccaacaccacatggaagcctctaaggcctggggcttgcaccctctgaagcaacaacctga

SEQ ID NO: 359605 - DNA, 580 bp, Homo sapiens
caaatgggagaaattaaacaaaactaaggggctacaagctccatgcaagtctaaaatccaataaggcggtcattaaagcttaaagttccaaaatgatctttgactccatagctcatatccaagtcacactgatgcaagaggtgggttcccacggccttggcagctctggctctgtggctttgcagggtactggctccctcctgttgctttaatgggctttcattttgtgtctgtggcttttccaggcaaatggtgcaagctctcagtggatctaccattctgaggtctggagaagagtggcccttttctcacagctccactaggcagtgccccagtggggactctgtgtgggggctccaaccccacatttcccttctgcactgccctagcagatattttccatgagtgccctgcccctgaagcaaacttctgcctggacattcaggcatytctatacatcctgtgaaatctagatggaggttccataacctaaattctttacttctgttcacccacaggcccaacaccacatggaagcctctaaggcctggggcttgcaccctctgaagcaacaacctga

SEQ ID NO: 359606 - DNA, 570 bp, Homo sapiens
caatgtcttcttatagtagtttcatagcttgagattttagatttaagtctttaattcattttgttttgattttcgtacatgaggagagatggggatctagtttcattcttccacatatggatatccacttttcccagcatcatttattaaagagactgtcttttcttcagtgtatgttcttgatacctttacaatgatttcctattcattcatcaatgtgtaaaaaaatacaactgacccttgaacaatgcagacattggggcactgactcccacccatatagtccaaaatccaagtataagttttagctatcaaaaaatgtaacaactgtactaatagactactcttgacctgaagccttaccaatgacatagtcaattaacacatattttgkatatttattatatactgtagacttacagtaaagtaagctacagaaagtaaacttgattaagaaaatcacaaggaaaatatatttacacttaattaaatgtacgtggatcatcataaatgtcttcatcgtcatcatcttcgtgttgagtagactgcagagagggattggacttactg

SEQ ID NO: 359607 - DNA, 362 bp, Homo sapiens
ctgtaacgctcattgcgaaggtctgcagcctcactccttagccagcgagaccacgaacccaccagaagaaactccgaacacattggaacatcggaaggaacaaactccagacgcgccaccttaagagctgtaacactcaccgccagggtccgtggcttcattctctaagtcagtaagaccaaaaacccaccaattcyggacacaatgctacctacatctatagctttaattattcccatatctatatctccatgacttctcactctctcttaagtttgagagccatgtatccagctgtctttggtgttttattttttctagatgcttagcagttccattgtgctccaacaattttggctgct

SEQ ID NO: 359608 - DNA, 338 bp, Homo sapiens
cttaaattgtcacattttccccttctatcggattgttgcctttgtcataaargcatgctgtaatttaacccaaaaaacactgtctttactccataacctaatccaattattgcctcacttcctcctctttagggcaaatatctttaaaaatgtctgttgcccaagtctttggtttctcatgtatcattctcttctcaattcactccaacaggtatccattcaattatcatcaagatcctcaactagtattcacttctcagtccatgatgctctatgcctctcagcaacacttgaccacttcatcagacattttcttcttagtttccaggatataatag

SEQ ID NO: 359609 - DNA, 338 bp, Homo sapiens
cttaaattgtcacattttccccttctatcggattgttgcctttgtcataaaggcatgctgtaatttaacccaaaaaacactgtctttactccataacctaatccaattattgcctcacttcctcctctttagggcaaatatctttaaaaatgtctgttgcccaagtctttggtttctcatgtatcattctcttctcaattcactccaacaggtatccattcaattatcatcaagatcctcaactagtattcacttctcagtccatgatgcyctatgcctctcagcaacacttgaccacttcatcagacattttcttcttagtttccaggatataatag

SEQ ID NO: 359610 - DNA, 597 bp, Homo sapiens
ttcccttgccttaatctttacctccttgtaatttttttattcttctctttttttctcttcattttttctgttatctatgcttcttctgaacttttaaaaattataaagtttgcaaaaatagttatcaaaataattgttctgagagtttcctgaatgggattgcaccaacaatccttactaataggcatgaaaacccaaaacaattttcaacttttataaccataggttttgtagcagtagagtataaggaaaagtgcttttcagctaaaacataaagacacatgcttctcttttctaactatgtaaatccacagtactgctttgactcaggggttatttgtatttggccttcagctgcttcctgatgcacatcagctgaataaagtctttaacttttgaatcacggraactatttttttcactcctgtcatatgtcaaggtaaaagaataaagcaaggatgtttacaggattttgtcttcagctgtgttgtttttgatctgtgtcttgcaaagtggggaacaggttgggtatggaccaattttatgacaatcactttgtactggttggcatagctagtagaagatcttgagatgagt

SEQ ID NO: 359611 - DNA, 596 bp, Homo sapiens
agtttctcatctttggttatttcctttgattaagcataaagtgatgtgtgaaataattaggagaagcctggattggcagaatagttaatgcatcttcatctaagataaacacctcttctctttcatctctctataggtattcttgattcatctttttattagatttcttttgaagcagtaaggctttacctcatattgcaggatttccttcaccgttatctttaatctgcaagttaacatttgaaccatcaacaaaatatatcactatgataaaccaaataacaagtaacctttattactttatattttgaagttcaacaaaccataatcttaaggagtawgtttggagcgtgtctgaaataaaagtgacatcattgcaaagtgttatagttaaaaacaagcaatccaaagtgaaactagggcaatctcaatttcctataagccacgctaggcaggtgagatttctgctttgttaaaaagagtggaagtgtagagcatagattagaaatagaagcaatccaggaccaaaaacatcagttagctgaatttggagacaataaagacaagtgttaaagtgatctgagctgggggctaga

SEQ ID NO: 359612 - DNA, 600 bp, Homo sapiens
attatcaacatatattttatgcatttgtaaaatatctgggtttttctaaacttttgcaatatttctaggctatgtggtttttctgtaagttttttcaaattgttccaattctcccttttttcaatatgtttattgaaaaaaattaacatataaatggacctatgcaaatcaaacctgtgttattcaaaggtcgactatataagttacattttataatatataacatgaaaagtatattatacataaagtaattaaatgtagtatataatatataaaaataataaaagataaactaaaagtagtaaataagtgttattaatataagatataaatattaaaaagtcatgtatttcatatatatatagtatcctctcttttttatatgaaaagtagtagcatgccacgttggattttcatatattgactgatttgcagcttgcttctttttttttttttttttttgggttttttgagacacagtcttgctctgtcacccaggctggagtacagtcgctggtctcrgctcactgcaaagtccgcctgccaagttcaagcaattcttctgtctcagcctcccaagtagctggtataacaggtgca

SEQ ID NO: 359613 - DNA, 564 bp, Homo sapiens
gaagagggtccctcctctaaagaaattcctgacatagagcgagggacgggaggtggtctgggaagacaggagtctgatgacggaggtacacactaaagacgcccacagcaccrgtgtgaacaggtatcattcaagtgtgtggatggtcctggagaatgccacagagcaggcagggcctccgaggagacgagaatcttgaccagagctttaaattaagggatgatccaactatggcagcggaggaggcagctttgccccaggactgttgcttccagctcttctttgcacagatgcctccaagtgcccactgtgtgccagaggcaaataaaactgccaggttccctgccctcccagagagcaaagagtgagagaccacgtgtgcacgcatgtgtatacatacctgtatgtgtgcaggtcatgtgtatgtatgcctatgtgctctgagcatattttccaaatatcagttgagggtctgctacatttcaaacaccctatggacacaggacaaaacagcaagcatgacattcacctgtgtacatgtgtgtgggcatgtgatacgtgtct

SEQ ID NO: 359614 - DNA, 564 bp, Homo sapiens
gaagagggtccctcctctaaagaaattcctgacatagagcgagggacgggaggtggtctgggaagacaggagtctgatgacggaggtacacactaaagacgcccacagcaccagtgtgaacaggtatcattcaagtgtgtggatggtcctggagaatgccacagagcaggcagggcctccgaggagacgagaatcttgaccagagctttaaattaagggatgatccaactatggcagcggaggaggcagctttgccccaggactgttgcttccagctcttctttgcacagatgcctccaagtgcccactgtgtgccagaggcaaataaaactgccaggttccctgccctcccagagagcaaagagtgagagaccaygtgtgcacgcatgtgtatacatacctgtatgtgtgcaggtcatgtgtatgtatgcctatgtgctctgagcatattttccaaatatcagttgagggtctgctacatttcaaacaccctatggacacaggacaaaacagcaagcatgacattcacctgtgtacatgtgtgtgggcatgtgatacgtgtct

SEQ ID NO: 359615 - DNA, 564 bp, Homo sapiens
gaagagggtccctcctctaaagaaattcctgacatagagcgagggacgggaggtggtctgggaagacaggagtctgatgacggaggtacacactaaagacgcccacagcaccagtgtgaacaggtatcattcaagtgtgtggatggtcctggagaatgccacagagcaggcagggcctccgaggagacgagaatcttgaccagagctttaaattaagggatgatccaactatggcagcggaggaggcagctttgccccaggactgttgcttccagctcttctttgcacagatgcctccaagtgcccactgtgtgccagaggcaaataaaactgccaggttccctgccctcccagagagcaaagagtgagagaccacgtgtgcacgcatgtgtatacatacctgtatgtgtgcaggtcatgtgtatgtatgcctatgtgmtctgagcatattttccaaatatcagttgagggtctgctacatttcaaacaccctatggacacaggacaaaacagcaagcatgacattcacctgtgtacatgtgtgtgggcatgtgatacgtgtct

SEQ ID NO: 359616 - DNA, 633 bp, Homo sapiens
aaccgtccacctagcttgactttctggtcctcagtttctgtgttcayaatagctccttcttgagaggacacttgatactattcttctcactgagtgggacagctttgatgagccatttttatggctctttttaagtgcattgccaaagagttattttcaaagaggggtttacctgaagaaacctccacctggagcgagaagactagtatcggagtcctggctctgtcactttccagttgtgtaactttggacaagttgctttccctctctgaacctcagttttcaactgtaaaaatgggtataaaaagagtaatgtctgcctcacaggataaatagcataaatataggtaaaaagcaatgaacttgtgtgtgtgtgcatgtgtgtgtgtgctaggagggtgtgtaaactataaaatcttatgcaaatatcaaattttagtattattcaaggtctcccctttgcctgtagttcctccctgtgtccacccccttgagatcctttgtgaatcccaccataaactttgcataccctcttctcccctggctgagtctaaattaatttctcccaatggtgtcttccagccacaccatataaggacctctctggggccctctcactaggtgccctgtata

SEQ ID NO: 359617 - DNA, 633 bp, Homo sapiens
aaccgtccacctagcttgactttctggtcctcagtttctgtgttcacaatagctccttcttgagaggacacttgatactattcttctcactgagygggacagctttgatgagccatttttatggctctttttaagtgcattgccaaagagttattttcaaagaggggtttacctgaagaaacctccacctggagcgagaagactagtatcggagtcctggctctgtcactttccagttgtgtaactttggacaagttgctttccctctctgaacctcagttttcaactgtaaaaatgggtataaaaagagtaatgtctgcctcacaggataaatagcataaatataggtaaaaagcaatgaacttgtgtgtgtgtgcatgtgtgtgtgtgctaggagggtgtgtaaactataaaatcttatgcaaatatcaaattttagtattattcaaggtctcccctttgcctgtagttcctccctgtgtccacccccttgagatcctttgtgaatcccaccataaactttgcataccctcttctcccctggctgagtctaaattaatttctcccaatggtgtcttccagccacaccatataaggacctctctggggccctctcactaggtgccctgtata

SEQ ID NO: 359618 - DNA, 633 bp, Homo sapiens
aaccgtccacctagcttgactttctggtcctcagtttctgtgttcacaatagctccttcttgagaggacacttgatactattcttctcactgagtgggacagctttgatgagccatttttatggctctttttaagtgcattgccaaagagttattttcaaagaggggtttacmtgaagaaacctccacctggagcgagaagactagtatcggagtcctggctctgtcactttccagttgtgtaactttggacaagttgctttccctctctgaacctcagttttcaactgtaaaaatgggtataaaaagagtaatgtctgcctcacaggataaatagcataaatataggtaaaaagcaatgaacttgtgtgtgtgtgcatgtgtgtgtgtgctaggagggtgtgtaaactataaaatcttatgcaaatatcaaattttagtattattcaaggtctcccctttgcctgtagttcctccctgtgtccacccccttgagatcctttgtgaatcccaccataaactttgcataccctcttctcccctggctgagtctaaattaatttctcccaatggtgtcttccagccacaccatataaggacctctctggggccctctcactaggtgccctgtata

SEQ ID NO: 359619 - DNA, 633 bp, Homo sapiens
aaccgtccacctagcttgactttctggtcctcagtttctgtgttcacaatagctccttcttgagaggacacttgatactattcttctcactgagtgggacagctttgatgagccatttttatggctctttttaagtgcattgccaaagagttattttcaaagaggggtttacctgaagaaacctccacctggagcgagaagactagtatcggagtcctggctctgtcactttccagttgtgtaactttggacaagttgctttccctctctgaacctcagttttcaactgtaaaaatgggtataaaaagagtaatgtctgcctcacaggataaatagcataaatataggtaaaaagcaatgaacttgtgtgtgtgtgcatgtgtgtgtgtgctaggagggtgtgtaaactataaaatcttatgcaaatatcaaattttagtattattcaaggtctcccctttgcctgtagttcctccctgtgtccacccccttgagatcctttgtgaatcccaccataaactttgcataccctcttctcccctggctgagtctaaattaatttctcccaatggtgtcttccagccacaccatatawggacctctctggggccctctcactaggtgccctgtata

SEQ ID NO: 359620 - DNA, 589 bp, Homo sapiens
aacatgagaagactatcagatgaatcccagttgaggaacattctacaaaatacctgaccagtactccttaaaactgttaaggtcatgaaaaacaaggaacaccggagayactgtcacagacaaaaggggccgaaggagacatgatgattaaatgtaacgcagcatcctggatgggatcctggaatcgagaaaggacattaggttccttcaatcccatccatgttgttgcaattgacaggatcttcctgaggcaggaggatcattcttttttgtggctgaataatgttccgttgtgtatacataatacattttctttatccattcctctgttgatagacacttaggctgattccatgtcttggctattgcgaatggtgccacaataaacatgcaactgtgggtgtctcttcaaaagactaattttctttcttttggatatataccactagggattgctggattttacattgctcctttctctcctggatctcatataataaataaaataataaatattccaaaaagaaacaggaaaaggacatcaggtaaaaacagaggaaatctgaattaaagtatgggttttaattaa

SEQ ID NO: 359621 - DNA, 589 bp, Homo sapiens
aacatgagaagactatcagatgaatcccagttgaggaacattctacaaaatacctgaccagtactccttaaaactgttaaggtcatgaaaaacaaggaacaccggagatactgtcrcagacaaaaggggccgaaggagacatgatgattaaatgtaacgcagcatcctggatgggatcctggaatcgagaaaggacattaggttccttcaatcccatccatgttgttgcaattgacaggatcttcctgaggcaggaggatcattcttttttgtggctgaataatgttccgttgtgtatacataatacattttctttatccattcctctgttgatagacacttaggctgattccatgtcttggctattgcgaatggtgccacaataaacatgcaactgtgggtgtctcttcaaaagactaattttctttcttttggatatataccactagggattgctggattttacattgctcctttctctcctggatctcatataataaataaaataataaatattccaaaaagaaacaggaaaaggacatcaggtaaaaacagaggaaatctgaattaaagtatgggttttaattaa

SEQ ID NO: 359622 - DNA, 589 bp, Homo sapiens
aacatgagaagactatcagatgaatcccagttgaggaacattctacaaaatacctgaccagtactccttaaaactgttaaggtcatgaaaaacaaggaacaccggagatactgtcacagacaaaaggggccgaaggagacatgatgattaaatgtarcgcagcatcctggatgggatcctggaatcgagaaaggacattaggttccttcaatcccatccatgttgttgcaattgacaggatcttcctgaggcaggaggatcattcttttttgtggctgaataatgttccgttgtgtatacataatacattttctttatccattcctctgttgatagacacttaggctgattccatgtcttggctattgcgaatggtgccacaataaacatgcaactgtgggtgtctcttcaaaagactaattttctttcttttggatatataccactagggattgctggattttacattgctcctttctctcctggatctcatataataaataaaataataaatattccaaaaagaaacaggaaaaggacatcaggtaaaaacagaggaaatctgaattaaagtatgggttttaattaa

SEQ ID NO: 359623 - DNA, 409 bp, Homo sapiens
acacctggctaatttttctatttttattttttgcagatacagggtctcaccatattgcccaagctggtcttgaactcctggcctcaaatgatcctcctgcttcagcttcccaaagctctgggattacaggtgtgagccactatggcccaggcatcatytttaatggctgcatatgatttcattatatgagtgaagcataattgattcaaccagttctctatttatgggttattaagtcatttccatttttttgctattataaatagtactgagataaacatcattgcacatatacccttgggcacatctttcagtgtttccctaggataaattccaagaagttgaattgtagattctaaggttatacacattttccaggcttgccaagggtttccacattgccttccag

SEQ ID NO: 359624 - DNA, 546 bp, Homo sapiens
ccacttttccctctgtgtaatcactcactcaggcctccgagagaaactcagacgggagcctgcttctctctttccctctctccctttagctacactggcctgcagagttttggatgagttttctttaggaaagttgtcccagcgtggccatggtggcggctcttctgtccaggtgagtgccagagtagggatcaaggctgagacccttgggtttggtctctaaccctctcattcactcctgtttgctgcctgtgtctttgtttatctctgtattttcccccctctctttcattttgtcttctcccctgatgacatatggatcaagtcctggccaccaaggtggccttgaacatagcgtaggagaggttgctgggcacagcggacctctcatgccatgcccagtccctcttctcccctcccctctcctcttgcatagaggatgagtttggtgctgaggagggagaggcagyaggggatcctcagactctaaactctgatccagggcccagcttctcaggcttgagtcccttcccagggcctacctcc

SEQ ID NO: 359625 - DNA, 589 bp, Homo sapiens
cagtcccctgcctcttctccccagtctaagaactgagggtgctgtgagggaacatagggggcttccccatgctcacacagagagaccagaactgtcaccctcacagtcacagagacatgaccaccttcctgcctctcacacacttggcgctccttcccacagtgcatagagcccacctttccctcctttgtccctagaggcctctctcttgcctggtggcaactgcgcctctctgcgcctctgtgtctctcaacccaagtctgaggaaggttgtctctggaagcctctccccatccttgccctgacctcccaccactctccttccatcaaccccagactgcttctcagcccgttcaaaacctcacctgccttargggactgcgggacaccgcccaggtccttggaagagttagtactgcctgaaagaagagggtgcagggtctgggcccctgggggaacaacatgggagggggagctggtattgcagggaggtaagaaatgtcccagggacaggggtggctttcagcctctgaaactgatctcccaaggtggagggcggtagaagggcttcagtgtgtgtaaccacatc

SEQ ID NO: 359626 - DNA, 566 bp, Homo sapiens
acccctggtatttgtgttcattcacaaattttgatgatgttctattaagacccatgtttcttgctttttctttagagaatagttgcctccgtagcttatgacttcttccgctgtacaaggcaaaagttggtcattttctggtcaatttgttcattaacaacaaacaacagtttaaatctgtcaggtgggaaatccacattgcctaaattagctggataactgcaaagactcctctttccttgagaccgttagaagtgtctctcattgtttgcgagtggctggcagtcttcaacaccatgacccccatactrcctttgacacctactttttagcacactgcagctctgcgcacatgcctgtaacctattataaatgagcacaatttgagatgagttggttggaaaaagaagagtaaatttcatcttcctaaacctataatttctgatttggtttaaaattggaaggatttaaataaaatctagctaatcaacaaatatttaatgacttcaactatgtgccaggcacaagagtatatagcaacggactttgagacaggggctcagttc

SEQ ID NO: 359627 - DNA, 566 bp, Homo sapiens
acccctggtatttgtgttcattcacaaattttgatgatgttctattaagacccatgtttcttgctttttctttagagaatagttgcctccgtagcttatgacttcttccgctgtacaaggcaaaagttggtcattttctggtcaatttgttcattaacaacaaacaacagtttaaatctgtcaggtgggaaatccacattgcctaaattagctggataactgcaaagactcctctttccttgagaccgttagaagtgtctctcattgtttgcgagtggctggcagtcttcaacaccatgacccccatactacctttgacacctactttttagcacactgcagctctgcgcacatgcctgtaacctattataaatgagcacaatttgagatgagttggttggaaaaagaagagtaaatttcatcttcctaaacctataatttctgatttggtttaaaattggaaggatttaaataaartctagctaatcaacaaatatttaatgacttcaactatgtgccaggcacaagagtatatagcaacggactttgagacaggggctcagttc

SEQ ID NO: 359628 - DNA, 593 bp, Homo sapiens
aagacataggatgtgattaaaatattattagacagaataaatatacaatgtataagtataaattcacaaatctggatttacattacacatgagattctgttcacagaatcccaggactaacatgtggccatccatgccagggtttctctgaatacatttaatgttggactcaggacaaagttccttcccaaactttatagcaaactgagtgatgattccattatgaagcacagagcacctgagcctataaacaaggcrcaccagagggacgataggctggctgggaagactttcatgagagagaatcataaaactgctttgagagacctctgctaaaaaatatggctgtggttaacgtggttgttgcccaaattctaagcaacaaccttttgtgatctgaggcagtaaattccttttattatcataaacaataagtctcttgaaaggacagagtcaaggaagcttcagagtacaagaggtcctctgtgtactgatttcttgtttataggcccttactagcagtttgcattaggctttttgatatttttttctttttattgaaccctttcactgcatgttgtctgttcacgtat

SEQ ID NO: 359629 - DNA, 485 bp, Homo sapiens
tatttccattaactgattgtggtgataaaaaactgacaaggggaacatttctgtgatccagaagcagtttctagaagatggttttattctagcctttccagctgggctcttcagagtggtaacgagactcctttgtgctcattactcacttctgcaggcacctggaggaatatttacctgatagctctttctgcctgttcttcattctatatgggctcttaagaaaagagactattagctttgtcttatgtggtatttaccttacttacattgacctggatttgactttttgactaaggtcttcagtgatctctatctaaaataaycccagttcacccttgtagcaagaaaactacatttccgccaaacagctctcagccactctgtatccttaactctggcagcttcctttttcagaagaatctacacctcaaattgcaggtatgagcagaggctctggaatcggattgttactgttcaaactc

SEQ ID NO: 359630 - DNA, 485 bp, Homo sapiens
tatttccattaactgattgtggtgataaaaaactgacaaggggaacatttctgtgatccagaagcagtttctagaagatggttttattctagcctttccagctgggctcttcagagtggtaacgagactcctttgtgctcattactcacttctgcaggcacctggaggaatatttacctgatagctctttctgcctgttcttcattctatatgggctcttaagaaaagagactattagctttgtcttatgtggtatttaccttacttacattgacctggatttgactttttgactaaggtcttcagtgatctctatctaaaataatcccagttcacccttgtagcaagaaaactacatttccgccaaacagctctcagccactctgtatccttaactctggcagcttcctttttcasaagaatctacacctcaaattgcaggtatgagcagaggctctggaatcggattgttactgttcaaactc

SEQ ID NO: 359631 - DNA, 570 bp, Homo sapiens
aaagtaactttggaaatattcttaacacaaatctggcatgtggtatgtgctaaatatgaccattttgtcattgtttttaaaatcattcaccttttgggtctaaacccctcctcctaggggctaggattctatcatgtatcagcttgagctaagtgttagctgaaccttttgttttgcactcccayagtatcctttagagatctttagagaccttggccaccattcttataatgcagtattatgtagggtggcatgcagccagcatgcccatgagcactggccaacatcccttctgactggttcatgtccattgtgtgaggagtccagtaagggtcagaaaagatggagacactggctctggaaaggagcaagcaatgagaagtgctttctggcagaaggaatagcaaggcttttgagggccttgcggtaggaatgagccaaggtgagacaaggtgagaatgtccttgtcttaagggcttgcactgaaacttctcatagaaagagaactatctttgcttagaaaaatatctgatgaatcacttggggtaggtgagatcctgagagtatggg

SEQ ID NO: 359632 - DNA, 596 bp, Homo sapiens
catcacaatcatttaatatatgttattattttaaatagtttcattataaaattttagtcataatattccaaaaaatacttaaagtgatrttaggattgtaaggtgatgagtggttggtaattatattatgtcaaaggtgacagcagacaaattgaaatggtagaagttgtggtattggcagagatggctattattgtgacagtggtggactgtgggtctatggaatttttctgtgaaaaaaatcagagtttgagagcataagattgcttggaaacagcctcataatgtgagaccagttacacttaattccaattcctaccttcatttcagtgacaggtgctctttggaagactacagtaaacatcacctaccatgttgagcaaattccttcctttaattcttcaagaaaacattaaatatgctggcttcagagctatgagtagcatcagtcaatggaaggaaatgtacccattttctggcatggagcagtagcgatagttgtctctccctcaacccaatttatacaaaaagggatggatcaagggatgcagtggagtcataattgaataaaatctgagaaaaattgtactggattt

SEQ ID NO: 359633 - DNA, 547 bp, Homo sapiens
gcagtgaaactaagcttcatttatgaagaaaatatactcttatttagataaacaaatgctgagagaattaaccactacaagctagaactacaagaactgatcaaaggagctctaaatcttgaaacaaattctcaaaatacaccaaaatagaacctcctcaaagtgtaaatctcacagaacctacaaaaaaaaaacaataaaaattaaagaaaaaaacacaagatattcaggcaacaaatagcatgatgaatagaatagtacctcacatcccaatactaatgttgaatgtaaatgtcctaaatgttccacttaaaagatacagaatggcagaatgaataagaatacaccaaccaagtatctgctgtcttcaaragactcacctaaaacataaggattcacataaacttaaggtaaagggatttacctttaccttattccatgcaaatggacaccaaaagcaacaaggggtagctattcttctatccaaaaaaaaaaaaaaaacactaaggcagcagcagtttaaactgacaaagacagatgttatata

SEQ ID NO: 359634 - DNA, 527 bp, Homo sapiens
gaggattgttttccatgactagtgataaaaggctcaagcctatactccttacactgaaaatctggaaagaggagaatcaggatgaacagtacaaggagagttaacttgaacttttcattgtaaaatagttaaaataataaaattttytttccatgaaaatcaagacacttttgcttatttgtctatactcacttactgacttaatttgaagaacaatcaaggggggggcaggaaaactaaactaaaccctaactttttagggtgaaaacatcacactatatattgctcagcctccacccttttgagagctatcaccacctgaagaaagtagagatctctcaactctttcctctctgattcttccccaaagcagcaagggaaggttcacaatactgtgtgattatctttcaaaagcaaatccagaacataaatgtggtctacggatggttcactttttgtggtcccttttctgtccaggaatcagaggtggctcatcaaatgaggaaacaaggaatgctttatttctc

SEQ ID NO: 359635 - DNA, 582 bp, Homo sapiens
gtgcatatggcagatgggacaaagcttcatagcccaatttgttcaacttctgaagcactggttgtggaacatgccattgggtgttgtcatggggaagaattgggccctttctgttgaccaatactggctgcaggcattgcagttttcagtgcatctcattgatttgctgagtatacttctcagatgtaatggttttgccagggttcagaaagctgtagtggaggtccagcagcagaccagcaaacagtgatcatgacctatttttttggtgcaagtttggctttgagaagtgctttggagcttcttctaagtccaaccactgagctggttgttacttagttgtaaaaagatcagcttcaatgattgctctcarttggttgttgtcaacttctgatgactggccactatgctcctcatcttcaagactcttatctcctttgcaaaacttcttgaaccaccactgcattgtatgttcattagcagttcctgggccaaatgcattgttgatgttgtgagtagccttcagtgctttatgaccgactttgaactagaataagaaaatcacttgaatttgccatttgt

SEQ ID NO: 359636 - DNA, 576 bp, Homo sapiens
ctgatacagttgttagaatgagaagacaagtacatttagacaattattataactatattccatatgtttaaagagttaaggggagaaatgcaagatattaaaaagcaactatrttgaacttccagagatgaaaactataataattaagataaaaaagtatggtagtagtggcagattatacatgagaacaaaagataagtaaacttgaagatacagtgataaaaattatctaaaacgccacccgagagaaaacttttttttaaaattataaatgaaaacagtatcagtgagctgtgggagaactttaagtaactaatatacatgtaattgaacctccaaaggagagaaggtattggagtggggagaatatttttttaattgctgattttttctaaatttttattagatgtataataaataaatactatataatatactagaaataaaatttgaccacaagaaacatggagaaagctacaaggcacataataataaagttgctcaaaaccaatgatgaagacaaagtcttaaaagcaaccaaagaacaaaagatatgttaaatacagatgaacaaaa

SEQ ID NO: 359637 - DNA, 547 bp, Homo sapiens
ccactttctgtgaatcatcatcccacctctcaattactggattcttttttagaatccacatttctctggcactgacttccagctgctaaggcaggtcattaactcctgtgagttgccaaggaggagcatcccatgccttcttgaataaagtctaatcctctacacctgttgtctgtcgtttctttcctcttctcttttggcaccttaggatttaaaaatcctgttgttaagaatttcctcagaggacagagtctggaacaccctgtgtggacaggacccatggttaccacagagggagaacctgagagggagccagggcatggagttaggagaaagagaaaagtaagagaatttttgtccttggagacattagagaagttaggtttaggatatgagaagcggtgtgtgctcaaatgaatattatcccactkggcttaataaagtaaaaggggataaaaagtaaagagagagactgtctttctctactaacagggcagtaggcctgtgaggaggcaacaagaacatgaaaactttttctggaactcca

SEQ ID NO: 359638 - DNA, 547 bp, Homo sapiens
ccactttctgtgaatcatcatcccacctctcaattactggattcttttttagaatccacatttctctggcactgacttccagctgctaaggcaggtcattaactcctgtgagttgccaaggaggagcatcccatgccttcttgaataaagtctaatcctctacacctgttgtctgtcgtttctttcctcttctcttttggcaccttaggatttaaaaatcctgttgttaagaatttcctcagaggacagagtctggaacaccctgtgtggacaggacccatggttaccacagagggagaacctgagagggagccagggcatggagttaggagaaagagaaaagtaagagaatttttgtccttggagacattagagaagttaggtttaggatatgagaagcggtgtgtgctcaaatgaatattatcccacttggcttaataaagtaaaaggggayaaaaagtaaagagagagactgtctttctctactaacagggcagtaggcctgtgaggaggcaacaagaacatgaaaactttttctggaactcca

SEQ ID NO: 359639 - DNA, 544 bp, Homo sapiens
tggcttgtggaacaaataattgggctcctaaaattagtttggttgtaaaataataataatgataattcccccacatttttcataaaatttatttattttctaaacaactaataaataattagagtagttaatggatgcacatgttaccaattccaaaagtacaaagatgtttccaatggatggcaagtttccttcccacccctgtccctggaacaaactagtttttctcctctgatgtaaccacagttacccagagaagcagtttaaaaatataagtaaaaaaattatttacaatctcagytattccatttcaaattggaaatagccttttctggctgggcatggtggctcacacctgtaatcccagcactttgggaggccaaggcaggctgatcacttgaggtcaggagttcaagaccagcctggccaaaatggtgaaaccccgtttttgctaaaaacgcaaaaataagccaaacgtggtggtaggtgcctgtaatcccagctactcagaaggttgaggcaggagacttgcttgaacccggga

SEQ ID NO: 359640 - DNA, 562 bp, Homo sapiens
tgggctcctaaaattagtttggttgtaaaataataataatgataattcccccacatttttcataaaatttatttattttctaaacaactaataaataattagagtagttaatggatgcacatgttaccaattccaaaagtacaaagatgtttccaatggatggcaagtttccttcccacccctgtccctggaacaaactagtttttctcctctgatgtaaccacagttacccagagaagcagtttaaaaatataagtaaaaaaattatttacaatctcagctattccatttcaaattggaaatagccttttctggctgggcatggtggctcacacctgtaatcccagcactttgggaggccaaggcaggctgatcacttgaggtcaggagttcaagaccagcctggccaaaatggtgaaaccccgtytttgctaaaaacgcaaaaataagccaaacgtggtggtaggtgcctgtaatcccagctactcagaaggttgaggcaggagacttgcttgaacccgggaggcggagattacagtgagctgggattgtgcccctgccc

SEQ ID NO: 359641 - DNA, 562 bp, Homo sapiens
tgggctcctaaaattagtttggttgtaaaataataataatgataattcccccacatttttcataaaatttatttattttctaaacaactaataaataattagagtagttaatggatgcacatgttaccaattccaaaagtacaaagatgtttccaatggatggcaagtttccttcccacccctgtccctggaacaaactagtttttctcctctgatgtaaccacagttacccagagaagcagtttaaaaatataagtaaaaaaattatttacaatctcagctattccatttcaaattggaaatagccttttctggctgggcatggtggctcacacctgtaatcccagcactttgggaggccaaggcaggctgatcacttgaggtcaggagttcaagaccagcctggccaaaatggtgaaaccccgtttytgctaaaaacgcaaaaataagccaaacgtggtggtaggtgcctgtaatcccagctactcagaaggttgaggcaggagacttgcttgaacccgggaggcggagattacagtgagctgggattgtgcccctgccc

SEQ ID NO: 359642 - DNA, 597 bp, Homo sapiens
tccaatttgactcttgctctctgttaaacatgtttgaaatggcctctttcattttaatagcagtttgtaaaaatgttttccgtcaggttaattggatgtcttatcatctcttttcttctgggaattctagggaaaggagaatatggtttacagtattttctaaggggtctttgtcatcaatattgcagtttctaaaggtagcatgscttagacttcccaacacactcacttgtttctcttgttgtactggagctgttaaaggagggagtgactgaatagaatggaggagactagatttgctgctctatgacctccatttagtttgtgcctaggcttgaagtcaggccatttaaaactatgtccagagcattcttttcttcataagaaggccctacttcaatgaaactattttaccaacattaattgactgagcctaacctgagggaagggaaattgccaactttaatcctctctagccttgctgtatcacctgagttgggtgtgagggaatggggtgggggaaaacaaaattgagaatcactgatgaaggttccagcccagggacacaggctcattaaaaaacagggacctgattgt

SEQ ID NO: 359643 - DNA, 579 bp, Homo sapiens
cattaggttcatttggcagattgaggaggggaaagattgaaacatcattcattgaatttgagcaatgytgggactaggaaggtggaggagagaagaatcattcatctgtcatggctccttggggaggtgatctctgaccccaatccagggtgactgtggcagtagggagtcattcttagaactcagccactgctggaaaaaagtatgaaaatgaaagctgggaggaggacgttaaagaggcttttagttatgtcattttttaaaatgtccttcaactggccctgtgacttcctgaaggaatcggtaggtctgtgttatcctgtttgacattacccatgaaaaaataagtcaatgttttccccacttcaaattgagacatttagtaatgccacaaaatttaggcatttagtgaagatttttttggtctatgttttgagaaaactttcaatatttcaacagttaaaataaacaactaattctgagctatttaacctgagtcttaatttccagattgtcctcatgacttttggaaagtcatcttctgttagggattcctgcacatggagtgatcagatttca

SEQ ID NO: 359644 - DNA, 560 bp, Homo sapiens
cataagtatgctgtgaaagtaaaaaggtggaggactattcttctagtgtaagatttttataagttgttgtaaaagctcttattagttgctctactgattaaacaaaattatcyacttcttattttacctgaataatacaacgatgactggaaatgtgtaaggaaaagagagatcagactgttactgtgtctatgtagaaagggaagacataagaaactccattttgacctataccctgaacaattgccttgccctgagatgctgttaatctgtaactttgccccaaccttgagctcacagaaacatgtgttgtatggaatcaaggcttaagggatctagggctgtgcaagatgtgccttgttaacaaaatgtttacaggcagtatgcttggtaaaagtcatcgccattctcctgtctcgataaaccagggccacaatgcactgcagaaagccgcagggacctctgccctggaaagccgggtattgtccaaggtttctccccatgtgatagtctgaaatatggccttgtgggatgggaaagacctgaccgtcccccagccc

SEQ ID NO: 359645 - DNA, 560 bp, Homo sapiens
cataagtatgctgtgaaagtaaaaaggtggaggactattcttctagtgtaagatttttataagttgttgtaaaagctcttattagttgctctactgattaaacaaaattatctacttcttattttacctgaataatacaacgatgactggaaatgtgtaaggaaaagagagatcagactgttactgtgtctatgtagaaagggaagacataagaaactccattttgacctataccctgaacaattgccttgccctgagatgctgttaatctgtaactttgccccaaccttgagctcacagaaacatgtgttgtatggaatcaaggyttaagggatctagggctgtgcaagatgtgccttgttaacaaaatgtttacaggcagtatgcttggtaaaagtcatcgccattctcctgtctcgataaaccagggccacaatgcactgcagaaagccgcagggacctctgccctggaaagccgggtattgtccaaggtttctccccatgtgatagtctgaaatatggccttgtgggatgggaaagacctgaccgtcccccagccc

SEQ ID NO: 359646 - DNA, 560 bp, Homo sapiens
cataagtatgctgtgaaagtaaaaaggtggaggactattcttctagtgtaagatttttataagttgttgtaaaagctcttattagttgctctactgattaaacaaaattatctacttcttattttacctgaataatacaacgatgactggaaatgtgtaaggaaaagagagatcagactgttactgtgtctatgtagaaagggaagacataagaaactccattttgacctataccctgaacaattgccttgccctgagatgctgttaatctgtaactttgccccaaccttgagctcacagaaacatgtgttgtatggaatcaaggcttaagggatctagggctgtgcaagatgtgccttgttaacaaaatgtttacaggcagtatgcttggtaaaagtcatcgccattctcctgtctygataaaccagggccacaatgcactgcagaaagccgcagggacctctgccctggaaagccgggtattgtccaaggtttctccccatgtgatagtctgaaatatggccttgtgggatgggaaagacctgaccgtcccccagccc

SEQ ID NO: 359647 - DNA, 598 bp, Homo sapiens
cattctttgttctcagtaacctgccccatctgttgaataggatatgttactggtacaggaggagataaatggacatatgcttaaatgcttacactgagccagaatagaattttcagccatattcttgtcactaagcctgccacaccaacatttgtagacaagagtgtcaaatttacatcaagctgttgtcatccaagatagaattgtatatttcaaaacactggacaaatgtttttccatcagctgctggctaaacattttgttcctatatacrtctatgcataaacatgtacacacaccaggattcacaggcaaggcaaactacattgcagatctctggttactgtgaccatcatagacagattctgtagaaaagtagtaattttaaattcaataaattgattcaaattataatatcatctgtttccacctttcctttcatggagtggaagataatcagtaattagttgtaccttctttcttaagtcatacaactttatttgacgtcaacagaggcatgcttcttaagagaattatcttccttttacactttcagcaaaaactgtatctaatttttattgtctatttcgtaggacaa

SEQ ID NO: 359648 - DNA, 587 bp, Homo sapiens
caaaacattcccatggccaaayagatgcatcaaagaagcaaagtcaagatggctggtcaaaatcacactatcaagctgtcgtcatctccatgagatgtgagctgtgggcaggtgttttctagaagtgcaaggaaaacgtttctgtgatgctgactaatttaaagttactatatttgttattcaaaaatgagttttagggtgaatttgaataagttccttgaaaaagctcagtgaaaactctgaaagataaaagtgctttttctgtggatgtttttgtaaactagagcaaacatttaataccctaaatccttctaatgctacagaattattcataacagagttaaaaggaatgacttatgcctgtaatagtcaaagcaaacctggatatgcatggaaatctaatggtgttcttatttcaaatgttagactggaaattaatttcatcaaatattacactttggccaaataccatgtaacttcacatttactaatgtataaacttgatgaattaacttgaaattgacactatttcaaactcttttatgactgtttctttttcctattatctttgtctatcagttggcatt

SEQ ID NO: 359649 - DNA, 587 bp, Homo sapiens
caaaacattcccatggccaaatagatgcatcaaagaagcaaagtcaagatggctggtcaaaatcacactatcaagctgtcrtcatctccatgagatgtgagctgtgggcaggtgttttctagaagtgcaaggaaaacgtttctgtgatgctgactaatttaaagttactatatttgttattcaaaaatgagttttagggtgaatttgaataagttccttgaaaaagctcagtgaaaactctgaaagataaaagtgctttttctgtggatgtttttgtaaactagagcaaacatttaataccctaaatccttctaatgctacagaattattcataacagagttaaaaggaatgacttatgcctgtaatagtcaaagcaaacctggatatgcatggaaatctaatggtgttcttatttcaaatgttagactggaaattaatttcatcaaatattacactttggccaaataccatgtaacttcacatttactaatgtataaacttgatgaattaacttgaaattgacactatttcaaactcttttatgactgtttctttttcctattatctttgtctatcagttggcatt

SEQ ID NO: 359650 - DNA, 587 bp, Homo sapiens
caaaacattcccatggccaaatagatgcatcaaagaagcaaagtcaagatggctggtcaaaatcacactatcaagctgtcgwcatctccatgagatgtgagctgtgggcaggtgttttctagaagtgcaaggaaaacgtttctgtgatgctgactaatttaaagttactatatttgttattcaaaaatgagttttagggtgaatttgaataagttccttgaaaaagctcagtgaaaactctgaaagataaaagtgctttttctgtggatgtttttgtaaactagagcaaacatttaataccctaaatccttctaatgctacagaattattcataacagagttaaaaggaatgacttatgcctgtaatagtcaaagcaaacctggatatgcatggaaatctaatggtgttcttatttcaaatgttagactggaaattaatttcatcaaatattacactttggccaaataccatgtaacttcacatttactaatgtataaacttgatgaattaacttgaaattgacactatttcaaactcttttatgactgtttctttttcctattatctttgtctatcagttggcatt

SEQ ID NO: 359651 - DNA, 521 bp, Homo sapiens
aaacatttaataccctaaatccttctaatgctacagaattattcataacagagttaaaaggaatgacttatgcctgtaatagtcaaagcaaacctggatatgcatggaaatctaatggtgttcttatttcaaatgttagactggaaattaatttcatcaaatattacactttggccaaataccatgtaacttcacatttactaatgtataaacttgatgaattaacttgaaattgacactatttcaaactcttttatgactgtttctttttcctattatctttgtctatcagttggcattggctactttctaargacttcaatttgctttccaaaatagttcaacttttaaagttaagcacagtgatttctcttgcatttttgcattcctatatatagtgaagtagaagaaaacactataaggaaaataccttgcaaaaatgtattttaaacattgtatattactacatatttatttctttaaacattgttatatgttatatatgtgttatatatatgtat

SEQ ID NO: 359652 - DNA, 594 bp, Homo sapiens
tcctaccagggcactgcctagtggagctgtgggaagggggtcaccatcctccagaccctagcatggtagatccaccagtttcttgcatcctctgcctggaaaagttggaaacgctcaacttaaacttgtgagagtagatacatgggctacatcctgcaaagccacaggggcagggcttcccaatatcttgggagcccgctcttcatactaggatgcaggacatggaggcaaggattatcttggagctttaagatttaaygcctaccccgctgggtttcagacttgtatggggcctattactcctttcttttggctaatttctccctttggcaatgggaatgtttatccaatgcctgaaccatcattgtatcttggaagtaaacaacttgttttgattttacaggatcagatgtggaggaatatgagtctcagatgagatttaagactttgaacttgaagctggaatgagttagggctttggaggattgttgggaagagatgattgtgttttgcaatgtgagaaacacgtgagatttggcagccagaggcagaatatatggtttagatatttgtcccctcgaaatttcatattaa

SEQ ID NO: 359653 - DNA, 407 bp, Homo sapiens
tcatccctttggtgatgagtgagttcttactctgagttcgtgctagatctggttgtttaaaactatgcggcacctcctatcccacctctctttctccttcttgcatgatgtgatgttccttctttcccttcaccttccaccatgattataagcttccttaggcctcaccagaagcagatgctatcatcacacttcctgtacaccttacagaagcatgagccaattaaacttcttttctttataaattacccagtctcaggtattcygttacagtaattaagatggcctaatacaactgcatactcaatagtagggtttttttttttttttgcatgtaagttaaagtttttattccatcactcttgtttttatttttgtcatgcagaacttgccttatctgaaggctg

SEQ ID NO: 359654 - DNA, 567 bp, Homo sapiens
aatgtaggttgcagaactgcttagcaaaagtaaaaatgtgataatgaatgcagcagtccaaatgtttcatggagtcaccatatggagcatattttacctgcmccttgttgcacttttaaaatcttctatagcacctagctcaatattttgttatctcagtgactggcctgggctggatcttacttccttaaccttctttattaaaacataaccttaagcagcataaaaataggctttattaaaagctatcaatctgatcttaaactattctaatcgtaaaatatctgaaggatggctaccattacataagcattcatccagccccaaccttttcagaagatgagtctatggcaccaatagtaagatccctattctctcaaaatgactttttggagattaaatttcaggaaaagaaaaaaaattaattaaaaaaacaaatagctattgcaaagaagcagttatacttatactcatgcaattgttaatgttgaagcattcctggcaattttcatcttgcatttttattttgcagagcagaccttaacccttataacaaagttacatatt

SEQ ID NO: 359655 - DNA, 508 bp, Homo sapiens
catttttttgactgtggcattagtgggtattcatgtgtgggaggtgggtgaggctatggctcactatggagtttaggtaagtagagggtcttgatttcttttgaagggaggagttcagccctagaacacttgctggaggtggagccactatttcctttcattgggcttaagggcttttattcagaaagcagtggtgctggacagttccctcccaaataggcaagaggtggccaggattttggggtcagattaataataatttttaaaagttgatgttattgtgaccttgaataataactttgtgctctgattcatsattcatttcagattgaaattatatattttttagttttatctaaccctaatttgtttttgcaatcttgttcaataataaaacatttgaaatttggaagtaggacttttgaatcagtattagtaggagtggtcagaaaatgagatttcttaatccatgctcaggtttccctaatgtacaagacactcaacacac

SEQ ID NO: 359656 - DNA, 537 bp, Homo sapiens
gtgatatgctgacatctgcttggtttctaggaagacctcaagcagcttttactaatggcagaaggtgaaggatgaataggcatgtcacatagcaaaagcaggaatgagagtgagagggtaggagggaaggtgccacacacttttaaataagcagatctcatgtgaactcagagcaagagctcacttattaccaaggagatagcccaagccattcgtgagggatcgacccccgtgatccaaacacttcccaccaggccccamctctaacattggggattacgtttcaaaatgagatttcagtaaggaaagatatccaaataatatcattccaccttgttccctcccaaatctcatgtctttctcacactgcaaaacgcaatcatacgttcttaatagtcccctaaagtcttaactcattccaacattaactgagatctcccaactcctaagttctatctgagactcaagccaagtttctttcacctataagcctgtaaaatcaaacacaggttattaacttccaagatacaatggtgt

SEQ ID NO: 359657 - DNA, 575 bp, Homo sapiens
ggttccaaagacctttggcaactccacccctgtggctttgcagggttcagcacccaaggctactctcacagctgtagttgagtgtccgcagcttttccaggctcagggcacaggctgctggtggatctaccattctgggatctggagggcagtggcccamttcccacagctccactagaaagtgccctattggggactctgtgtggcagctccaaccccacatttcccctccacactgccctagtagaggttctctgtgagggctctacccctggagcaggcttctacttgggcacccaggctttttcatatatcctttgaaatctaggcagaggctgccaaggcttcactctgtgcacctacaggcttaacaccacagggaagccaccaaggcttactgtggtgcaattcagaaggccactcaagctatatatggggccctttcaactgaggctggagccagattgggtgggatgcaggaagcagtgtattgaggctgcacagggcagtgaggtcccatgcctggcccatgaaaccattctttcttcctaggactctatgcctgtgttgacagg

SEQ ID NO: 359658 - DNA, 575 bp, Homo sapiens
ggttccaaagacctttggcaactccacccctgtggctttgcagggttcagcacccaaggctactctcacagctgtagttgagtgtccgcagcttttccaggctcagggcacaggctgctggtggatctaccattctgggatctggagggcagtggcccaattcccacagctccactagaaagtgccctattggggactctgtgtggcagctccaaccccacatttcccctccacactgccctagtagaggttctctgtgagggctctacccctggagcaggcttctacttgggcacccaggctttttcatatatcctttgaaatctaggcagaggctgccaaggcttcactctgtgcacctacaggcttaacaccacagggaagccaccaaggcttactgtggtgcaattcagaaggccactcaagctatatatggggccctttcaactgaggctggagccagwttgggtgggatgcaggaagcagtgtattgaggctgcacagggcagtgaggtcccatgcctggcccatgaaaccattctttcttcctaggactctatgcctgtgttgacagg

SEQ ID NO: 359659 - DNA, 575 bp, Homo sapiens
ggttccaaagacctttggcaactccacccctgtggctttgcagggttcagcacccaaggctactctcacagctgtagttgagtgtccgcagcttttccaggctcagggcacaggctgctggtggatctaccattctgggatctggagggcagtggcccaattcccacagctccactagaaagtgccctattggggactctgtgtggcagctccaaccccacatttcccctccacactgccctagtagaggttctctgtgagggctctacccctggagcaggcttctacttgggcacccaggctttttcatatatcctttgaaatctaggcagaggctgccaaggcttcactctgtgcacctacaggcttaacaccacagggaagccaccaaggcttactgtggtgcaattcagaaggccactcaagctatatatggggccctttcaactgaggctggagccagattgggtgggatgcaggaagcagtgtattgaggctgcacagggcagtgaggtcccrtgcctggcccatgaaaccattctttcttcctaggactctatgcctgtgttgacagg

SEQ ID NO: 359660 - DNA, 626 bp, Homo sapiens
cctgtgactgccagctttgccccacttccctgacaacctgcatgactcagcagagrcagccataatcctcctagagacacaactccagtgctctgagaatctcacctgcatccctcacagcagccacagcaagacccacccaaggagagtctgagctcagacacacctagccccacccctacctgagggtccttccctatccaccctggtagtggaagacaaaggcatataatcttgagcattctagggccccacccacccgtggtccctctgcacactactacagctgatgctttctggaaagcaccacctcttggcagaaggccaatcagcacaaaaatagagcattaagccaccaaagctaaggaccctcaaggagtccattgcaccctctgacacctttactggaacaggcactgatatccatggctgacagacttatagacagttcacaccacatgactcagtgcagacaacccccagtaccagcctggagccgggtagacttgctgggtggctagacctagaagagagacaacaatcattgcagtttagctcacaggaagccgcatccataggaaaagggggagagtactacatcaagggaacaccctgtggaacaaaag

SEQ ID NO: 359661 - DNA, 626 bp, Homo sapiens
cctgtgactgccagctttgccccacttccctgacaacctgcatgactcagcagagacagccataatcctcctagagacacaactccagtgctctgagaatctcacctgcatccctcacagcagccacagcaagacccacccaaggagagtctgagctcagacacacctagccccacccctacctgagggtccttccctatccaccctggtagtggaagacaaaggcatataatcttgagcattctagggccccacccacccgtggtccctctgcacactactacagctgatgctttctggaaagcaccacctcttggcagaaggccaatcagcacaaaaatagagcattaagccaccaaagctaaggaccctcaaggagtccattgcaccctctgacacctttactggaacaggcactgatatccatggctgacagacttatagacagttcacaccacatgactcagtgcagacaacccccagtaccagcctggagccgggtagactygctgggtggctagacctagaagagagacaacaatcattgcagtttagctcacaggaagccgcatccataggaaaagggggagagtactacatcaagggaacaccctgtggaacaaaag

SEQ ID NO: 359662 - DNA, 557 bp, Homo sapiens
aataaacttgcttcatcaaagtacacctgtttggattgagtgcaaagcacccaggaacttytgaaggatggagagaatccaatttgggttgttttaattttcctatggagattctacaacaaggaaaatccataggcagatgatctataaatgactgtgcagtgggtggagtaatccaggtcttttagcctgttcttgcattgctataaagaaatacctgagactaagtaatttataaagaaaataggtttaattggctcatggttctgcaggctgtaaaagaagcatggtgccagtaactacttctggtgagggtgtcaggaagcttataatcacagtgcaaggcagagggggaagagatgtgtcacatggtgaaagtggaagtgagagagaaggagatacttccacactcttttaaacaactgtatctcgtgtgaactcagagtgagaacccactgtcacaaggagggcaccaaccctccttgtaattcagaagatatctgctcccataatcaaaacacctcccaccaggccccacctccaacattggggattac

SEQ ID NO: 359663 - DNA, 530 bp, Homo sapiens
actcatgggcaggaaacagcacaaatactctggacaaagacaggattcttgtcttgggcaggagggagcagagcacaagatttcctcacactacttagaacagtgtgcaaattaagacttaggaattgtttatttctggaatttttcagtttacattttccatccaaagttgactgtgagtaactggaatctcaaaggtaaaccgcaggtaagtggggactactgtcactgcagtgagttgcagtgttccattattttttatttcacaggatgttagtgtttgcrtatagggaaggtgctcagcttatgtaaactaatagaaccctttatggtggcctggtcaggaaacaaaacaccatttgaaatgattggagtcatttcttacacatttccctgtacttgcagcagtgagaaactgggccacacctttgagtgtcattttttttttttttttggtattattcaatacatttctgacacaggttttggttcagatacatagcttctctctacacaatgtgaatgatcat

SEQ ID NO: 359664 - DNA, 617 bp, Homo sapiens
tgtccacgagagaaaggagactatcttttattagaaattcactcctgtaataactaacccactccaatgayagtgacattaatccattcatgaggacagagccttcatgacctaatcacataataaaggtcccacctctcaacactgttgcattaaagattttttccaaatcctaaactttgggagacacatttaagtcatagcattccattcctaatatcaaaatttatgtccttatcacaatgcaaactacattcattccatcccaattgtctccaaagtcttatccagcatcagtgcaaaagtctgaagtctaaagtctcatctaaatcagatgtgagtgtgactcaaggcacaatttagcctgatataaattttttcccatctgtgagcctataaagtcaaaacaagttatctactttcaaatacagtgaacaatggggcaggtatgggatagaaattcccattccaaagctcagagacagggaaggagaaagcagtgcctagttcaaaacccaacagaggaaaaaaacattaagtcttatagctgagacttaatgtttttttccccttgttgggttttgaacatagttcacaccattgtagaagtccttgtg

SEQ ID NO: 359665 - DNA, 617 bp, Homo sapiens
tgtccacgagagaaaggagactatcttttattagaaattcactcctgtaataactaacccactccaatgacagtgacattaatccattcatgaggacagagccttcatgacctaatcacataataaaggtcccacctctcaacactgttgcattaaagattttttccaaatcctaaactttgggagacacatttaagtcatagcattccattcctaatatcaaaatttatgtccttatcacaatgcaaactacattcattccatcccaattgtctccaaagtcttatccagcatcagtgcaaaagtctgaagtctaaagtctcatctaaatcagatgtgagtgtgactcaaggcacaatttagcctgatataaattttttcccatctgtgagcctatraagtcaaaacaagttatctactttcaaatacagtgaacaatggggcaggtatgggatagaaattcccattccaaagctcagagacagggaaggagaaagcagtgcctagttcaaaacccaacagaggaaaaaaacattaagtcttatagctgagacttaatgtttttttccccttgttgggttttgaacatagttcacaccattgtagaagtccttgtg

SEQ ID NO: 359666 - DNA, 590 bp, Homo sapiens
tttctatgaaattgaaacagcctatctgccagtggagaaagttatttcatccttttttgcctgcagtgagaaagggggaaatcagagccacagagaagagaatgaaatgtccctgaggacatctgagaattagagaaaagaaagcctcagattctaaggagaagtcctcgccacttcccatctgagcctgctcttcagtggacccaagtgtcgagtgcatcctgcacatctcaggcccccaggagggagggtcctgtctgggttcacacggcatcccctcactgtgtctcccacaggaatacctggctgtcctgtgggttcctggagctccgccgcagggagcgctgcttgttggatgagtctctggatggagatgaggctcttgagaggcggcggttgttcgtgtttctcttataatcgatgctcctcagccagtgcaaccccttgtctaggggccggtggaccsggcctccgcagtaaccactggctgtgatggagaatccggagtcgtgccaggtgaggaagggggcagccacggcttctccagtcttgagcctcactcctgctgctgcacctgggacaggacagct

SEQ ID NO: 359667 - DNA, 601 bp, Homo sapiens
tatgcagacagtggtgattattattttggttgggcagtgagctaaacctggaacaaaaatgtcttttataggagagcctttctgtcaagcagaaatccctttgacgagatgaaggagctaatctattcgtctcagctcacccctgcaccgccccccctcccccccagccccaaggccatgggcactgaatttaccagccgtgcaaccttggccaggatccttctacctctcagtgttgtccctattgcagtggaggggatgtaacctacctcacaggcttgtgttgaggattacataggtaacatacgtgagcttccagcagaggtgcagtaaatgctgctttctcccttatggcctctccggcttttaacatttatttttatagaggtatgctaacttaaagcaagacatgttttatagattgaattatttacatcttggctatgagcttttatgtgttctaaattggtttttgaatagttacttggagctgacaatttttttgtttcmtctttggaaaactggaagattctgtgacccttaatgagaggattattataaggagtaaccttgggctgtcatttccgtatttcaaaacaac

SEQ ID NO: 359668 - DNA, 433 bp, Homo sapiens
tttgcagttttttctttttgtcagtgataataaatatgctatggtatgtgcacatgcttattcttattttaaaaataacagctttattgaaagagaattcatatactatatatacttcacccttttaaagtgaagtcagtggtttttagtatagtcacatagctgtgcaagcacgaccactgccactgaatgtttccatcacccsaaaaagaaacccagtgcctattagcagtcgctccccattccccctccccccaacgcttgaccacccctttttgtctctatgggtgtcttttttggacgtagcatgtaaggggaccacacaccgtgtggccctttgtgactggcttccttcactctggtgatgtcagggcccctccatgctgtgggtgtgtcagcacttcctcctctttcgcaaccgagtggcgttccc

SEQ ID NO: 359669 - DNA, 433 bp, Homo sapiens
tttgcagttttttctttttgtcagtgataataaatatgctatggtatgtgcacatgcttattcttattttaaaaataacagctttattgaaagagaattcatatactatatatacttcacccttttaaagtgaagtcagtggtttttagtatagtcacatagctgtgcaagcacgaccactgccactgaatgtttccatcacccgaaaaagaaacccagtgcctattagcagtcgctccccattccccctccccccaacscttgaccacccctttttgtctctatgggtgtcttttttggacgtagcatgtaaggggaccacacaccgtgtggccctttgtgactggcttccttcactctggtgatgtcagggcccctccatgctgtgggtgtgtcagcacttcctcctctttcgcaaccgagtggcgttccc

SEQ ID NO: 359670 - DNA, 597 bp, Homo sapiens
ggatgcttgctttgccctttgagaactcagttctcttcctggggcctcaactagccatgtcctggctcctcttttcccaggtgaggaagtagattggaacagcagcttaaygtaataatcatgtgagttcagacacaccaggattcacttaatgtaatttatagttcaggacatccatcatgtttagagggaatctctctgttctagggagtgggccactttttaaaagtgtttaaattaaaataaattttttagatgaacttttgctcctttgcgcaggctagagtgcagtggcccgatctcagcttaccgcaacctccacctcctgggttcaagtgattctcctgcctcagtctcccaagtagctgggagtacagacacgcacaaccactcccatctaatttttatatttttagtagagataaggtttcaccatgttggccaagctagtctcaacgtcccgacatcaggtgatccacccaccttggcctcccaaagtgctgggattacaggcctgagccaccattttaactaaggcactgggagctgccctctgagaccttttgagtcctggaattctttctgagaccttaggag

SEQ ID NO: 359671 - DNA, 597 bp, Homo sapiens
ggatgcttgctttgccctttgagaactcagttctcttcctggggcctcaactagccatgtcctggctcctcttttcccaggtgaggaagtagattggaacagcagcttaatgtaataatcatgtgagttcagacacaccaggattcacttaatgtaatttatagttcaggacatccatcatgtttagagggaatctctctgttctagggagtgggccactttttaaaagtgtttaaattaaaataaattttttagatgaacttttgctcctttgcgcaggctagagtgcagtggcccgatctcagcttaccgcaacctccacctcctgggttcaagtgattctcctgcctcagyctcccaagtagctgggagtacagacacgcacaaccactcccatctaatttttatatttttagtagagataaggtttcaccatgttggccaagctagtctcaacgtcccgacatcaggtgatccacccaccttggcctcccaaagtgctgggattacaggcctgagccaccattttaactaaggcactgggagctgccctctgagaccttttgagtcctggaattctttctgagaccttaggag

SEQ ID NO: 359672 - DNA, 594 bp, Homo sapiens
ggctagccatatgcagaagatggaagctagatgtctacctttcaccattaacaaaaatcaacaaaaaatggagtaaagatttaagtataagacctcaaactataaaaatcttggaatacaacctaagaaatactcatctaaaaattgttttgggcaagaaaattttggcaaagtccccaagagcagttgcaacaaatcaaaattctgtctgtggcaccttataaaactaaggagcttctacagagccaagaaactatcaagagagtaagcagagatcctacagaatgggggaggctattcacaaactatgcatytgatgaaggtccaatatccagattctataagaaatgtaaatcaacaagcaaaaataataataataatcacattttaaaaataggcaaatgacatgagcataaacttctcaaaaatacataaagtggccaggacatatgaaaaaacgtttaacgtcactaatcatcagagaaatgccaatcaatcaaaaccacaatgagatgctgtctcacaccagtcaaaatcagtattactaaaaattaaaaaaaaaaaaaaacagatgctggtgaggctacggagaac

SEQ ID NO: 359673 - DNA, 594 bp, Homo sapiens
ggctagccatatgcagaagatggaagctagatgtctacctttcaccattaacaaaaatcaacaaaaaatggagtaaagatttaagtataagacctcaaactataaaaatcttggaatacaacctaagaaatactcatctaaaaattgttttgggcaagaaaattttggcaaagtccccaagagcagttgcaacaaatcaaaattctgtctgtggcaccttataaaactaaggagcttctacagagccaagaaactatcaagagagtaagcagagatcctacagaatgggggaggctattcacaaactatgcatctgatgaaggtccaatatccagattctataagaaatgtaaatcaacaagcaaaaataataataataatcacattttaaaaataggcaaatgacatgagcataaacttctcaaaaatacataaagtggccaggacatatgaaaaaacgtttaacgtcactaatcatcagagaaatgccaatcaatcaaaaccacaatgagatgctgtctcacaccagtcaaaatcagtattactaaaaattaaaaaaaaaamaaaacagatgctggtgaggctacggagaac

SEQ ID NO: 359674 - DNA, 492 bp, Homo sapiens
acttataagtgggagctgaacaaatgagaacacatggacacagggaggggagcaacacacactggggcctgtyaggagatggaagggggtagggagagcattaggcaaaatatctaatggatgctgggcttaatacctaggtgatgggttgataggtgcagcaaaataccatggcacacgtttacctatgtaacaaacctgcatgtcctccacacgtaccctggaacttgaaataaaaataaacattttttaaaaagagctatcaatacttccaaaagttgtgaccctggaaccatggcaatttgtactcacgcttatacaatcctagaagctgactactaggtttaatcttttcatgaactaggagtcttcattaggtcaatgtaccagattaacaatgaccacaccaggagaggtgccatctatttatctattaatcaatattaacactgaaattttaggccaactgtaaagagctaaccaactgtgaag

SEQ ID NO: 359675 - DNA, 492 bp, Homo sapiens
acttataagtgggagctgaacaaatgagaacacatggacacagggaggggagcaacacacactggggcctgtcrggagatggaagggggtagggagagcattaggcaaaatatctaatggatgctgggcttaatacctaggtgatgggttgataggtgcagcaaaataccatggcacacgtttacctatgtaacaaacctgcatgtcctccacacgtaccctggaacttgaaataaaaataaacattttttaaaaagagctatcaatacttccaaaagttgtgaccctggaaccatggcaatttgtactcacgcttatacaatcctagaagctgactactaggtttaatcttttcatgaactaggagtcttcattaggtcaatgtaccagattaacaatgaccacaccaggagaggtgccatctatttatctattaatcaatattaacactgaaattttaggccaactgtaaagagctaaccaactgtgaag

SEQ ID NO: 359676 - DNA, 569 bp, Homo sapiens
ttggcattacctgttctattatactgatgttggctcttcctaatcattcgttttttttctaagtgctcccactatccttaaattgttcatttctagattcttgcctggggtggatgatattcctcagtgccaggtcactgggcagagatttttcactgtattggatctcttctgctttctctttcttatttgtgaaaatatgtgtgcatacagacatacacacatgtgcacacacacatgcacgtgcacacacacacacacacacgagctgactcccttaaaccaggtagctgacctccatgggtccacactctrggtccaaactcaactgaaggaaagtgaactgaaggaggcatttgtgaatttgattctccaacctaaggactttgcttttcaaaccaagggtgttcagaagggcacagactgcagaacatgaagacttctgttaccattaacatagttccctggctccatgaggcatgaacagcctctctgagaatgcaccaacaactcagcacgccttgtaaacaggccataattatagagcttggttttgactttttttccag

SEQ ID NO: 359677 - DNA, 508 bp, Homo sapiens
gatgatattcctcagtgccaggtcactgggcagagatttttcactgtattggatctcttctgctttctctttcttatttgtgaaaatatgtgtgcatacagacatacacacatgtgcacacacacatgcacgtgcacacacacacacacacacgagctgactcccttaaaccaggtagctgacctccatgggtccacactctaggtccaaactcaactgaaggaaagtgaactgaaggaggcatttgtgaatttgattctccaacctaaggactttgcttttcaaaccaagggtgttcagaagggcacagactgcagaacatgaagacttctgttaccattaacatagttccctggctccatgaggcatgaacagcctctctgagaatgcaccaacaactcagcacgccttgtaaacaggccayaattatagagcttggttttgactttttttccagggccttaaagttgatatatttttacatttccctggattggagggtaggggg

SEQ ID NO: 359678 - DNA, 593 bp, Homo sapiens
cattttgtatatttgtgcatgagtgatctagagaagtccttgtcttgttaatgaaagttcatggaaatatgataactgcatcacttactgtgaactcacacttcactagtctcaaaaatttctcacccatgtgatggagcaatgggtgcctctaagaatatgctgatttttggactcaacatgttctctttgcttgacttatagacccatgtctgacatctgagacacaccctggggagctgtctccagataacaataatgtaatcttcttcatgaacacaactctgcattccccacatamctcagccacaccttaggggagaggtgttaacttcaccgtccaaaagcattttataccctggagcctgaaaaataatttggatgtgataccaccttgtacttgtaatatagagggcagaggtcagcatccccctggatttgaatgtgttttattgttgtatttattttcttgcagacatgaattacttgcttgacaaaaactacagccatgccagttcataaaattttccttattctgattttcccatctgtggcatttgaatttcaatattaagtgagcgatgtgcatacct

SEQ ID NO: 359679 - DNA, 583 bp, Homo sapiens
ttattatttaacgttatcaacaaatgcagcagtaactccaggatgtcaattcacaggtttatgaagtgaaaatggatgggttacaaaagttgttttgagagaacgatcctgtagttgtagaatcaataccaagggtggcatcagtgtaaggttgaagtggcagtttctgggatgatgtccttgcaaaagtaattttttwataaggtggtggtgtcttcttcccaagattgtggttaagcagagtatatttatgatagttcttgttatcaggaatatgggcttaagaaccctccttcatggtcactcctagtttcatttgtcagagttttaatacaagtggctccattttgattttgacaactttcccactctctttctaacactactggggggaaggtgaccctgtgttagcttgaacagcacaggataaattccatatccacatcccattttgaccacacaagctcatcctcttcacaactattggccacttgcattcccaagtgagtctctacacaacacagtggagggttctgagcaacgggagagaaggaagtcccatcagcctctcccacgtggctgc

SEQ ID NO: 359680 - DNA, 583 bp, Homo sapiens
ttattatttaacgttatcaacaaatgcagcagtaactccaggatgtcaattcacaggtttatgaagtgaaaatggatgggttacaaaagttgttttgagagaacgatcctgtagttgtagaatcaataccaagggtggcatcagtgtaaggttgaagtggcagtttctgggatgatgtccttgcaaaagtaatttttttataagrtggtggtgtcttcttcccaagattgtggttaagcagagtatatttatgatagttcttgttatcaggaatatgggcttaagaaccctccttcatggtcactcctagtttcatttgtcagagttttaatacaagtggctccattttgattttgacaactttcccactctctttctaacactactggggggaaggtgaccctgtgttagcttgaacagcacaggataaattccatatccacatcccattttgaccacacaagctcatcctcttcacaactattggccacttgcattcccaagtgagtctctacacaacacagtggagggttctgagcaacgggagagaaggaagtcccatcagcctctcccacgtggctgc

SEQ ID NO: 359681 - DNA, 583 bp, Homo sapiens
ttattatttaacgttatcaacaaatgcagcagtaactccaggatgtcaattcacaggtttatgaagtgaaaatggatgggttacaaaagttgttttgagagaacgatcctgtagttgtagaatcaataccaagggtggcatcagtgtaaggttgaagtggcagtttctgggatgatgtccttgcaaaagtaatttttttataaggtggtggtgtcttcttcccaagattgtggttaagcagagtatatttatgatagttcttgttatcaggaatatgggcttaagaaccctccttcatggtcactcctagtttcatttgtcagagttttaatacaagtggctccattttgattttgacaactttcccactctctttctaacactactggggggaaggtgaccctgtgttagcttgaacagcacaggataaattccatatccacatcccattttgaccacacaagctcatcctcttcacaactrttggccacttgcattcccaagtgagtctctacacaacacagtggagggttctgagcaacgggagagaaggaagtcccatcagcctctcccacgtggctgc

SEQ ID NO: 359682 - DNA, 487 bp, Homo sapiens
tgaccctgaccctggcccagcctctctcttggctgaggttagaattcctaaatactgttttcttcagggaaccccactgaggtccctgtcctgagtgtgactggagaagactcaccgggttccactcagcttccacagggctgtggccctggtgaccactggcagagggattgttctgcatttagtgcctgtaagaaggtttcctcctggtacaacaaaactgtggtatttcagagacgtagagctaggcacagcatcatgaaataagggagggtccctggaggaaacatgtagatgtagaggcagccccacacccyggcagtaaaccagcctctcatctccacccacacctgctctggggctggccctgtgcttcctgcaacctgctcttcccctggtggtcttgagtcccccttgtggtcctgagtcttgctggcggtcctcagtgccctgacagcaagttttgtgtcagggctcacaaggacac

SEQ ID NO: 359683 - DNA, 487 bp, Homo sapiens
tgaccctgaccctggcccagcctctctcttggctgaggttagaattcctaaatactgttttcttcagggaaccccactgaggtccctgtcctgagtgtgactggagaagactcaccgggttccactcagcttccacagggctgtggccctggtgaccactggcagagggattgttctgcatttagtgcctgtaagaaggtttcctcctggtacaacaaaactgtggtatttcagagacgtagagctaggcacagcatcatgaaataagggagggtccctggaggaaacatgtagatgtagaggcagccccacaccctggcagtaaaccagcctctcatctccacccacacctgctctggggctggccctgtgcttcctgcaacctgctcttcccctggtggtcttgagtcccccttgtggtcctgagtcttgctggcrgtcctcagtgccctgacagcaagttttgtgtcagggctcacaaggacac

SEQ ID NO: 359684 - DNA, 624 bp, Homo sapiens
gctgatgacagagcagtatctagggaggagagaggctgacaacacccagcattgttctcctaaacagagtttgaggagaagtgtgcatgtgccaggagccccacatatataaggggtaggaaccacggckaccctctgtctcagagcctcttctcaggggtgattttcctgctcaggcatcagatcaatcacacagactcttcctcctctgaaagagcatccctctgctgagtgttcaaggcatccattgtcaccccaagggcaggagggcaggtgacagaaacaagcaggtttgctggacagagagggaagaataggagtaggaacgggggaaacacatggtgcccaggacctgtggcctacagtcctcctgcttctttcgggttcccagctggagatagtacactgtgaactttcctggcagtcgtgcttctggagggaggattaggggaaatgctgagtaagttctcctctttgctgagcacagagttttcactctctgtggtatgtggttttatccctccccggttgagtcacccctgctcatccctccctgttgctccccaggttttgcttctttgcttataggagaactgacaacagcgaggcaagggattgggttag

SEQ ID NO: 359685 - DNA, 536 bp, Homo sapiens
ttaaagctgcccatttttatgtttttctgagaaagagattaaaatgctttactgtgttatgtccataatctggaacaatcattttactgaggaatgctgttactgttctgaactkcacatcaagttccagattttcattctcccacacaggagttttttaaatttcaaaagatgtcagtggggctgagcgcagtggctcatgactgtaatcccagcactttgagaggctgaggtggcgggaggattgcttgagcaatgtggagacctgcctgggcaacatagtgagaccgtatctctacaaaacagtaaaaaattagctgggagtgtgatgagactgtagtcccggctactcaggaggctgaggtagaagaatctcttgagctcaggagggcaaggctgcagtaagccccattcacattatagcactccagcctgtgcagcagagcaaaaccctatctccacccctctcccccccacacacaaaaaagtcagtgctagaacttaatacagacaaatttgcattcacaactacaatt

SEQ ID NO: 359686 - DNA, 638 bp, Homo sapiens
gttaagaaccactatttgttgttgttgttgtttgagacagagtcttgctctgtcacccaggctggagtgcagtggtgcagtcttggctcaccgcagcctctgcctcccggaaacaaatgattctcctgcctcagcctcccgagtagctgggattacaggtgcgtgccagtacaaccggctgttatttttatatttgtattttttmgcagagaacagggtttgtatttctagcagagaacagggtttcaccatgttggccaggctcgtctccaacttctgacctcaagtgatttgcctgctttggcctcccaaagcgctgggattacaaatgtgagctgccatgcctggcaggaaccaccgtttgtttgttattttcctcaaacaattggtatttgaaatactactgaagtagtatcatttgggaatcttttgaaacattttgatcttacaagggaccctagtactttgaagattgtgaaccactgtctgtactcttaagggtagagaattcctaattccttagctttgtagagatgtgtatcactatctgtgaatgctgttatttccaacacgctttgtaattcgacaatgtttgttttctgacatatgttgtatgtgatatttcagtctaaagaaat

SEQ ID NO: 359687 - DNA, 585 bp, Homo sapiens
ttctgttgctgtgcagaagctgtttagtttaattaggtatcacttgtcaatttttgtttttgttgcaattgcttggggacttagccaaaaattatttgccaaggccagtgytgacatgagtatttcctaggttttactctagtgcttttatagtttgagatcttacatttaaatatttaatccatcttgagtaaatatttgtattagtgaaagataagaatttggtttcatttttctgcttatggcaagccagttaacctgaaacatttatcaaatggcaaatcctttccctattgcttgttttcattgaccttgtcgaaaatcagatggttgtaagtgagcagctttatattttagctttctattctgttccattagtctatgtgtctgtttttgtatcagtactatgctgttttttcactgtagccttattgtttgaagttgatagtgtaaggcctccagctttgttctttttgcttaggtttgcattggctatttgggctcttttttggttccacataaattttagaatagtttttctaattctatgataggttgataggaatagcattgcatctgtaaatt

SEQ ID NO: 359688 - DNA, 407 bp, Homo sapiens
ttccatgagtatggaatgttttcccacttatttatgtcacctgatttctttcagcattgttttctagttctccttgtagagatttttcaccttcttggttacctgtactctcagctgtttcattttctttgtggttattgtaaatgtgattgtgttcttaatatgactctcagcctggatgttattggcacatataaatggtactgatgttttctacattgattttgtatcatggaactttgctaaaatcatttattagttccagtascctttctcctgcttgattgctctggctctgacttccactactacgttgaatatgaaatggtcagagtgcttgcctttttttcagttctccaggggaatgtttccagcttttgcccattcagtataatgttggctctggg

SEQ ID NO: 359689 - DNA, 440 bp, Homo sapiens
ctgcttgattgctctggctctgacttccactactacgttgaatatgaaatggtcagagtgcttgcctttttttcagttctccaggggaatgtttccagcttttgcccattcagtataatgttggctctgggtttgctatagacgactcttattattttgagtcatattattttgatgtctagtttgttgagggtttttatcatgaagtgatgttgaattttattgaagtttttctgcattttttgagatgatcagatagtttttgygtttaaatctgcttatgtggcgaatcatatttattgatttgcatatgttgatccaaccttgcatcccaggaataaagcctactttatcgtggtgaattaactgttttatatgctgctggattcagtttatcaatattttgttgagaattttttgtctgtgttcatcatggacat

SEQ ID NO: 359690 - DNA, 582 bp, Homo sapiens
ttctgtcatcatgttgctagctgattgttatgtagacttgattatgtggttgctttatggcgcctgtgtgctatgtggttaaatgagcttttgtggtatgactgtcattctttcttttccatgtttagcactcccttaaggacctcttgtatggctagtctagttgaaacatattcccttagcatttgcttcacttcacttttaagcttagtttggtgggatatgaaattattggttaaaatttattttctttaaggatgctgaaaataagctaccaatctcttctgacttgtaagmtacctgctgagaggtctgctgctagcctgatgaagttccttgtatgtgactttaccctgcctttaagacttttttctttagtgttgaccttgatgaatattgtactatgtgccttggaggtagtcatttcatgtcatatctatctggggttctgcgtgtttcttggatttgtatgtaaatctccctaaagagataagaggaattttcatgaactgtatcttcaaatatattttccaagttgcgtattctctctcctctctcaggaatgacaatgagtcatagatt

SEQ ID NO: 359691 - DNA, 578 bp, Homo sapiens
aatacctgttcaaattatggtggtttacctaataatttggcctctcttgagaggagtggcacttcctggctgtgtctagtcggccatcttgttcgtctcctctatcttaaaatggagtcaaccaatccactacaaataatgtgatttgaggaagtccaaagctctaattcaggtttttatttgtttgttttgtatgctttcygggtttttttttgttgttaaaaactatctcaacaattttattctctccaataaatgtacatctcatctaaattttggtattgagcttttttatacatcctatttccaaccaaaaagacttgtttttaaataaatgcaacttaatcatcctatttctattatttagatactatcattccttctatctggaggtctctgtaatggctgtattaacagtactcaaaagtaatgtggataataattgtggattttgttcttgtttttaaatctgtctttaatcatttcatgtaaagttgtaagcctttgaagcatttgagaatttcatacaaaacatttctgaaagataaattttctcatattttcttggacacgctgat

SEQ ID NO: 359692 - DNA, 578 bp, Homo sapiens
aatacctgttcaaattatggtggtttacctaataatttggcctctcttgagaggagtggcacttcctggctgtgtctagtcggccatcttgttcgtctcctctatcttaaaatggagtcaaccaatccactacaaataatgtgatttgaggaagtccaaagctctaattcaggtttttatttgtttgttttgtatgctttccgggttttttyttgttgttaaaaactatctcaacaattttattctctccaataaatgtacatctcatctaaattttggtattgagcttttttatacatcctatttccaaccaaaaagacttgtttttaaataaatgcaacttaatcatcctatttctattatttagatactatcattccttctatctggaggtctctgtaatggctgtattaacagtactcaaaagtaatgtggataataattgtggattttgttcttgtttttaaatctgtctttaatcatttcatgtaaagttgtaagcctttgaagcatttgagaatttcatacaaaacatttctgaaagataaattttctcatattttcttggacacgctgat

SEQ ID NO: 359693 - DNA, 577 bp, Homo sapiens
atgcacatttccattattgctgtgaatgtgggggccaagttatttatcgtttaataccatatccctcttgttgttttattgtcaaatgtgagcagctggaggaaaaacacttggaatttctctctgatccctgrtctgtactcataagttgtttgccacgcactaccctttactcatgccttccccgacagtacagcagcagaagggctgcagagaaattaacttcatcttaggttccacttgccattgagattgcccgccctccaccaaatttattttcttaaaaatggattaaaagtaacaagaagctatttctcctcctttgtaataaaaacttactgaggatgagtaattatgtcttcttttcttattagaaccatagatgatgctgggagatatcagatagcgacttaattacccataccttttgtgcacacattcaagtgtacacacagtgacttaattatcagacttacgcattatctaccgcatttctttaatcccagcttggctgttaccacttagcacagaaggtgtagtgtatggacattcatggaatgggcattcgtttaaaagg

SEQ ID NO: 359694 - DNA, 545 bp, Homo sapiens
ccttttgtgcacacattcaagtgtacacacagtgacttaattatcagacttacgcattatctaccgcatttctttaatcccagcttggctgttaccacttagcacagaaggtgtagtgtatggacattcatggaatgggcattcgtttaaaaggaggtaaatcttgcattggagcccttttttggttgcrgggggtgggcaggaaggtccacataatttgaacatggctaattcagaatttaggatctgttattctgggattgagatgagggatggtagattgcccaggttcagagctcggacttcgacatcaggttgtctgagttcacgtactccgtccatcagttgccatctttcctgaccttgggaaatacacttaaccctcttaactttctttagttacctgtgaagttgggatataaagtaccaaccttgccaagtagattgtttttagattaaaaggtcaaacttacaaagtgtccagtgccccatagagtgacactgattgtgatgttgatgtttagttggtaccttaggtttatgct

SEQ ID NO: 359695 - DNA, 443 bp, Homo sapiens
ggataaatcttctttcagtcaagatgatgstacataaagctaactgtattgattgttctttaatgatgctttgtgctgccaaagtcatttgagctggatctgaatcagatccagttggcgaagcttccccatatgtggagctcttataaatcctgcaggcacacagatctaatacagagtaatgagatagctgctgggagaaaaaattgattacagggttgcagacaatatcattaacatttcttaccatgatacaccagatgtcttccctaatagactatttttgttaatttggtttttataggatagcattgattgcatcataatttaactttctttgcatattcaggtatatgtgatctgtgtttctacactaatgatggaataaactcatcagatttaattttgtaagttttaacttatctgttcatttttctatctgc

SEQ ID NO: 359696 - DNA, 443 bp, Homo sapiens
ggataaatcttctttcagtcaagatgatggtacataaagctaactgtattgattgttctttaatgatgctttgtgctgccaaagtcatttgagctggatctgaatcagatccagttggcgaagcttccccatatgtggagytcttataaatcctgcaggcacacagatctaatacagagtaatgagatagctgctgggagaaaaaattgattacagggttgcagacaatatcattaacatttcttaccatgatacaccagatgtcttccctaatagactatttttgttaatttggtttttataggatagcattgattgcatcataatttaactttctttgcatattcaggtatatgtgatctgtgtttctacactaatgatggaataaactcatcagatttaattttgtaagttttaacttatctgttcatttttctatctgc

SEQ ID NO: 359697 - DNA, 538 bp, Homo sapiens
gacagaaaaagagaagatggagaaagtttgagaagcaaaacaccaggggccaaagtggaggacatgagcccttaaagcggtgtttcatctgcacaaacagccratgaaaggaaaagaaactggaccccacgcatatgctgagttgttagaaaagcatttacaatagtgtgtctgacagcacagaaaacaaaaaaattgtgcatagagccagactttggattgaatatacacaattaaaaaaaattatactgagatatatcattgctagtataactctgaaaataggcagagtttaaagttgaattgaacccctgttctaagttaatgttttataggtgaaagaaaccatgagttacaaggaagacatggtaagagatcctggggaagacttttgcttgaccaggtcaggaatcaccaaggtggaaaaggaaacctcaccctccccaggtacctgatatggagctgcctccaaagagccccttggaggtcctgagtgtcccctcgtgtcctgagccatccttgctgtcctgaacacctg

SEQ ID NO: 359698 - DNA, 636 bp, Homo sapiens
agtgcacaggattatttctttggcacacttcacaggccctgactatctgcttgatagtttcaaaaaggcctggtccagtaaataatgatttggccatctgatgggtgctatcaatgcctaagtgaaaggtttggtgaagggttttaagtaatttccattggttagctgcaggcagaagtattttttcttcttcagtggctagccatcttgaggggaggaaactatgttctcatgaggttccccattctatttcttctgctgagtactgggggttggtytcccagaggggattaccccatactaggtgtctttctataagcatttctaatggagggtcctgccttgaggctcttttggcttcaatatccgcttggcagttcccttctatttccctttcctttcctttcggatgaccccagcagtgtaagactgccacctcttcaggtttctgtacaaccaataataatctcctaatggcttcctgatgtttgataggtgttccctcggaagttaggaattccctttctctccatattgatgcatgggcatggaggactaggtaagcatacttagagcctgtatttatatttaccctttttccttctccgaattctagtgcccaagtgagggctacca

SEQ ID NO: 359699 - DNA, 636 bp, Homo sapiens
agtgcacaggattatttctttggcacacttcacaggccctgactatctgcttgatagtttcaaaaaggcctggtccagtaaataatgatttggccatctgatgggtgctatcaatgcctaagtgaaaggtttggtgaagggttttaagtaatttccattggttagctgcaggcagaagtattttttcttcttcagtggctagccatcttgaggggaggaaactatgttctcatgaggttccccattctatttcttctgctgagtactgggggttggtttcccagaggggattaccccatactaggtgtctttctataagcatttctaatggagggtcctgccttgaggctcttttggcttcaatatccrcttggcagttcccttctatttccctttcctttcctttcggatgaccccagcagtgtaagactgccacctcttcaggtttctgtacaaccaataataatctcctaatggcttcctgatgtttgataggtgttccctcggaagttaggaattccctttctctccatattgatgcatgggcatggaggactaggtaagcatacttagagcctgtatttatatttaccctttttccttctccgaattctagtgcccaagtgagggctacca

SEQ ID NO: 359700 - DNA, 522 bp, Homo sapiens
ggagtggcaggattcacacacagatctctgaattaaaggcagtgtgcatccagcatgatgctttgcagccttccagatcagtatactacactgtaaactctcaaagaggaaaacattgctgggcacggtggctcacacctgtaatcccagccagcactttgtgaggccaaggtgggcagatcacaaggtcaggcgttcgagaccagcctgaccaatatagtgaaaccccgtctctactaaaaatacaaaaaattggccgggcatggtggcgcacgcctgtaatcccagctactcaggaggctgaggtaggagaattgcttgaatytgggaggtggaggttgcagtgagccaagattgcaaccaggatgtcatccagccttgggtgacagtgcaagattccgtctcaaaaaaaaaaaaaagaaaaagaaaaaaaaaagagcaaaaacatgtctggttcatctctgtgttactcaccacactgagtacggtgtcgtcttcaacataattgcaggtttagataca

SEQ ID NO: 359701 - DNA, 473 bp, Homo sapiens
ttagaaagacattgtcattaccgggtattaatgtatagaaatgtacagtccacccttggtcccccagtaaacatgtatataacattcttttcatacatgcaactccaaaacgtcctgcttaaaattccccaactttcccaggtgaaaccccaaacagtagttttctggcctaaaatcatacttgccctgcattctgtgatataatgacytaagcaatatttctctgtgactaggctttctgaggactatctattcctattccactcaagttcaataatatatttatatggttccttacaatatgtaatacatctaataaacaataatagagaaaaatcaatataattaaaataaaacttattttttgttaaaaaatgaaaaatgctgtggtataatttggtcactggttcagagaatatcctgattattaaattataagatgaaaaaacatcttgggcctccatttgttaact

SEQ ID NO: 359702 - DNA, 599 bp, Homo sapiens
ttgagcctgggattttggaggatttctctataggaggctaagccaactttgtagttcatttcttatcagtgtctgtatcagtgtcttgccttcctgtgttttctggagatacaactgctacaaaagattggtcagttgtctgtcaatttcatttgagaaaattctatttttaaataacctgtgaaagaaatactgagctgtattctttgaatccctatcctgacctgggtcttgttgaatgtrctttacgaaagggccattgtatggggtcatcaatgtgtctacccccgccgtattggtgcttcagaggggcaccttaagtttcctgggaccccacagatattctcattctgatttgtaaaatccaatttatatgttctaatttcagaatagaatgcaactgaagaaatggctggtgcaattcagcaaggtaaaagattatcttacccccagctggttaaaggcagaagctatgaatttgtgctattgtctgtgggctcctttcaggtgagccatcttgaactgaagattattcctttcataaaaaactcataatgaagcctgaataaatcagtcaacatactaaaatattttgacat

SEQ ID NO: 359703 - DNA, 599 bp, Homo sapiens
ttgagcctgggattttggaggatttctctataggaggctaagccaactttgtagttcatttcttatcagtgtctgtatcagtgtcttgccttcctgtgttttctggagatacaactgctacaaaagattggtcagttgtctgtcaatttcatttgagaaaattctatttttaaataacctgtgaaagaaatactgagctgtattctttgaatccctatcctgacctgggtcttgttgaatgtactttacgaaagggccattgtatggggtcatcaatgtgtctacccccgccgtattggtgcttcagaggggcrccttaagtttcctgggaccccacagatattctcattctgatttgtaaaatccaatttatatgttctaatttcagaatagaatgcaactgaagaaatggctggtgcaattcagcaaggtaaaagattatcttacccccagctggttaaaggcagaagctatgaatttgtgctattgtctgtgggctcctttcaggtgagccatcttgaactgaagattattcctttcataaaaaactcataatgaagcctgaataaatcagtcaacatactaaaatattttgacat

SEQ ID NO: 359704 - DNA, 605 bp, Homo sapiens
tacaaaatgtacattgaggattaaaacagcgaagtaaccaacaaggccaatggagcttgaacagagttttgaaagctatatggttcatcatgttgactaggaaggcaggatactacaaccaagggagtggaatgttgaaaggtatataacagcatggcccagcataacctaaagcttaggataggacaaagggaatagtcagatgatgtaggagaggggtttggggttacatcaggaaatgcttcatatgccatgcaaaggaatttgggctttgaagggatttaggccagcctataaaatgatgagatttaccagatttacccagtcctttaagcttctgcatgtcarcgtgccaccaggctagtgaacacacagaagtgattaatgagctctgtgaccacccagaaaacattcctggcagctgcaagccccaagatacatcaggagtctgcttctctggcaacatttaggtcagaaataagtctatttttgagagttctgctgctgccttagttgcttgtctcttcatctgccccactactgtagtatatacaggtgattttttttcctatggattattttcaagggttgatacaaacattaac

SEQ ID NO: 359705 - DNA, 593 bp, Homo sapiens
tatatgttctaatttcagaatagaatgcaactgaagaaatggctggtgcaattcagcaaggtaaaagattatcttacccccagctggttaaaggcagaagctatgaatttgtgctattgtctgtgggctcctttcaggtgagccatcttgaactgaagattattcctttcataaaaaactcataatgaagcctgaataaatcagtcaacatactaaaatattttgayattttgccaccaagtctcctaaaaatcttgggtactagatgtaacagaagataaataaccaactgttctgctaccacaggcataatcctcctcctggtcccaaataaagaattcttgctgtcctcaccccaccttcattcaactagtgtgcaaattctgcattcaaaattctttctaggataaacaagttgcatacattcatacaatggaattttactcatctataaaaagaaagcaacttaatgaggtcttgattcagtgatacaaaaatatggatgtcaaaaacatgctgaatcaaagatgtaagacatgaaaacacatatggtataattttgtttatattaaacaaaatcagaaaaaaactat

SEQ ID NO: 359706 - DNA, 594 bp, Homo sapiens
attcctaggtatttttgttattgttgcaattgcaaatgggagtttgcttctgatttggccctctgcttaactgtttttggtgtatagaaatggtcacgatttttcccattaattttgtatcctgagactgctgaggattaccagtttaagaagctattgggctgaggctgtagggttttctagatataggatcatgtcacctgcaaacagggatagtttgacttcctctcttcctatttggatgcccttttttctttttcttgcatgactgccctaagacttcaaatactgtgttgaatagaagtgctgagagagggcatccttgtcttgtgtcagtcttcaaggggaatgcttccagctttttctcattcagtatgatgttggctgtgggtttgtcataaacagctcttatattttgaggtatgttccttcaatayctagtttattgagagtttttaacataaatagatgttgaattttatcgaaagccttttggttttgtctttagttctgtttatgtgatgaatcacatttattgatttacatatgtcaaaccaaccttacatcccagagataaagtctacttgacatagt

SEQ ID NO: 359707 - DNA, 512 bp, Homo sapiens
cactattctctgtgcatgtgctatgaagggcataccaaggaagtaaaagttcccaaggcgtatatcaatttttgtttaactgccaagctactgtatttcattaaaagaaatctttaccttttaatgaatttcccaagctgcttcttccaatggtatgtaccrttgctcaactaaataaagcagctttggaattttcaaaacctctttttggctgctcaagatacttgtattccctgggatgtgtactccaaatggattaaacagactttaacattactctacttgttatggatcgaattcctgcctgagggagcagatgatttgaacagtgctgactgaatctgcatgacatggaccctccagaccatctgaaaagactccacactctgtgttatatttcctacctgcatgttttctctcgtcctccccacctgcccatcttctctttccctgcctctgccacctcctctttcttcttcttcctcttctgaacatttctaagaagacatgtt

SEQ ID NO: 359708 - DNA, 444 bp, Homo sapiens
ctacagttctgtgccatgcctggctaatcttttttttcttttgtagagacaggatcttgctacactgaccaggctggtcttgacctcctggcctcaggctatcctcccacctttgcctcccaaagaaaaatcagtcttttgttatgtcttcattttattcacatgcatgcttgattcatgttctgttgcttctattgattattaaatctggtttcagagtactagacagactgtcttgctgtgttgcattctactgttttgaccacgaaaggacaggttaaatattgtgttctgttacaaaatgaaatggaaaactaggatcattcacaaaatatttgatgtactatggctcattcttttcatggttgtctttgtatttcaraaatgcttctttactgtttgaatgaccatatatggaaaatagacaccgtacaaactcttcct

SEQ ID NO: 359709 - DNA, 633 bp, Homo sapiens
gacttctcataattaatctatattgcttataaattacaacatcaattattccttcacttacgaggtctgataactggcaataatgggaacaagcaatgctgtgtgtagattgtgtgagggcaaagcatagttgaattcctttttatccacctaagctgaccatcactcagtgatgtaaattcataagattgcagattgcagtgtctactcttgcctgataatgttgtctatattttacctgatatgttaaatatgcttatttttcctaaatacagacataataatggccarttcacagagggttgttgatgaaatatgcctcaaaatattacctctccctctacaagtaatggaaaatacatttaatttttagagtttttacaaactgagtttgtggaaataaagcaggatcacttgctcacttgttaacagtccagggtgtcacattcttgaatcaggttgggaaggtgctcatgaagtttatacaagacctgtgatatggggaatctctcagatgcgtgggcaactccctattttgtctcacaggatgtgagatgtgtacctttttattctcttgaactaatctaaatacattctaacaataatgagtagaaaccagcaaattatgtaaca

SEQ ID NO: 359710 - DNA, 558 bp, Homo sapiens
ttgcagtgtctactcttgcctgataatgttgtctatattttacctgatatgttaaatatgcttatttttcctaaatacagacataataatggccaattcacagagggttgttgatgaaatatgcctcaaaatattacctctccctctacaagtaatggaaaatacatttaatttttagagtttttacaaactgagtttgtggaaataaagcaggatcacttgctcacttgttaacagtccagggtgtcacattcttgaatcaggttgggaaggtgctcatgaagtttatacaagacctgtgatatggggaatctctcagatgcgtgggcaactccctattttgtctcacaggatgtgagatgtgtacctttttattctcttgaactaatctaaatacrttctaacaataatgagtagaaaccagcaaattatgtaacaaaacagatttcttatggtatgttggaaatattggtctaatcccttcattttacaaataaagaacttgaaacctgtaatgattaagtggccaagtggttacaaggtcaactagtggcccag

SEQ ID NO: 359711 - DNA, 560 bp, Homo sapiens
gtcttctccactatgcagaaggtttatagtttgctacagtcccatttatttatcattgtttgactttgcctgtgcatttgaagtctcggccataaaatctttgcctagaccaatgttctgaagtgtttatgttttattcyagtagttttatagtttttgctcttactgttaagtctttaatccatcttgagttgattttttgtatttgctgagatagggatccagtttcagtcttctgcatattgacatccagttttcccagcaccatttatcgaagaaggtgtcctttccccaatgtatgttcctgtcaactttgttgaaaatcaattggctgtaaacagttggatttatttctgcgtttctatcctgtccctttggtctatatttctgttattataccaataccttgctgtttggttgctctagacttgcaatatattttgaagtcaggtagtgtgatgcctccagctttctcgttttggctaggattgctttggttagtcaggctcttttttggtttcatgtaagttttaggattgtttttccatttctgtaaaaaa

SEQ ID NO: 359712 - DNA, 560 bp, Homo sapiens
gtcttctccactatgcagaaggtttatagtttgctacagtcccatttatttatcattgtttgactttgcctgtgcatttgaagtctcggccataaaatctttgcctagaccaatgttctgaagtgtttatgttttattctagtagttttatagtttttgctcttactgttaagtctttaatccatcttgagttgattttttgtatttgctgagatagggatccagtttcagtcttctgcatattgacatccagttttcccagcaccatttatcgaagaaggtgtcctttccccaatgtatgttcctgtcaactttgttgaaaatcaattggctgtaaacagttggatttatttctgygtttctatcctgtccctttggtctatatttctgttattataccaataccttgctgtttggttgctctagacttgcaatatattttgaagtcaggtagtgtgatgcctccagctttctcgttttggctaggattgctttggttagtcaggctcttttttggtttcatgtaagttttaggattgtttttccatttctgtaaaaaa

SEQ ID NO: 359713 - DNA, 567 bp, Homo sapiens
gcaggtcactttcccttgaagtcaagtcgcgcctctgcctctctctgctgtccagccattgtctctgaagtcaagtcgcctctcctcagtgtccagccacttctcccttctaccagctgagtctggggtctttataggcacaggctggggttggggtagaccatagrcagttttggaaaaggcaatattcaattggtaaaaagacattatttagaaagaaccaattgggagagagtgggcaaatagggatagaagttctcactttgaaccatgggtttcaggcttttcggcttgaaggtggggcttcatcagggacctgcctctgtctgcctagagtttctctgcctcctgtctctatcaatatgccctttcctaaaccagttattgacaaggggaatgggattaccctttttgccttagaccatgggtaggcaatctttcccttttaggagccaggtagtaaatgttaggctttattggccatactgtctcagtcacaatgactcacttttgctgttgtagtgcaaaagtagccacataccatggtgcataaacaaatgagcatgg

SEQ ID NO: 359714 - DNA, 567 bp, Homo sapiens
gcaggtcactttcccttgaagtcaagtcgcgcctctgcctctctctgctgtccagccattgtctctgaagtcaagtcgcctctcctcagtgtccagccacttctcccttctaccagctgagtctggggtctttataggcacaggctggggttggggtagaccataggcagttttggaaaaggcaatattcaattggtaaaaagacattatttagaaagaaccaattgggagagagygggcaaatagggatagaagttctcactttgaaccatgggtttcaggcttttcggcttgaaggtggggcttcatcagggacctgcctctgtctgcctagagtttctctgcctcctgtctctatcaatatgccctttcctaaaccagttattgacaaggggaatgggattaccctttttgccttagaccatgggtaggcaatctttcccttttaggagccaggtagtaaatgttaggctttattggccatactgtctcagtcacaatgactcacttttgctgttgtagtgcaaaagtagccacataccatggtgcataaacaaatgagcatgg

SEQ ID NO: 359715 - DNA, 536 bp, Homo sapiens
ctgattagcatggctaaaattattcaccaattcagactggtagtgagcccctccttgtcaaactgctcagaatgggctttctttaaccctcaataaaagtgaaaaggggattattcctcaggttcaatccaggcctttgaaacttgtcttccaaaagtcaacttatcttctaaaagatttttctacacagtggagaagaaacttatattctctttccatttcttagaaactttttgaagaaaccctctttttcatgaaggtgatgatttcacagcagtagacaagacttatttcaaggtaattggcaaaagtctttgatctcaatacattctgatgtatttataatacttaatctagcaaatatttatgaagcaccaactatatatcaggacctttattaggcrtgagggatacagcaggaaacaggaaagataattaactgccaataagccatgatggcttctatcttcagccaacaaaaaaaccccagatgttctgccaaacacttcaaatgctctacctaaccataatgtccc

SEQ ID NO: 359716 - DNA, 536 bp, Homo sapiens
ctgattagcatggctaaaattattcaccaattcagactggtagtgagcccctccttgtcaaactgctcagaatgggctttctttaaccctcaataaaagtgaaaaggggattattcctcaggttcaatccaggcctttgaaacttgtcttccaaaagtcaacttatcttctaaaagatttttctacacagtggagaagaaacttatattctctttccatttcttagaaactttttgaagaaaccctctttttcatgaaggtgatgatttcacagcagtagacaagacttatttcaaggtaattggcaaaagtctttgatctcaatacattctgatgtatttataatacttaatctagcaaatatttatgaagcaccaactatatatcaggacctttattaggcgtgagggatacagcaggaaacaggraagataattaactgccaataagccatgatggcttctatcttcagccaacaaaaaaaccccagatgttctgccaaacacttcaaatgctctacctaaccataatgtccc

SEQ ID NO: 359717 - DNA, 491 bp, Homo sapiens
attgactaaattcaaaaaggtactacatggtttttctgtaaataaaaaattgaaataaaagcacaacaaggtactcgtaatgcactaatctgctttttagcaaactttgttaacggttatracagattgttgcttctttaaaattttggagtcattgtaacaaaataaataatttaggataatctgaaattctattttataacatcaagtgtttcaaatctctaacacttaacatgcttcccaaaatcatactttagtttcaaaattgcctttcctgattcctggcttttggatacttcagagggtccctggagtatctaaaagagaggtaaacagaattatttgacatgtttaggtacatgagattggcaaaatggtgtttattccatctttaggttatattttggtgaataatactaatatatgttccaaaattgtttgggatttctaaaattctaatatatggtatcaatggtaattaaggttgttat

SEQ ID NO: 359718 - DNA, 491 bp, Homo sapiens
attgactaaattcaaaaaggtactacatggtttttctgtaaataaaaaattgaaataaaagcacaacaaggtactcgtaatgcactaatctgctttttagcaaactttgttaacggttatgacagattgttgcttctttaaaattttggagtcattgtaacmaaataaataatttaggataatctgaaattctattttataacatcaagtgtttcaaatctctaacacttaacatgcttcccaaaatcatactttagtttcaaaattgcctttcctgattcctggcttttggatacttcagagggtccctggagtatctaaaagagaggtaaacagaattatttgacatgtttaggtacatgagattggcaaaatggtgtttattccatctttaggttatattttggtgaataatactaatatatgttccaaaattgtttgggatttctaaaattctaatatatggtatcaatggtaattaaggttgttat

SEQ ID NO: 359719 - DNA, 636 bp, Homo sapiens
tatttgcacaaaatgctaactcatctcagaataatggcagcatcttttggtttgtttatggtggaacacactcaggacaagatcatacagattgtaatattccaagaggagtattaaagccccaccccttgggtgaaactgtaggtctttttatttttacctcagtttggttcatggtatgttttttattttaagagaatgcaatttttttgttgttgttgtttgttttttccagaaaatgtcccctcacagcaatgattgccaacgccgaggcacctagcacagtgtcttgctcagtgggtactcagtatatatggaactgggttgattaaggcacaaaaccaacagcaaggttggttcagtgaagaataatttagtaatactggttagactaaaaggccatgacttagcagcaaacatttttacattcatttgagaaataatttacaattaggtcacctaaaaatgttaatttacagcggtggcatttaagcttggctgctctgtcatcacctatacagattaaaatcayactgttgcccaggttcaactcaagcaattctgatttaattagggtgttgcaatttgtgttcaggggatttttaacaccaccaccccctcccacccccacgctgc

SEQ ID NO: 359720 - DNA, 611 bp, Homo sapiens
cggaataaatttagcaatgcagaataatatagactaaaagatactgagtaagttctttggcagaaacctgattatccaaggtgattatttgcaggctgacatacttacactgcaaaagccagaagagttcagtgtataaactgaacagtggagtctgttgtacttgggttacttcagtacagttagtatagttatgtgtagtgtttgtagacaacctgcattcatataaattaaacagtattttctacaatagtatgaatataaggccacaatatttaactttgattgaattccttagttattttaatattgttattcatacttttgaaatacagtgtttcaactgaattacagttcagataattttttaaaatattacataccttatgactagtacataaaattattcatacttatatatttatatctgatatccaaaaaaatttaccattaaatcgttrcagtagatattagtctgacatgctattaatttatccagtgggaataattataggtaagcataattttagtgtcttatattttaccaaattggtatgctgctattacaggacaaataaagacagatgatatggctacccaaaaaccataat

SEQ ID NO: 359721 - DNA, 574 bp, Homo sapiens
tgtctgtgaaagacgtgggctgtcacagtgagaactctcagagctatctctatctggactcatgccaaaacccagcagtatttttttcatgccrccattataaataaaaactgaggttgaaacagtgctcccttttctgttattgtgaaggtgcaattctacccaggaggcctgcaagctctcctcctgctgctcaggcttcactgtctgatgtggcactggagtgctgctgtggcaattggggttcacctaagatgtgagtttccagctgtgagccctgtgctgtgggctgtgcctcagtggcagatggtaggggtcaagagagtacactagccaccaggagagggaaacaggagtactcaagcccagtgctcagggagtagagacctattgctttaaaatgtaaagagccaaaaagatagcacccgaatcaacaatttttgtagaagagtcaaagcctaccttcagcaggcaccggggttcaagttgcaaaactacctccagtcatgaagatgtgaaaagtttattttgtcattgattataaccaattagcatacatggatggccttcccaa

SEQ ID NO: 359722 - DNA, 367 bp, Homo sapiens
ttgaaacagtgctcccttttctgttattgtgaaggtgcaattctacccaggaggcctgcargctctcctcctgctgctcaggcttcactgtctgatgtggcactggagtgctgctgtggcaattggggttcacctaagatgtgagtttccagctgtgagccctgtgctgtgggctgtgcctcagtggcagatggtaggggtcaagagagtacactagccaccaggagagggaaacaggagtactcaagcccagtgctcagggagtagagacctattgctttaaaatgtaaagagccaaaaagatagcacccgaatcaacaatttttgtagaagagtcaaagcctaccttcagcaggcaccggggttc

SEQ ID NO: 359723 - DNA, 367 bp, Homo sapiens
ttgaaacagtgctcccttttctgttattgtgaaggtgcaattctacccaggaggcctgcaagctctcctcctgctgctcaggcttcactgtctgatgtggcactggagtgctgctgtggcaattggggttcacctaagatgtgagtttccagctgtgagccctgtgctgtgggctgtgcctcagtggcagatggtaggggtcaagagagtacactagccaccaggagagggaaacaggagtactcaagcccagtgctcagggagtagagasctattgctttaaaatgtaaagagccaaaaagatagcacccgaatcaacaatttttgtagaagagtcaaagcctaccttcagcaggcaccggggttc

SEQ ID NO: 359724 - DNA, 367 bp, Homo sapiens
ttgaaacagtgctcccttttctgttattgtgaaggtgcaattctacccaggaggcctgcaagctctcctcctgctgctcaggcttcactgtctgatgtggcactggagtgctgctgtggcaattggggttcacctaagatgtgagtttccagctgtgagccctgtgctgtgggctgtgcctcagtggcagatggtaggggtcaagagagtacactagccaccaggagagggaaacaggagtactcaagcccagtgctcagggagtagagacctattgctttaaaatgtaaagagccaaaaagatagcacccgaatcaacamtttttgtagaagagtcaaagcctaccttcagcaggcaccggggttc

SEQ ID NO: 359725 - DNA, 585 bp, Homo sapiens
gatcaaatgtagatttggtcttttcacatagtcccatatttcttggaggctttgttcatttctttttattctttttttctctaatcttgtcttcttgctttatttcattaagttgatcttcagtctctgatatcctttcttccactttatcgattcagctattgatacttttgcatgtatcacgaagttctcatgctgtgtttttcatctccatcaggtsatttatgttcttctctaaactggttcttcctgttagcaattcgtctaacctcttttcaaggttcttagcttcctggcattgggttagagcatgctcctttagctcggaggagtttgttattacccacccacctctgaagactacttctgtcaatttgtcaaactcattctctgttcagttttgtttgtttgctggtgaggagttgtgatcctttgtaggagaaaaggcattctggtttttggaattttcagcctttttacactggcttctccccatctttatggatttatctacttttggtctttgatgttgatgaccttcagatggggtctctgagtaaacatcctttttgtagatgttgcttc

SEQ ID NO: 359726 - DNA, 585 bp, Homo sapiens
gatcaaatgtagatttggtcttttcacatagtcccatatttcttggaggctttgttcatttctttttattctttttttctctaatcttgtcttcttgctttatttcattaagttgatcttcagtctctgatatcctttcttccactttatcgattcagctattgatacttttgcatgtatcacgaagttctcatgctgtgtttttcatctccatcaggtcatttatgttcttctctaaactggttcttcctgttagcaattcgtctaacctcttttcaaggttcttagcttcctggcattgggttagagcatgctcctttagctcggaggagtttgttattacccacccacctctgaagactacttctgtcaatttgtcaaactcattctctgttcagttttgtttgtttgctggtgaggagttgtgatcctttgtaggagaaaaggcattctggtttttggaattttcagcctttttacactggcttctccccatctttatggatttatctacytttggtctttgatgttgatgaccttcagatggggtctctgagtaaacatcctttttgtagatgttgcttc

SEQ ID NO: 359727 - DNA, 660 bp, Homo sapiens
ttttttccaggctgcaaagctgaatcttgctgaatttaaagagaaatgcttcattcatgtcctaattatctaagttttgtctttttatgtgcattcaaaccatatatgcatcacagtccttctttttctgtggtatggctacagttttctcactgttgttttcatgccatgtgattcacaaggtatgttgtaggttttaaggagagcattggtatttttttcatgtactgaaacattggttttaactggaaggtttgcatacgaatacaactttaagattggctaattaacataaaagacatacactgcctaccgaagagaggattaaatcagcatggtgtttctttgtaaaagaaaaatgttaggtttttatacaaagtgtggcaaatatgtaatttgctagaacaaacataaaaattaaatttttaagagaatagtaagtgagcaatttaaaatttatttaggatgtacttacagcacaacttacatttccatgcaaaatcctctgttttaaagtgtgaatgttaaaggttgcaaagcaataaaatgacctctgtacatttggaataatatttattttccatattgatattacgatttggagacatttatcactytttttttaatgttttagtggttgaagtttagtctacagtttat

SEQ ID NO: 359728 - DNA, 615 bp, Homo sapiens
cttttgggtgtgcatctttttctagtttcgcacagctgcagaggcttcaggaaactaacaatcatggaaggcaaaggggaagcaaagactttctggttgtggctggagaaagagctacaatgtactgactggtctcactcaggatgttcctgacattcaggataggtggggtgacccagcaatcatttggacactatccattccagtgacgctcaaacttcagtgtgcatcagaatttctgcaaggcttgctaagacacagactgctgagcccacctscaagacttctttctttttaaggaataaagagcattccattgtgtaaatataccactttttaaaaattattcacctgttgatggacacttaggttgatttcataccttagctattgtgagtaatccacttttttccttttcttattttttatatatcttttttccttttatatttctagaaacattttaattttatactataaattatgacttaaatacctttatccttttggttaatattttggctgattgaaaaaataagttttaaaaaatttttttggatcaaggccattactttattattaacataatttgagacaaaatagcaataaaaatca

SEQ ID NO: 359729 - DNA, 615 bp, Homo sapiens
cttttgggtgtgcatctttttctagtttcgcacagctgcagaggcttcaggaaactaacaatcatggaaggcaaaggggaagcaaagactttctggttgtggctggagaaagagctacaatgtactgactggtctcactcaggatgttcctgacattcaggataggtggggtgacccagcaatcatttggacactatccattccagtgacgctcaaacttcagtgtgcatcagaatttctgcaaggcttgctaagacacagactgctgagcccacctccaagacttctttctttttaaggaataaagagcattccattgtgtaaatataccactttttaaaawttattcacctgttgatggacacttaggttgatttcataccttagctattgtgagtaatccacttttttccttttcttattttttatatatcttttttccttttatatttctagaaacattttaattttatactataaattatgacttaaatacctttatccttttggttaatattttggctgattgaaaaaataagttttaaaaaatttttttggatcaaggccattactttattattaacataatttgagacaaaatagcaataaaaatca

SEQ ID NO: 359730 - DNA, 574 bp, Homo sapiens
gctaatcaatagcttatgtattttaatgtaaatttttggtaaaccactttagaactgccttctcattttcatagaaatacctgcttgtaatggctgctaatcagaatatatattcagggcaatttaaatctatccttatggaggtgatcctcaatatgcgaccctgaatamatttgtttcaaatttgattctaaactttttgattattttaagttaactaggggctggcctggaacattctcctgggtataatagcccaactatgagccacctgctcagtgaaggaaacgaatcaacatcagggcccagcataggtcaaacacacatgcagtgggaagctctgtggggcctggctcctaattgcaaagacagtcacactgatgcccctgaatgtatggccagcctgccctttctggacccaaatcccccccaccagcttttttaagctcacctgaccttttgttggtctgttctctgaggtgaaaactcattttcagggttgtctccaacaggagagaaatatcaggttactaaaacctcaggaacagagattacagattggtttaagagtgtg

SEQ ID NO: 359731 - DNA, 646 bp, Homo sapiens
tgtcttattataacactcttgtagtgaaaacatcagattccactcatatgatttttaactcacagcattttccagaagtattccataattttagcactgtccatactgtatacatttacatattgtgagaaagccaartaacacttgtaaatcacagcttcagaacaaaaatatttaggcatttacatatcacaaaccttcaaacggtttaatgtagagatttatacatatgtaagtaggatatgagagacagttgaattagtacataaagtttttatttaaagttttccccttccaagcaagcttcatttacacattctaatactgtacaaaatttacattctctgtgacttatttattcacttttcactttctagtaacttatgtctctctgaaatacagaaagctttacttataattctcataaatgcttttattttggtgagaaataaaaaataaaatgcagaacaagtctaaggaaagcaaaggttcttgtacaaattgtgacttttggaagaaacagtgacagttgacaacaaaaggttctgaagcagacctcattctattcatgatgtcagctgagattttcccacagagtactgtaacttttctttctatatactcatatgttttaaggaaaaagaaa

SEQ ID NO: 359732 - DNA, 554 bp, Homo sapiens
caatacgttttttcattgtgaaggaagtagattgctcataataataatagctatagcggcagccgcagcaggaaatattttctgttcaaaaggattggctgtctccatccccatctgcccaggtgagaccaggagtgtggatgagtagagcttttccgttcacctatcctttaaactagcatttaattctgaatagaatagatatttttaatatttctcaattattaaaacatggcctacctaggtacaccattagaacaactctgtagaatacggaggtatataaacatcagccaataatcccccggttgaatagtgattgtaggctgtgattataggcaatacaaatgatgttgaaactgcttctccacaaggtctctgctgattcccttaacctctccattttctagaatgtatattcagcactaaatggggggtatggctgtactatatattggatgtgcagatatattccaaactgcmagctgaattttcctttgccaacaaacaaatcactactgtctccagattgcactaccagcatgccccaaccg

SEQ ID NO: 359733 - DNA, 587 bp, Homo sapiens
ctttcagttctataaatgtgtcatgctctctctttctcttccttcccccatatcatacctttgtattagccagggttcaaccacgaagaaaacccagtaagagatayatatagtaaagaactcttacatagaactatcatatgacccagcaattttattcttaggtatacacccacaggaattgaaagcaaggacttacacaaatatttataattcagtgttcgttgcagcattattcacaatagccaaaatgttcaacccaagtgtccagcaactgatgaatggataaatgaaatgtggtatatacatacactagaatattattcagccatagatacatgctacaacattggcgaactttgaaaacttatgctaaatgaaataagccagacacaaaagaacaaatattgtatgattctactcatgtgaaatatttagaatagtcaaattcatagagacagagaatatattggaggttaccatgacctgaaaagaaaggaaaagggagaattattgctcaatggctacagagtttctgtttggaatgatgaaaaaaatttggaaatacatagtggtgatggtttcac

SEQ ID NO: 359734 - DNA, 411 bp, Homo sapiens
cacattatatcaataaaatgttgagcaaaaatgacacagcagagttcactccctgctgacatttgaaaataaaacacgctacaaagagtgatctccattaatgtgactcccaccagccctctgtcacctttcccttgtcctaatgaagatcagcctcacctgtgtgatttgccctcaataagcacaaatattctccatgagccagtgagctactctttcaggttaagtgggcatgactacaaatgtatagtcctatgatgcctcaaaggccttcagtggttttytgaatttctttcaattttaatagaaatttgcaagtgacaaaagcccaaaatcccagcaaatgctggcttcaaagttggcctcttgggacatttttagtcctaaaaatttaaatgcagtaagtaaaag

SEQ ID NO: 359735 - DNA, 411 bp, Homo sapiens
cacattatatcaataaaatgttgagcaaaaatgacacagcagagttcactccctgctgacatttgaaaataaaacacgctacaaagagtgatctccattaatgtgactcccaccagccctctgtcacctttcccttgtcctaatgaagatcagcctcacctgtgtgatttgccctcaataagcacaaatattctccatgagccagtgagctactctttcaggttaagtgggcatgactacaaatgtatagtcctatgatgcctcaaaggccttcagtggttttttgaatttctttcaattttaatagaaatttgcaagtgacaaaagcccaaaatcmcagcaaatgctggcttcaaagttggcctcttgggacatttttagtcctaaaaatttaaatgcagtaagtaaaag

SEQ ID NO: 359736 - DNA, 411 bp, Homo sapiens
cacattatatcaataaaatgttgagcaaaaatgacacagcagagttcactccctgctgacatttgaaaataaaacacgctacaaagagtgatctccattaatgtgactcccaccagccctctgtcacctttcccttgtcctaatgaagatcagcctcacctgtgtgatttgccctcaataagcacaaatattctccatgagccagtgagctactctttcaggttaagtgggcatgactacaaatgtatagtcctatgatgcctcaaaggccttcagtggttttttgaatttctttcaattttaatagaaatttgcaagtgacaaaagcccaaaatcccagcaaatgctggcttcaaagttggcctcttgggacattyttagtcctaaaaatttaaatgcagtaagtaaaag

SEQ ID NO: 359737 - DNA, 588 bp, Homo sapiens
cctacttcagtcttgcttgaggacatattctactccaggtcgctctgctccacccagctcattccagcattgaccattgacctggacttgagtctctcacaggctctgcttctcagtggttccatgtacccactccttcaatgaccctgaaatttctttgtatcaaccttcttctatggatgtgtttggactattacagaacatataggaactaagtctttcagttacayatatacacattagtaaacgtatcatttgcaatgaaaactgacatcagggcattacaacagttaaattaaagaagcaaatgtccaataatggttactgtcaacttccatgcatattactaaaatactttctccttcatattctagataatctttctcctacctcttgttccaggtaattttttctgacagcctatgtaactgtcatatggttacagtaaggacagttctatttcaaattgtatttgtccagcatctttgcacttttccaagaattccacaaagccctttcacttgttcaaacatcagacatgatgtcatcattaaaaataatttacatatacaatatttaatatacata

SEQ ID NO: 359738 - DNA, 602 bp, Homo sapiens
aatgtggctttctccatggtcacaaaagcttcaaaacaggacatatgagtgaacctgcatcgctgagagaattctggctgatgcgcagggggaggaaaccacctggaaagggaaataaaccagaaatttcttgaaaaagagaagagaaaagaagaaacttggaagctgagcgccctcgccatggcacaaccctgaaagataagaaggaagggactgagttgactcccagatgtggcaagagcccagctgaaaatggttttctctgcttcttgggctgaaaggttgacccttctcagatggatttcaactaccaggaagaagacagaaatgtttcaacaatccattcaacaattttttattaagtatctatcacatactaagtactagccatccratgggaagggtgcaaaaactactatcgtccctgcttccatggaatgtacattctacaggaaaatacaatcaaacaaatcgttacaaattgcaacaaatgctacagaggggagagaaacagggctggagacagattgtatggaagtaagccaaggacattctttagaaagagaaggcctctctaagaaagtgtcatttaagctgagatt

SEQ ID NO: 359739 - DNA, 489 bp, Homo sapiens
gatgggggaattcctgcattttccacagagggaaaacaggaaaatcaaaagagattcatgctgattaaaatgcacacctataaataaaatgactctaaactgttagcctaacttggctaatccctaggattcctactcataaaaaccaaagatatttttgtaaatttgtttttacataaataaggtcatggtctttgattgagacttctccttataagaaaattctttagaagccaaactctaagaatttctttttaattccccatggactatccaatgacaaaagaaaacacatgctcaattaagattaaaagtctgctgagagaaaaaaacmcaatgaatcatagtttagttttcttgaatagtaaaacttaaaaatatttattttacacttttgtgcacattaaattattgactgaaaattttctgctaaaaatcaataatccttgatatgttgagaaacatttacctttgaaataaaaacatgtg

SEQ ID NO: 359740 - DNA, 608 bp, Homo sapiens
gcctgccttacaaatttcagacttacttagctagtccccataatactgtaagatttgtaataaacaaaagaacaaacatatattaatacataggtggataggtgatagctacagaaatcaacatagacacagatatagacatagacatggatcgatattctactaattctgcttcttgggctgaaccctcatagaggggctatcttggaattctgaccactataggcttttgtttttttggaatgtagcaagatactatagcaatcatcagtatcagaactggaagacccaagtctgaggctagatattgccactaaaagcatcgtaatctcgtaatcttgagaaaatcacttaacctctctgaacttcatttatttcttctgcatttcaggaaccttcactgcagagttgtgagcatcagatgagaaaaatacagtcacatgccatgtaatgatgtttaggtcaatgacacactgtgggtaggtcagtagtctcttgagactataatgtcatatttttactgcamctttactatttttaggtatatttagaaagacaaaaacttgattgcctacagtattcattacagtaacatgctgtacaggttt

SEQ ID NO: 359741 - DNA, 609 bp, Homo sapiens
ctccttcttctcagggcttttgagatttattcatgtaactcccattagagttaattggagttactaacataaattccacttgctccaaatagagactaggtttctttaatgttgtttttattttttaataaggttagacttaaaatagaatcttgtatacaatggtctcttttgcctcgggaaattaaaatgcctttaacaacttttagggttagggaatcgaaatctgttgcaaagttttctttcttaattctgctgtattattacatcatcattayaaattacaattggtaatgaaagaaataggaaagtaaactataaaagcatttttccagcaagccaccactatttacatactatttgtagatttatttgtggaattactctgttaatggtatattattaacactatttagaaaaaattgtgtttgttgttcttaacaataaagaggaagaagcagatattatatattgagagaaaagtaccatttcaaatgaaaagaaaagccaacacctcatttttcatgaatgctgtttataggcagattcttttaaattaccttttaaaatatgattgttaataaatattagtcatttaaactatggata

SEQ ID NO: 359742 - DNA, 591 bp, Homo sapiens
attaatatgtctacagcttaaagtataactagtggaaataagttattctcagcttaagtttgaactgtagatttggatttcaaacaagaaggaaaaagaggatgtttagatttgttttttagtgtatataatattttgttttagcctgtcacaaatgtcaatgacttgtgcacaagcacagattatgtcaagagactatgcctctcttgttcatagtatataacattagtagatatttgtttgaaaaaaatactcatgatgtatttacttcggaatgccattgtcatctaattttgacatataagatattgtacagaataagaggaagtgtgctacccaagaagcaaacaaagtaacggctacttacaaggaaccaaagctatgactcagtgtttcagatatgaggaataagcaatgcaatcaatagttcttkgcaagcagtgaaggcaggacaaaagactaaataataagacagtctaatatatacatacattactgccatcaaccaaacagatatacactaaccagtatacactgaccagaaaacgaagaacctagtaagtttaaaatagaaagttgctgcagccaaag

SEQ ID NO: 359743 - DNA, 591 bp, Homo sapiens
attaatatgtctacagcttaaagtataactagtggaaataagttattctcagcttaagtttgaactgtagatttggatttcaaacaagaaggaaaaagaggatgtttagatttgttttttagtgtatataatattttgttttagcctgtcacaaatgtcaatgacttgtgcacaagcacagattatgtcaagagactatgcctctcttgttcatagtatataacattagtagatatttgtttgaaaaaaatactcatgatgtatttacttcggaatgccattgtcatctaattttgacatataagatattgtacagaataagaggaagtgtgctacccaagaagcaaacaaagtaacggctacttacaaggaaccaaagctatgactcagtgtttcagatatgaggaataagcaatgcaatcaatagttcttggcaagcagtgaaggcaggacaaaagaytaaataataagacagtctaatatatacatacattactgccatcaaccaaacagatatacactaaccagtatacactgaccagaaaacgaagaacctagtaagtttaaaatagaaagttgctgcagccaaag

SEQ ID NO: 359744 - DNA, 413 bp, Homo sapiens
taattgctactttctattcattgaccaacctctccccttcctytttttttccctcccctcctcagtccctggtagcaactgctctactctttgcttctacaatgtcaactcttttttttttttttttccaattccacacatgagtgagaacatgcagcatttgtctttctgtgtatggcttattcacttgatgtgatgtcctccagttcaatccatgtcgtctcaaatgacaatattttactatggatgaatagtgttctgttgtatgtatacaccacattttttcttctttcattcattgttgacactttttttcttttattgttcgttgttggacacttgagataactccatattttggctattgtaaatagtgctgccataaacatgggagtacagatagctcttcaaca

SEQ ID NO: 359745 - DNA, 413 bp, Homo sapiens
taattgctactttctattcattgaccaacctctccccttccttttyttttccctcccctcctcagtccctggtagcaactgctctactctttgcttctacaatgtcaactcttttttttttttttttccaattccacacatgagtgagaacatgcagcatttgtctttctgtgtatggcttattcacttgatgtgatgtcctccagttcaatccatgtcgtctcaaatgacaatattttactatggatgaatagtgttctgttgtatgtatacaccacattttttcttctttcattcattgttgacactttttttcttttattgttcgttgttggacacttgagataactccatattttggctattgtaaatagtgctgccataaacatgggagtacagatagctcttcaaca

SEQ ID NO: 359746 - DNA, 510 bp, Homo sapiens
ccagtacatgcatggccaaacataacttttatttttcaaaacccactctatgtaaaatgcactatttatttctcataatatactctttaatgtgcttatattctaggtatcattgcctttaagttgcttttttaaatgaagtatcattattattattatttgagacagattctggctctgttgctcaagctggagtgcagtggtgtgatcttggctcactgcaacctctgcctccctggttcaggcaattctcatgcctcagcctcccaagtaagtgggactacaggcgtgcgccaacatgcccagctaatttttgtatttttagtagagacagaatttcactatgttgtccaggctggtctctaactcctcaagtgatctgcctgyctcggcctcccaaagtgcctgtgcccagccttttaattggactttaatgtgcaaatgcagtgtcttcagaaagcctttttttcttctttttttaaatcagcctacatcatgctatgacaattt

SEQ ID NO: 359747 - DNA, 596 bp, Homo sapiens
catgtacagtatcatctatttaaattcacaaataaagacaagaaaaatatagatttttaaaactgaaggtattatgtttatgtttgggtggctgattcattatcacataatacagatttgtaagataatgtcatttacagtattgaagcctgcctgttagttcagcgaaacacgctttatacgtgtgaaaatatggataagtagcaccctctgctggtaagtagttggaagtcattaataaacctacctatgatttatcttattctcaatgttgtgattactggttcgtgagctcaaattgtgtatcataagaaagatttttttttttttaaaagaagtccgggcacagkggctcatggctgtaatcccagcacttttggaaagctgaggcaggtggatcgcttgagctcaggagttcgagaccagtctgtgcaacatggcgaaacccccacctctacttagaaatataaaaattagccaggcatggtgggtgcatgcctgtagtctcagctactcaggaggctgaggtgggaggattgcttgagccaaaggaggtcaaggctgcagtcagctgtgattgtgtcactgcacttgag

SEQ ID NO: 359748 - DNA, 596 bp, Homo sapiens
catgtacagtatcatctatttaaattcacaaataaagacaagaaaaatatagatttttaaaactgaaggtattatgtttatgtttgggtggctgattcattatcacataatacagatttgtaagataatgtcatttacagtattgaagcctgcctgttagttcagcgaaacacgctttatacgtgtgaaaatatggataagtagcaccctctgctggtaagtagttggaagtcattaataaacctacctatgatttatcttattctcaatgttgtgattactggttcgtgagctcaaattgtgtatcataagaaagatttttttttttttaaaagaagtccgggcacaggggctcatggctgtaatcccagcacttttggaaagctgaggcaggtggatcgcttgagctcaggagttcgagaccagtctgtgcaacatggcgaaacccccacctctacttagaaatataaaaattagccaggcatggtgggtgcatgcctgtagtctcagctactcaggaggctgaggtgggaggattgcttgagccaraggaggtcaaggctgcagtcagctgtgattgtgtcactgcacttgag

SEQ ID NO: 359749 - DNA, 479 bp, Homo sapiens
aatttgaatttcaaataaacaacaaataattttccagtataactatgtcctgtgcaacatttgggggcatacttamactaaaaaattagtcattgtttatctgagattaaaattttattgggcttcctaaatttaacctaatagctctagtggcttacttgttcatagctgtatcttccacagactacgagtttcaggatattgttttcttcatcattgtatccccagtatttgcacagggcttagcacttagcagaaattcaataaatattggttggctgtctaaagggatggatattaaaactactttaatatattagatacattggctgacaccagtaattccagcactttgggaggctgtgttgggtggattactttagctcaggagtttgtgaccagcctgggcaacatggggaaaccccatctctaccaaaaatacaaaagattagctgggcatagtggcatgtgcctgtgat

SEQ ID NO: 359750 - DNA, 479 bp, Homo sapiens
aatttgaatttcaaataaacaacaaataattttccagtataactatgtcctgtgcaacatttgggggcatacttaaactaaaaaattagtcattgtttatctgagattaaaattttattgggcttcctaaatttaacctaatagctctagtggcttacttgttcatagctgtatcttccacagactacgagtttcaggatattgttttcttcatcattgtatccccagtatttgcacagggcttagcacttagcagaaattcaataaatattggttggctgtctaaagggatggatattaaaactactttaatatattagatacattggctsacaccagtaattccagcactttgggaggctgtgttgggtggattactttagctcaggagtttgtgaccagcctgggcaacatggggaaaccccatctctaccaaaaatacaaaagattagctgggcatagtggcatgtgcctgtgat

SEQ ID NO: 359751 - DNA, 633 bp, Homo sapiens
cgccccacaggaaatatgcttttcaaatatgtaaaaccactatacaaaattttagttaattttgggctttcacttctgtttttctttaatttttatttttgagatgtgttttttaaaaaatttccagacctaaaactacaaaaaccctaggaaataccattctggacattggccttggcaaataatttattaataagttcccaaaagcaattgcaacaaaacaaaaattgacaagcgggacctaattaacctctgcacagcaaaagaaactgtcaatagagtaaataaacaatctacagagaggtagaagatattcacaaccatgcatgtgacaaaagtctaacatccagactctgtaagaaacttaaacaattcaacaaacaaaaaataacctcattaaaaagtgggcaaaggacatgaacagacacttctcaaaagaagacatrcatgcagccaacaaatatatgaaaaaatactcatcattactaattattagagaaatgcaaatcaaaactgcaatgagataccatctcacaccagtcagaatgggtactattaaaaagtcaaaaaccaacagatgtcggtgaggttatcgagaaaagagaacacttacacattgctggtgggaatata

SEQ ID NO: 359752 - DNA, 391 bp, Homo sapiens
caaatcatttattagggaaaaccatcttgttatgtgtgtttctgagtataggaagcagcagagtttaayagaaaaaacatagggtttagggtcaatcagaaatttttggttcagatcctggctctgccacataccagttgtgtgatcttgaataaataactaagccactctgagcctcagtttgcttatgtataaagtgacagatgaccttgggcaaattattaactcaatgttcctctgtttccttatcttttgaatggtaattatattaacatctacctcacagggatgtgttgaggattaaatgagttaatagatatgttaagagcatagaactgtgtctggcacatagcaagcattctttctctctctcttttttttttttgagact

SEQ ID NO: 359753 - DNA, 618 bp, Homo sapiens
tgcccttactatcagaaaggaggtccccaagactgaaaaactggctgttcgctaatagatatagtggtggggcaaagaaaattctgaaatgcttcctctctagaagatattatcagtagccactcactaatgtaagatctcctttcttattttgctaaatactttaagtgcagaagagaacaaagtccaccaaaacattttcttctaaactggttatttaatttaatgattaaagtcattgtctgttataaattagcttcaaaacyttacatgaattgaacaacttcctccacagtaactgaacacatatcagagatattttacctgaaacagcaagccatggtgttccccttcaatgaactccttttgaagtgactcaattgttgctacaaagagaatttataaccagctcaatatgaccattttaatttaattaattaatgaatttatttcaagacaggatttggttctattgcccagattggagtgcagtggcatgatctcacctcactgcaaactctgcctcctgggctgaagccatcctcctgtttcaacctcccaagtagctggaattacaggcacatgccacccacactcagctagttttggtattttttg

SEQ ID NO: 359754 - DNA, 649 bp, Homo sapiens
aacttacttctcaatcaagcttgacatagtgttactaggcccactaggagcaaaacagatgtttgtttttcaaacatctccctcccataggaagaaaagcatatttttaaaagagtatttctaggctgggtgcggtggctcatgcctgtaatcccagcattttgggagaccgaggcagrtgggtcacctgaggtcgggagttcgagaccagcctgaacaacatggtgaaaccttgtctctactaaaaatacaaaaaaattagccaggcatggtagcacacacctgtagtcccacctactcaggaggctgaggcaggagaattgcttgaacccgggaggcggaggttgcagtgagccgagatcaagccattgcactccagctctgggtgacagagcaagactctgtctcaggggaaaaaaaaataagtatttctaacctacaaaagtaatttaaaatttatttcttattaatacttaggaccctggtaaagatgaaatttttaaaaaattctgtcttaactgtattaagaaggaaggccctgtgctccttctgatctacatctaaacaatagcaaccaaagcaataagaagtggccatcgtgtgtttttgaaggtcgtgtatctccaaaatacaaattcagaatactatc

SEQ ID NO: 359755 - DNA, 649 bp, Homo sapiens
aacttacttctcaatcaagcttgacatagtgttactaggcccactaggagcaaaacagatgtttgtttttcaaacatctccctcccataggaagaaaagcatatttttaaaagagtatttctaggctgggtgcggtggctcatgcctgtaatcccagcattttgggagaccgaggcagatgggtcacctgaggtcgggagttcgagaccagcctgaacaacatggtgaaaccttgtctctactaaaaatacaaaaaaattagccaggcatggtagcacacacctgtagtcccacctactcaggaggctgaggcaggagaattgcttgaacccrggaggcggaggttgcagtgagccgagatcaagccattgcactccagctctgggtgacagagcaagactctgtctcaggggaaaaaaaaataagtatttctaacctacaaaagtaatttaaaatttatttcttattaatacttaggaccctggtaaagatgaaatttttaaaaaattctgtcttaactgtattaagaaggaaggccctgtgctccttctgatctacatctaaacaatagcaaccaaagcaataagaagtggccatcgtgtgtttttgaaggtcgtgtatctccaaaatacaaattcagaatactatc

SEQ ID NO: 359756 - DNA, 577 bp, Homo sapiens
aaaagtaatttaaaatttatttcttattaatacttaggaccctggtaaagatgaaatttttaaaaaattctgtcttaactgtattaagaaggaaggccctgtgctccttctgatctacatctaaacaatagcaaccaaagcaataagaagtggccatcgtgtgtttytgaaggtcgtgtatctccaaaatacaaattcagaatactatcttacaattgccaatgaagccgtgtttcagaagcgatgatgagctagtataagattgtttaaattgcccatctgcttgctcaccaggcaatcttgggttttagaaacagtctatcttgaagcattcaaattgaaagccttatttcaacagatgttttgtgcaatgcatagcaactatttccatattttccacatggcaaaacaagttggcttatgaccacaatttgcattcacctttgcattctgctttacatgtttggagttggacctgtaatgcctctagaacaaatatatgcttcatatagaaggaagtaaaacaatggctactgtatcccctgctgttgccatctgccatgtaggatgggaccag

SEQ ID NO: 359757 - DNA, 577 bp, Homo sapiens
aaaagtaatttaaaatttatttcttattaatacttaggaccctggtaaagatgaaatttttaaaaaattctgtcttaactgtattaagaaggaaggccctgtgctccttctgatctacatctaaacaatagcaaccaaagcaataagaagtggccatcgtgtgtttttgaaggtcgtgtatctccaaaatacaaattcagaatactatcttacaattgccaatgaagccgtgtttcagaagcgatgatgagctagtataagattgtytaaattgcccatctgcttgctcaccaggcaatcttgggttttagaaacagtctatcttgaagcattcaaattgaaagccttatttcaacagatgttttgtgcaatgcatagcaactatttccatattttccacatggcaaaacaagttggcttatgaccacaatttgcattcacctttgcattctgctttacatgtttggagttggacctgtaatgcctctagaacaaatatatgcttcatatagaaggaagtaaaacaatggctactgtatcccctgctgttgccatctgccatgtaggatgggaccag

SEQ ID NO: 359758 - DNA, 389 bp, Homo sapiens
tccaactacagcatcttcagccctttcagagaaaccagccgactcagtcacttccaaaaccataggacccattaatgcccagccatctgttgaaaaagacacactgacaacagaaagtcaagcaaaacccagaaaaaagggaatatatcttatggcaaaaggaagaaatcaagaagtgaagcaatagactcagatatttccaacattgtgcatatttggtgtctggaaggaaggaaaaccaacgacatcatggaattgaatattgttttgcctgcatttgagaaaaacctcgtccagtataaacaytgaatagaatctaaaatttgtaagaaacacatcaataaattttattgtactagtaaagaagaactcaacaaaatgcttaaaaa

SEQ ID NO: 359759 - DNA, 504 bp, Homo sapiens
gtacatagagtggaaatacttcataaccagtcattttcctacttcgtgtcctctcctaagcctactctgacaaaaacactctataacagcagtccccaacctttttggtaccagggaccagtttcctggaagacagtttttccacgggggtgaggtgagggggaaacagtttctgaaggaacctgttccacctcagatcatcaggcgttattctcctaaggaacatgcaatctagatggctcgcttgcacagttcacaatagggttcgtgggaatctaatgccaccactgatttgacaggaggcagaggtcaggtggtcatgttccctggcctgccgctcacctcctgctgtgcggcgcaattcctaacagcctcgaatgggttctgatccctggctcagcagcgactggggacccctgctctacagtttttaatgctgttaagaggaaataaaattggctgcaagggygcttccaaactagttgaagcaaaaagggcgtaaat

SEQ ID NO: 359760 - DNA, 601 bp, Homo sapiens
attaaagtaaaattaagaagctgggcacagtctcacatctgtaatcccagcaatttgggaggcggaggcgaggggattgctgaggccaggagttcaagaccagcttggccaatttagtgagaccccatctccattaaaaaatgataaaataaaataattgattttgagaaaggatgtggacaaagtgcagcacatagaccaagggcccagttctgtttgagggcattggargcaacttccacagcaaagacttgggttgaaatttacaaaaataggagtttgccagcttgacagagaggcagcggaggtcaaccagcagcacacttaagcagtcatggaggctgacctaggcgctggacatggaaaagtagcaatcctggagctttgtatagatgtggggagggaacttacaggggaccaactaggctactgggcaatttcacattataaagaattttatatgctcaaattaaaggattaaaaattttcccccatgtacataataaattggcaaaaatggttatatttgagggtgactaaggaactctgggaaagagatcggcaaaccaggcacatgttcttgactactgcaaaagtacat

SEQ ID NO: 359761 - DNA, 628 bp, Homo sapiens
atctaattatttgaaatgagtttaaaaccttattatgaaaggaagttgaaaacattcgatcacaattgagttttgtactatggactaaaaccaagatgtgctttctgtcagtagctgtgcaactccctgaaaaaagaaaaatagcgcagagcgatctgagctttgtgaaggctacacaatttatcaggcccagagagataggagtgtgagacktcagtcacgtccccccgtacgcatgcgcaggagtaattatttaaagacattttgttcctgactaactgcctcactcattatgttcctggaatttgtgatacaaaaaaacaatgtttagcctatcaatagtttatatagtttatgttattttaatataaattcttctcaacttaaaaactgcctcttttttcttttaaaaacccacttgtaactgctgtatatattcagggcaacttgatttggtgtttcgttggttgcagtcctcaaatttgacctcaatatactctctacttatataaattttggctcagttttgtccgtaggctgacattccaattgttttcctaattatatattttgttccttatttctcatgtctagaaataaagctagggaagtaaacagctggaaaact

SEQ ID NO: 359762 - DNA, 577 bp, Homo sapiens
aggcccagagagataggagtgtgagacttcagtcacgtccccccgtacgcatgcgcaggagtaattatttaaagacattttgttcctgactaactgcctcactcattatgttcctggaatttgtgatacaaaaaaacaatgtttagcctatcaatagtttatatagtttatgttattttaatataaattcttctcaacttaraaactgcctcttttttcttttaaaaacccacttgtaactgctgtatatattcagggcaacttgatttggtgtttcgttggttgcagtcctcaaatttgacctcaatatactctctacttatataaattttggctcagttttgtccgtaggctgacattccaattgttttcctaattatatattttgttccttatttctcatgtctagaaataaagctagggaagtaaacagctggaaaactgatagtggtgttattaacctaactgagagggctgggcttatgagtaaattattcctgtgcataaatgaaagattgtttctaaatggcagctatgttgagcctttgtattagttacatcttttggggtttcaggt

SEQ ID NO: 359763 - DNA, 577 bp, Homo sapiens
aggcccagagagataggagtgtgagacttcagtcacgtccccccgtacgcatgcgcaggagtaattatttaaagacattttgttcctgactaactgcctcactcattatgttcctggaatttgtgatacaaaaaaacaatgtttagcctatcaatagtttatatagtttatgttattttaatataaattcttctcaacttaaaaactgcctcttttttcttttaaaaacccacttgtaactgctgtatatattcagggcaacttgatttggtgtttcgttggttgcagtcctcaaatttgacctcaatatactctctacttatataaattttggctcagttttgtccgtaggctgacattccaattgttttcctaattatatattttgttccttatttctcatgtctagaaataaagctagggaagtaaacagctggaaaactgatagtggtgttattaacctaactgagagggctgggcttatgagtaaattattcctgtgcataaatgaaagattgtttctaaatggcrgctatgttgagcctttgtattagttacatcttttggggtttcaggt

SEQ ID NO: 359764 - DNA, 456 bp, Homo sapiens
tctactttctatatgatgctatcattcttttttcttttcttttttttgacagaatctcactgtgttgttcaggctggagtgccgcaragtgatctctactcactgcaacctctgcctcctaggttcaagcaattcttgtgcctcagcctcctgagaagctgggattaccaccatgcccagctaattttcgtatttttttgtaaagacggagttttgccatgttggccaggctggtctggaactcctggcctcaagcgatctgcccatctcggcctcccaaagtgctgggattacaggcatgtgctatcattctttttgagcacaggaggaaactatggctgatctgctcattttactgtcaaaaatataggcagcttttgtattgtaacattatccccttaacagctgtccaactggtctatacatttcacctaacatatggtaaatgttcctact

SEQ ID NO: 359765 - DNA, 559 bp, Homo sapiens
attttcagttttgcctgcatcataagagtgagcactccattgctttctttcctggccacactgctacaatccagcactaactatccaygtccagggtaaggatcgagatcgagaagcccacactgccagtgaaaaagctacgtctttactgcataaattagaggaagcaatttcggaacaacggaaccttcaaactataaatactgaattatcgaacacttgccaggcacttcagcagaagacaaggaaactgaagagtgagtagcaaatattcatttatgacccagtttttgtccaccctcaggcggggcataggactacagacatttttctagattacagctaggatattattcctgagtttatgacaatgaaatggtttgagaaggcaatattgtggggctttcagagaggtttgctgagtggctaggtgcatgcatgggtttaaccattaacttccctttttgcctttttattataagctggttttgtctgtggctgtttttttcttttaaaattaattaaaacttctcaaaatttctaaaagtaaacaaggaga

SEQ ID NO: 359766 - DNA, 528 bp, Homo sapiens
ttccccttcctcactgtgattttcttgcagtattttcttagaagagtcaactttaataacttaccccaaagtgcacgttcttgatattatgaacttgctattgttgtcttcccagtttatcttcacggcccaatagattcaaatacacttaaaagcagaatatgaaagctgccctgggttgatacgtgtatttttttctgcctggataacgtagagtggacacttcctttctgtcttgagttatgcataacctgtccagatttatgaaatcccttacttgttrcttgtatcttttgctgcccaaaaaacccatacaaatcaggattttgcttatatgaccatgtacttacgatctttctaacaatgccctttaaattcaatctttgagagaagagggaaatttagatagcacgtattttcaaaatgttctatatagcagatgttccagatagactgcaaacaaatgtcaatgactgcagttatcacacaaacacgtccacgcacatcccgccatgaccactgccaccc

SEQ ID NO: 359767 - DNA, 642 bp, Homo sapiens
taggatgtgtatataacatattagggtgaatcttatgtacagaaatcatggactaattgatacaatccaaaactatcacccccttactattcaccatctcttgttcccatctgacgtgaaatcttcatggagtcagtcttctcatagacaatgagagaattacctttaagaatcacaaatttttccttgaaaagagatcctgggaaactctgatatagcataatttcttatttgaacgtagtatctgyacatgaacttcctagtttagaggagactttcacctagatgatatcactgcaaacactcttttagcttgctattcttagcatggagggcgggaggtatggcagaggtaaaacccttagggcttggagcatggattcaagatgaaagccgtgtcctaagcagtcagtaaacaggagggaaatgagccaaagaaggcgggtgaagggatccaggtgattgagatacttaaagatagaaggttttggggtgacggccaaggagaaaaccaaagccaaatacagcttgctcaacaactctgataggatagggacccaagttttcccaaatgaaaaatgcagatatggagaagtaatctgggaagtatagtataatgattaagaacatgggatttgaaat

SEQ ID NO: 359768 - DNA, 642 bp, Homo sapiens
taggatgtgtatataacatattagggtgaatcttatgtacagaaatcatggactaattgatacaatccaaaactatcacccccttactattcaccatctcttgttcccatctgacgtgaaatcttcatggagtcagtcttctcatagacaatgagagaattacctttaagaatcacaaatttttccttgaaaagagatcctgggaaactctgatatagcataatttcttatttgaacgtagtatctgcacatgaacttcctagtttagaggagactttcacctagatgatatcactgcaaacactcttttagcttgctattcttagcatggagggcgggaggtatggcagaggtaaaacccttagggcttggagcatggattcaagatgaaagccgtgtcctaagcagtcagtaaacaggagggaaatgagccaaagaaggcgggtgaagggatccaggtgattgagatacttaaasatagaaggttttggggtgacggccaaggagaaaaccaaagccaaatacagcttgctcaacaactctgataggatagggacccaagttttcccaaatgaaaaatgcagatatggagaagtaatctgggaagtatagtataatgattaagaacatgggatttgaaat

SEQ ID NO: 359769 - DNA, 510 bp, Homo sapiens
ggtttcttataaaagcctttgcattcaactgtaaaaaaaaggcgacccttttccaagacccctctctattgcagaaagctgttctttctttcacctattaaatttctgttctaaacttcacccttggtgtgtccacatccttgatttccttggctgtgaaaccaagaacttcaggtgtcatcccagacaacacagctgcttcactttgaggtggcgagaggggccgattttcaacatttattaaattctgtgctatcartactggtaacatggactcttttaacctaccaatgtgacatcactgaatgcacagttaggaagagctgagcacaatagtctctcatgagccagtggggcccagccacagcacacctctgctaatgaaccactaggccagtcttggcttcataatcaagagagcacctcatatattcatgtgttcttagaaaatagtggtgtgagccatgtctttttctacagcatgttcaaggaagttgtgtgtaatgcact

SEQ ID NO: 359770 - DNA, 510 bp, Homo sapiens
ggtttcttataaaagcctttgcattcaactgtaaaaaaaaggcgacccttttccaagacccctctctattgcagaaagctgttctttctttcacctattaaatttctgttctaaacttcacccttggtgtgtccacatccttgatttccttggctgtgaaaccaagaacttcaggtgtcatcccagacaacacagctgcttcactttgaggtggcgagaggggccgattttcaacatttattaaattctgtgctatcaatactggtaacatggactcttttaacctaccaatgtgacatcactgaatgcacagttaggaagagctgagcacaatagtctctcatgagccagtggggcccrgccacagcacacctctgctaatgaaccactaggccagtcttggcttcataatcaagagagcacctcatatattcatgtgttcttagaaaatagtggtgtgagccatgtctttttctacagcatgttcaaggaagttgtgtgtaatgcact

SEQ ID NO: 359771 - DNA, 610 bp, Homo sapiens
ttggccaagcttgtcttgaactcctgacctcaagtgacccacccgcctcagcctcccaaagtgcaggccaaaattctgcactttaatcaatagcaatttaacattaccaattcctaacaggaaagaaaggacattgaatgctttacatgcgctagctcatttatccctcccagccctagggtaagtagtattgttatctccattttatctaggaggacccacgggcttagagtgactatgtggcagggctaaagtcacacagcccttggagcyggagcttgaaggcaggcagtctgactcccaagcgtgggctcttgaccagttctctccattgccttcagttagaagctccttagtggtcccagattgagtctttcctataatgcatccatatagacttgcagggtcacaaaagacctggcattcaatgatctagtccccatattttactactgaggcaagagctaagctaaacaaagttattttgtttgtgggaggtcataagggactgccacagggctggaaccaagtctctccaagatttagagactctaaaaacagttttgcaactgatacctgaaacaaattagtcggaatgactttcagccac

SEQ ID NO: 359772 - DNA, 466 bp, Homo sapiens
gccactgcactccagcctgggagcctgggtgacagagagagaccctgtctaaaatatatatatacacacacttgaatgcttcatgtcccttgctcagtgacagccccgtcctctgcttytgcacagttgaccaaggcttctcagtctactcctgtgtagaaaagaattaaagcaggcctgaggctgctagtcttagaaaggcttgcaaagttggcccttgtctggtgtctgggaacttgaatttctggagggttctcaccattccctgaaaagaatggctcacgatgcctaaaatatttgtacaaacaatgaagtttctgctgaacatctgcttccttctgggagtctggaattttaggatgtgctaggtaggggtgtttacatgacagccccacataaaaaccttgggcactgagtgtctaatgagattccctagtaagtaatattttacacatattatcacaac

SEQ ID NO: 359773 - DNA, 555 bp, Homo sapiens
tatggtatgatttctactgagaagtctttgtaaacaagactgaaaccttgagaatcttacagaaatgcaatgcaatttattctggcttttgggtcttgttttctttaaaaactaaagtctatcatatttatttcccatagatgtttgaatgaaaaaaaagtctttgagacacatttccctttggcaattytgagggtattatgagcttgagatttcaaaattcaaatccaactaggaactcatcagcaaatatagtggaacaattatgttttgcttaggtggaggaacacctctttaaataatatgatttgatttaaaatgcagtcaatcaattgctatttcccagttcactgaatactaatttattttaaccagttttatactgagaatattttcaaaaacacgttttaaattattaagattttcagagaaaaactctgatgttactccaagttagcactgattggaaatcatacagagaaaggaataaaatcaataataatgagaaaagatttttactaatgttaaataaaatttaaaaggaagagatatggt

SEQ ID NO: 359774 - DNA, 467 bp, Homo sapiens
taaatatcttctttatattaacatacttatgtttcctctatctttgtgaacatataaaacataatttataatgcaatataaatattcattgtaacttttagtatacttgyttatgaattctattctcaatctcatttctggatccctttcagttattgataattctccccattttgggtcatattttcttgcttatttccatgtcacatgatatttgttggatgccagacattgtgaattttgtcttgttgagtaataggtattcttgtattgctttcattttgatattcttgtgccttgtcctgggacacaactgtcagttggaaccagttttatctttcctttctttcttttttttttttttttgagacagtcttgctctgtcacccgggttgcagtgcaatggtgcagtttcagatcactgcaacctccgcctcccaggttcaagcaattgtcgtgcctcagcc

SEQ ID NO: 359775 - DNA, 467 bp, Homo sapiens
taaatatcttctttatattaacatacttatgtttcctctatctttgtgaacatataaaacataatttataatgcaatataaatattcattgtaacttttagtatacttgcttatgaattctattctcaatctcatttctggatccctttcagttattgataattctccccattttgggtcatattttcttgcttatttycatgtcacatgatatttgttggatgccagacattgtgaattttgtcttgttgagtaataggtattcttgtattgctttcattttgatattcttgtgccttgtcctgggacacaactgtcagttggaaccagttttatctttcctttctttcttttttttttttttttgagacagtcttgctctgtcacccgggttgcagtgcaatggtgcagtttcagatcactgcaacctccgcctcccaggttcaagcaattgtcgtgcctcagcc

SEQ ID NO: 359776 - DNA, 467 bp, Homo sapiens
taaatatcttctttatattaacatacttatgtttcctctatctttgtgaacatataaaacataatttataatgcaatataaatattcattgtaacttttagtatacttgcttatgaattctattctcaatctcatttctggatccctttcagttattgataattctccccattttgggtcatattttcttgcttatttccatgtcacatgatatttgttggatgccagacattgtgaattttgtcttgttgagtaataggtattcttgtattgctttcattttgatattcttgtgccttgtcctgggacacaactgtcagttggaaccagttttatctttcctttctttcttttttttttttttttgagacagtcttgctctgtcacccgggttgcagtgcaatggtgcagtttcagmtcactgcaacctccgcctcccaggttcaagcaattgtcgtgcctcagcc

SEQ ID NO: 359777 - DNA, 621 bp, Homo sapiens
aaacagctttgtcttttctgacttatcactattaagcataatataagcaaacagcttattttacctgggtatgtttttcttattattttttaactgatcaaataagctaacattacttttatgtaatgtttaagattgtaaaaaatgtaaatttatgtctaagtgaagtgaatccttattctgacacactttttatttcaacagtaattgtgttttatagtatgtcatgttgaagataatttttaagatctctaggtaacttaagccttatatcgatattaaataaattaatatgtaatcaayagatatctagttactaagtaggataggacactgacatatattattaaggataattttacttatttttgtatgttagagaagctgtaacaatgagtcatgttaataaatgtgctcacttttgctacacagggatgcatgagactacaaaaagttgtattatgaattttgttaatctgctaaatgctttgagatgacagaaagatgttaattatccactttcttgtcttttctgtgaaatagaagttaattacttcagttaaaagttataattaatatgagtggttacaaccacactgggaacaatagtgacagaaaaat

SEQ ID NO: 359778 - DNA, 619 bp, Homo sapiens
gactattttagttgcaaataatagaaccccaactcatactagttaagggttgggtttgcttattgacttataagtaaaaagtacagggttaggactgacttcaggaaggactgactcctgctgcttaaataaggaagcacctcttcatctcttgtgccctgctgtcctccatgttggcctcaggaacagaggtgcaacaagcaaattggcagtggtccactacactcatggtgaagatcgaaggatataaaggaaataaactgccctgcacttttgatgggaatttttttctggattcttctgctttcccatctctctctctctctatatgtgatcattcaataagtcctttggattctcccttagcattgctgcttgcaaacacccctcctctccattccactgccttgatgtrgcctcctaccgccactcctggactactggggcacctgaacctgaatctggctccagatgatccattattcccacacacctctgaacagccccttggctacagaggtccatgtggatggtttatgccagagaaagctggctgcagatgggtggtagagcaagctagctgagatggagtggagatgtattgtagtcatggtgctgg

SEQ ID NO: 359779 - DNA, 575 bp, Homo sapiens
gtaagactgagttaaatgttaggagctcaaacagggcctccaatggggaatgcagtgttgaaggcagggactatttggcccagatatcacattcatgaaagactttgcaacttttgatattatctccaaatgaaattacacacaaaggttgaagagagacagcgatgggacagaatgaagttgttctccgcctgtaaactgtgcatgatgattggaccagactgccccagttacactatgaattcataaattttataagtcccatgcttatyttggaactagcaccacctaattatgttacattgtatttaatttgttatatgtaatcacttaaaataatcttcaacttttgtaattctgatctagtatttctttattgggggcacctgtttcagaaagtagaagtggccaggatcacctttgagaggctcagcgctcaaacaagggggatcttgtgggctgttggttgtctctgaaggactggtagggtttattttgataattggaggggggataggaaatgtcattattaagtgtccctctcagagtgaatcaaatatatatgtgtatatata

SEQ ID NO: 359780 - DNA, 575 bp, Homo sapiens
gtaagactgagttaaatgttaggagctcaaacagggcctccaatggggaatgcagtgttgaaggcagggactatttggcccagatatcacattcatgaaagactttgcaacttttgatattatctccaaatgaaattacacacaaaggttgaagagagacagcgatgggacagaatgaagttgttctccgcctgtaaactgtgcatgatgattggaccagactgccccagttacactatgaattcataaattttataagtcccatgcttattttggaactagcaccacctaattatgttacattgtatttaatttgttatatgtaatcacttaaaataatctkcaacttttgtaattctgatctagtatttctttattgggggcacctgtttcagaaagtagaagtggccaggatcacctttgagaggctcagcgctcaaacaagggggatcttgtgggctgttggttgtctctgaaggactggtagggtttattttgataattggaggggggataggaaatgtcattattaagtgtccctctcagagtgaatcaaatatatatgtgtatatata

SEQ ID NO: 359781 - DNA, 564 bp, Homo sapiens
gttctccgcctgtaaactgtgcatgatgattggaccagactgccccagttacactatgaattcataaattttataagtcccatgcttattttggaactagcaccacctaattatgttacattgtatttaatttgttatatgtaatcacttaaaataatcttcaacttttgtaattctgatctagtatttctttattgggggcacctgtttcagaaagtagamgtggccaggatcacctttgagaggctcagcgctcaaacaagggggatcttgtgggctgttggttgtctctgaaggactggtagggtttattttgataattggaggggggataggaaatgtcattattaagtgtccctctcagagtgaatcaaatatatatgtgtatatatatatacatgcagtgttggcatggatagggaacagctaggagagttacacaggtgcaatcgcagtgttgagctgtttaatttgctcctgaaaggagcaatagtcgtgccctggttaattgagacagaagttatacattagggcttccagagaggcccttggggttcaatttgc

SEQ ID NO: 359782 - DNA, 561 bp, Homo sapiens
ttctaggatccttgtgttccttgccatgctcagctgagtcaggacagtcagcaacagccgaataaaggatttgggagaggagacttatgggagatgggtgtggcgttagtggggcacactccctgcaggaggacctgcccccccccagcctcccacctgggcctgctgatcactactgccccctgctgttggggtgaagcctgcaatgcgacacatgcacgagggaggcaggtggagccacatgtgctcccccagctttgcataggagtaagtctgctctctgctccagagagaaatggggcataaaaggacttggggggcagatcctctctctgatccagaaattcactcrgggcacagtctagtcccaggctagagagaacgcaaaacatagtgtggttaatgtgtggtgagacatgtcatgggtaaagactactcatgacctcatgccataaataagacaggacacccattcacttatccgtgctccttccatcccaggcctgtagagggaagtggggacccagaaatcagtcctcagcttcaagaagctcataagaa

SEQ ID NO: 359783 - DNA, 625 bp, Homo sapiens
tgtggtttaactgcatttgccaccaagtagatgacataatcacatgggctgactttttgaccctctttttgwctacctcttttaaatcgctttttgcacaaatcacagcctaagtgacagcagataacattttcttcccctctagcaccaccttccccagggtgcctccctggggctcacatgtgttctcacagtgcaggctgaattaggaaaaggagcctcttcctcagggtagagacagcttcctcccaggcagcaacttggatttcagcgcttctcaccctctttccctagactaggatttgtttcttaatctctgtgctactgacattctaggccacataagtctttgttacaggagcctgtcctgtgtactgtaggatatttagtggcatccctggcctctacccattagatcccagtggcacccagacacaaagatgtcgccagacattgtcaaaggcactggggtgtgggtgctgggtaaaccagccctggttgagagccagctctaggcccttgtttcccactgcttctttgtctggctctggatggttaggtcatcagttgttcacacaagcactggctctgtgtccctccctagccagcccagggctcatcttgg

SEQ ID NO: 359784 - DNA, 625 bp, Homo sapiens
tgtggtttaactgcatttgccaccaagtagatgacataatcacatgggctgactttttgaccctctttttgactacctcttttaaatcgctttttgcacaaatcacagcctaagtgacagcagataacatttkcttcccctctagcaccaccttccccagggtgcctccctggggctcacatgtgttctcacagtgcaggctgaattaggaaaaggagcctcttcctcagggtagagacagcttcctcccaggcagcaacttggatttcagcgcttctcaccctctttccctagactaggatttgtttcttaatctctgtgctactgacattctaggccacataagtctttgttacaggagcctgtcctgtgtactgtaggatatttagtggcatccctggcctctacccattagatcccagtggcacccagacacaaagatgtcgccagacattgtcaaaggcactggggtgtgggtgctgggtaaaccagccctggttgagagccagctctaggcccttgtttcccactgcttctttgtctggctctggatggttaggtcatcagttgttcacacaagcactggctctgtgtccctccctagccagcccagggctcatcttgg

SEQ ID NO: 359785 - DNA, 630 bp, Homo sapiens
tggatatactataggttctggaaccagtatcgtactcatggatacataggtaatttccagtcttttcctgtaaaaaacagtgctgcagtgagygggttaaatctttttatatttttgccagtgtatttttggaatagattcctggaaatggaattgctatgtcaaagggcaaatacctaacgcaattttgctagatattgctgaatttccttccataggattatattattttgcctttccaccagcaatgtatgaacacatctgtttcctcacagccttcccatcagatgatgttttcaaactcttggatttttgcaagtgaaaaagggtatcttggggtaatttgcatttgcattgggggagggttttgataccaagaagtgagtagtcattttcttatttagctagcattataaaagcctcaattaatcccctctgtacatgtgaataattatcagagtgggatgcaactactcaacacaaatatgacttccgggtttgttttattaaattgtatttataaattctacttgcagttcttattcctggatgtacgtcatgtgaatggctgctcagtgtaacatgctaccagaaatgccatatgtaccaggctctgagtacagctgggtt

SEQ ID NO: 359786 - DNA, 598 bp, Homo sapiens
attattttatgaaatatttattgagcacccactatgagccagaagctgtacttaggagaagagtcaacagtttcaggagtsatgagtgtccccaaggagaagggcagggaggtaggactgcagtgggcagagccagagaggcttcctgcgagacgtgacttgaggtagagagttgaagaagactctgagttactccaaggaagtggagaagcaagaaagcgtgccaggcagagggaacagcacctgctggagcactcatgggaaggagggtggggtgagaaactggagaaagccccatggatgaagcagagacagaaagagctgccggggggaggcggccaccccatgaggagctgggttttcacttcaaatgcaagcaggagaaactcaggggaatttttcttttaaacaccttaattaaggtgtcatttaaataacacaatatctacccattttatgggcacagtttgatgagccttagtaaatgtacacagttgtgcaactatcatcacaatctagttttagaacatttttatcacccccaaaattttcttgtgcccacttgctgtcaatgccattcccaggcactgacctgctt

SEQ ID NO: 359787 - DNA, 598 bp, Homo sapiens
attattttatgaaatatttattgagcacccactatgagccagaagctgtacttaggagaagagtcaacagtttcaggagtcatgagtgtccccaaggagaagggcagggaggtaggactgcagtgggcagagccagagaggcttcctgcgagacgtgacttgaggtagagagttgaagaagactctgagttactccaaggaagtggagaagcaagaaagcgtgccaggcagagggaacagcacctgctggagcactcatgggaaggagggtggggtgagaaactggagaaagccccatggatgaagcagagacagaaagagctgccggggggaggyggccaccccatgaggagctgggttttcacttcaaatgcaagcaggagaaactcaggggaatttttcttttaaacaccttaattaaggtgtcatttaaataacacaatatctacccattttatgggcacagtttgatgagccttagtaaatgtacacagttgtgcaactatcatcacaatctagttttagaacatttttatcacccccaaaattttcttgtgcccacttgctgtcaatgccattcccaggcactgacctgctt

SEQ ID NO: 359788 - DNA, 528 bp, Homo sapiens
aattgagtgatggagagaatgcaatgtaaatttcctgtctggcgcagcatgtgaacactgccaccaacagtgatgtctgtcatggtacctcacagacacactcagaaatgtgggacttctgggtctaaacaggacatgagagatgaagcatctgacaggcagcacctaaatttaccatacaaggccaccttggaacattcagtataaaacggaaacagataaagggcctgctctgttgggagagggaatcctctgaatgtggctgagctgtgcttggttccatcagccatgggtgggcgccaccttcacaaaagacagacagagtcagctgttaaagaactgaaggcatcatccatcccaaagtgtcacacccaagcagcccagaatgtagcaatccatatgactctgggtgagcccaaggaggcctgcaaatcatagmagtgatgggcaaagcaaggctctggcagccagaaattgccgagctcatcacgtaatttgcaaccccagagtataacagcacaccaataa

SEQ ID NO: 359789 - DNA, 523 bp, Homo sapiens
acaaccattatataggaaatcccatactttgattggtttattttgaatctgggctaccttactgaacttattagttctaatagtttttcaaatgcttctcctggactttctaaggacacagtaacaccacctgcaagtaatgaaaactgaatctcctttctataactatatttcttatttttgactgataccattggaaaataatggtggtgagyaggcattcttttctattcccttgcttctgtggggatgcttttgaagtgttatgccattatgcatcatgctaaggaaggatccttacagttctaatttactgagagcataaaaaaaatccccaagtaggtgctggattttattgaatgactcaagtgtgtattgagatgatgatttaagtttcataaaaatatattgtcttagtaatgtggtatattaatagatatctttatggtatattgtccttgaatacctaggataaatgctacctggtcttgttgaattattcttttattagcaatttgataac

SEQ ID NO: 359790 - DNA, 577 bp, Homo sapiens
tcagacgtggctgctctgtagcacagaatgattactaatttgcctcttcccttttgcagacttcagttctggggcttttgctgggagaagcttggtgtttctgtgggcacaagcacagtctggcccctaccacctcatgcacacttttgcccwttttcttcttcccttggttgtgttggctgaagtgcaccctgggaaacaaaggccttgaaagacaaaaatctaagagatcaggagcaactgtcacaagtggtgttaagaatcaagtaacaaagaagcttggggtaatgtagcatgttaagaaaaaacataaaaaagaccagaatctcaactaaatggttatgcatgcctttacaaacagactgttgtgattaaacctcgcctctaagtgaagcttggaaaatatgatctggctgtggctactgagactttgaggccattttagcaccattgtctttattttccttatcagtcttcaagcttatttaatgttttgcatctttttttgtttctccagagagctcttcaactgtgtgatccaaatgaatttgagaacacctatttactgctccgccct

SEQ ID NO: 359791 - DNA, 547 bp, Homo sapiens
gtttaaacttccctttggtcctggatagaaaggattttttttttttttttgagacggagttttgctcttgtagcactggctagagtgcaatggcgcaatcttggctcactgcaacctctgcctcctgggttcaagggattctcctgcctcagccttccgagtagctgggattacaggcacccmcccccacgctggctattttttttgtatttctcaggagagacagcatttcaccatgttggtcaggctggtctcgaactcctgacctcaggtgatccacccaccttggcttcccaaagtgctgggattataggcctgccacctggatctattcttctccctgctcctggctttttcaatccagtcacaaagaggcctttgaaattgatgcctgccaccacacctggcagaaaggatgtttttgtttcttctttttcctgttcctttctctgcaatcatctctctgagtctcagacatgtggcactggttggctggcagcaccttctgtgtgtctgagcccttacatagcttccagaggaaggggtg

SEQ ID NO: 359792 - DNA, 547 bp, Homo sapiens
gtttaaacttccctttggtcctggatagaaaggattttttttttttttttgagacggagttttgctcttgtagcactggctagagtgcaatggcgcaatcttggctcactgcaacctctgcctcctgggttcaagggattctcctgcctcagccttccgagtagctgggattacaggcaccccccmccacgctggctattttttttgtatttctcaggagagacagcatttcaccatgttggtcaggctggtctcgaactcctgacctcaggtgatccacccaccttggcttcccaaagtgctgggattataggcctgccacctggatctattcttctccctgctcctggctttttcaatccagtcacaaagaggcctttgaaattgatgcctgccaccacacctggcagaaaggatgtttttgtttcttctttttcctgttcctttctctgcaatcatctctctgagtctcagacatgtggcactggttggctggcagcaccttctgtgtgtctgagcccttacatagcttccagaggaaggggtg

SEQ ID NO: 359793 - DNA, 585 bp, Homo sapiens
tccccatttttcatagcattgtgtatatcagcagtagtgaggcagtgaattccagaatacaggggtctcatgaagtgtctgagggcctcaaaataaagcacactcatctgcaaagtgctgtttatcccctgacctggtgcagtcaagtctggtgctagaggacatgccatgaaaatttccttctcagagaccctttcaagatctgtttcatttaaaccatatctcaagatagacatattaaaaagaaggaaaatgctgtttgttattaaatcaggaaagcattttaaaagaatttggaatctaacatgtgtagcctcaaatccttgaagcctcacatgatatgaaaaaaaattatcttggttcaaaacaattgttggagtaattcaacattcttaaawctatcttctccagaaaaatcttttaagttagaaatgtgaaaatgaatagtttttcagaccaggctggagaattttccatgaatatatattaaaatcactatatttgattaataaacatccgtgtgagcccaagattaaagcaacatgctgagcttatataatatttactcatgctcttgtggtatct

SEQ ID NO: 359794 - DNA, 585 bp, Homo sapiens
tccccatttttcatagcattgtgtatatcagcagtagtgaggcagtgaattccagaatacaggggtctcatgaagtgtctgagggcctcaaaataaagcacactcatctgcaaagtgctgtttatcccctgacctggtgcagtcaagtctggtgctagaggacatgccatgaaaatttccttctcagagaccctttcaagatctgtttcatttaaaccatatctcaagatagacatattaaaaagaaggaaaatgctgtttgttattaaatcaggaaagcattttaaaagaatttggaatctaacatgtgtagcctcaaatccttgaagcctcacatgatatgaaaaaaaattatcttggttcaaaacaattgttggagtaattcaacattcttaaaactatcttctccagaaaaatcttttaagttagaaatgtgaaaatgaatagtttttcagaccaggctggagaattttccatgaatatatattaaaatcactatatttgrttaataaacatccgtgtgagcccaagattaaagcaacatgctgagcttatataatatttactcatgctcttgtggtatct

SEQ ID NO: 359795 - DNA, 483 bp, Homo sapiens
gctgagcttatataatatttactcatgctcttgtggtatctcctaaagcccagaagacccagaactggggctgtcactgccttaaatagaatyatcatagcttaatttcccccttatctcagattgtactgcaccaccttatcatatgcatttaattctctccatattcactgtgcaatagagaattcaaattaaaatcaccaaggtagcaaaagtgatatacatcacattggacactgataagacatttttatttaacacagaaaattgctggtgtaaatgatattacaataaatatacttcaatttaaaatgcaagtcactgagaggaaaaactgggagccataaaatacctttcctctcctcaaggttgtccaaagttggtgaggatggggggggtggtggtgttaagaaaaggacaaggctttggactgggttgttatctttacgatgcaatttaatctgggatgccacaagcacgtgg

SEQ ID NO: 359796 - DNA, 483 bp, Homo sapiens
gctgagcttatataatatttactcatgctcttgtggtatctcctaaagcccagaagacccagaactggggctgtcactgccttaaatagaattatcatagcttaatttcccccttatcycagattgtactgcaccaccttatcatatgcatttaattctctccatattcactgtgcaatagagaattcaaattaaaatcaccaaggtagcaaaagtgatatacatcacattggacactgataagacatttttatttaacacagaaaattgctggtgtaaatgatattacaataaatatacttcaatttaaaatgcaagtcactgagaggaaaaactgggagccataaaatacctttcctctcctcaaggttgtccaaagttggtgaggatggggggggtggtggtgttaagaaaaggacaaggctttggactgggttgttatctttacgatgcaatttaatctgggatgccacaagcacgtgg

SEQ ID NO: 359797 - DNA, 483 bp, Homo sapiens
gctgagcttatataatatttactcatgctcttgtggtatctcctaaagcccagaagacccagaactggggctgtcactgccttaaatagaattatcatagcttaatttcccccttatctcagattgtactgcaccaccttatcatatgcatttaattctctccatattcactgtgyaatagagaattcaaattaaaatcaccaaggtagcaaaagtgatatacatcacattggacactgataagacatttttatttaacacagaaaattgctggtgtaaatgatattacaataaatatacttcaatttaaaatgcaagtcactgagaggaaaaactgggagccataaaatacctttcctctcctcaaggttgtccaaagttggtgaggatggggggggtggtggtgttaagaaaaggacaaggctttggactgggttgttatctttacgatgcaatttaatctgggatgccacaagcacgtgg

SEQ ID NO: 359798 - DNA, 519 bp, Homo sapiens
tttcctctcctcaaggttgtccaaagttggtgaggatggggggggtggkggtgttaagaaaaggacaaggctttggactgggttgttatctttacgatgcaatttaatctgggatgccacaagcacgtggggcaggatcgttaggaaataacatcataaagaatcaagaaaggtctaaaagaaaacaggagaaactgtcttgaggctttctttcttccatgcatagttataagagtattatgttaacctgtctggtcatggccacaggaataggagatgctttaacgaagtgttgagttggggcccactcaggatgcaagaaaagagaccaaacatatattgcatgggctagacagtttatgtagatcatcatatttaatccttaaaataaataaccctgtatgatgaggatatattattcctaattcacaattgaggaaacacaagctagagagatggggtaaattgttcaaggtcatacagcaagtgagtttgacaccaaaatttgactccaaacct

SEQ ID NO: 359799 - DNA, 609 bp, Homo sapiens
ggaaaaactgggagccataaaatacctttcctctcctcaaggttgtccaaagttggtgaggatggggggggtggtggtgttaagaaaaggacaaggctttggactgggttgttatctttacgatgcaatttaatctgggatgccacaagcacgtggggcaggatcgttaggaaataacatcataaagaatcaagaaaggtctaaaagaaaacaggagaaackgtcttgaggctttctttcttccatgcatagttataagagtattatgttaacctgtctggtcatggccacaggaataggagatgctttaacgaagtgttgagttggggcccactcaggatgcaagaaaagagaccaaacatatattgcatgggctagacagtttatgtagatcatcatatttaatccttaaaataaataaccctgtatgatgaggatatattattcctaattcacaattgaggaaacacaagctagagagatggggtaaattgttcaaggtcatacagcaagtgagtttgacaccaaaatttgactccaaacctagtgatctctttctgtgacaccatggtcacaaggaggggagcatgcgccctctgaagttcacca

SEQ ID NO: 359800 - DNA, 508 bp, Homo sapiens
tggaatagctctttagtttgtctttcatgacactgacattttgtataggccaattattttgcagaatgtccctcactttaggcttgtctgatgtttcctcaggaggaggtacagggtacgcccttctggcagaaccagcacagaagttggggtggaccctcctcrgtgcatcatatcacaacatacatgaggtcattatgtcccatattggtggtgttagctttgatcacttggttaaggttgtatctgctacatttctcagctgtaaagatattttttcctgtggaattaatcagtctattgtcaggagttacttggtgaccgtgtacatatcttgttatttcaacctgctagtattaagattcattagtgattcttgcataaatcaattatttggatggttgctaaatggtggttttctgattacactattcctcctgcattggcattctactgtaagaaagagccttccccttttttgcatttgtttgttcatttaattaaccaa

SEQ ID NO: 359801 - DNA, 508 bp, Homo sapiens
tggaatagctctttagtttgtctttcatgacactgacattttgtataggccaattattttgcagaatgtccctcactttaggcttgtctgatgtttcctcaggaggaggtacagggtacgcccttctggcagaaccagcacagaagttggggtggaccctcctcggtgcatcatatcacaacatacatgaggtcattatgtcccatattggtggtgttagctttgatcacttggttaaggttgtatctgctacatttctcakctgtaaagatattttttcctgtggaattaatcagtctattgtcaggagttacttggtgaccgtgtacatatcttgttatttcaacctgctagtattaagattcattagtgattcttgcataaatcaattatttggatggttgctaaatggtggttttctgattacactattcctcctgcattggcattctactgtaagaaagagccttccccttttttgcatttgtttgttcatttaattaaccaa

SEQ ID NO: 359802 - DNA, 513 bp, Homo sapiens
aacacctgtatgcacatctgggaagatttaaaaaatgtatggcatgggtttggtttgatctgcaggaaagaaggtataatagatagcttctcaatttccttctagctagggcatataaactttcatacagctaaatatttccaaattgaaaaatgaagaygggcacgtttgtaatttcactcattacagttgtgcatgcaattcatgccacacagtctccaatttaagaagcttgtaagccagagattttctgtctgaccttgactctggcacttcacctttctagctaagttttcaatgtacagagcaaaataacatctatttctgcctcccttatgaataaaaatacattctcccaaatggttcaaaggaaatatcaaatgtgccccagcagtaaaatatattggaaaggaggtcaacaactccatcaaactaggttgaataatgtcccccaaagatgtcaggtcctaatccctagaacctgtaaatgttactttacttggaaaaagggtc

SEQ ID NO: 359803 - DNA, 480 bp, Homo sapiens
tacctgtaagaaaactaaagtcgacttgagtcatttcatttatagcttgagtaattagctttacattcaagcactgtcttagaatgatctaggaaaagaatagagggcaaggtctgaaagagaaatatcatcttcacttttgatttttgggtatagaaagtatgacattaacttgaaagagactaagacatctagctattttcttgtactttgaaactgccctcatcaaggacaactcttaattctgatagggtatcattctgaggtgtgagtgggctgtattttgagttcagcttactgttcaccaaaaattctcagagattcttattaccttggtgaattttcatggtctaaggtctggtcattagycttgaagataagaaactgggcctttcatctccccagctcacccactgtttttctgctgacaaccctccttgatatgcactttctttggcatattaaatttgctgataaagt

SEQ ID NO: 359804 - DNA, 643 bp, Homo sapiens
tgaagcgtgtatgtatgcccttagctacctgctttaaaccaatcaaagaaaatatctataaatatgctaagctttcattacaatagaaaaaatttttgcccaaagaactaaatcttggtcaaaagaaacaaaaatgtgtcgattatttagggattttaagcagcatgttcatgaggtagcttgttttgctaagaatagcatgactttggggttgaagagtctcgtgtttggtttgaatctcaattctgccagtaaaatccctcatctattaaaatatctacaataatacttttgtcatttattaaaatgaggaaattaccagtyttcatatttattacaataactgttcctttgctgcaatgttgggtggagtagaagtcatttttacacagtacccagtacattgtaggcctttaataattagaaattgctctgccatagaattacaccatagcaattctatggagcatccattggaggaaatgcatatggcatgctatctgtatttaaatccaaagcatttcaaagtcaatcaattaaaggttacatttttcatttctgttcaaggcaatattaacattggtattggtaactgattaacaacttattttaacagtttcacatttttcacttccatgtttac

SEQ ID NO: 359805 - DNA, 532 bp, Homo sapiens
catttattttcaagaaaatgtgacagccagctggggcctattttaaagagatttctgtgtcctcctatgaccccaaagtaaaaaaaaaaaaaaaaaaatctacaacgacaattccggattttatgtctaattctgtcactgagctcacataatggggascagtcaatgcaaaaattttggaaatggcttaggagtctgattctaatggattggaaaaataacaataatgtgctccaaaaacactcaatcaatattaaaatagtttcattctttcagtatgaggagggtgcaacatacaatctgtcctttctgtagtttcctgacccatttttagcggtaggtgccttttaaagtctgtgttgatgaatttatataattgatccataatctctgatcagccccataggagcaatggcagaggaacacgcaggacttaggagtgagctgtatcacttgaatggagctggaacttaattgtagcttcattaaatagatccaaactaaggctagctacattttctaagtatcacat

SEQ ID NO: 359806 - DNA, 532 bp, Homo sapiens
catttattttcaagaaaatgtgacagccagctggggcctattttaaagagatttctgtgtcctcctatgaccccaaagtaaaaaaaaaaaaaaaaaaatctacaacgacaattccggattttatgtctaattctgtcactgagctcacataatggggagcagtcaatgcaaaaattttggaaatggcttaggagtctgattctaatggattggaaaaataacaataatgtgctccaraaacactcaatcaatattaaaatagtttcattctttcagtatgaggagggtgcaacatacaatctgtcctttctgtagtttcctgacccatttttagcggtaggtgccttttaaagtctgtgttgatgaatttatataattgatccataatctctgatcagccccataggagcaatggcagaggaacacgcaggacttaggagtgagctgtatcacttgaatggagctggaacttaattgtagcttcattaaatagatccaaactaaggctagctacattttctaagtatcacat

SEQ ID NO: 359807 - DNA, 525 bp, Homo sapiens
ttttgcatactcacaaaccaatcagcatgcactccccattttgagtccataaaagctccaggctcastcatattgggggactttcctgcttttaggtaggggaagcaccccccgcccttctttctctttgctgagagctttcctttcatttaatacattctactccactcactctctggtgtctgtgtgcctaattcttcctggtcatgagacaagaacccgtacctagctgagctaaggagcagaaaaaaatcctgcatcaaccccaataactggattgtaatcttgttcattctgcttataggcctaacatggtagcctttctaataatccactctagattgagattattccttgttttcgtgtgtacattcattttctattactaccataacaaatgccaatcattcagcatctttaccaaacctatttataatatcacagttcatagatatctaagctcagcagagctcagctgggcctctgctctgggtttacaaggctggaaccaaggtatcagcagtg

SEQ ID NO: 359808 - DNA, 525 bp, Homo sapiens
ttttgcatactcacaaaccaatcagcatgcactccccattttgagtccataaaagctccaggctcacycatattgggggactttcctgcttttaggtaggggaagcaccccccgcccttctttctctttgctgagagctttcctttcatttaatacattctactccactcactctctggtgtctgtgtgcctaattcttcctggtcatgagacaagaacccgtacctagctgagctaaggagcagaaaaaaatcctgcatcaaccccaataactggattgtaatcttgttcattctgcttataggcctaacatggtagcctttctaataatccactctagattgagattattccttgttttcgtgtgtacattcattttctattactaccataacaaatgccaatcattcagcatctttaccaaacctatttataatatcacagttcatagatatctaagctcagcagagctcagctgggcctctgctctgggtttacaaggctggaaccaaggtatcagcagtg

SEQ ID NO: 359809 - DNA, 577 bp, Homo sapiens
tattgtgagttgttaaagaaaaggctgagatatagtcaccaagtgtttaccaataacataaattattgcaaagcttgaaaaaaaatcaggccaaatatacacgacagtttgaatggaatgctgaggacttagtgaatgctgaaatatgactcatctaaaagtctgctactccggcctgatgctcctcaaattttaatgaccccttaaatgtcctcagatgcacatgcagtttacgtcactgaccactgttggtcaaaacaatcattggatgtgcttatttttcaaattttgagtatcaagttgtgccctaccrtgacacaaagcttaaaggtctttcttgcaaactgtaaaatcatgtagaaaaatagtaactcaaaaataccacatttgacagtcggtcacgaaagatgttagcacctcaataaaaattagaattgttcattgggtgtgccaaaggaaagtggaaaaaaattaaaaagcatgccctgttttttatttgttttttttttttttcctacaaatcacagttttcctcacagtgttagacttttaggtcactctgatgtagcagtacctt

SEQ ID NO: 359810 - DNA, 577 bp, Homo sapiens
tattgtgagttgttaaagaaaaggctgagatatagtcaccaagtgtttaccaataacataaattattgcaaagcttgaaaaaaaatcaggccaaatatacacgacagtttgaatggaatgctgaggacttagtgaatgctgaaatatgactcatctaaaagtctgctactccggcctgatgctcctcaaattttaatgaccccttaaatgtcctcagatgcacatgcagtttacgtcactgaccactgttggtcaaaacaatcattggatgtgcttatttttcaaattttgagtatcaagttgtgccctaccatgacacaaagcttaraggtctttcttgcaaactgtaaaatcatgtagaaaaatagtaactcaaaaataccacatttgacagtcggtcacgaaagatgttagcacctcaataaaaattagaattgttcattgggtgtgccaaaggaaagtggaaaaaaattaaaaagcatgccctgttttttatttgttttttttttttttcctacaaatcacagttttcctcacagtgttagacttttaggtcactctgatgtagcagtacctt

SEQ ID NO: 359811 - DNA, 631 bp, Homo sapiens
gaaatcacagaggcaagctgatgtcatcagaggtgactctgcctatttcaagtcctataatcaccccatgggattcaacagcagtaggaaaacatcacattctcttaatggacaccccatatttgtagaaacagttatgactattagcatttgttatacaaacccaatctatttgtgctcatctgtagaatcctacagacactagagactaaatgatattaattttaggaggtgtttctaaaggagaaacagacaacatttggttttattatcgtttgtatccctcagaagttgtgtgtagacaactttcatctaatacatcaatatcgacttgtccaagtttctcgatgaagtgaaaggatctgattattggctgtgtcttagcgtctgtaggaagcttytaggctatttgtgtacccaaatttaaaacttgcaccttgtttcattgaataagtgtttttcttatttgtgacttggaaaaaatagtgttaatgtgatgtaaaaaacctattatcataggcacaagtaatgaacactattggtcatgacagattaaaatttccttggaaagaaaaatgatagtatcagaataagaatacatgaggaatatatacatatacacctgcttcac

SEQ ID NO: 359812 - DNA, 555 bp, Homo sapiens
ggcactgggttttgttctcatcacaattcttgtttatagctcactggatttatagccgccctcttaaacatctgcagtcatcatttttttctcttctaagaaaagacacaactctctatagaacagaaaacaggtattttctcctactaagccttaaagggagatgtcctttctgtgttttaaccattgaagtaagcgaaacataagactccaatgatgtcaagagaattagggtgaggaaccttgacgctagagctttgatatttytgcaaaattccatgagctgcaagtcagaaaaacatagttttaaattcataacttttattaattcactgtgtggctaaaagcaaatctcttcatttttttagtgtttcatagaaacacagaactttaaaacaaggagaagccttggaatttcattcaatacaacaccctcatgtttgagagagagtcccatatcccagattactaatttaacctcctgcaggtgaagagctggagcttctctctggaacttctaattttacagtgtatttactgctgtctctactatgc

SEQ ID NO: 359813 - DNA, 555 bp, Homo sapiens
ggcactgggttttgttctcatcacaattcttgtttatagctcactggatttatagccgccctcttaaacatctgcagtcatcatttttttctcttctaagaaaagacacaactctctatagaacagaaaacaggtattttctcctactaagccttaaagggagatgtcctttctgtgttttaaccattgaagtaagcgaaacataagactccaatgatgtcaagagaattagggtgaggaaccttgacgctagagctttgatatttttgcaaaattccatgagctgcaagtcagaaaaacatagttttaaattcataacttttattaattcactgtgtggctaaaagcaaatctcttcattttyttagtgtttcatagaaacacagaactttaaaacaaggagaagccttggaatttcattcaatacaacaccctcatgtttgagagagagtcccatatcccagattactaatttaacctcctgcaggtgaagagctggagcttctctctggaacttctaattttacagtgtatttactgctgtctctactatgc

SEQ ID NO: 359814 - DNA, 613 bp, Homo sapiens
aggtgttgtatatcttaagcttaacaatagccatgcaatgcaaattctaatgctatctttggagtcactttcagattttcatacgaatgcattttcaagaaagaagtcaacttttatagtccatcattggcaacaatctactctgtctttctctctaaatgtgtgtgtgtatgtgtgtgtgtgtgtgtgtgtgtgtgtaaatggaaagggctactctgaaaagaatgcctagaaccctaagaatagtcaccatttttcacatcttacccctgtctttattatgacactaacacttttagtgtaagctgcttgctttggattaaattatgtcctcccaaaattggtatttgaagccttaaccccttatgtgattgtatttggaaatagggtgtttagaaaataattaattatggttaaatgacatcataagaatggggcctaataggactggtggccttataggaaaagragagagaggcttccctttctctacagggaagtcacatgcgcatataatgagatggccacctgcaagctaggaagagacacttcaccaaaacttaatggcctaaatcttcatcttggacttccaacctccagagctgtgagaaaa

SEQ ID NO: 359815 - DNA, 508 bp, Homo sapiens
gacactaacacttttagtgtaagctgcttgctttggattaaattatgtcctcccaaaattggtatttgaagccttaaccccttatgtgattgtatttggaaatagggtgtttagaaaataattaattatggttaaatgacatcataagaatggggcctaataggactggtggccttataggaaaagaagagagaggyttccctttctctacagggaagtcacatgcgcatataatgagatggccacctgcaagctaggaagagacacttcaccaaaacttaatggcctaaatcttcatcttggacttccaacctccagagctgtgagaaaataaattcctgttgtttacaccaccccatctgtggtattttgttatagcagcctcagcagactaatacactacttttgagtaaattacaaaaaataaatcatttaagaagcatccaaatgaaaagtataatctttctgtttaaaaaagcataaatattttaaaagtcagctgcgcaca

SEQ ID NO: 359816 - DNA, 508 bp, Homo sapiens
gacactaacacttttagtgtaagctgcttgctttggattaaattatgtcctcccaaaattggtatttgaagccttaaccccttatgtgattgtatttggaaatagggtgtttagaaaataattaattatggttaaatgacatcataagaatggggcctaataggactggtggccttataggaaaagaagagagaggcttccctttctctacagggaagtcacatgcgcatataatgagatggccacctgcaagctaggaagagacacttcaccaaaacttaatggcctaaatcttcatcttggacttccaacctccagagctgtgagaaaataaattcctgttgtttacaccaccccatctgtggtattttgttatagcagcctcagcagactaatacactacttytgagtaaattacaaaaaataaatcatttaagaagcatccaaatgaaaagtataatctttctgtttaaaaaagcataaatattttaaaagtcagctgcgcaca

SEQ ID NO: 359817 - DNA, 552 bp, Homo sapiens
gtgatggtgaattgaaactttgtttatttctatttccccccaaaattccacataaatgacagtaaaaaaaaaaattgtaaatgacaaatttataaggaggataaaaaggaggaagaaaaagtaagagcaagagtattttggaaactggagagctggtggattagtgacatctaacaactaacaaaatatggtgaaaaagcaatgtttgcaataacagaacctcaaaacagtattatttgtgctataggccccaagaaatgctcaraacttggaggcattgataccttttaaagtggggttgttgactgaaaatataagtgttggttgagagactacatgagatgcagtttagctcccaaattccttctccaaaaatgatccactagtaaaaagactaaactgaaccctggcagaaattagatatttatattgtagagaagtagataaaagtggacggcaattatagttgagagtgttaccggaaaggtgtcccaatccagaccccaagagagggttctgggacctcacacaagaaagattttggggtgagtc

SEQ ID NO: 359818 - DNA, 552 bp, Homo sapiens
gtgatggtgaattgaaactttgtttatttctatttccccccaaaattccacataaatgacagtaaaaaaaaaaattgtaaatgacaaatttataaggaggataaaaaggaggaagaaaaagtaagagcaagagtattttggaaactggagagctggtggattagtgacatctaacaactaacaaaatatggtgaaaaagcaatgtttgcaataacagaacctcaaaacagtattatttgtgctataggccccaagaaatgctcagaacttggaggcattgataccttttaaagtggggttgttgactgaaaatataagtgttggttgagagactacatgagatgcagtttagctcccaaattccttctccaaaaatgatccactagtaaaaagactaaactgaaccctggcagaaattagatatttatattgtagagaagtagataaaagtggacggcaattatagttgagagtgttaccggaaaggtgtcccaatccagaccccaagaragggttctgggacctcacacaagaaagattttggggtgagtc

SEQ ID NO: 359819 - DNA, 552 bp, Homo sapiens
gtgatggtgaattgaaactttgtttatttctatttccccccaaaattccacataaatgacagtaaaaaaaaaaattgtaaatgacaaatttataaggaggataaaaaggaggaagaaaaagtaagagcaagagtattttggaaactggagagctggtggattagtgacatctaacaactaacaaaatatggtgaaaaagcaatgtttgcaataacagaacctcaaaacagtattatttgtgctataggccccaagaaatgctcagaacttggaggcattgataccttttaaagtggggttgttgactgaaaatataagtgttggttgagagactacatgagatgcagtttagctcccaaattccttctccaaaaatgatccactagtaaaaagactaaactgaaccctggcagaaattagatatttatattgtagagaagtagataaaagtggacggcaattatagttgagagtgttaccggaaaggtgtcccaatccagaccccaagagagggttctgggacctcacrcaagaaagattttggggtgagtc

SEQ ID NO: 359820 - DNA, 527 bp, Homo sapiens
ggttgagccaaacaaagaaaggccttttgttgatctttattttgatgaacttatctcaacattgccccaagcaattgttggtcagctttctcattccagtctttgccttctgattattattaagaacttcttctaatcagaagtaaatagagaaaactggcttgtacgcttttaatgttgggggaccagcaaggaccctctttggtccacccaccttaagtagtgttgtattaagacttttgttttaatcccatcaattttcctttcattcattcggtttcctagtaaccaagtaaagattttctacccttctgagatgagtcccatgacttccctccccccttttttttaacgttttagttttatccctctcaatgkgttctttttcatttaccttatttaaaaaaataaccatttaaagattttcacctccctgggatgaatcctttgactctccattttgtctccatttgtttttttaactaacttaatgttttattagcatctataagacccatgaggaaaag

SEQ ID NO: 359821 - DNA, 527 bp, Homo sapiens
ggttgagccaaacaaagaaaggccttttgttgatctttattttgatgaacttatctcaacattgccccaagcaattgttggtcagctttctcattccagtctttgccttctgattattattaagaacttcttctaatcagaagtaaatagagaaaactggcttgtacgcttttaatgttgggggaccagcaaggaccctctttggtccacccaccttaagtagtgttgtattaagacttttgttttaatcccatcaattttcctttcattcattcggtttcctagtaaccaagtaaagattttctacccttctgagatgagtcccatgacttccctccccccttttttttaacgttttagttttatccctctcaatgtgttctttttcatttaccttatttaaaaaaataaccatttaaagattttcacctccctgggatgaatcctttgactctccattttgtctccatttgtttttttaactaacttaatrttttattagcatctataagacccatgaggaaaag

SEQ ID NO: 359822 - DNA, 520 bp, Homo sapiens
cttaaaaaatgtagctagccttagtttggatctatttaatgaagctacaattaagttccagctccattcaagtgatacagctcactcctaagtcctgcgtgttcctctgccattgctcctatggggctgatcagagattatggatcaattatataaattcatcaacacagactttaaaaggcacctaccgctaaaaatgggtcaggaaactacagaaaggacagattgtatgttgcaccctcctcatactgaaagaatgaaactattttaatattgattgagtgtttctggagcacattattgttatttttccaatccattaraatcagactcctaagccatttccaaaatttttgcattgactgctccccattatgtgagctcagtgacagaattagacataaaatccggaattgtcgttgtagatttttttttttttttttttactttggggtcataggaggacacaaaaatctctctaaaataggccccagctggctgtcacattttcttgaaaata

SEQ ID NO: 359823 - DNA, 481 bp, Homo sapiens
agaaccagtgtagaaaaaagtttctaccattctcacatttcattttttcttccaaacacagttgcttcagaagggtcataackgtagaggtttacttttaccactccctttcacccatgaaaagttttccaaaaggtcaatgtatgctttgtgtttatacacatcactttaagttagttttacgaatatttgtcctattattttttcactatgtagactacttatacttcatgcattcagtatataatgctgaccaattacaaatttctagttttaattttcccttagtacagtggttctaaatccggaaaaattttctccctgtgggatattagtgatgtttggagatgttgtggattgccacagtggtgggagggatgctattgacatctagtggaaagaatccaaagaagcttttgaaatgcacagaacagcccccatcccccgacacaaagaatgtttctctccagaatgtcagtag

SEQ ID NO: 359824 - DNA, 481 bp, Homo sapiens
agaaccagtgtagaaaaaagtttctaccattctcacatttcattttttcttccaaacacagttgcttcagaagggtcataactgtagaggtttayttttaccactccctttcacccatgaaaagttttccaaaaggtcaatgtatgctttgtgtttatacacatcactttaagttagttttacgaatatttgtcctattattttttcactatgtagactacttatacttcatgcattcagtatataatgctgaccaattacaaatttctagttttaattttcccttagtacagtggttctaaatccggaaaaattttctccctgtgggatattagtgatgtttggagatgttgtggattgccacagtggtgggagggatgctattgacatctagtggaaagaatccaaagaagcttttgaaatgcacagaacagcccccatcccccgacacaaagaatgtttctctccagaatgtcagtag

SEQ ID NO: 359825 - DNA, 426 bp, Homo sapiens
gtatgaatgattacatgaatatggattttaatattagctagaacaaacattgtagatattaatttataatacaaaacatttaatttaaaaatgcaatctgtctctatttaraactgttgatgatttatccatcgtggattgttgtgcagtaatttaaatttttaaaactgtaacactaaagtataatttttcttgataacaaagtctaccaaacctccgccctgctcaaatttggtgctggaagcaagtctttcacttatcttatcatagacccagtataagaatatttattacacctaacgtagctgatgaaaagttagtagaacatgctttttaacttgtcgtcaatgctaatgaaattctgttactgaagaaaaataatgtaatgcatagattagagaattaaggaagcttaaaaatcgtatc

SEQ ID NO: 359826 - DNA, 426 bp, Homo sapiens
gtatgaatgattacatgaatatggattttaatattagctagaacaaacattgtagatattaatttataatacaaaacatttaatttaaaaatgcaatctgtctctatttaaaactgttgatgatttatccatcgtggattgttgtgcagtaatttaaatttttaaaactgtaacactaaagtataatttttcttgataacaaagtctaccaaacctccgccctgctcaaatttggtgctggaagcaagtctttcacttatcttatcatagacccagtataagaatatttattacayctaacgtagctgatgaaaagttagtagaacatgctttttaacttgtcgtcaatgctaatgaaattctgttactgaagaaaaataatgtaatgcatagattagagaattaaggaagcttaaaaatcgtatc

SEQ ID NO: 359827 - DNA, 612 bp, Homo sapiens
ttaaccttttttcactataaaagggcaagtgtttatactaatcctctgtgtagatgaaatacttagattgttaaggggtctggtatacatcctgtttgcaaactaaaatttctttttgaatgaagaataaattgtgcatgtgcagacccaaaacaaaaacctcattttggggctttgctattagttccaatctttataatctgcatctctaaaatgttccacttcacaaagtacaaagctgttttcatagttctctcgtaacttgttttcctaaagcactccaatcagttttatgccagtgaatgtctgttgtgtttattatattttgcattttctccacccgggcccccaccctcaaatcccacattgtgagcaagtcttttgmgtatccaagtttgttagcaaattttccagcaaatagaatttttttggaattttttccacctttggttgatgggcttaccctgaaataaaccagtcatgtttgtgctaaacttctaatggaacttcacttccactcacatttaatgaatgaatgacgaactgaatataccaacaaaatcaagtcatgaataaaaatagagggagacagagagtcactgagtaaaacag

SEQ ID NO: 359828 - DNA, 639 bp, Homo sapiens
  misc_feature (1)...(639): n = A,T,C or G
natcattgacatcaatggaacagtcatgaactatagcggttggagccacagggatgacttcctgcatggcatgggctactctgccacgaaggaaattctaatagtgcagattcttgcaacagaccccactaaaccattagatgtccgttatagcttttttgttcccaaaaagtccactccaaaagtaaactctgtcactagtcatggcagcaataaagtgggatcacacacttcgcagccgcagtgggtcacgggcccatggctcgcctgctctaggacctgtgacacaggttggcacaccagaacggggcagtgccaggatggaaaccggaagttagcaaaaggatgtcctctctcccaaaggccttctgcgtttaagcaatgcttgttgaaraaatgttagcctgtggttatgatcttatgcacaaagataactggaggattcagcaccgatgcagtcgtggtgaacaggaggtctacctaacgcacagaaagtcatgcttcagtgacattgtcaacaggagtccaattatgggcagaatctgctctctgtgaccaaaagaggatgtgcactgcttcacgtgacagtggtgaccttgcaatatagaaaaacttgggagttattgaacatcccctggg

SEQ ID NO: 359829 - DNA, 639 bp, Homo sapiens
  misc_feature (1)...(639): n = A,T,C or G
natcattgacatcaatggaacagtcatgaactatagcggttggagccacagggatgacttcctgcatggcatgggctactctgccacgaaggaaattctaatagtgcagattcttgcaacagaccccactaaaccattagatgtccgttatagcttttttgttcccaaaaagtccactccaaaagtaaactctgtcactagtcatggcagcaataaagtgggatcacacacttcgcagccgcagtgggtcacgggcccatggctcgcctgctctaggacctgtgacacaggttggcacaccagaacggggcagtgccaggatggaaaccggaagttagcaaaaggatgtcctctctcccaaaggccttctgcgtttaagcaatgcttgttgaaaaaatgttagcctgtggttatgatcttatgcacaaagataactggaggattcagcacygatgcagtcgtggtgaacaggaggtctacctaacgcacagaaagtcatgcttcagtgacattgtcaacaggagtccaattatgggcagaatctgctctctgtgaccaaaagaggatgtgcactgcttcacgtgacagtggtgaccttgcaatatagaaaaacttgggagttattgaacatcccctggg

SEQ ID NO: 359830 - DNA, 447 bp, Homo sapiens
catggcctattagataatctctgtcacattcagaaagcaataaagttctttgttcaaacgactaagacctccacaaacaatgattcaaattcactttctatcactcaccagcaaataatcagacatgtggaaatgaccattacggaattcaaagctagaagtgatgcagaaagctcctctccttagaggggcagcttgagactttattttcctcaatttgmtgtattctgattcatcaggtgatagctggaagcttcgagtcttatacctcagcctgtctaacccttgtttgggatagtgatgtactctctttcgggtatcctctgttctgtttagtttctctcttccttggcatatggctttcacttaaatttacaattactatttttctcaacaggaatgtccttctctgacatcatttctccttcttttactattctccagcat

SEQ ID NO: 359831 - DNA, 617 bp, Homo sapiens
ggaattccctgaggtaatgttatgttataccaaaaatatctactagggttttacagaaatgccaaacattttcgtagagtctttggaattcctgtagaagggttttacataggagccatcatttttagtgtacaaattttcttgtgatttcatcatggaacattttagtcttccaaatatatttttgagaaacaactttgagagagaatttttttttcataagataaagagccctcattaagaagtgtgaaaattttcttaatttcaatagaagaataatattctaaartctcaatatagatatgtgagaatatagaaaatacttttcattttgggacaggtcatttataaaaggtaatttatttgacaatttcaccattttcaatgcctaaaaaagataagtttggcatgatgcaccactatcattttgttgctttaaaaaatacattgctaattagaccttggaaacaacatttttagagtttgttttgcagagaaacacagatactccttaaggtgacatgaacacttggtagcagaatagaaataatagtaatcaatatattgttgagtctggacactccatgacccttaaactactaaaggacagtgttaat

SEQ ID NO: 359832 - DNA, 616 bp, Homo sapiens
gttgtttttgtttccatagcctgtttaagtaggttgtaagtttgaatagttagacatggaaattattttataagcacacactctaaagatatctttttagatgataaaatgtacacccccccatcaccaacctcacaacttagaaaaatctaagttgtttgatttctttgggatttcttttgttgtgaaacactgcaaagccaatttttctttataaaaattcatagtaatcctgccaaatgtgcctattgttaaagatttgcatgtgaagatcttagggaaccactgtttgagttctacaagctcatgagagtttatttttattataagatgtttttaatataaaagaattatgtaactgatcactatattacatcatttcagtgggccaggaaaatagatgtcttgctgttttcagtattttcttaagaaattgcttttaaaacaaataattgttttacaaaaccaataattatcctttgaattttcatagactgactttgctttwgacgtaaaaattttttttctcaataaattatcactttgagaaatgaggcctgtacaaggctgataacctatatgtgatggagatcacccaatgccaagggcagaaagc

SEQ ID NO: 359833 - DNA, 616 bp, Homo sapiens
gttgtttttgtttccatagcctgtttaagtaggttgtaagtttgaatagttagacatggaaattattttataagcacacactctaaagatatctttttagatgataaaatgtacacccccccatcaccaacctcacaacttagaaaaatctaagttgtttgatttctttgggatttcttttgttgtgaaacactgcaaagccaatttttctttataaaaattcatagtaatcctgccaaatgtgcctattgttaaagatttgcatgtgaagatcttagggaaccactgtttgagttctacaagctcatgagagtttatttttattataagatgtttttaatataaaagaattatgtaactgatcactatattacatcatttcagtgggccaggaaaatagatgtcttgctgttttcagtattttcttaagaaattgcttttaaaacaaataattgttttacaaaaccaataattatcctttgaattttcatagactgactttgcttttgacgtaaaaattttttttctyaataaattatcactttgagaaatgaggcctgtacaaggctgataacctatatgtgatggagatcacccaatgccaagggcagaaagc

SEQ ID NO: 359834 - DNA, 561 bp, Homo sapiens
ctatttttaagcaggtaatctgacaacacatatacaatttttcaatggtacctaaagagtacattataaatgggaattccatttatgtctaatatcttaccccaccccctctcaccttcagcaatactggagaaatgaggtcggagagtaaagttaaattcaaagcatttgatttatttttaaaattattagccataagtagctggacatttgtagcactcgtccactgccaaatgtaaattcattagtactgagtgtttcctgatttagttccaacaagaaatatgcagcaattaggttatggttgaaaaaccagcgtgctcactctaaagtcactgtgtctgcagatttgtgattcagaaaaggagaagccatgtctcatgggasccccctcctcccaaccttggccaagatacttgtagacattctgcagtgtttatacaagctagctctaggcaagctggctaggagtatgatcctcaaaaataaaggtaagcactggcaaagaaattgtgcagtgaaagcaggttattgaatttcctttctcaaatgtttactaac

SEQ ID NO: 359835 - DNA, 546 bp, Homo sapiens
cttctctgctatctgattaggacatattacaaaacaatctatctattgkgatggataacatatgctttaaaatctgttttacttaatattatagaaaatatatttctagaaagccagattttcattttttatacacagtaattttatactatatagaagtcttcaaatgaataatgtacatatgtattatttaagacatacaggtgttatctgtaaagtaaaaccgacaagtcattttttatgctgaccagctgtgaaatgttgttttagcttttctcacacaattatgcacatattacttgcttttatgagttacttgagttctatttttccttattttccaaaaatcatcaaaaatcaaaccttactagaaacacatggaaaatcaggaatttccagcagaaagtaatttgaaacatttgaggttttctttcccttccttcataatggcaaatttcaagcaaagttttcaaattacttaatgagtagtagctgtaattgtagtaggagttgtttctcggttctataattatgtatatatatttt

SEQ ID NO: 359836 - DNA, 546 bp, Homo sapiens
cttctctgctatctgattaggacatattacaaaacaatctatctattgggatggataacatatgctttaraatctgttttacttaatattatagaaaatatatttctagaaagccagattttcattttttatacacagtaattttatactatatagaagtcttcaaatgaataatgtacatatgtattatttaagacatacaggtgttatctgtaaagtaaaaccgacaagtcattttttatgctgaccagctgtgaaatgttgttttagcttttctcacacaattatgcacatattacttgcttttatgagttacttgagttctatttttccttattttccaaaaatcatcaaaaatcaaaccttactagaaacacatggaaaatcaggaatttccagcagaaagtaatttgaaacatttgaggttttctttcccttccttcataatggcaaatttcaagcaaagttttcaaattacttaatgagtagtagctgtaattgtagtaggagttgtttctcggttctataattatgtatatatatttt

SEQ ID NO: 359837 - DNA, 591 bp, Homo sapiens
gcaagatatttatcaatcatattaaaaaatctcaaaataaatgaaaactagatgttcttaaagggagtttatgatatttttatctgagccttaaaactcactaatttttaaaaagagatatatagtagaaactgcaaatcctatttcaattcaatattctgtttagttcgagttgactaagcaagcttgtccgttgaaaaatgagactggaatatcccttttttttttttttctttcaaaatagtctcttagtatcttaragttggaattgatataaagatgattggtttaattctgttatttttcaaatgaggtccacataggaaaagtggccttccagaggacatatatttagttgggggcaaacatgaaatcaattctctttcttagttcagatctctttccaatatattacattcaagactattttacttactaggcaatacaatcacactgcctaagcaccctgattttctgagggcatataacaatgcttgagacctggggtagagaatatgtattggcttccaaatgtctaagaatattgcaaagctaaattcataactatatcattaagtacctatacaatgt

SEQ ID NO: 359838 - DNA, 591 bp, Homo sapiens
gcaagatatttatcaatcatattaaaaaatctcaaaataaatgaaaactagatgttcttaaagggagtttatgatatttttatctgagccttaaaactcactaatttttaaaaagagatatatagtagaaactgcaaatcctatttcaattcaatattctgtttagttcgagttgactaagcaagcttgtccgttgaaaaatgagactggaatatcccttttttttttttttctttcaaaatagtctcttagtatcttaaagttggaattgatataaagatgattggtttaattctgttatttttcaratgaggtccacataggaaaagtggccttccagaggacatatatttagttgggggcaaacatgaaatcaattctctttcttagttcagatctctttccaatatattacattcaagactattttacttactaggcaatacaatcacactgcctaagcaccctgattttctgagggcatataacaatgcttgagacctggggtagagaatatgtattggcttccaaatgtctaagaatattgcaaagctaaattcataactatatcattaagtacctatacaatgt

SEQ ID NO: 359839 - DNA, 591 bp, Homo sapiens
gcaagatatttatcaatcatattaaaaaatctcaaaataaatgaaaactagatgttcttaaagggagtttatgatatttttatctgagccttaaaactcactaatttttaaaaagagatatatagtagaaactgcaaatcctatttcaattcaatattctgtttagttcgagttgactaagcaagcttgtccgttgaaaaatgagactggaatatcccttttttttttttttctttcaaaatagtctcttagtatcttaaagttggaattgatataaagatgattggtttaattctgttatttttcaaatgaggtccacataggaaaagtggccttccagaggacatatatttagttggkggcaaacatgaaatcaattctctttcttagttcagatctctttccaatatattacattcaagactattttacttactaggcaatacaatcacactgcctaagcaccctgattttctgagggcatataacaatgcttgagacctggggtagagaatatgtattggcttccaaatgtctaagaatattgcaaagctaaattcataactatatcattaagtacctatacaatgt

SEQ ID NO: 359840 - DNA, 601 bp, Homo sapiens
cccactatcatctacttcctgaaagcagacttttgcttcaatatattctagctgtcaaacattatggcacatttttctgtttctgcctcattagaaagaatcactaggagagattctttgcagtaattatcacacaaacttctcatctttattaggtgttatcttctggctcatttggcaggaagatttgaggagcaaatacccataaacttcacgatcacctacaggctataaggaatgagattgcatatacaggctggattttaagttgatratgtttcatactttacttggaaacatagtcctgaagcgttgcatattggaaaggatattaatgttatattaatattagagatgtcatgaatttaactcgtatatctgctatttactggttttctttgattctgggatagttaccttaattttctcatttgtaaaagtctacaacataggatagcaaggcataatattttggggtgatgaaatgaggtgctctatttaaaagaatatttcttacacagacttataaagaaagatatattgtatcatcagtgatattaattcatgggactccagtttggtggcccatgccatatgattg

SEQ ID NO: 359841 - DNA, 529 bp, Homo sapiens
aagaaaaaacagtaaatgattgtggctaagcagtagagtggggaaaataggattccaaaaaaacacggtagcatctggcattgtktttaaactaaaaaaatcaaaaactaaggttttaccctaatcaagatatttccaaaacagtcatatttctgaatattttaattaaagtccatcagttgagaattctctcaattcaaactaaaaagtcactgttattaaagaagtttagttctataatctgattcttttctaatgtgttttgctactggtgaaagcatatgtcaccatctatcatggaggcttgataaggtttggctgtgtccccacccaaaccacaccttgaattgtaataatcctcacatgtcaagggcagggccaggtagagataattgaatcatgggggtggtttcccccatactgttctcctggtagtgaataagtctcaccttgatctgatggttttataaatgggagttcccctgcacaagctctcttgcttgctgccatgtaagacatgtcttgcttc

SEQ ID NO: 359842 - DNA, 624 bp, Homo sapiens
  misc_feature (1)...(624): n = A,T,C or G
gtgattttttttcttttatgtttaggaagtttcctcttccctcccacataaagagtgtctagtaatatcaaagcttgttggctggtgtggtggctcatgcttgtaatcccaacagtttgagacaagccctggcatcatagtgagaccctgtctctacaaaaagtaaaaaaataaataaataagtaataaataaataaattagccaagggtggntggtgtgcaccctgtagtcccagctagtcagaaggtatgaggatcatttgaacccaagagatggaggcttcagtgggctttgatagcatgactgcacaccagcctgggtgatrcagcaagactctctctctctctctctctctctccatatatatatatatgtgtgatatatatatatggatatatgtgtgatatatatatatatatatcactgattactagaatactcataagtaaaagtatataacaatcccagaatatcaatgaggacaataaagttagctaacaatcactggtcctttgatatatgtcaagcacatattctaatcactttgcatgttttatatcatttaattcttacaaaatgccatgaggtaagtaccattagtgggtcacccaagagagagaatg

SEQ ID NO: 359843 - DNA, 595 bp, Homo sapiens
ctggtagaaatttaacaatatagattttggtaccagcaggtagggtataggatgccaatataacaagtaaatatgtggaggtggctttgaaactgagtaatgagtagaggcttgatggattttgagacacaggatagaaaagatctagattgccttaaatagactttttgtagaaatatggattttaaaaacacttctggtaagattcagraaaaaatgaagaacatgttattggaaactggaggaatggtaattcttgttatacagtggcagcttgttaactgaattgtgccctatagttgtgtggaaagcaagacttgtaaagcaatgaatttggctatataactgaggaaatttcaagcaaaatgttgaaagtgcagctcaattgcttctttctgctgatagtaaaatgagggtggaaagaggtagagtgaaaaaaagaacaattaaggaaaaaagaatctacatttaattatgggtaaattctcagcctatccagattggaaacaaaaatgctaaaatttggtgattcactcattaggaaagggtgctctggagagaagatcaaaagtgtggctggacaaccttttgctgg

SEQ ID NO: 359844 - DNA, 543 bp, Homo sapiens
ggaaattctaaccatagaaatagccatattggtttcaactctggggacatggaagatgcaatcatcatgcttcagtggagcttctcagctctaacttccagtacctacctactcaataggcggatatgggacaggaattagccatgagatagcagtttatatggtagaaggtggattgctatgagattcttgcatcttattttgatagatctttcttgttaaatcgttgttgattatatcacaataaattaaattatagaactgattgtactgcatgaactcaaaattttgtcgatcctagaaaatgggttatagatttgatgagtttccttccttttgctrtaagctccatgatgggctctccatgatggcaaggactgtatcttgttcgctgtctctattagaatgtgaaacacatactaaataatcagtgattatttgaatgattcttgaataaggttttcccagaacaaataacattgtttgtttggaatacattacaaactcaatacacggtaaagtgtggacaagcgtcaggaagag

SEQ ID NO: 359845 - DNA, 543 bp, Homo sapiens
ggaaattctaaccatagaaatagccatattggtttcaactctggggacatggaagatgcaatcatcatgcttcagtggagcttctcagctctaacttccagtacctacctactcaataggcggatatgggacaggaattagccatgagatagcagtttatatggtagaaggtggattgctatgagattcttgcatcttattttgatagatctttcttgttaaatcgttgttgattatatcacaataaattaaattatagaactgattgtactgcatgaactcaaaattttgtcgatcctagaaaatgggttatagatttgatgagtttccttccttttgctataagctccatgatgggctctccatgatggcaaggactgtatcttrttcgctgtctctattagaatgtgaaacacatactaaataatcagtgattatttgaatgattcttgaataaggttttcccagaacaaataacattgtttgtttggaatacattacaaactcaatacacggtaaagtgtggacaagcgtcaggaagag

SEQ ID NO: 359846 - DNA, 543 bp, Homo sapiens
ggaaattctaaccatagaaatagccatattggtttcaactctggggacatggaagatgcaatcatcatgcttcagtggagcttctcagctctaacttccagtacctacctactcaataggcggatatgggacaggaattagccatgagatagcagtttatatggtagaaggtggattgctatgagattcttgcatcttattttgatagatctttcttgttaaatcgttgttgattatatcacaataaattaaattatagaactgattgtactgcatgaactcaaaattttgtcgatcctagaaaatgggttatagatttgatgagtttccttccttttgctataagctccatgatgggctctccatgatggcaaggactgtatcttgttcrctgtctctattagaatgtgaaacacatactaaataatcagtgattatttgaatgattcttgaataaggttttcccagaacaaataacattgtttgtttggaatacattacaaactcaatacacggtaaagtgtggacaagcgtcaggaagag

SEQ ID NO: 359847 - DNA, 557 bp, Homo sapiens
cctgccttctctcttggaaagctgacctgtgggggcgacagaaggggccctaatgatagtttgacttaagatgttttgattttacaatagcacaaaaggatacacactcagtagaaatgtggttggaattttgaattgtgatcttttcctgggctggagaagttggggaagatactcttccrcaatgctgggcagtggccgggagctgcagctgccagtcagccacgtacactcaagggtagcaatcatgagataacactatattataaaatagaggtgaatatgcccaactgtaagctaatgtaagtgttctgaacatgtttaaggtaggctagtctaagctatgatgttcagtaggttaggtgtattgaatacattttcaacttatgatattttcaagttactgtgggtttatcaggatgtatccccattgtaacttgaggaacatctgtatattagcggacatcattgtcttctggcttctgttgcatttggtcaaaaaagaggaggcaagtgaatttatttgcctccaaagccatcttcttgtggggttgcct

SEQ ID NO: 359848 - DNA, 557 bp, Homo sapiens
cctgccttctctcttggaaagctgacctgtgggggcgacagaaggggccctaatgatagtttgacttaagatgttttgattttacaatagcacaaaaggatacacactcagtagaaatgtggttggaattttgaattgtgatcttttcctgggctggagaagttggggaagatactcttccgcaatgctgggcagtggccgggagctgcagctgccagtcagccacgtacwctcaagggtagcaatcatgagataacactatattataaaatagaggtgaatatgcccaactgtaagctaatgtaagtgttctgaacatgtttaaggtaggctagtctaagctatgatgttcagtaggttaggtgtattgaatacattttcaacttatgatattttcaagttactgtgggtttatcaggatgtatccccattgtaacttgaggaacatctgtatattagcggacatcattgtcttctggcttctgttgcatttggtcaaaaaagaggaggcaagtgaatttatttgcctccaaagccatcttcttgtggggttgcct

SEQ ID NO: 359849 - DNA, 544 bp, Homo sapiens
gaggagtttagttacacaatacctttgatcatatgtggagaaccaaggaacgtaatgaagctggttggttgctcctaagttcagtggacaaagtgataaaagaaaatgatgaactcaaggattctgtctcccaatttcagaagcagatactgagcctcaaatctactaagattkccctgagtatctcctgtagagaaagagttcaaactgtggaaaaacagtcacaagctcttatcatgcgagtggctgacttgcaaggaaaagtgcatgcgcagccttgccaggtgtctactgttaaaatgagggcattgattagaagagaatgggaccttgaaacttgaaacattcgtgaatgtgtaggaggaccctgatgaagctggggacactgagtttgtaaactctgatgacccttttctatttgccagaaggaacagcttccccatccccagtagtggcaatatccactcccctccccgacccatgctaccatcatcctttccacctttgtctgaggaggtaaaccctgtgttgcctgaggcaacag

SEQ ID NO: 359850 - DNA, 650 bp, Homo sapiens
atcagattgggcctcctagtgaataaaaagctggcccaacatcaataaaattattgtttttaaggaccatatgtgcagcaggtgaaatctttattattacaagtcaataataaaagtttgacaagttaaaatataaactcaaaatgtaaacttacactaacttgaaaactttctgcagttcacatttggattgtaaagtggctgtaaacacattcctgcctccactcgaggaacatggatggggactgtgtttttgatagtttgaagtgactttctgaaatgtcttaacaatttagccaacatttacatgcatataacacaagaaggaaagcactttttgactgcctatccagaatcaatgtcaatcaatatccatcttccaraagtctgtattggcatcagttgattagttaccttcaaaatctagcagcttttttgaaagaattagcagaaaaaaagaagtgttctagtttcaaatggtatatgaaaagagtaagttttcataattgttcatttttaacctgtgtcattttgacttcaaataatttaatgccgtgggtagaaatggtgtcagatagagactacagctctgcctctatttaccttatgagttaattatcaaggtaagatttttttttaggtggggggct

SEQ ID NO: 359851 - DNA, 484 bp, Homo sapiens
tggtcgagcacaccctgccaaaacaagcagccaaaaggcctgactttatgtcctagcctaggcactgtatgggatcctggggaagttatttagatactttgtgtacttttttcctcatctgcaaaagagtgacaattataacacatgcctcattgggtttttatgaaggttagcaaggttaagaatttgaattggtgtgcaatacctagtacatggcaaataaataataaatgtattattgttattttaaattacccactatagcagttaagggttttgttttaactctttcattttcacttaaattttgcctcagagattacctctgactttgttctgatagaagcttttggaagagaatcactaaggctgcgagcaataaagaagtttaagacatttcagttactaaggctggagaaaagtctgatgcaaataagtagaaaatccaraaaggtgtataaagatgcacaacttctatgtggac

SEQ ID NO: 359852 - DNA, 623 bp, Homo sapiens
ttaagtgaagtttctgaggatgtttgaagagataaatgaagaaataagtttgattaaaaagaatagaatatttggtaaaatgaaggtaaaatataaagtaaaagggccaggcgcagtggctcacgcctgtaatcccagcactttgaaaggctgaggcggggggatcacaaggtcaggagatcaagaccatcctggctaacacagtgaaaccccgtttttactaaaaatacaaaaaattagctgggccgtggtggcgggtgtttgtagtcccagctactcgggaggtttaggcaggaraatggcgtgaacctgggaggcccagcttgcagtgatccgaaatagcccccctgcactccagcctgggtgacaaagcaagactccttttccaaaaaaaaaaaaaaaaaaaaaaaagtaagaggaagtaataaactcgaaatcttgaaagtaaaaaatatatatttaaaaaacataaaactattttaatggattccgtaaatggtgcatacatttgaagggaattagtgatttggaggaaggtaccttcatctaaagttcttcataatagagacacaaaaggccaggtaaatggtgtataggttaataaggagggtagcaatagaata

SEQ ID NO: 359853 - DNA, 623 bp, Homo sapiens
ttaagtgaagtttctgaggatgtttgaagagataaatgaagaaataagtttgattaaaaagaatagaatatttggtaaaatgaaggtaaaatataaagtaaaagggccaggcgcagtggctcacgcctgtaatcccagcactttgaaaggctgaggcggggggatcacaaggtcaggagatcaagaccatcctggctaacacagtgaaaccccgtttttactaaaaatacaaaaaattagctgggccgtggtggcgggtgtttgtagtcccagctactcgggaggtttaggcaggaaaatggcgtgaacctgggaggcccagcttgcagtgatccgaaatagccccmctgcactccagcctgggtgacaaagcaagactccttttccaaaaaaaaaaaaaaaaaaaaaaaagtaagaggaagtaataaactcgaaatcttgaaagtaaaaaatatatatttaaaaaacataaaactattttaatggattccgtaaatggtgcatacatttgaagggaattagtgatttggaggaaggtaccttcatctaaagttcttcataatagagacacaaaaggccaggtaaatggtgtataggttaataaggagggtagcaatagaata

SEQ ID NO: 359854 - DNA, 621 bp, Homo sapiens
ttcagtgtagtggatcaaaaagatgcattctgggtaatgccctaaactttaggaatagggtcttctttcctttgaatggaaaaattctataactaggagaaaacaatagtactgytggactgtgctgccacaaggtttaatggaagccccaaacttattaggtcaaatcttagaaaaagtcctggaggaattacaaacttccagtggaacccagttgttacaatatgtggatgattttttaatttctggggagagaggagggctgagttatcagaaaccactataagcttgcttaatttcctaggagaaaggggattgcaagtctctaagaacaaattgcaatttgtagaaaaagaagttaaacatttaggacacctgattagtgaagggaagtggagaataaacccagagaggatatcaggaattagtgggtctgcctttgcctaagacaaagagagaactccaaaaagttttaggtttaactggctactataggttgtggattgactcatatgctcaaaagacaaagattctgtacctcaagttgttggaaaagcaacctgatcttttgcaatattccccagaggaaattcaggatatgaaagagctaaagcatgccct

SEQ ID NO: 359855 - DNA, 613 bp, Homo sapiens
cgtgctggtagaagagagttgaaagctaacctttggtggggtcttaatagtaagcaccccacaccaggtcaggaatatattaaatcaaaaagctgggagatggttaaygaactcttggcttctaaaatatgaagccctgttgctagaaaaggatgatttggtcgtaacaacaaatacttgcctgaatccagccagtttcccatggaaaagagagaagaacaaagagacatcagaccataactgcttagatatcacagaataccaaaccaaagttagaccagaccttagggaagctccactacatgattagataaggctgtttgtggatgggtcatcccgagtgatagacggcaaagagacataatggttatgctgtcattgatggaaataaatattccttatgtgagaaaggtagattacttaatggctggtcagcctaaacctgtgaattatatgctctttatcatgccctaaagctccttgaaggccaagaaggcactatatatactcattctaaatattcctatggggtggtacacacttttggaaaaagctggatggagcacggcctaatacatagcagggaaaaataattgatacaagggggttttag

SEQ ID NO: 359856 - DNA, 613 bp, Homo sapiens
cgtgctggtagaagagagttgaaagctaacctttggtggggtcttaatagtaagcaccccacaccaggtcaggaatatattaaatcaaaaagctgggagatggttaatgaactcttggcttctaaaatatgaagccctgttgctagaaaaggatgatttggtcgtaacaacaaatacttgcctgaatccagccagtttcccatggaaaagagagaagaacaaagagacatcagaccataactgcttagatatcacagaataccaaaccaaagttagaccagaccttagggaagctccactacatgattagataaggctgtttgtggatgggtcatcccgagtgatagacggcaaagagacataatggttatgctgtcattgayggaaataaatattccttatgtgagaaaggtagattacttaatggctggtcagcctaaacctgtgaattatatgctctttatcatgccctaaagctccttgaaggccaagaaggcactatatatactcattctaaatattcctatggggtggtacacacttttggaaaaagctggatggagcacggcctaatacatagcagggaaaaataattgatacaagggggttttag

SEQ ID NO: 359857 - DNA, 561 bp, Homo sapiens
gtcagcctaaacctgtgaattatatgctctttatcatgccctaaagctccttgaaggccaagaaggcactatatatactcattctaaatattcctatggggtggtacacacttttggaaaaagctggatggagcacggcctaatacatagcagggaaaaataattgatacaagggggttttagactcaaacaggttttagaaagtctcctgcttccagcagaggtagccataggtcatataaatgatcatcagaaagggaacattatagaagctgtaggaaacaagcttgcagatgaagctgctaagtgagcctccctggagaaagaaattagaytatttatcctgatcccagacatccctaaggtagtattaaggccccagtttaccagagagaagaaggaagaattagacagaagagggataactcaaactgaagatggaagatgggaaatgggtacttcctgatgggagagaaatgataagtaaatccctgatgagagaattaatgtccatattacaaaagggaatcattggggaccccaggctctgtgtgatgcaat

SEQ ID NO: 359858 - DNA, 559 bp, Homo sapiens
acttctccttgatgccactatgtgaagaagggcatgtttgtttctccttccaccatttttgtaagtttcctgaggccacctcagccatgatgaactgtaaatacattaaacctctttccttaaytgattatgcagtcttgggtatgtctttattaacagcatgagaacagactaataaacctgctgactataccttcccacttcatgggtgaagaacttgcttgaatctatggcatagatgatgtctagggaactcagagattactgagagcaagaggctaggtcacagtgtaggtaggtgtgactattactagttggtaggtgtgcctaccaactaggcatctccacttcaaaggtggaggtcacactcacactcatgggtggcacttggggctaatgtgtttattacacactctcctgaggtaccttttggcccaaatttcattccaagctttgggttgaagccctaaaaagaaagaaaactagatctgatggacccagaagcagttgacagtggaaggccagggcatagcacaagtgagcatgactattactgctg

SEQ ID NO: 359859 - DNA, 559 bp, Homo sapiens
acttctccttgatgccactatgtgaagaagggcatgtttgtttctccttccaccatttttgtaagtttcctgaggccacctcagccatgatgaactgtaaatacattaaacctctttccttaactgattatgcagtcttgggtatgtctttattaacagcrtgagaacagactaataaacctgctgactataccttcccacttcatgggtgaagaacttgcttgaatctatggcatagatgatgtctagggaactcagagattactgagagcaagaggctaggtcacagtgtaggtaggtgtgactattactagttggtaggtgtgcctaccaactaggcatctccacttcaaaggtggaggtcacactcacactcatgggtggcacttggggctaatgtgtttattacacactctcctgaggtaccttttggcccaaatttcattccaagctttgggttgaagccctaaaaagaaagaaaactagatctgatggacccagaagcagttgacagtggaaggccagggcatagcacaagtgagcatgactattactgctg

SEQ ID NO: 359860 - DNA, 503 bp, Homo sapiens
ttctttgacttgcagagtaatcaagaactttgcctatgttgtaggattgattcagccctcctagggaccatctcaggaaaggctacataggcaatcccatgggactaggaaagcaaaccccaragatatctccagtgggggagtcagctatctctagtgggggaatcagctacctctgatggggatccagctccctccagtcctgcacctcctggtccaccttgtcctccctatccaggttctctctcaaacttgccccatcctagaaatcctcattttaggcagggctcagtctcactcctgccgatacaagagatgtctagttaatatgtccccattaaagtccaggtccccttgtctatacaagacttaaggcaaattaaggggggtcttggcaagttttcagatgaccctcacttgcatatagagactttccagaatttaattcaagtatttgaactcttctggaaggatgttatgttacttttgaatcaaaccctgct

SEQ ID NO: 359861 - DNA, 577 bp, Homo sapiens
gagtttgtgaagtatgccaaagtcatatagaaacctgaggtaatgttttcatacttttaagttcatcttttttattttataagcttctaaagatcactgaagttttaatttttatcctgaatactatgaagattggtgaagaaaaaaacatgtcatgattgaaatcaacattatatctgttagtccttttgggacagtaaaaatcattttgcttcactcttttctctaagaaaatgtttacatataattattacatttaatctatgtttcttctgtttagacagtggcttagatcatgggtcagtaaatattttaactattccagttattaatattttaggctttgcataccatagggtctctgctgcaactacttggttctgccaatgtattgtgaaaacatccataagacaatacataaatgagtgggcagacatgtgttcactaaaattttatttataaagtcagcaatctataagtcataatttgctgaccctttaratcagtgtagttcaatagaatttttacattaacggaaatgttctgtctgtgttgtgtaacatgaaggatactagcc

SEQ ID NO: 359862 - DNA, 620 bp, Homo sapiens
ttaattaaataattcgaacaaaaacctttacataatgtctaacaaatcccaattttgagttaagtgtattggtaagagtcttaactmcccccaacataaataggttgcccatctctttcttgctcaccccactctatttctctgctcaactcactgtctagtccctacctatatagaatcatcttcttataaaacaaccaaatgtattaataaggcatagaattgtggtaagtgttgatgatggaacattgcagggacaaatacggtaccagtttctctcttggcaccacttttaactacctgccatgagttttcatgtattatactcagtatcattttttttttaaatagagagactagatgaaatttaataaaactactcattttgtttgtttttgtagcttataatactgatataatttcaaatgtagagaagtttcaagaatatttcaataaatttgtagatacaccttatccagatttgcattattttaaaaacaagttgtctcctttgctttattttctagaagacagatgatagataaacagacaggtaagtcagtaatttggagacattttacatgtttactcctaaatagtttatggtggatttgctaata

SEQ ID NO: 359863 - DNA, 646 bp, Homo sapiens
ttgttttttcaaatttgaatgtctttgtaatattccattttctgtgtataataaaatgtgttcatttactctattgtttatagatatttagattgttttaaatttgtagctgttaatagtaaagctactgacatggtttrgcagtgcccccacccaaatctcatcttgaattcccacatgttgtgagaggtacctggtgggcagtgattgaatcatgggggcaggtctttcccatgctattctcatgatagtgaataagtttcatgagatctgatgattttaaaatggggagttttcctgcacaagctctattctcatgtctgccaccatgagaaggtggctttcaccttctgccatgattgtgagccctccccagacacatggaactgtaagtccaatagacgtcttgcttttgtaaattgcccagtcttgggtacatcattatcaccagcctgaaaatggactaatacagctactatgatctatcttgtacttttttgctagcatatgtttttatttatcttgattaaatattagtggaattgctaaagcatatggcatgtatttctatatatttacaataaactatcaaacacctttccaaattgtgcaattttatgtttatcccagcaatgtatgaatgctc

SEQ ID NO: 359864 - DNA, 561 bp, Homo sapiens
ctggtcacccaaaaccataactacaatggaatgatctagacagcaaggtcacaggcataattcatggagtcagttaaagatgtagtgctggagtagttcttataagcaccttagttttgaagtgctataaacttcaattatttcttaacttacatgaagtgcttatatacttcatacaagttaagaaataattgaaaacagaattttgtaagggttaagtgtatgtttaacattcacttgagggacctaaatatcggttgctcctactggcacaaaatattgaaataattgccagtgattggcggtgcagcaggcacatttaaattacaatcatgaatgggcgcggtggctcaygcctgtaatcccagcactttggcaggccgagctgggaggatcacttgagctcaggagttcgaggccagcctgggcaggacggtgagaccctggctctacaaaactaaataaataaggaagcagtaaattacaatcatgaataaatcatctgtcacatattctccttttcattcaccaaaaccttgtgaagttaacaaacacagtctc

SEQ ID NO: 359865 - DNA, 561 bp, Homo sapiens
ctggtcacccaaaaccataactacaatggaatgatctagacagcaaggtcacaggcataattcatggagtcagttaaagatgtagtgctggagtagttcttataagcaccttagttttgaagtgctataaacttcaattatttcttaacttacatgaagtgcttatatacttcatacaagttaagaaataattgaaaacagaattttgtaagggttaagtgtatgtttaacattcacttgagggacctaaatatcggttgctcctactggcacaaaatattgaaataattgccagtgattggcggtgcagcaggcacatttaaattacaatcatgaatgggcgcggtggctcatgcctgtaatcccagcactttggcaggccgagctgggaggatcacttgagctcaggagttcgaggccagcctgggcaggacggtgagaccctgrctctacaaaactaaataaataaggaagcagtaaattacaatcatgaataaatcatctgtcacatattctccttttcattcaccaaaaccttgtgaagttaacaaacacagtctc

SEQ ID NO: 359866 - DNA, 580 bp, Homo sapiens
attatatcttccccaaagtagccataaatctagcatactgaaaatcttcataagttttatgtgtgcaaaactaaaggtaattaaaaccaggtagtrtaatagaaatgtaattcagaaatatatttgtaaagatgttataagagccaagccaaataaggaattttgagaaattccagtgctagaaagagctggaaaattctaaaacccttaatgcttagggaccaagggaggttcatcaaggcacaagaacctgggctgctcagtgggaactcagattttgaaaaagatgcagccattgtcagagattctgccaacagcagaaatagtgagagaaataccctaggtttctcttttctcctgtcaccaatctcttttcagtactttccatcatgcaaacttatagaaaatgagttgccaagagaatctgcaaaatgtgatttgcaaaagtgtgggaaagctattaaagaacagaaaagcaaatgacttgactgtcagactctagctataatatttgctaatccatgtgtattctaacttttctatacatatttcacagaactaagctttgtgctttcaccta

SEQ ID NO: 359867 - DNA, 600 bp, Homo sapiens
cctgttctcctggttatcaccagtggaggctgcagaacagcaaagattgttgcttgttccttcccctggaagctttgtcccagagggccaccggcctgatgcctgccagagccctcctgtatgaggtgtctgtcaacccctgctgggaggtttctcccagtccaggaggcatggggatcacggaccctcttgaggaagtagtctgtctcttagcagagctggtgcactgtgctgggagaatccctcttgtcaggatcagttgctctcttcagagccagcaggcagaaacgagtaaatccggtaaagctgggcgcccagccaccccttccctcaggtgctttgtcccagatagatgggggttttgyctgtaagtccctgactggggcttgtatcttctcttcagagatgccctgcccagtgaggaggagtctagaaaagcagtctggccacatctgctttgctgcctacagtcccaatctcccagcctccttagcactgtcaggggaaaatcacctactaaagcctcagtaacggcagacatccctccccacgcgaagctggatcatcccagatcaacttcagccggctgtgctggcagtg

SEQ ID NO: 359868 - DNA, 601 bp, Homo sapiens
actgttgcaatatcttttttattgctgtatacttaacaaatttttccattaagaaagcagcatttatgaattccaacacatgtacataaaatacaaatgttccaaaggaattgattggtttcagatgaatgaacatttcacccatctagtgagtagtttttatgttgtctgaatttttctctaagggcttaaaagataatgctattgaacaaactaaattatattcccccatctcaacatcattagaataatgtatttgacaacaatatagttcatatagcacaagaaataacaaatatgatgaaacatacagacatcacatgcaaacacacacacacttatagacasatgcacatattttccttgtaccatcacagcatttttagtggatatatatttttttctgctgctcaagattgaaccatgcaccccactcctaatttttctgtctcagttcctttaattatcattctctgccctcactatttaattgctccattttcactgacttccctcctttgcctacaacatattctaaaacctaataaactaatgacatattgaaacaggcagaaaaacagaacatgcaacttctgacatt

SEQ ID NO: 359869 - DNA, 593 bp, Homo sapiens
aaattattgttagattgttttcaatatgcatataagttgttatcctcaatttcagtacttatgtctcaaactatgacctaacatttatcagataagcctgggtccaaagccacatctctttatcattataactattttcgctcaaaaatgactttaccttgtaatgcctaaagattaaaaaaaataatgtstggtttccattagttggaatatgcaatattctgttttcaataatggattgaagaggtagacaaaagaccaagaacgaatataaatgaacaaaactacaaaccatctaaacctaatcaacaactatagaacattttacatgagaatatgtattctctccatgatagatcataccataattggatcctaaaacaatctaaataaatataatggaattaagaagatacaaattatgttttctgaccccaactaaataaaattaattgaggatttggaaaattgacaaatatgtagaaattaaacatatttctaaaatatattcaattaagacatctaaaaagaggctgggcagggtagctcatgcctataatctcagcactttgagaggcctaggtgggtgggcc

SEQ ID NO: 359870 - DNA, 593 bp, Homo sapiens
aaattattgttagattgttttcaatatgcatataagttgttatcctcaatttcagtacttatgtctcaaactatgacctaacatttatcagataagcctgggtccaaagccacatctctttatcattataactattttcgctcaaaaatgactttaccttgtaatgcctaaagattaaaaaaaataatgtgtggtttccattarttggaatatgcaatattctgttttcaataatggattgaagaggtagacaaaagaccaagaacgaatataaatgaacaaaactacaaaccatctaaacctaatcaacaactatagaacattttacatgagaatatgtattctctccatgatagatcataccataattggatcctaaaacaatctaaataaatataatggaattaagaagatacaaattatgttttctgaccccaactaaataaaattaattgaggatttggaaaattgacaaatatgtagaaattaaacatatttctaaaatatattcaattaagacatctaaaaagaggctgggcagggtagctcatgcctataatctcagcactttgagaggcctaggtgggtgggcc

SEQ ID NO: 359871 - DNA, 593 bp, Homo sapiens
aaattattgttagattgttttcaatatgcatataagttgttatcctcaatttcagtacttatgtctcaaactatgacctaacatttatcagataagcctgggtccaaagccacatctctttatcattataactattttcgctcaaaaatgactttaccttgtaatgcctaaagattaaaaaaaataatgtgtggtttccattagwtggaatatgcaatattctgttttcaataatggattgaagaggtagacaaaagaccaagaacgaatataaatgaacaaaactacaaaccatctaaacctaatcaacaactatagaacattttacatgagaatatgtattctctccatgatagatcataccataattggatcctaaaacaatctaaataaatataatggaattaagaagatacaaattatgttttctgaccccaactaaataaaattaattgaggatttggaaaattgacaaatatgtagaaattaaacatatttctaaaatatattcaattaagacatctaaaaagaggctgggcagggtagctcatgcctataatctcagcactttgagaggcctaggtgggtgggcc

SEQ ID NO: 359872 - DNA, 516 bp, Homo sapiens
aaggccatgatttctgtttggggtatctgggaggcaagagattaagtacttcaaaagtatttccttaaagaaggaattgttgctacccttgcccaacagatgactagaccgttggcaatgtccaataacatcagtgtaaatgtgcagatgctgcttaattctggtgagggcatccattgccaagatggctactcaatgtttggctaatagtgctcaccccgagtcctgtccttagctagaggggtcctgcttaagagatgaaaaagcagaaactatcacctgagcttcatcatgttaaattatggcaatgccatctacaaagtatatgaacttcctctgatctttactcagttgatttccaatgactccccaggtgacaaggcactgggcgaaggatgacattccccatacggggactggcaagagactgaagacacggttgtgmgatatgccagagggcccagtttgggctctattctgtagccatgcctagcatgtaaggtactgtttccataa

SEQ ID NO: 359873 - DNA, 510 bp, Homo sapiens
tgtgatcatataaactgagcagttccacaatatgcagttggaaaactgtagacccaggaacgctaacagtgtagctccagtccacgtcctaatgtctgagaattaggagagcaaatggcctaaacattgagaagagtttgtgtccataaaaccsgagcacttttctattaaaaataaaaaatcagaatatgaaatatgatttaataaaaataaaagaaaaatgtgttctgactgatgtaaaatatagacttaaagataacatttgttatttataagataacttgaagaaattaaaaatgtagaaaaaggataaaaatattgaatatgttatttttaaaacagcagcaataaaagatagatctaagagatctatcatttctggataaaataaaagaattccattatcccattccaacaaaagaatagaaacaattagagactgaagaattatcaaataatgaaatgaagaaatttttctgatttgaagccatttttatcttcagatggatt

SEQ ID NO: 359874 - DNA, 552 bp, Homo sapiens
tttgactgtgtttagaatgtgatgtgctacaggtggctggactggtatggaggatgactactaatatgactggcctggaaagctgggtccagctctcttttcatgaagtttctgtgttcgtctcatgttctttctagcaggtagcctgccctctcacacaggaattgtaagtcccaagagcaagtctttcaagatgccggaagtgaaacttgtcaggctcttaagtccagggcctggaaactggcacagcatccattcagccatatttttgtgctcaaagcagttacatagccccctcagattgaacgggaggagagagagaacacatcacttgatagaagtagagtcaatgartttcttgccatcttgaacctgctgcagtctctgccacagaagaacctccatgcttatttggcctgaatctgatttttatgttacataggaatacgattttatattttaagcacctacagctatgtagggtgtttttcttataatgagtcttttgctatagaggacctctttaatttattactcttaagtactatatcc

SEQ ID NO: 359875 - DNA, 533 bp, Homo sapiens
gggctttagtaaaggtgagggaaggagactcagatgttgaagtcattcagtgctggtggtccttcaaaacacatggatgcatgaggtttctccaaatgtaaaattagagagtcagaaacagaatctcaaggagtttctgtttcttggcaaaaagagtggggccaaggtacagaaaaatggcattacagagatgggagagtcctgccaaatgtgggcagcttgcaaggaggcaagaggaaggaggcaatggagaggaggttcaaagggaggagayagtgggaaaggcccttcagcacacgaggagatgagaactagggactgggaccacagggagagaaaaagggaagaaccattgtaggagaaatgaatgtgggatcaactttcctcatgttgccagtcttctcagtgaaatcaaattatgtcttcccaaagaagaccaaaggtaggtggaaggggctggggaggtgaggaccagcattggagggtttgggatttgaagggagaagttttccaacatagaataaaaggaatta

SEQ ID NO: 359876 - DNA, 533 bp, Homo sapiens
gggctttagtaaaggtgagggaaggagactcagatgttgaagtcattcagtgctggtggtccttcaaaacacatggatgcatgaggtttctccaaatgtaaaattagagagtcagaaacagaatctcaaggagtttctgtttcttggcaaaaagagtggggccaaggtacagaaaaatggcattacagagatgggagagtcctgccaaatgtgggcagcttgcaaggaggcaagaggaaggaggcaatggagaggaggttcaaagggaggagatagygggaaaggcccttcagcacacgaggagatgagaactagggactgggaccacagggagagaaaaagggaagaaccattgtaggagaaatgaatgtgggatcaactttcctcatgttgccagtcttctcagtgaaatcaaattatgtcttcccaaagaagaccaaaggtaggtggaaggggctggggaggtgaggaccagcattggagggtttgggatttgaagggagaagttttccaacatagaataaaaggaatta

SEQ ID NO: 359877 - DNA, 570 bp, Homo sapiens
gagggtttgggatttgaagggagaagttttccaacatagaataaaaggaattagcccataaatcaggaggtcagagaagagtaggcaagttctataaccacacagggcactgattggataacacggaactccaggatgcagactggagattaagatgcaggcaacaggccgttagagctgatctaaatggcctcacttaatagctgacatttccaaggcttctcatctaacatcatttgctcctcagtccagtagcagctctgtgacatacagggatgagggccaggctgagactgtctttggaaaataaaagaaggtgtctagaaggctgggggaaattaagagagaaagggggtggttgagaataaaacagaagggcccaagtgattagcattttggagggagacacataagtaaagatttttaggaaaaatcaactttaaagaaattrttcaaaagagtttaagtaatttccccctaagtcacccagcttttccagactcaaacccagcggggtttctgcttctacgacctgtgcttgtagccttgcagctatgtttgaagttaaca

SEQ ID NO: 359878 - DNA, 559 bp, Homo sapiens
caatgcaattatgtcaatgaaagcttacttctcagtgtttcttttgaaacaccctgcagaaaagcaatggtccagcccttcccacagccttttaaccctgagattaagcatgtattaagagtcattgaggacaggcccagtggactcagtggtccagatctctttaaggaattcccggcctggatataagaccttcatccctcttctacagaggaaataaaaataggccaaagcgggaaatgaaacctataagcaaaggaagtaagacacaaacaacagtcagatgaattcctttaaagggacgggttacctgagccaaagcccttattaatgtgtaaartagagagtaaagttgtttcaagttagcacaaaagggcgtcttagcagcagacctctatcagaagaatcaaagtctatttttctgccatatttgccatcaaacacgtggttctcatgcggttatctcacacagaagcaaaaactagaggtggcagtaacgtttcttcctattgaagtaccagctgtgaactggccctgggctgcccaggagccatcaggt

SEQ ID NO: 359879 - DNA, 559 bp, Homo sapiens
caatgcaattatgtcaatgaaagcttacttctcagtgtttcttttgaaacaccctgcagaaaagcaatggtccagcccttcccacagccttttaaccctgagattaagcatgtattaagagtcattgaggacaggcccagtggactcagtggtccagatctctttaaggaattcccggcctggatataagaccttcatccctcttctacagaggaaataaaaataggccaaagcgggaaatgaaacctataagcaaaggaagtaagacacaaacaacagtcagatgaattcctttaaagggacgggttacctgagccaaagcccttattaatgtgtaaagtagagagtaaagttgtttcaagttagcacaaaagggcgtcttagcagcagrcctctatcagaagaatcaaagtctatttttctgccatatttgccatcaaacacgtggttctcatgcggttatctcacacagaagcaaaaactagaggtggcagtaacgtttcttcctattgaagtaccagctgtgaactggccctgggctgcccaggagccatcaggt

SEQ ID NO: 359880 - DNA, 602 bp, Homo sapiens
ccttattaatgtgtaaagtagagagtaaagttgtttcaagttagcacaaaagggcgtcttagcagcagacctctatcagaagaatcaaagtctatttttctgccatatttgccatcaaacacgtggttctcatgcggttatctyacacagaagcaaaaactagaggtggcagtaacgtttcttcctattgaagtaccagctgtgaactggccctgggctgcccaggagccatcaggtgagccttgattcactgtctcagtgtcaaagggacccacgggtgtctgaggtatctgaagtaactgtcattgccacccccacatccaccccaaagcctgggaatggatctaggctggtcccatccctacccaatctagagaaactgctagctcatagcttggttcagggaccccagaaccactcaagagaatcccaaattccagtttggtcctaatacctgaattttctagaaaataatgaattcctgggaagaccttagaataggcacagctacacaggcccttccatacgagtccaggcttaaggtgggcttcatgtaaagtgggcttcataagatgactaaacaaccatgtgctacgaagcta

SEQ ID NO: 359881 - DNA, 602 bp, Homo sapiens
ccttattaatgtgtaaagtagagagtaaagttgtttcaagttagcacaaaagggcgtcttagcagcagacctctatcagaagaatcaaagtctatttttctgccatatttgccatcaaacacgtggttctcatgcggttatctcacacagaagcaaaaactagaggtggcagtaacgtttcttcctattgaagtaccagctgtgaactggccctgggctgcccaggagccatcaggtgagccttgattcactgtctcagtgtcaaagggacccacgggtgtctgaggtatctgaagtaactgtcattgccacccccacatccaccccaaagcctgggaatggatctaggctggtcccatccctacccaatctagagaaactgctagctcatagcttggttcagggaccccagaaccactcaagagaatcccaaattccagtttggtcctaatacctgaattttctagaaaataatgaattcctgggaagaccttagaataggcacagctacacaggcccttccrtacgagtccaggcttaaggtgggcttcatgtaaagtgggcttcataagatgactaaacaaccatgtgctacgaagcta

SEQ ID NO: 359882 - DNA, 606 bp, Homo sapiens
aataaaggtcttttcaatgtggtcttaagagcatttgttcaattacagaagggttacatatcttactaaatttacttggatcaataacagaattaatcaactcatagataaaacagatcaaattacttgtcttccttgttctcctttggagcccttttgtcctttgatgttattgttttgtcctggattaccctagagaaagatttttaaaagtagtttagaatccagaaatatcagctttttccccaaaacggtatgatgttcaagtactaagctaatttgggtcaagctataagaggtgtgagaaattttttcatattygaaactcacaggattttggaaaaaatcaaagcagtacttcctcaagtttgaagaagatttggcaataaataaagaattaaaagggtgcctgctacatggtgattttcccttttctatgatggcagcttcactgatgcactggttcaaatattcttaggctattccctcaagggtgtaaaaagattcccccgtaactaagtctgcaaatagtgaatctgtaggtctgcaagattagaagtccaataaataaagctatggaaatgttctcccaaaggaaccagaaag

SEQ ID NO: 359883 - DNA, 606 bp, Homo sapiens
aataaaggtcttttcaatgtggtcttaagagcatttgttcaattacagaagggttacatatcttactaaatttacttggatcaataacagaattaatcaactcatagataaaacagatcaaattacttgtcttccttgttctcctttggagcccttttgtcctttgatgttattgttttgtcctggattaccctagagaaagatttttaaaagtagtttagaatccagaaatatcagctttttccccaaaacggtatgatgttcaagtactaagctaatttgggtcaagctataagaggtgtgagaaattttttcatattcgaaactcacaggattttggaaaaaatcaaagcagtacttcctcaagtttgaagaagatttggcaataaataaagaattaaaagggtgcctgctacatggtgattttcccttttctatgatggcagcttcactgatgcactggttcaaatattcttaggctattccctcaagggtgtaaaaagattccccygtaactaagtctgcaaatagtgaatctgtaggtctgcaagattagaagtccaataaataaagctatggaaatgttctcccaaaggaaccagaaag

SEQ ID NO: 359884 - DNA, 600 bp, Homo sapiens
gtaaattttatcccctataaccactgacacacagcagttaagactgtctctgtcaccaaattctccttctttgaagtattgaaaagaaaagtgttacctgagatcctggatcacctttttctccttttattccaggaaatccatgasagccctaaaagaagacaagaaaaacaaaattcccacttaaaaaaaattttagcaacctcatgacagttttatgatacttgaagaaatatggcttacctcttccccatcaagtccatcaatcccatcgtctccatgacctccctgagagatgacaatagacaggcatcaggtaaaagcaggtctctgccacacgcttattcggaaactaatcccatttggaaatcaaattaaactaagaaaaaactccagtaccttaggtccagaaaatcctttgagtccctgcaaaagatgaaatatctctcactgacaaatcaaagacagagtgtggattcaaagactgcctctctaaagtgagtgagcatgtatttctttagtcgcttcgggctatacatctacaaagaggttagagatgcaatttattaatgctaaagactccttgatattattaaaaag

SEQ ID NO: 359885 - DNA, 596 bp, Homo sapiens
ggcactatgagctttagaaaaagtgaatcctcttcaaaaaggattcaaaagtgaatcctcactcatttaygtctgtttttcccctctgtattcaaacatgtttcctgtcaaccttcagggctttttatagacccaagatcacaaaaaggtgcaagaagagctcagccacttcactacctgatcaaacagcacagtggcttcactttgtagccacattccaagactccagtaatccatctacggccctaatgctatactgggagagtcagcattgctgacagtagacccacaagtcagtgctagggtactgctgctgagtagaaacagttgctgggaagtgacactactaggagaatgagaaagcaaaggtgagaaaagccagtcctcacaggaggaatcaccaggttaaagacccccaaagtcagactatccgtgcaggggtgagcactgaaggtcaatgatttgtgtgtctcccaccaaccttgcttctccaaggaaatatttaaatacaggtaaatgctaaagtaaaatggatcttaagaaaggaacaattttgtgctttttgagggcaggaaccccaactgtgtctttcacca

SEQ ID NO: 359886 - DNA, 533 bp, Homo sapiens
gtggcttacttgtggcaaacatttcatttgagtttgctttccccaccctctaacacaggcccagctggctgatcagtataccaggggggttgtgcttctggaacataattctaatattgacctgagcaaagtatcgagagaaaattgtgctaaacaaaacatcacagtgcagtaaaaagttcaatataaattgtccttccataaggatggacagtgcagaactcatgagcaagtattgttgatctcttttttttaaagaaaaacttcatttgtattgtgatacctaaaatccatttgaaaagtgcattaaagtgtataaaatataaatgtatagtttaattgttakaaagtaactttatagaacaatattataatttttatatatataaggtctatgtagccaccatgcaggtcaagaaatagagcattattggtcccaggcacagtgcctgtccccagtcacaattcacccccagcctctctccacaagggccctcctgacttctgataatattttcttgccttttaaaaat

SEQ ID NO: 359887 - DNA, 626 bp, Homo sapiens
ttttttttaaagaaaaacttcatttgtattgtgatacctaaaatccatttgaaaagtgcattaaagtgtataaaatataaatgtatagtttaattgttataaagtaactttatagaacaatattataatttttatatatataaggtctatgtagccaccatgcaggtcaagaaatagagcattattggtcccaggcacagtgcctgtccccagtcacaattcacccccagcctctctccacaagggccctcctgacttctgataatattttcttgccttttaaaaatacttcaccgttaagtattcctccctagatactataacttctaataaatggaattttaccacatgcattcttctatgttttgctttttttagtcattaccatgttagtaaaagttattcatgttgttgtgtgtagctgtagttcattcattttcattgacatattttattgaaaatatcatgacatatttattcatcctattgttgtataatattttataatttgkgttttaaaaggctattaatctgcaatgctatgatctttttgtagttcaatctcattctgttactgatgaagcacaactcttatttgtttatttatttttaaggagatggggtct

SEQ ID NO: 359888 - DNA, 470 bp, Homo sapiens
aactcttatttgtttatttatttttaaggagatggggtctcgttatgttgccctggctggtcttgaacaatcaagtgatcttcccaccttagcctcccaagtagctgggattacaggtgcaagctcctacacccagcttcatctccactattttttacttcttaccacctttcaaactttytaaagcaggtacaaaagtataaattgcaaaaccaagaagcaacattgccaagggtatgtaaaagaaaagggagttattcttgctagcagtatcaaaagtgagctctcctgacctggattttattccaaaaaagtcacatgaaatgtccaaagcaattccattagcatagagtgaaggctgtaaattcaaccactcagtctcagtcccacctgtaccaaatcaaggcacattagataaaatagtatcacaggtgagtggcaccttcatggcttgtagtcctcgggtccca

SEQ ID NO: 359889 - DNA, 612 bp, Homo sapiens
agcatttttactattaaaaaacaccaactatatgaggtgcacctgttaattagtttgatttagccattctacaatgtacacatatttcaaaaaattatgttgtacaccattaatgtacaaaattttaatttaaaaaataagtacatttaaaatataaagacaatgaagctgagtttcagatatattaagtgtgtagtgacagaaatgacatctatccacatcttccaaattccaatgccagtgtttttgttttacttcaagtatttcactaaacaacacattataatagaaatatttcctgtgtattgtacatcagaaaataaaggaagctttttgctcaacaaggtggatgaccacacacatctatctcttcttggaatccctttaaataccaaaaagaaaaagaattttaatgtacaaggactgctaaggtttgggtrtttgtctcctccaagcctcatgttgaaatttgatccccaatgttggaggtggggcctagtgagaggtgtttgggtcctaagggtggattgctcatgaatagaataatgccttatctgaagggggctgtggggaggagttcttactctattacttcctgtgagagctggttat

SEQ ID NO: 359890 - DNA, 531 bp, Homo sapiens
agatccatgtgtatagctgtggttatttaccaaaatatcctcttaacatgatcctgcataacccaaacttcaaggattttttttttcaacatactgttgaatttggaccagcttccaagaagaaccaacactkaattccctttctcaagaaaattacgcagaagcaaagggaagaatgtctggcaaaaacaatctcagagggacaaagattggtggtgagggagagttggagcctctgcatgtgataaccttccactctatggccagtgtacaccaagttgtcacagatggcagatctcaaaggaaaagcttccaagacttcaacttttgaatggctgctctgacttcttatgatgtgagcattgcagggaatcattccaattctggacaattaataaaaccataaaaagtttctaaaattcaataataaatcactaatagataaatagataaaatgtaacagaagatgagcagtatcatgcttaatgataaaatgctagaattaattcaataagtactcattgagcatta

SEQ ID NO: 359891 - DNA, 547 bp, Homo sapiens
tataaatctctgcatggcgtgtaagtgtacatgctcatgtgcctgtatatgtttaattctgcaccagagatcccagaggatggatgactaatcacagtaagtctgaacttcttcagagtttttggggataagagtgggaggaaaataccatatctaatgtttaataacaacggtccagcacaagaaaccttgggatggaaataacatataagaaggggtgagttttctgagattcggggaaaaaatgcaaattattccttaaatgggcttccctgaaataaaaactgaaatgtttgcacatatttattcartaatctttcttacagtaaaataaccagttggagcaatgtcaattgctattgctcctgtaataaagttcactgaggctttaaatttattaattgcccttcttagtcttattgcagtctactattagagtattaaaagctgctagaaacatgtaattgccataaatgttctcaagtggatgaatcatacccttttgaaaatctggacttattgtttcttttttaacaatagagattgc

SEQ ID NO: 359892 - DNA, 547 bp, Homo sapiens
tataaatctctgcatggcgtgtaagtgtacatgctcatgtgcctgtatatgtttaattctgcaccagagatcccagaggatggatgactaatcacagtaagtctgaacttcttcagagtttttggggataagagtgggaggaaaataccatatctaatgtttaataacaacggtccagcacaagaaaccttgggatggaaataacatataagaaggggtgagttttctgagattcggggaaaaaatgcaaattattccttaaatgggcttccctgaaataaaaactgaaatgtttgcacatatttattcaataatctttcttacagtawaataaccagttggagcaatgtcaattgctattgctcctgtaataaagttcactgaggctttaaatttattaattgcccttcttagtcttattgcagtctactattagagtattaaaagctgctagaaacatgtaattgccataaatgttctcaagtggatgaatcatacccttttgaaaatctggacttattgtttcttttttaacaatagagattgc

SEQ ID NO: 359893 - DNA, 551 bp, Homo sapiens
cttgcaggtttcaaagttgaagctatagcctttaggtacacctctcaacattatcaagagttttggaatcactgccatctttgggggaagaagaaaattccaattaagctgttaccaaggaaactttagaactatcacctaacayttaagtgtttataagacattatgttaagtttctgaaaattccacatgcataattttgacgaataaagtccaatgaaaatctctatgttgccacaggaacaacacaaaacaaacttacttgggtttgttttcttagttgtatccaaaacacagaaaatagcacatgatagatttaaaaacataggtgttttagtctatgtgtggattgagagaaagctctcattcaaaagacattaaaattgataggctcaaactgaaggttgcacaatacaattttaaaagcactacaatttgtaagaataaaatgatgaccccaagtaatcagaaaagtgacaaattacaatttttcaaagggatggatacacgaacaggcaaatataaaatatccagttgatagaggttaagaa

SEQ ID NO: 359894 - DNA, 626 bp, Homo sapiens
atcctgctttgttttttttctataaaaagtattacttcccaacatactaaataatttacttttttattatgttgatgatatagctttcccactagaacgtaagatagaggggttttttttgtttgcttttttgttttgttttgtttttgtgagaaaagtctcgctctgtcaccccggttggagtgcagtggcacgatcttggctcactgtaacctcggcctcctggttcaagcgattcttcagcctcagcctcctgagtagttggtattacaggcacatgccaccrcacctggctaatttttgtatgtttagtagagacggggtttactatgttggtcaggctagtcttgaactcctgacctcgtgatccacctgccttggcctcccaaagtactaggattacaggcatgagtcaccacgccaggccaagatagaggttttatctgtttcatttattttcatatccccagaacctagaactacacctataacattgtaggcattcaataaatatttgttgaatgaatgagtgaatgagtgaatgaatgaatgaatgaatgaagagcatggggtttactcctatgaataaacttccttggtttaccaggtcaacatctagtctttac

SEQ ID NO: 359895 - DNA, 479 bp, Homo sapiens
ttccaattaggctacatggggaacatttcccataaagtgaatgaactraattgaagcttcaaaattctgaagtaaaaacatatagaaaagatgattaaaatattttatcaaaaaatatactaataatgtaagtatcaagtgtgcttaatttagcaatattaaacttttccaaacattttagttttttgagataaatacagtgcctctcagtaaaagagtaacaggtataattaatagccatttgataaatttgataaagcactttttaaacaatatttcccagaaattagaaaatgttgtctaaatgactggataactgattcttttgtaaaactttttgaaagattactgggtgattttcgggatatgattcagaaaaaagtcaaataattgtttgacattgctctgataaaactccttcaagatccatcgatgtaaataatatttatcagtgcttaaatatataacaatagatatta

SEQ ID NO: 359896 - DNA, 611 bp, Homo sapiens
aataataggtgctgatgttgggagcaaaagctcacatggcaatggttggggagggaggcccagaaggggaagacagaaaacgaaagaatattgtcytagaaattaatgttaaaaaagaaagattagggggattctgggcaaaaccttgatattgtctattgcacaccccttcaagcacctgtttaataataccagccactaaatttgctaaacatggaatgtcaaatcattaatgtaccaacattcttccaggaagaattatgtctatgattctccttatacattgctcatttatatctattatcacatcaccctgagctggacttctattttgaccattgaaaatgacaaaaatattgtgtttgttttatatgtggcatataaaggagtaggccctggaggaacattttgaacaaatacaatgacattaaaagcagtgaatattgttatattttgcagatggtgaagatacaaggtcatcataggagaaaagaagatagctccactgacatgtataatcccatgtggttctaaccagaatgtataatcatctgttagaggtactgtggtaaatgacagggacttttcacaaaaacaattggctaatagca

SEQ ID NO: 359897 - DNA, 611 bp, Homo sapiens
aataataggtgctgatgttgggagcaaaagctcacatggcaatggttggggagggaggcccagaaggggaagacagaaaacgaaagaatattgtcctagaaattaatgttaaaaaagaaagattagrgggattctgggcaaaaccttgatattgtctattgcacaccccttcaagcacctgtttaataataccagccactaaatttgctaaacatggaatgtcaaatcattaatgtaccaacattcttccaggaagaattatgtctatgattctccttatacattgctcatttatatctattatcacatcaccctgagctggacttctattttgaccattgaaaatgacaaaaatattgtgtttgttttatatgtggcatataaaggagtaggccctggaggaacattttgaacaaatacaatgacattaaaagcagtgaatattgttatattttgcagatggtgaagatacaaggtcatcataggagaaaagaagatagctccactgacatgtataatcccatgtggttctaaccagaatgtataatcatctgttagaggtactgtggtaaatgacagggacttttcacaaaaacaattggctaatagca

SEQ ID NO: 359898 - DNA, 571 bp, Homo sapiens
ataaaaataccaactctacttttcaacataagctccatcacattgaagacacttataagtgatgataccagccgtttggtccatccttaaagaactgagggtcctgggaatttaaccatgtcagtgcagtcttttttacattattaactgaagaaaagtgggtgcctgttaaagactttttaagattaggaaacacaaaaaagtcagaaggagccaaatgagaactgtaagttgggtgcctagtgattttctgtcaaaagtcacaaaattgcccttgtttactgagaggaacgagcaggagcattgctgcagagaaaaaatttctgatgaagctttctcagcacttttctgctacagctttggctagctttctcaaacactctcataataagcagatgttatcatgctttggccctccagagagttaccaagtaaratgccttgagcatttcagatacctgttgccatgacctttcctctttacctgtctgcttttgctttgactagaccacttacacctcttggtagccattgttttgattgtgttttgtcttcaggattatatttgtaa

SEQ ID NO: 359899 - DNA, 569 bp, Homo sapiens
atgcactgggcaccatgggaggaaccctggaaagaagatgatgcttgggataaacrttaggcctggagttgagtgaggaaggttgggagacgtgaggcataataagagaaggagaaacatatatgaaagtatggaagtcagtggtggccagagtgcagggcaatggaggggcatggtatgaaatgagggtagagaagtaagcagaggcaggactggatgtgaatgaatgagaggagtctaggataactctaaggcgtctggctcacaactacatgtgggcaacaccatttactgagatagtgaatatagaagggggaggaggtttaaaaagaaaggcagaagaaaataattctattttgaatattttgagtttgagatgcctgggagctgttcaaggaatgactctcggtggccggatggatttgtataggtctgaggtttgggtgtgaggcctgaatccatggatttggatcataacaaaatgggtagttgaatctacagaagtatatgaggatacagggagagtttattcagccatcactcattgaatagatattcactgagcacct

SEQ ID NO: 359900 - DNA, 569 bp, Homo sapiens
atgcactgggcaccatgggaggaaccctggaaagaagatgatgcttgggataaacgttaggcctggagttgagtgaggaaggttgggagacgtgaggcataataagagaaggagaaacatayatgaaagtatggaagtcagtggtggccagagtgcagggcaatggaggggcatggtatgaaatgagggtagagaagtaagcagaggcaggactggatgtgaatgaatgagaggagtctaggataactctaaggcgtctggctcacaactacatgtgggcaacaccatttactgagatagtgaatatagaagggggaggaggtttaaaaagaaaggcagaagaaaataattctattttgaatattttgagtttgagatgcctgggagctgttcaaggaatgactctcggtggccggatggatttgtataggtctgaggtttgggtgtgaggcctgaatccatggatttggatcataacaaaatgggtagttgaatctacagaagtatatgaggatacagggagagtttattcagccatcactcattgaatagatattcactgagcacct

SEQ ID NO: 359901 - DNA, 569 bp, Homo sapiens
atgcactgggcaccatgggaggaaccctggaaagaagatgatgcttgggataaacgttaggcctggagttgagtgaggaaggttgggagacgtgaggcataataagagaaggagaaacatatatgaaagtatggaagtcagtggtggccagastgcagggcaatggaggggcatggtatgaaatgagggtagagaagtaagcagaggcaggactggatgtgaatgaatgagaggagtctaggataactctaaggcgtctggctcacaactacatgtgggcaacaccatttactgagatagtgaatatagaagggggaggaggtttaaaaagaaaggcagaagaaaataattctattttgaatattttgagtttgagatgcctgggagctgttcaaggaatgactctcggtggccggatggatttgtataggtctgaggtttgggtgtgaggcctgaatccatggatttggatcataacaaaatgggtagttgaatctacagaagtatatgaggatacagggagagtttattcagccatcactcattgaatagatattcactgagcacct

SEQ ID NO: 359902 - DNA, 569 bp, Homo sapiens
atgcactgggcaccatgggaggaaccctggaaagaagatgatgcttgggataaacgttaggcctggagttgagtgaggaaggttgggagacgtgaggcataataagagaaggagaaacatatatgaaagtatggaagtcagtggtggccagagtgcagggcaatggaggggcatggtatgaaatgagggtagagaagtaagcagaggcaggactrgatgtgaatgaatgagaggagtctaggataactctaaggcgtctggctcacaactacatgtgggcaacaccatttactgagatagtgaatatagaagggggaggaggtttaaaaagaaaggcagaagaaaataattctattttgaatattttgagtttgagatgcctgggagctgttcaaggaatgactctcggtggccggatggatttgtataggtctgaggtttgggtgtgaggcctgaatccatggatttggatcataacaaaatgggtagttgaatctacagaagtatatgaggatacagggagagtttattcagccatcactcattgaatagatattcactgagcacct

SEQ ID NO: 359903 - DNA, 585 bp, Homo sapiens
tcagacggagtggactcaagttcttatcacgtatgggaaggatggagagatcagttaggaaataatcaccaaggactctccaagctacttgctcagttgaaaacagtattaatttcactacctctacttttgtaccctctgagattatatagactctcaaaaataccgattttcattaacctcatgataacacaactgaattttctgcaaatgattttcagactatacytgtcatattgtgtcacgtatactggtgtaattacttacttaaggcatgcattggatcattctaagataaacaacctttttaaagccctgggatttttgaatcagctatgaagtcagagtagaggaagacttttttcccctattcggtcaaattaatgttaagaaactagagacatcaagccaaattctctcattgtgtgactttatacaattcttacactattatatgagaggccaattcgctttcataggccattagggtaaaattaggattcagcagaaactttctaaattctcttctcaagattgaatagtaagtactttatatttaaaggaacagaaaacaaaccccaagat

SEQ ID NO: 359904 - DNA, 519 bp, Homo sapiens
gctatacctgttttatttccaactttggcacaccctggagacctgtgtgaggatgtgaagatagcaaagtcctgggcatgcacatcacccaggaatcttgttaaaatgcaggatattcttactgaggatatctagggtgaagcctgagattctacatttctaacagatactgcagtaatgtcaatgctgctggttcatggatcacatggctctaggccagtgcactacaaagggttgctcattgcatgagtgccaggctacaaattgatgtataaagaaataaacacacaaattgagagtaaacatctagaaacttttaaggcaatttgacattgattgctgcagcgtacagttgcatgaccagtggactctgtctcattgaacaggatgtatcagtctgcaaagaactagaaataagaatacctcgtcctctatcacagatggtttggraaaatgctcttctagagcaattgttctcaatatggcacaatttgccccaggggacatttggaaatgcct

SEQ ID NO: 359905 - DNA, 618 bp, Homo sapiens
aaaaatagtctttgttgacatattcgaattacaagcaggtataaatgcttggtgtggagtcagggaatggggaagttggaggggcaagaacaaggatagcaggtctcaagtaagcaggagcagtcctgcatccttgtgcaaaatcggggtgaaggggaactgtgcaaggagcctccagagttttaatactcgagatctgctctctcccttaacaactagggttttcttggtttgagatgtaggcctttagctgagcctcagcctcagtgggacctggagaggacaaggccaccatggttctgagatctgtgtggagactgtgggcagctccataggctgggtggagaaatggacctacagctaaaagcaaaacaggagatggacagccggaagctattggctctagggcagcgattcacagtccttgctgtgtcccagagtcatgtgggaaatgattttaaaataaatattccttggtatctactaaagctgaaaatatgtatatccartgacccagtaattttacttcattgtatataccctataggaatatacatattaaccaaaaatcatgtactaaaatgtttataaaagcactatttgtgttgccccaaagtg

SEQ ID NO: 359906 - DNA, 554 bp, Homo sapiens
cactgtgtgaataattttgcagtagtgcaggtgaagatatgtggtggagaatcatgtcatcatgtaacagaggaggcaagctgcatgtagacgttcttctgcagcatgcaccatattttatatattttaccaatgtctacctttttttggtttttaaaaattccattttgacaaagaagaatcattcattgcattaagttagtgttgaaaatttttgtctcactgagtttgtctggatttgatgtattaacttgttgtggtttaacagctgcataagaactataagtgtataatatttacagctagatttgtgtttgtaaatgtttaaataacattataatattttgtctgctgtcctataggaattggttttccttgtaaatgactttatgatttattcaaggttgggaaacactgcttcacataagatcagtgccacatygtccttcagaaggtgttggctgctagacgcttccctgtaaaattaccaagtaaatgaaatctgacattagaggaacatatgcttgcatgaattctggagaactcacctttcc

SEQ ID NO: 359907 - DNA, 554 bp, Homo sapiens
cactgtgtgaataattttgcagtagtgcaggtgaagatatgtggtggagaatcatgtcatcatgtaacagaggaggcaagctgcatgtagacgttcttctgcagcatgcaccatattttatatattttaccaatgtctacctttttttggtttttaaaaattccattttgacaaagaagaatcattcattgcattaagttagtgttgaaaatttttgtctcactgagtttgtctggatttgatgtattaacttgttgtggtttaacagctgcataagaactataagtgtataatatttacagctagatttgtgtttgtaaatgtttaaataacattataatattttgtctgctgtcctataggaattggttttccttgtaaatgactttatgatttattcaaggttgggaaacactgcttcacataagatcagtgccacatcgtccttcagaaggtgttggctgctagacgcttccctgyaaaattaccaagtaaatgaaatctgacattagaggaacatatgcttgcatgaattctggagaactcacctttcc

SEQ ID NO: 359908 - DNA, 541 bp, Homo sapiens
aacttgttctctatgctgctgggagattccgacctccgcagcccctggactttgacccctgaggctttactagaactggaattcgtagaggaaagaatccagaccacccagttatctagagtacagccrtttcagccttttcagcttctggttttcgcttcattacactcccctactggactaatagttcaacataatgatttagtggagtggtgttttcttcctcattctgtgttaaaaactttgtgtgtttatctagaccaaatagccatattaattggacaggcttggtgcagaatacttcaaatttctggatttgatccaaatgtaattgtagttcctttaaatcagctcaaagttcaagctgcctttcaacattccgtactgtggcaaattcacttggctgattttattggcattattgacaatcactatccaaaaaacaaattgtttgattttataaaaatgacatcttgggtggttcctaaattaaccaaggatcaacccattcctaaggccattacagtgttcactgatggct

SEQ ID NO: 359909 - DNA, 500 bp, Homo sapiens
ctctgggcagggcatttctgaaagaaaggcagcagccccaggcaggggcttatggataaaactcccatctccctgggacagaggacctgggggaaggggtggctgtacttaaacgttcctgcctgctggctctgaagagagcagtggctctaccagcacagcgcttgagctctgctaagggatagactgcctcctcaagtgggtccctgatccccaggcctcctgatgggaagatacctcccaacaggggccaacagacacctcatacgggagagctcyggctagcaactgggcaggtgcccctctcagatgaagcttccagaggaaggagcaggcagtaatctttgctgttttgcagcctccactggtgatacccaggcaaacagggtctggagtggaactccagtgaactccagtgaactccagcaaactccagcagacctggagaagaggagcctgactgttagaaagaaaactcccaagcaggaagcaatagcatc

SEQ ID NO: 359910 - DNA, 566 bp, Homo sapiens
ctatttgctgttccttgattcaaattcatgctcggtagcatgggtcagctcattattatcctctcatccatggacatttaagaactaagaatgtggagaccttactaaggaatttccacacagagagggtctatgtcatacctccagcattttctctgacaacctctttttcaaactgtatactttttaacttctgtttttgctccatataattgcccttaatccaaattctaataaatgagaaagcactaactgcattttctctgttctctttccagtataacaggaaatgttcataaacatttatatgtttacattatatgtttatgaacatgttatacgttttyatatgttcagaaacttactgattttcatgtaggtaacatgaaattgttttttaaaaaggacattctccctccactgcctgcacttaccttcgctttttgagataactattgataatactttagcatatatctttggaaaatatgctttccaggttgccaacgactttgcatagatattacatatgtccatgcaaataacctgtattatcaacactaaat

SEQ ID NO: 359911 - DNA, 501 bp, Homo sapiens
ctcacagaagaaggtattcagatgacaaatgagcaaacgaaaagatgctcaatatcatctgtcactagggaaatgcaaactgaagcaataggatactgctacacacctcttagaatggccaaaatccagagtactgacaataycaaatgctggtgaggatgtgaagcaacaggaactctaattcattgtcggtgggaaggcaaaatgagacagccactttggatgacaatttggcagttccttacaaaactaaacacatgcttaccgtacaatccagcaatagcactccttggtatttacacaaaggaactgaaaatgtatatccacacaaaaccctgcacactgatgtttataggtgtattcagaattgctaaaacttggaaacaatcaaaatatccttcagtagatgagtggataaaataactatgctgcatcctgacaatagaatgttaccaaacaacagcaacaacaacaaacctatcaaggcatgaaaacacatgg

SEQ ID NO: 359912 - DNA, 501 bp, Homo sapiens
ctcacagaagaaggtattcagatgacaaatgagcaaacgaaaagatgctcaatatcatctgtcactagggaaatgcaaactgaagcaataggatactgctacacacctcttagaatggccaaaatccagagtactgacaataccaaatgctggtgaggatgtgaagcaacaggaactctaattcattgtcggtgggaaggcaaaatgagacagccactttggatgacaatttggcagttccttacaaaactaaacacatkcttaccgtacaatccagcaatagcactccttggtatttacacaaaggaactgaaaatgtatatccacacaaaaccctgcacactgatgtttataggtgtattcagaattgctaaaacttggaaacaatcaaaatatccttcagtagatgagtggataaaataactatgctgcatcctgacaatagaatgttaccaaacaacagcaacaacaacaaacctatcaaggcatgaaaacacatgg

SEQ ID NO: 359913 - DNA, 501 bp, Homo sapiens
ctcacagaagaaggtattcagatgacaaatgagcaaacgaaaagatgctcaatatcatctgtcactagggaaatgcaaactgaagcaataggatactgctacacacctcttagaatggccaaaatccagagtactgacaataccaaatgctggtgaggatgtgaagcaacaggaactctaattcattgtcggtgggaaggcaaaatgagacagccactttggatgacaatttggcagttccttacaaaactaaacacatgcttaccgtacaatccagcaatwgcactccttggtatttacacaaaggaactgaaaatgtatatccacacaaaaccctgcacactgatgtttataggtgtattcagaattgctaaaacttggaaacaatcaaaatatccttcagtagatgagtggataaaataactatgctgcatcctgacaatagaatgttaccaaacaacagcaacaacaacaaacctatcaaggcatgaaaacacatgg

SEQ ID NO: 359914 - DNA, 630 bp, Homo sapiens
tgccacatccttgtctgtcacctattcttaaataatcagtctatgtcatcacccctcccgaacatttcccccatcaaaatgtggacttctctcctgctgctgagtaacgtggggctggttatgactgggagggaggatgggagcgaggcacgtggaccagaaatacttcctagaaacagcaagtacgctgctcaaccctgcctgaactttcctgtaaacagccactgacagactgcatccctgctgggtggatcctgcgactcctagagggaatggcacttcttgtttttaattagcaaggtgaaaggtgaattaaaactagcagtttggcaagtcagtgcaagaggctgacttctgagaggcttccaggagcccgaagagaggacctccacgggagaagggagtgcgtgtgctcggttttktttttttctctcttttttttttttttttctgaatgaacagctttgcccaagtgactgaaaaatacagcttcttcctgaatctaccggcgtagttgctgaagagcgctctagacaggacatggctttgaagactcactctttggaatgtcctcttgctcccggcttataaacaactgtcccgaggaaagaaaggttttacatagccaaa

SEQ ID NO: 359915 - DNA, 630 bp, Homo sapiens
tgccacatccttgtctgtcacctattcttaaataatcagtctatgtcatcacccctcccgaacatttcccccatcaaaatgtggacttctctcctgctgctgagtaacgtggggctggttatgactgggagggaggatgggagcgaggcacgtggaccagaaatacttcctagaaacagcaagtacgctgctcaaccctgcctgaactttcctgtaaacagccactgacagactgcatccctgctgggtggatcctgcgactcctagagggaatggcacttcttgtttttaattagcaaggtgaaaggtgaattaaaactagcagtttggcaagtcagtgcaagaggctgacttctgagaggcttccaggagcccgaagagaggacctccacgggagaagggagtgcgtgtgctcggttttttttttttctctcttttttttttttttttctgaatgaacagctttgcccaagtgactgaaaaatacagcttcttcctgaatctaccggcgtagttgctgaagagcgctctagacaggacatggctytgaagactcactctttggaatgtcctcttgctcccggcttataaacaactgtcccgaggaaagaaaggttttacatagccaaa

SEQ ID NO: 359916 - DNA, 635 bp, Homo sapiens
aattttttcatttttagaatagtggatgttttcttagtttaaatagatttcctataatactatccagtagataatataaatttaagaaatccattgatactaaattggtaaagtgtttaaaatatagtgcccagaattaacactaatcttttaacttgggaagatgtatcatggtatgtatcaaaatgcctatttctaagaagtttatcatcaaagatgtcaacatgtacaaatttgatgtgatggaatatggacaaataaaaatgcaaaaaaatataattgattgtttttcttatgtagacaagtagataagctgccagtttttgcaagctacaattctgttatatctagtattaacattttataccctattattggggtacttgtgttttcatggttcaatatcagtgtgttttccaacaggtcacattttaatatttcataagagagttaataatttgatcaaaaaataccaaagttctctgatacaagtaaatgttatgcataatactattatcgagttcatctttattatgtcacttatattcaaagaaataattgtaactgatgttatgagtggtgtcatatggtgtgagagtaaaacygctagtatctatatgtacaatagactgaaa

SEQ ID NO: 359917 - DNA, 635 bp, Homo sapiens
atactattatcgagttcatctttattatgtcacttatattcaaagaaataattgtaactgatgttatgagtggtgtcatatggtgtgagagtaaaactgctagtatctatatgtacaatagactgaaaactcccacaggatttcccttaactttgaatttaatggaaccagctgaaaatgcacaatatgatgtttttatacaaaggcagaatagagagagttacctgaaaatagaatgttcctacttgtgcaatttasttagtaaagtcagttaagagatcacactggagatgctacctgaagcagcaaatgcctactgcacctcaggggcctcagtgaaaagaagagcatatatactgtcagaggagggatattcagtcccaccaatacaatatgaacagcccatttatctctctacactctggaattcagtgaatattttagaagtcttcaaaaactaggaataagatattacagattaatcttttgctgacttgactaatgtcagtaacgacaagtgttcagtagcgagtgaattaagtaattaatatttaaatgagtatataatctttcaatataagaggcactaggtatatgtcatatagcatctctgtaccgctgcctgaccactagca

SEQ ID NO: 359918 - DNA, 516 bp, Homo sapiens
gcagccaaattctaacagatatacaaacaacttataccaattctactgaaactattccaaaaagttgagcaggggctcctctctaactcattccacaaagccagcatcattctgatgccaaaatctgccagagagacaatgaaaaaagaaaacttcaggcccatrtccctgatgagcatatagatataaaaacttcaacaaaatactagcaaaccaaatccagcagcacatcaaaaagttaattcataatgatcaagtaggctttattcctgggatacaagtttggttaaatgtacacaaatcagtaaatattattcaccacccaaacagagttggtaacaaaaccatatgatcatcttcacaggtgtgaaaaaagtctttgataaaatccaacattcttgcatgataaaaaccctcaacaaaccaggcagcaagaaaacatacctcaaaaataataagagcaatctatgacaaacccacagccaacatcatactgaatgagcaaaggctggaact

SEQ ID NO: 359919 - DNA, 568 bp, Homo sapiens
aatatcaccttatggaaggttaaactgctttggatcagaggccattaaactgcagcaaacaagctaaatctggtagcccacagtgacctaggagaattcttacattttaagtaatgaaaaagtattcaaggaaaaatagtttgaatactttttggtgacatgtgaaaattaaatttcagtgttcataagtaaagtattattgaaacacaaccatagagttgttttcatattatctccmactgcttttgcactaccccttcagggttaagtagttaatggcttataaagtgaatggcttataaagcttaatatatttactattgggtcgttttcagaaagtttgctgacccttttcatgatcgttgttccttaaactgtgtacgtatacaaatcataagaggaaattcataaaaatgcagatactgattctgcggcctgtaactctgcatttcaaacaagctccaggtgatgtcaattattgctcttccacgaaccacactccaggtagtaaagctctggatagccattttgatgtgatatgcaaaatgtaagagttatttgaaaccat

SEQ ID NO: 359920 - DNA, 568 bp, Homo sapiens
aatatcaccttatggaaggttaaactgctttggatcagaggccattaaactgcagcaaacaagctaaatctggtagcccacagtgacctaggagaattcttacattttaagtaatgaaaaagtattcaaggaaaaatagtttgaatactttttggtgacatgtgaaaattaaatttcagtgttcataagtaaagtattattgaaacacaaccatagagttgttttcatattatctccaactgcttttgcactaccccttcagggttaagtagttaatggcttataaagtgaatggcttataaagcttaatatatttactattgggtcgttttcagaaagtttgctgacccttttcatgatcgttgttccttaaactgtgtacgtatacaaatcataagaggaaattcataaaaatgcagatactgattctgcggcctgtaactctgcatttcaaacaagctccaggtgatgtcaattattgctcttccacgaaccacactccaggtagtaaagctctggatagccattttgatgtratatgcaaaatgtaagagttatttgaaaccat

SEQ ID NO: 359921 - DNA, 515 bp, Homo sapiens
atttatgattaatgaactaataaaatarcagaaaattaaaatttaatttttatttttaaaataacatttagattaaaagcccatactcctaataaacaatggaatttgaaacttgtcacgtgagtggccctaagacacaaattacagctctgttttagactcctcaagacaataagatggtaaaccactcttttcctctgtttgaatgaagttctgagaatcaggagccattccattctgtagacagttgcacctctaatcaagtgttcaaggtggaaagctaaaatccctgggataaatggctgatgaaagcaaaacttcccaacagcacagaccaggaaaataatgaccaatattttatcaaaataatttaatatctatttggattggcagatgccggaggaattaaattgtccagttataggaattatggctaatctctcctttgaatttttttagataaattttcttctttacataacaataaaacaaatatttcaaatattcatttatat

SEQ ID NO: 359922 - DNA, 485 bp, Homo sapiens
aacaaaaaataattatagctacaatttaaaacaataaacaatcttaaaacaatatttagatatacaatcaagaatacttagtacctgtgagtagaggctgagaagcagtgagaaagaataagagattctttctataaaccctgggctttatagactgaggccaccacaaggacagtggtgccyttaactgaaagtaaagatggaagagagaaacaggtttgggttttgttgtgatgaatttcattttaaacagactgaatttgggcagtcaaggtttatccatatggagaaatccaacaagcagtaagatgcccgggtctagagataaaagagagttcggatgtacagatatgtatccaatcggccctcagtgcaagagcagtgtatccatatatttttcaattttactgtggaaatacatagcataacatgtactgtgtaactggaagttggcttcttttgatggcatttggataactataatt

SEQ ID NO: 359923 - DNA, 576 bp, Homo sapiens
atgttcaggtgtcactccacataactgattgtgccatgccaactttctctaaagtaaatgtggtgaaatcctttccttacaaggaagaaacacagcatctgttatatttgaacgggaaaactacttctggctggctgtccatagtgctgaacggggaataaaatctgtctggctgtttacgtcctgaattttggcactgagraagaatgtgaaaagctcaatttacctataatattgtgtccaaaattccttcttctcccatcttaggtattaaaaagtatgcagtgcaatggcttatcttgcaacaggtgcaattattaattacttgagactttcagggacaaacagaaaatcttctcttttagtaacatcaagaaagactgaagggtagagaaaataattctcacttccatttttcaacctcacgtacttgatgctccaattagagactcagtgatatttttgaaattttattttcctgcttttatgtatgaatattgttttgtgttttaagtgcttcaagagatgctacatctttagaagtcattattttgtaattttttgttaaataaatat

SEQ ID NO: 359924 - DNA, 576 bp, Homo sapiens
atgttcaggtgtcactccacataactgattgtgccatgccaactttctctaaagtaaatgtggtgaaatcctttccttacaaggaagaaacacagcatctgttatatttgaacgggaaaactacttctggctggctgtccatagtgctgaacggggaataaaatctgtctggctgtttacgtcctgaattttggcactgagaaagaatgtgaaaagctcaatttacctataatattgtgtccaaaattccttcttctcccatcttaggtattaaaaagtatgcagtgcaatggcttatcttgcaacaggtgcaattattaattacttgagactttcagggacaaacagaaaatcttctctyttagtaacatcaagaaagactgaagggtagagaaaataattctcacttccatttttcaacctcacgtacttgatgctccaattagagactcagtgatatttttgaaattttattttcctgcttttatgtatgaatattgttttgtgttttaagtgcttcaagagatgctacatctttagaagtcattattttgtaattttttgttaaataaatat

SEQ ID NO: 359925 - DNA, 621 bp, Homo sapiens
taaaaaaaaaaaatcagatttgaaattattgtttttaactaatgtatgtattttctacttgcatattatattgtggccaatattaaattacaaaatgagrtttgctaaagtgaagcttccaaaaaatatctgatgttaaagctaaaaatactatcatttcacaatctttctgttatatgtaggctacttaaagtataatgtagggaatgacaaatattcctattttttaactgttaagtccacacaaatgcttctatgtataattgtaccaacacttcctgtttggtgcaactggaaatagttcctatttcaaccatttgggtgatgctgaagagctcccactgagcgaatttgtgtgtccatttgaaacccctagtgtgaaatgacctaaagctgtacttacataacttttaaaaagtacagattcaaccagtcagttattgtgtccacatgacaacagataatgtgtttaaattattctttttacaacttgattgactttctctttttgaatatatgaaaatcactggaggtttaggggtcgtgttatcagcctaactaaaattcttctccactcactcactgagcatgttctttactcttgtaatttcattgccatac

SEQ ID NO: 359926 - DNA, 621 bp, Homo sapiens
taaaaaaaaaaaatcagatttgaaattattgtttttaactaatgtatgtattttctacttgcatattatattgtggccaatattaaattacaaaatgagatttgctaaagtgaagcttccaaaaaatatctgatgttaaagctaaaaatactatcatttcacaatctttctgttatatgtaggctacttaaagtataatgtagggaatgacaaatattcctattttttaactgttaagtccacacaaatgcttctatgtataattgtaccaacacttcctgtttggtgcaactggaaatagttcctatttcaaccatttgggtgatgctgaagagctcccactgagcraatttgtgtgtccatttgaaacccctagtgtgaaatgacctaaagctgtacttacataacttttaaaaagtacagattcaaccagtcagttattgtgtccacatgacaacagataatgtgtttaaattattctttttacaacttgattgactttctctttttgaatatatgaaaatcactggaggtttaggggtcgtgttatcagcctaactaaaattcttctccactcactcactgagcatgttctttactcttgtaatttcattgccatac

SEQ ID NO: 359927 - DNA, 546 bp, Homo sapiens
aaaagtattttattttaaagaactgcctcaaaatgtgtttgtatcatccccaaagtgctgttttaagtttattattttttaaattaattttactatcttgatcttaggaataagatatgatccaaacaattgaaatgtgcatcaaaaatactgacaatcttaattcaaaagctttgttaatcatactaatatgaattatttttaggcctgaaatctggttttagattatattagagtaggcccatttctttatgcaaatggtaaatagggctctttgttagttcaattttagatgaaatgagtaaagaaagagcactttytgaaaacagtagtcatttcacattgttttgtggtttacagtgttccattaaaaacacatgacattgttaggcctattttaggcagtcatacagtttgattcacagggaagaattgataattccttccatgttttacttctgtatatttttagattttcttttctgtaggtcattttcttactgacaggaggatgaggagaaaggcaggatgggttaaatggattca

SEQ ID NO: 359928 - DNA, 579 bp, Homo sapiens
ttttaaatacctgagacaaataaagcacaagactttattaagaatataagaatgtattacagattggcagactggattttagtctgaagttcctagaatgaaaaagatgtagaaagctcactctaccaatctatcctgtctttctagtyttctaattttcaccctctgtaggcataatttctgatataatgaatatacagcacttgatgaatatactttgaatgtgtgtgcatactgagtaaatctagagccattcctcttattttctattttattttctggactacttagaatacagagtatatgttcagaaaaaagaattatttaatttaattcatatagttattaaaatttaaacttaattatcccttgaattttttaatcttatagatattataaatgttacaactatgaatggtctactacattaatctaaatgctgctctgcaattttacattttcctagcccattctagaaaatatgatactttccttgaattttaaataccttgttaggggctaatgtatgtccctcttaatattaatataaaacccatatgttgaagtcctaaagcccaa

SEQ ID NO: 359929 - DNA, 579 bp, Homo sapiens
ttttaaatacctgagacaaataaagcacaagactttattaagaatataagaatgtattacagattggcagactggattttagtctgaagttcctagaatgaaaaagatgtagaaagctcactctaccaatctatcctgtctttctagtcttctaattttcaccctctgtaggcataatttctgatataatgaatatacagcacttgatgaatatactttgaatgtgtgtgcatactgagtaaatctagagccattcctcttattttctattttattttctggactacttagaatacagagtatatgttcagaaaaaagaattatttaatttaattcatatagttattaaaatttaaacttaattrtcccttgaattttttaatcttatagatattataaatgttacaactatgaatggtctactacattaatctaaatgctgctctgcaattttacattttcctagcccattctagaaaatatgatactttccttgaattttaaataccttgttaggggctaatgtatgtccctcttaatattaatataaaacccatatgttgaagtcctaaagcccaa

SEQ ID NO: 359930 - DNA, 567 bp, Homo sapiens
tgttcatgtggggtgttacgataggtcatgggagggagtttatttgagagggatgcagaagggaaaggatagattcaagcaaaataaaaaattaaaagactaccaaaaaagagagtaatcttataattccatttatgtaagattatattacatgtatatgtatatctgtattagttcattagaaaaaattctatatcaacctaaaattttacattattcaggagaagacttgtatatacttctttaacacatctgattctgagaacagttatagtaaatatactcttatgactgcaactgggagtracttattgctcataatacaatgtataaaagttttccaaggttcatgcagtcctgctacttattgtttcatctgtggtgattagttctgtctgttagtactattaaataaggaactggaacaagtttaatctactttttttattcaataaactgcaagatcactttaaaggacaaacagcaggagttgcctcttaaatatttaagaaagatgagagtaattaatttcatggttaaaagcatattcatattttattttcatca

SEQ ID NO: 359931 - DNA, 526 bp, Homo sapiens
ttttataagtcagtttcacttaagaaagtcctattagaagcrgtaaaactattaatattaaatctcaacccttggatatatgtctttttaatattctttgagacacaaagtatttctgctgcatactaaaattcaagaattgtctctagaaaaagcacgtgtgccattttatggaacactatttttatttgaaagaacaaccgacaaattattgttattcgtaactgggtatttggcagatattttctcacaaatgaagaaagcgagtctttcatttcaagaaaagcaactgacatgatttattgccagtgataaatgtcttgctttcaaatgaaaatcagaattgtggacaacttttgtctgccacagagggctccctaatagttaaagactttttttttccctgaagaaattaagggtgatataaatgaaagtgattttttaaaaatattgtatatttgcagaactcagtgagcaaatattttccaaatgactgaaacatgatgttataaagtcactcatgagt

SEQ ID NO: 359932 - DNA, 580 bp, Homo sapiens
atgggaattaataagttgttgttaatggaatgaagtgaataaacactcatgagtgcctatctaggcactgtgccaaattctagagaccaaatgatgaagaagacatagaacccagctaaagagacaggtatgtgaggaaagagaagatacagggtatatagtagggaaagaattaaaggaaattggtttatgtggcacgtgactttttattgtgttttccrttgataattaaaatttacaatgtttatgtaaatgacattgagcttaatatatttttatgtaaagagctccatgaccatcctcccaagaacatttatacatgtcagatacaaagaatcaaactgatatactgaataagtagtttttaaatactgctacttatagaagaataaactgacattagcatttttataaattagagctataatgattaaaaaaaatcagctatttgaagcaagaaaattaagaacaaactatcagaatccaccagcctagctcaaatgtatgaagtgttcctatttggaaacataacttggttgacacattgaatccctcttctaacacgttactcaaaatcatg

SEQ ID NO: 359933 - DNA, 537 bp, Homo sapiens
tgacacattgaatccctcttctaacacgttactcaaaatcatgtgtgaattacatgtgtaaagcatagatgacttggcttaagaatttaaatgccatcttcttcttcttctttttttgctgcagtttgctagctgtggaaatgacactagctatgacatagtatatgctgacttaaggctactttatagcaaatgttttgaggatctacatcccactgtaatacagacacaatcatgtcttttactaaattttaaacagtaataggaagagtttgttggataatgaaatacatacggatgaatccaagcaaagaggtgttagacaaagtgtcagatgaacaaaacaaactggaagattttcattcttggctwaaagtcttcagaaaataacaaattgtaagaaagttattagtgatatttatatttttttcattcaaattacctaattgagggtctgaaaatatgacctctctatattcccatgtaaaaaaaaaatatttgttctattcagtattttaatcagactgtttatcagtt

SEQ ID NO: 359934 - DNA, 575 bp, Homo sapiens
ctaacacatgtgcagtaagtggaacaaagcaatatggagtaattcaagctaagggcctgcatgcgcactaggaggacagggcagagctgccagaaattagcaccttatgcaaatgagctgcccagtcctcactggtttattataaaagcccttgcattcaactgtaaaaacagcaaccttcttctaggcccactctccacagcagagagctttcttcttttgcttattaaactttcaccctttcaccttctaacctcaccctttttgtctatgctccttaattctcttggtcatgagacaaaaactccaggtgataccttacaagtagagactgctacattgtggtgcactggtgagactgtaayacttagagtgttaactgcttcaaaaatggaaagtccttagaaataagccatccaaccaagttttctctgtgactttccccacaatctctgtctttcaattctctctctctcccaaagcacaggaggagcctgttctctgaagtttcttcatttacctagatcctcaaaagatctccaaagagaaacacaattgtcttctattcctttgct

SEQ ID NO: 359935 - DNA, 583 bp, Homo sapiens
catgaaaaccattccttcatgtcctttctgtgctccatttttcagggtttttttcttttttctttttttttttttttaacacaagtgactatttttattctgacagtttttaacattgtttataggtagattttagccaagttgtaactaaaattacatctaacttaataatttgctgttgtcttcaataaaaagtcactctttcataaaactatgcataattgtatgttggacacaggaaggatgttagattatccagtcattgaaggatcaattatatgtcatctataaggcaatcctcacagcataaatcctaagaatagctttayattaaggaacaaataatacatacatatgctgcatgcaagcacacactgcccgtgaacaaatttggagaatttgaagaaagctttgaagaaatgcttataacttagattaaaattaagtttaattatataaaatattagatttttggaatttagacaatttaaaaatgaattaaaatttaactgaaattccactctttggttctttcccttcctaacctggaagacaatgaactatttttctaatgaaaagaaat

SEQ ID NO: 359936 - DNA, 583 bp, Homo sapiens
catgaaaaccattccttcatgtcctttctgtgctccatttttcagggtttttttcttttttctttttttttttttttaacacaagtgactatttttattctgacagtttttaacattgtttataggtagattttagccaagttgtaactaaaattacatctaacttaataatttgctgttgtcttcaataaaaagtcactctttcataaaactatgcataattgtatgttggacacaggaaggatgttagattatccagtcattgaaggatcaattatatgtcatctataaggcaatcctcacagcataaatcctaagaatagctttacattaaggaacaaataatacatacatatgctgcatgcaagcacacactgcccgtgaacaaatttggagaatttgaagaaagctttgaagaaatgcttataacttagattaaaattaagtttaattatataaartattagatttttggaatttagacaatttaaaaatgaattaaaatttaactgaaattccactctttggttctttcccttcctaacctggaagacaatgaactatttttctaatgaaaagaaat

SEQ ID NO: 359937 - DNA, 566 bp, Homo sapiens
gaatgataaaacatagccattgcttttccttctcactatgttactaccaatagctgtgcttttaaaatgataaatgaaagacaaatggccaaattattcataaaacttttgcacagagacagactgacaaaaaaaaaaaaaatcttgctttggtcaattgggcctttctgaaaaaaaacaaagatgggtaaattatcactctttcccagttctgactttcttttctttctgctttgtcatggtattcttgtattcrttctttttctctgtttcttcataatttgtcactgtagaaatgaatgaaattggaaattgggagatcatgattggagcaagtgggaagaaaagttgagtcaaatgtgacaataatcatttgaatggcccagatgaattcatactgtcctctgccacagcctcaaactatatcttttaataatttacagatattttctgaataattttaaagcagtcctggatttctcttcagaacttttgtaatggaagagttgaagccaaactagtgcctaatatgttgcaaaaggggcagaagagaaatagtctcatca

SEQ ID NO: 359938 - DNA, 566 bp, Homo sapiens
gaatgataaaacatagccattgcttttccttctcactatgttactaccaatagctgtgcttttaaaatgataaatgaaagacaaatggccaaattattcataaaacttttgcacagagacagactgacaaaaaaaaaaaaaatcttgctttggtcaattgggcctttctgaaaaaaaacaaagatgggtaaattatcactctttcccagttctgactttcttttctttctgctttgtcatggtattcttgtattcgttctttttctctgtttcttcataatttgtcactgtagaaatgaatgaaattggaaattgggagatcatgattggagcaagtgggaagaaaagttgagtcaaatgtgacaataatcatttgaatggcccagatgaattcatactgtcctctgccacagcctcaaactatatcttttaataatttacagatattttctgaataattttaaagcagtcctggatttctcttcagaacttttgtaatggaagagttgaagccaaactagtgcctaatatgttgcaaaagggrcagaagagaaatagtctcatca

SEQ ID NO: 359939 - DNA, 524 bp, Homo sapiens
tcactactccatacctggctgtgtgttatcatcatagctgttggctttaactccagtcatgtctaccccatgcattttgtcctaatgcacgtctctatctgattcacttttttctcatacttgaaaggataataaaaattaatgccttgttatcatttgtagaaraaagctaacttatttggctgggtattcaaattctttcttctagcctttagccttaataccctccaagcttttattcccattctacattatagagcattctcagctctaaacatctctttcctcaccttcccacttaaaaaaaagtgtgatctttgttctctcccttttcaccctcccattgccttctgagggttttatctttgccagctgtgtttttaatcttttgggattcaaattttgaataattaaaacagaaaagaagtgggggatcttaacaggggtgagccaggggtttgcttttgtagggtgagcaagtttttgtaagaaagcattcaaagactcagcatgagagaaaatcc

SEQ ID NO: 359940 - DNA, 554 bp, Homo sapiens
atcataatttaaaacaaaatcatttttattagacttgtataaastttaacactaattttcaacacaacatgttatgattcaaatgacatattaattatttttttatttcaatactatatctaccctatacactgtggacaatttttttaaggaactcatttttttttctttttttagattaaaatgggccccaaagttaccataccccatcataagctctgaaagtctttatatataaactgaatgtacatttgaattctatcacacgtacatgcaatgtagaaaattcctagaatttcatgttttctccacatccattttgaatataagtttaactttctcataccagaagcctggcttgacagtttccagttctacacctcttcccaattcctcaatgtagtgagccagatatctgccttatacaactgtctcctagtaatcacctccctacggagctagatacaacctacttgacttgccccaccaacccccatgccctgcatggagtttgcagatgtgctgcggtgaccccctctcagtcacagcgtgac

SEQ ID NO: 359941 - DNA, 554 bp, Homo sapiens
atcataatttaaaacaaaatcatttttattagacttgtataaactttaacactaattttcaacacaacatgttatgattcaaatgacatattaattatttttttatttcaatactatatctaccctatacactgtggacaatttttttaaggaactcatttttttttctttttttagattaaaatgggcccyaaagttaccataccccatcataagctctgaaagtctttatatataaactgaatgtacatttgaattctatcacacgtacatgcaatgtagaaaattcctagaatttcatgttttctccacatccattttgaatataagtttaactttctcataccagaagcctggcttgacagtttccagttctacacctcttcccaattcctcaatgtagtgagccagatatctgccttatacaactgtctcctagtaatcacctccctacggagctagatacaacctacttgacttgccccaccaacccccatgccctgcatggagtttgcagatgtgctgcggtgaccccctctcagtcacagcgtgac

SEQ ID NO: 359942 - DNA, 554 bp, Homo sapiens
atcataatttaaaacaaaatcatttttattagacttgtataaactttaacactaattttcaacacaacatgttatgattcaaatgacatattaattatttttttatttcaatactatatctaccctatacactgtggacaatttttttaaggaactcatttttttttctttttttagattaaaatgggccccaaagttaccataccccatcataagctctgaaagtctttatatataaactgaatgtacatytgaattctatcacacgtacatgcaatgtagaaaattcctagaatttcatgttttctccacatccattttgaatataagtttaactttctcataccagaagcctggcttgacagtttccagttctacacctcttcccaattcctcaatgtagtgagccagatatctgccttatacaactgtctcctagtaatcacctccctacggagctagatacaacctacttgacttgccccaccaacccccatgccctgcatggagtttgcagatgtgctgcggtgaccccctctcagtcacagcgtgac

SEQ ID NO: 359943 - DNA, 554 bp, Homo sapiens
atcataatttaaaacaaaatcatttttattagacttgtataaactttaacactaattttcaacacaacatgttatgattcaaatgacatattaattatttttttatttcaatactatatctaccctatacactgtggacaatttttttaaggaactcatttttttttctttttttagattaaaatgggccccaaagttaccataccccatcataagctctgaaagtctttatatataaactgaatgtacatttgaattctatcacacrtacatgcaatgtagaaaattcctagaatttcatgttttctccacatccattttgaatataagtttaactttctcataccagaagcctggcttgacagtttccagttctacacctcttcccaattcctcaatgtagtgagccagatatctgccttatacaactgtctcctagtaatcacctccctacggagctagatacaacctacttgacttgccccaccaacccccatgccctgcatggagtttgcagatgtgctgcggtgaccccctctcagtcacagcgtgac

SEQ ID NO: 359944 - DNA, 546 bp, Homo sapiens
attgctttcaaacagaaaaggggacggaactgtgatccagcatccctggaaagactgataaaatcttttgaaaggacgaagagatatgtctagaaaaatacttttgaaaatatataatcaagatatctcttggcatattaaaggaaaaatattttatagcaaaaaaaaaactatctgtccaccaragcaaaacttgttttttccaaacttactatttttttccttttagaagaagaaaaggcaaagcaacaaaatatcagcaacagactctggtacatttcagatgttcatctttaacatcagtgtgtgtgcaccctcaatcagacaaccctagaattggttgaaaacttgagtgtgttgggcctcagaaaatgtaaccctggaatatggtgcattgacatgaagcagcctcaagatttctctgattctcccgacacccctgtgacacccaccccctgtctttcaatcctctgtctctcccaaagcactgagtgaagctattctctgaagttcccttatctagctagaaaccagatctgcaaagaa

SEQ ID NO: 359945 - DNA, 546 bp, Homo sapiens
attgctttcaaacagaaaaggggacggaactgtgatccagcatccctggaaagactgataaaatcttttgaaaggacgaagagatatgtctagaaaaatacttttgaaaatatataatcaagatatctcttggcatattaaaggaaaaatattttatagcaaaaaaaaaactatctgtccaccaaagcaaaacttgttttttccaracttactatttttttccttttagaagaagaaaaggcaaagcaacaaaatatcagcaacagactctggtacatttcagatgttcatctttaacatcagtgtgtgtgcaccctcaatcagacaaccctagaattggttgaaaacttgagtgtgttgggcctcagaaaatgtaaccctggaatatggtgcattgacatgaagcagcctcaagatttctctgattctcccgacacccctgtgacacccaccccctgtctttcaatcctctgtctctcccaaagcactgagtgaagctattctctgaagttcccttatctagctagaaaccagatctgcaaagaa

SEQ ID NO: 359946 - DNA, 582 bp, Homo sapiens
tcatccatttatttcattatgcaatatataatgagcagtaataggcattggagcaattgttagatataagaactgtaaaacaaatagaaagttccaaagggtatatagcacagtgaagtatatagcacagtgaagtgagttatcactgtgttacargctaataggtatcacactatattaacagctaacatttattgagcattaagcagttacgtgtattaactcatttattccttgtaacaacccaaaaaggtggacctttttattatgatccttagcatacaaatatctgagttatagagacaacaatgagcttaaagccacacaactaataaataccagagccagtatgtgagcccaggaagtctagctccaatgtcggtgctttaatccaatacataaggaataaaatgcacaggatgcagttagagcacagagaaaatccatgtcagatggctgttttggtgaagagataagaagaaaaactctggggctgatggaaaccgcctgcataatagcatgaggaatacagtctgtgtgtttgaggacagtaagaagttctatggggttgattagaagtgt

SEQ ID NO: 359947 - DNA, 502 bp, Homo sapiens
atctcaatagttgcagaaaaagcattcaacaaaatccagcactgctttatgatcaaaaccctcagaaaaatcagcatacaagggtcataccttaatgtaataaaagccatctatgtcagacccacagccaacaaaatactgaatggggaaatgtggaaagcattcccttcaagaatgggaacaagacaaagatgcccactctcaccactcctcttctacatagtactggaagtcctagccagagcaatcagacaagagaaagaaatgaaggtcatccaaatctgtaaagaggaaatcaaactgtcgctgtttgctgctgatatgatcatttatcctgaaaaccctaaggacttctccagaaaactcatagcactgatgaaagaattcagcaaagtttccagatacaaaatgaatgtacasaaattggtagctcttctatgcacgaacagcaaccaagcagagaatcaaatcaagaactcaacccctttacaatagctgcaaa

SEQ ID NO: 359948 - DNA, 502 bp, Homo sapiens
atctcaatagttgcagaaaaagcattcaacaaaatccagcactgctttatgatcaaaaccctcagaaaaatcagcatacaagggtcataccttaatgtaataaaagccatctatgtcagacccacagccaacaaaatactgaatggggaaatgtggaaagcattcccttcaagaatgggaacaagacaaagatgcccactctcaccactcctcttctacatagtactggaagtcctagccagagcaatcagacaagagaaagaaatgaaggtcatccaaatctgtaaagaggaaatcaaactgtcgctgtttgctgctgatatgatcatttatcctgaaaaccctaaggacttctccagaaaactcatagcactgatgaaagaattcagcaaagtttccagatacaaaatgaatgtacagaaattggtagctcttctatgcaygaacagcaaccaagcagagaatcaaatcaagaactcaacccctttacaatagctgcaaa

SEQ ID NO: 359949 - DNA, 619 bp, Homo sapiens
ttttctacttaaagtcacatattctaattctatgtgtatatgacatatattatccagttacaaaaggaaaatgaagttggtaagtgggtggctggttcacagctatataaacattatgaatgagattaagttaaatttgggggtcattctggtctcttacacgttctctgctttcaatctgcactcattttactgtcatcaggcaattttctgcctcctctctagaaaaaccaatggcgatatatttgtagtaaaacctcagragccaattttatttttcacacccacatattctctttctacagttactctataaatctttgtttttcttgtttatctagagttctctgacaccacacttcagcaactccttaaattttcttcctacttggcaatactttttagagaatagctctccaaggaccataagtgtatctgggaaatttaactggtgtgtagagcagcagaaacttggactcatacccttaaagatttctagcaacaaagttaattgactcagagatatcagacctaagtatgtttttttaaaataaagcttagatattgatagtttaaaaagatttcaagtgatttagttgtttttaaggttatataactt

SEQ ID NO: 359950 - DNA, 601 bp, Homo sapiens
aaggccaaaccccagtgtttcaataacattaaggacaaaaatattctcttacataactgtataattaccaaaatcagcaatttaacattgctacaatattattttctcctttactgtctgtattaaagtttcattagttgtcttaataatgcccttaattttattttcattttctcagtagaggatytaatgcaggatcacacaaggcatttatttgttatatgcctttaatctggtatagtttgtcagaattcttaaaaaatatatatatatatttaaatttccattagttatcttgtagaataccttttaatatgggtttgatatttactcatgattacatttttggcaggaatatcacagaagggatattgtgtcctgtggaaggcctcatagaagaagcacatgataatttgtcaaatattggtgatattaatttgatcaggtggttaaaaatgttatctgcaaaggttttctcctgtgaaattactgagtaatgcatggaaagatattttgaaactctgtaaatattgtattccatgtcacatttgtgccttcagtcattttaacattcattgataatgccatttcttctatggtt

SEQ ID NO: 359951 - DNA, 599 bp, Homo sapiens
gaataattaggcagaaatcaagattttagaacaaaacattatttattggkgttacttaattttactaaataataatttgcaaaaattaatgattatagctacatatacaatactttttttgtatttagagaagtatccaacatgataaacatttaataaactacttatagcattattcaagagcatgtggtaaaaggttaagcagtataattaatgctacagtttgaaggccatgatagaggggaggcagtgtaattaaaaaaggcctgccatctggtcaggttgtttttcacagggtggcattaacttaatgaaacgatcagatttaaatcttgttctcgccaagcaaggcctagacacatagattaatacaaacgaaacctgcgaacaactgccacaaaccgaaacaaaacaagtgaacaaacacaaaataaaatctgatcctggtcatttacacttagagtatttcctccagtggtcatgtaatttacaactggcttcccaataatgcactgtgggaatttgtaatggcagaggtacttgatagctgcaatcagatcagaggacatagttaaaatatttaaatcaaagacagtaag

SEQ ID NO: 359952 - DNA, 599 bp, Homo sapiens
gaataattaggcagaaatcaagattttagaacaaaacattatttattggggttacttaattttactaaataataatttgcaaaaattaatgattatagctacatatacaatactttttttgtatttagagaagtatccaacatgataaacatttaataaactacttatagcattattcaagagcatgtggtaaaaggttaagcagtataattaatgctacagtttgaaggccatgatagaggggaggcagtgtaattaaraaaggcctgccatctggtcaggttgtttttcacagggtggcattaacttaatgaaacgatcagatttaaatcttgttctcgccaagcaaggcctagacacatagattaatacaaacgaaacctgcgaacaactgccacaaaccgaaacaaaacaagtgaacaaacacaaaataaaatctgatcctggtcatttacacttagagtatttcctccagtggtcatgtaatttacaactggcttcccaataatgcactgtgggaatttgtaatggcagaggtacttgatagctgcaatcagatcagaggacatagttaaaatatttaaatcaaagacagtaag

SEQ ID NO: 359953 - DNA, 599 bp, Homo sapiens
gaataattaggcagaaatcaagattttagaacaaaacattatttattggggttacttaattttactaaataataatttgcaaaaattaatgattatagctacatatacaatactttttttgtatttagagaagtatccaacatgataaacatttaataaactacttatagcattattcaagagcatgtggtaaaaggttaagcagtataattaatgctacagtttgaaggccatgatagaggggaggcagtgtaattaaaaaaggcctgccatctggtcaggttgtttttcacagggtggcattaacttaatgaaacgatcagatttaaatcttgttctcgccaagcaaggcctagacacatagattaatacaaacgaaacctgcgaacaactgccacaaaccgaaacaaaacaagtgaacaaacacaaaataaaatctgatcctggtcatttacacttagagtatttcctccagtggtcatgtaatttacaactggcttcccaataatgcaytgtgggaatttgtaatggcagaggtacttgatagctgcaatcagatcagaggacatagttaaaatatttaaatcaaagacagtaag

SEQ ID NO: 359954 - DNA, 558 bp, Homo sapiens
tatgcacctaatctgtacccatcataaatttaaaaataagacaagaaaaaaacaaaacaaaatagaatcagcaatgcccagacgattatcaacggtttaggaaaccaacctgagaatacytacaattcttagtcaaaagacaaaaaatataagaatatgaaatacatgcttttttaaaaaaataaggctaaaaagcaacagaaacaatgaatttaattagaatcagggaatagaaacttttctaatgtaataagggttttttaaggtcaccatgtttaaggcaactttaaaagacaattttaaaaatgtataattgtaaacttattgaaattttgaattctaagacaatatttggtttcattgtgtttatgttgcgttcttcctggaaatatattaaatatatttatcttaatgcatgagaatgtggaaatgacaatgtttgtgtgtgataagtacataaatatataaaatttgtacctaaaaatcaccttcatcttttgagcagagtgcacatttggaaatataatcaagggggtacataaaggtcccattaagttt

SEQ ID NO: 359955 - DNA, 558 bp, Homo sapiens
tatgcacctaatctgtacccatcataaatttaaaaataagacaagaaaaaaacaaaacaaaatagaatcagcaatgcccagacgattatcaacggtttaggaaaccaacctgagaatacctacaattcttagtcaaaagacaaaaaatataagaatatgaaatacaygcttttttaaaaaaataaggctaaaaagcaacagaaacaatgaatttaattagaatcagggaatagaaacttttctaatgtaataagggttttttaaggtcaccatgtttaaggcaactttaaaagacaattttaaaaatgtataattgtaaacttattgaaattttgaattctaagacaatatttggtttcattgtgtttatgttgcgttcttcctggaaatatattaaatatatttatcttaatgcatgagaatgtggaaatgacaatgtttgtgtgtgataagtacataaatatataaaatttgtacctaaaaatcaccttcatcttttgagcagagtgcacatttggaaatataatcaagggggtacataaaggtcccattaagttt

SEQ ID NO: 359956 - DNA, 558 bp, Homo sapiens
tatgcacctaatctgtacccatcataaatttaaaaataagacaagaaaaaaacaaaacaaaatagaatcagcaatgcccagacgattatcaacggtttaggaaaccaacctgagaatacctacaattcttagtcaaaagacaaaaaatataagaatatgaaatacatgcttttttaaaaaaataaggctaaaaagcaacagaaacaatgaatttaattagaatcagggaatagaaacttttctaatgtaataagggttttttaaggtcaccatgtttaaggcaactttaaaagacaattttaaraatgtataattgtaaacttattgaaattttgaattctaagacaatatttggtttcattgtgtttatgttgcgttcttcctggaaatatattaaatatatttatcttaatgcatgagaatgtggaaatgacaatgtttgtgtgtgataagtacataaatatataaaatttgtacctaaaaatcaccttcatcttttgagcagagtgcacatttggaaatataatcaagggggtacataaaggtcccattaagttt

SEQ ID NO: 359957 - DNA, 375 bp, Homo sapiens
aaatataatcaagggggtacataaaggtcccattaagttttctctaaacttagtcaaataaaytattattgatagtcaatagagaagctagaagatcaaatctaggaaatcagagtgaaaagttggcacaatatgctggaaggaaggaggaaaacgtaacaatgcctccttattttatttgaatcagcttctttagcaggatagcctgccagtgatactgctctgaaaatagggtcatagttgaaatccagaagtatttttacatagaaccagggggttaatggctaagaactttagattttgtgggaatgttcagttattaaataccacacccctttcacctttgctcttgcttctctttaatcctgcccattg

SEQ ID NO: 359958 - DNA, 375 bp, Homo sapiens
aaatataatcaagggggtacataaaggtcccattaagttttctctaaacttagtcaaataaactattattgatagtcaatagagaagctagaagatcaaatctaggaaatcagagtgaaaagttggcacaatatgctggaaggaaggaggaaaaygtaacaatgcctccttattttatttgaatcagcttctttagcaggatagcctgccagtgatactgctctgaaaatagggtcatagttgaaatccagaagtatttttacatagaaccagggggttaatggctaagaactttagattttgtgggaatgttcagttattaaataccacacccctttcacctttgctcttgcttctctttaatcctgcccattg

SEQ ID NO: 359959 - DNA, 548 bp, Homo sapiens
ttgagtaggatttttatcagttctttagatatttggtagaatccatctgtgaaaccaytgggtcctggagttttctttaggaagagtttttattacagcttcaatctcattactcacattccaaatttcctgattcaatcccagtaggttgtatgtatagaaatttgttcattccttctggattttttaaatttattggcatatatttgttcatagtagccactaatgatcctcctttgaatttctacagtattagttgtaatgtctccttttttatttctaattttatttatttggattttctctctttttcttggttagtctggccaaaggtttatctactttgtttacctttaaaaaaattattacatttatttttatatattttttcaattttatttctgctctgatctttattattggttttattctacttgttttgagtttggtttgctcttgctttactagttctttaagatgaatcattagattgctcatttgacgtttttcctcttttatgatgtaggcacttacagcaatcatgttca

SEQ ID NO: 359960 - DNA, 445 bp, Homo sapiens
ttgtctatagtacatattaaatatgattttttgttgattttttctgtctgaaagatcttcccaatgctgaaagtggggtgttcaagtctccatcaattattgtactaggtcctatctctcactttagttctaataatattttctgtaggtatctgggtgctccagtgtttggtgcatatatatttaaaattgttttatcctgttgctgaactgacccctttattatatagtgatcttctttgtctcttcttacagttttttttttgaaacataatttgcctaagtatagtgactcctgttatttttcgatttccattagcatggaatatctttttccattccttcattttcattctgtgtgtctttataaatgaagtgtgtttcttgtaagcaacagatcaatgkttttttttattattcattcagctagtttgcgttttttgat

SEQ ID NO: 359961 - DNA, 673 bp, Homo sapiens
cagtggtagactaatgtaagtgtacttacattagtttaaggtagagtttaagtgtaagtgtatttacattagtttaagttaagcacgtttaaggtagagtaggctaagctatgatatttgtatgttaggtgtattaaatattaaactaaattttatgattgtttaacgtatgacaggtttattgggatgtaacccattgtagtcaaggagcatctatacataattttactaatggatagtctaaatatcttaagctgttactcactataataatttctcagatactataaccacaaatctttggtaacaactctgtatcargaggattatatcaggacaaaattgtaaactagatgaggcctggccaggcgtggtgtctcaagcctgtaatcccagcactttgggaggctgaggtgggcagatcacgaggtcaggagtttgagaccagcctggccaacatggtgaaaccctgtctctactaaaaacacaaaaattagacagatgtggtggtgtgcgcctgtaatcccaactactcaggattgcttgaacccaaggggcgcagattgcagtgagctgagattatgccactacactccagcctgggcaacagagcaagactccatttcaaaaaaaaaaaaaaaggtagatgaggactgtcttgagcactcatata

SEQ ID NO: 359962 - DNA, 490 bp, Homo sapiens
ttgaataagttgtatcagacacattccaattcaggaccacctgctgcccctgttctttatgtatgagaaattccttttacttacaacggtccacttccactttaaaggaaaaygtaaataattattgaagagacaaagccaatttcctgtaaaatatacatatttttgccttcttaaaatgtagtcataaaacaacatgagcatacaactaagtgatatcaaaacataagatgtattcaatattttgtccatattttggaaatcaaacttgaaaattttacatttgggggtaaatgttgtttttctcttttcttgtattttacaactttccctggcaaaggaggacaaggcttttaaattttgttttgggttggtgtgcaacttccatgctattaggggagataataaaatattgaagacttatctaggcatatgtcaacagatcaacaaaaatcaactatctggatatttactctataaagtttgtttt

SEQ ID NO: 359963 - DNA, 490 bp, Homo sapiens
ttgaataagttgtatcagacacattccaattcaggaccacctgctgcccctgttctttatgtatgagaaattccttttacttacaacggtccacttccactttaaaggaaaacgtaaataattattgaagagacaaagccaatttcctgtaaaatatacatatttttgccttcttaaaatgtagtcataaaacaacatgagcatacaactaagtgatatcaaaacataagatgtattcaatattttgtccatattttggaaatcaaacttgaaaattttacatttgggggtaaatgttgtttttctcttttcttgtattttacaactttccctggcaaaggaggacaaggcttttaaattttgttttgggttggtgtgcaacttccatgctattaggggagataataaaataytgaagacttatctaggcatatgtcaacagatcaacaaaaatcaactatctggatatttactctataaagtttgtttt

SEQ ID NO: 359964 - DNA, 539 bp, Homo sapiens
aagtttgaagtatccagaaatctggatattcctagcatgtcacataggttaggctttctatttcaggaaaaagtgatgcggtttcttaaccttaaaaaatgggacctcacattttayaattgttttgggggttcatgtaaggtttgctgctgcctttagctaattaatatttttattttcatagtatatgtgcagtatagtatggtattttagtaaagtattgatatactaacatcaggaaataaactcacctttgtatctcatactcaattattagctttgaggtattttattccgtaaaaattttatactgtatgttaatataattaaaaccattaaacaatgtaaataactacattcttatgttgatgattacagaaaattagttgatttaatctgttgaaagacatgaataacactatgcttccacaacactgagttccctttgcccttacagctgcagttttaattatagcttctgctcttatagtaataactattcattattttcttcctgttttctacactgaatgtctttt

SEQ ID NO: 359965 - DNA, 468 bp, Homo sapiens
atgttgttgctaactgtagtcctcctaatctgctaatgaacattataacttttttataatctaattatatatttgtacccactctccaacctctcaaaatttccccctcccaccctcatgtgcttcccagcagttggtatctatcactctatctctattaggtcaagctttttagttcccacatatggctgagaacgtgcagtattagtctttctgtgcctggcttaatttacttaacataatgacctccagtttcatccacactgctgcaaacaacatgatttcattcttttatttggctaaattgtatttgtagaaatatagccatcttctttatccactcattcattggyggacacaggtgattttatatatctttgctattgtgaatagcgctgcaacaaacatgtgagtgcaggtattactttgatatactgatttcatttcctgtggataaatacccagcag

SEQ ID NO: 359966 - DNA, 582 bp, Homo sapiens
ccattactttagttgtttctctactttttattctttcttctctacatgttccctttatacctattcttcaaagccactttataagaaaggtgaaatggaaaacatccagtattagagctggtcaaggtttgaaagggccacagctttcattttctcgtaagccccaaaacaatacggaaaaatgaaatgttatattttccactatttaaaaatttcttggctgggcatggtggctaatgcctgtaatcccagcactttggaaggccaaggcaagtgaatcacttgaggtcaggagttcaagaccagcctggccaacatggtgaaaccccctctctactaaaaatacaaaaattagcccagcatggtggctcatgcctgtaatcccagctacttgggaggctgaggcaggagaatcacatgaaccaggaggtggaggttgcagcgagccgagatctcgccactrtactccagactgggtgacagagcgaggttccatctcaaaaaagaaaataggtaaataaataaaaattaaaaattaacatttctttaaaaagaaagttactcttcaaaatataaaggtca

SEQ ID NO: 359967 - DNA, 582 bp, Homo sapiens
ccattactttagttgtttctctactttttattctttcttctctacatgttccctttatacctattcttcaaagccactttataagaaaggtgaaatggaaaacatccagtattagagctggtcaaggtttgaaagggccacagctttcattttctcgtaagccccaaaacaatacggaaaaatgaaatgttatattttccactatttaaaaatttcttggctgggcatggtggctaatgcctgtaatcccagcactttggaaggccaaggcaagtgaatcacttgaggtcaggagttcaagaccagcctggccaacatggtgaaaccccctctctactaaaaatacaaaaattagcccagcatggtggctcatgcctgtaatcccagctacttgggaggctgaggcaggagaatcacatgaaccaggaggtggaggttgcagcgagccgagatctcgccactatactccagactgggtgacagagcgaggttccatctcaaaaaagaaaataggtaaataamtaaaaattaaaaattaacatttctttaaaaagaaagttactcttcaaaatataaaggtca

SEQ ID NO: 359968 - DNA, 621 bp, Homo sapiens
atcattcattgcagtggtggtcagaagctaagttccagttagccctccctccacagataaaacactctggggttctaaataaacttgaaaggcactctaggccacaaggactgcaggttctgggtaatttctggtgytgtgctggactcagcaactggacttggggtacatgctgcctaaggagaccctgagcagtggtgaccaagactgtacttgcatcacacctttcccaaccccttagcagtacagcttgcagctctgtgaggcactcctatcctcccacttgagaagtgagtaaagaggagtttgtcttgaaatttggacaccaactcagtcacaatagaacagagcaccaggcagagtgaggtccaccttcaaggccctagctcccaaatgacatttgtagacacaacctgggcaagaaaggaatccattgcctagaagggaagtgcccaattttggaaggattgataacctgctgattaaagagcccttgggccttgagtaaacatcagcggtggaaaggaagtactcacggtaggccttggatgaaacctaaggccatactgacttcaggtgtgacccagtgcatttgcaggtgtagtggccaggaggagagac

SEQ ID NO: 359969 - DNA, 621 bp, Homo sapiens
atcattcattgcagtggtggtcagaagctaagttccagttagccctccctccacagataaaacactctggggttctaaataaacttgaaaggcactctaggccacaaggactgcaggttctgggtaatttctggtgttgtgctggactcagcaactggacttggggtacatgctgcctaaggagaccctgagcagtggtgaccaagactgtacttgcatcacacctytcccaaccccttagcagtacagcttgcagctctgtgaggcactcctatcctcccacttgagaagtgagtaaagaggagtttgtcttgaaatttggacaccaactcagtcacaatagaacagagcaccaggcagagtgaggtccaccttcaaggccctagctcccaaatgacatttgtagacacaacctgggcaagaaaggaatccattgcctagaagggaagtgcccaattttggaaggattgataacctgctgattaaagagcccttgggccttgagtaaacatcagcggtggaaaggaagtactcacggtaggccttggatgaaacctaaggccatactgacttcaggtgtgacccagtgcatttgcaggtgtagtggccaggaggagagac

SEQ ID NO: 359970 - DNA, 619 bp, Homo sapiens
ttcttccaaaacatacaattaatttatcccattttcatttctgccactgttgtattatttttcttatgcaggttttgatgatgattctttctcacctgtgtactttgagttctcataatttatttttctcactcttatgtgtaacctgcctttagactgtgttttcccaaaggtatgacttgatccatacccttcaggcatctaaaacttggtatctccttagtgaagttctatagattgcctaaactagaatagtaatcaccaccgattcctatcattctctatacctttacccaatttaatttttcataacatttcttcattaaatggattgtaccatttatttatttgtatagtattttattttmttttattgcctgtctctctcattataatgtgcatactgtggccatatagtggtgttctttggacttttaaatatcttcaggcactaaaatactgcattttctggttcttattaaatatgttaatcatcaattaagcattctttttcttactggggaagcctagtaaccataaaataaatttaaaaattaaaaataaaaaaacttgataagatgattaaacaaatccatacgtatgcttggaatcatatcta

SEQ ID NO: 359971 - DNA, 576 bp, Homo sapiens
atagtaatcaccaccgattcctatcattctctatacctttacccaatttaatttttcataacatttcttcattaaatggattgtaccatttatttatttgtatagtattttattttattttattgcctgtctctctcattataatgtgcatactgtggccatatagtggtgttctttggacttttaaatatcttcaggcactaaaatactgcattttctggttcttattaaatatgttaatcatcaattaagcattctttttcytactggggaagcctagtaaccataaaataaatttaaaaattaaaaataaaaaaacttgataagatgattaaacaaatccatacgtatgcttggaatcatatctatagatataattaaaattttgataatataaggtaaaggcataaaacaagagtagtgacaaaatatttttatacaacgattatgagagtattttatttttaaaaggttactgattttctgacatgtagtgatatgccatagaatcatgaggctgaaagagtcttggtatcgctagtcttctaaatttaggtgcagccgtattttgaatac

SEQ ID NO: 359972 - DNA, 526 bp, Homo sapiens
acatgattctcagggttccataataagacatccatgttaggagctcagatactcaaagagtggacattaaaaaaaaataaggcaaagtgaaaactttgatttaaaagataaaatggaggataaaaattgcaaaaatgaggtccacaagatctgaaaacaaaaataaaagaatttataacaaaaatgcaaactttgtctctgtacttttcacttactttttctgtaaacctaaaacttctctaaaaacaaagcctatttttgaaaaaatgcaaccatcaattgcctataatgagtatttaagagtgtcatatctataaagtgaatgcaaatgaaaaagttgctgctcttaacttccatattacaaattacttgtgcacacacacttataaatgttaaatgtgttcatgayatctgaaaaaaaagattgaagcatatggggagatgaactggaaaaatactaaaatgttctctacctcatcatatattttaagtgatttgagggtttctaatgcattaaaaaagtccc

SEQ ID NO: 359973 - DNA, 539 bp, Homo sapiens
ttccgtgctgcctacaagataaggccaagcacccaggtaatctcaactgtcacccccacacatgcattcctccatgtcgagctgctgggattcactgtatctatcatgttcttcccagcctttccatatgctcttccctcagtctggaatgtcctgcaaccccgtggtcttccctgtgctgcatacaaccactgatgccctgagagattactgtggagtgggtaagggtaagggcaccwgagtttaagtcttcacttttccatagacagattttatggaagtctgcaagcagtttcacgtccattctccatttggatttgcacaactctagggaaaggtaacaaaagagttccaaatcccaggcaagtggagtgacttgctcaaggtcacaaacctagcaagagtccgggtctaagctacaacctagctcttcccactccctttccagggccgatgctagtttacgacacacacaaagaagacgttagccactgggagtcattaattgatacctgtaggcgtttttattactttccact

SEQ ID NO: 359974 - DNA, 539 bp, Homo sapiens
ttccgtgctgcctacaagataaggccaagcacccaggtaatctcaactgtcacccccacacatgcattcctccatgtcgagctgctgggattcactgtatctatcatgttcttcccagcctttccatatgctcttccctcagtctggaatgtcctgcaaccccgtggtcttccctgtgctgcatacaaccactgatgccctgagagattactgtggagtgggtaagggtaagggcacctgagttyaagtcttcacttttccatagacagattttatggaagtctgcaagcagtttcacgtccattctccatttggatttgcacaactctagggaaaggtaacaaaagagttccaaatcccaggcaagtggagtgacttgctcaaggtcacaaacctagcaagagtccgggtctaagctacaacctagctcttcccactccctttccagggccgatgctagtttacgacacacacaaagaagacgttagccactgggagtcattaattgatacctgtaggcgtttttattactttccact

SEQ ID NO: 359975 - DNA, 509 bp, Homo sapiens
aggtccagggtcatgtgtttccatgtttagatttttgctatcaattatttgtacttgctggattatttgtactgtctctccccagttaagtttcctcttaccagtgaatgttggagaactatacgctaggagacaggagacttcacttctggccttttttstattagctctgtgatatgggcaagtcagtgttggctccctgggcctcaatttcctcatccccagctaatgagaaagcagctggcccttgcctacctgcaagtaggtgttggagcagacttggtttcacaatgctgcctggtttacaaagcattttcccatccagagcctgagataagcctgagagtagagaatactattccattttcatagatgagaaaacagatgctcaatgtggtcacatcacttgcccaaggccatccagacagtatgaaatggaaacagacagatgtcagttcagatcctatcaatgtcacttccaaactcactttgactagttcattaacatt

SEQ ID NO: 359976 - DNA, 509 bp, Homo sapiens
aggtccagggtcatgtgtttccatgtttagatttttgctatcaattatttgtacttgctggattatttgtactgtctctccccagttaagtttcctcttaccagtgaatgttggagaactatacgctaggagacaggagacttcacttctggccttttttgtattagctctgtgrtatgggcaagtcagtgttggctccctgggcctcaatttcctcatccccagctaatgagaaagcagctggcccttgcctacctgcaagtaggtgttggagcagacttggtttcacaatgctgcctggtttacaaagcattttcccatccagagcctgagataagcctgagagtagagaatactattccattttcatagatgagaaaacagatgctcaatgtggtcacatcacttgcccaaggccatccagacagtatgaaatggaaacagacagatgtcagttcagatcctatcaatgtcacttccaaactcactttgactagttcattaacatt

SEQ ID NO: 359977 - DNA, 509 bp, Homo sapiens
aggtccagggtcatgtgtttccatgtttagatttttgctatcaattatttgtacttgctggattatttgtactgtctctccccagttaagtttcctcttaccagtgaatgttggagaactatacgctaggagacaggagacttcacttctggccttttttgtattagctctgtgatatgggcaagtcagtgttggctccctgggcctcaatttcctcatccccagctaatgagaaagcagctggcccttgcctacctgcaagtaggtgttggagcagacttggtttcacaatgctgcctggtttacaaagcattttcccatccagagcctgagataagcctgagagtagagaatactattccattttcatagatgagaaaacagatgctsaatgtggtcacatcacttgcccaaggccatccagacagtatgaaatggaaacagacagatgtcagttcagatcctatcaatgtcacttccaaactcactttgactagttcattaacatt

SEQ ID NO: 359978 - DNA, 509 bp, Homo sapiens
aggtccagggtcatgtgtttccatgtttagatttttgctatcaattatttgtacttgctggattatttgtactgtctctccccagttaagtttcctcttaccagtgaatgttggagaactatacgctaggagacaggagacttcacttctggccttttttgtattagctctgtgatatgggcaagtcagtgttggctccctgggcctcaatttcctcatccccagctaatgagaaagcagctggcccttgcctacctgcaagtaggtgttggagcagacttggtttcacaatgctgcctggtttacaaagcattttcccatccagagcctgagataagcctgagagtagagaatactattccattttcatagatgagaaaacagatgctcaatgtggtcasatcacttgcccaaggccatccagacagtatgaaatggaaacagacagatgtcagttcagatcctatcaatgtcacttccaaactcactttgactagttcattaacatt

SEQ ID NO: 359979 - DNA, 615 bp, Homo sapiens
tgtgcacccatgcacgtgtctgtgtggggattagttaacaaaaatgaggatatttagcatgttttcttccatcctgctttcttgacttactattacaatgtaagcattattcctgtggatcaaatatccttttaaaatatgaagtttgaaggtaattttaaaaattttaagttaggttaggttttacatgcctacaaagtgggagagacaatcagggaagacttcatgaaggaggtgataccttctgaaggatgaatagaggtcaactagatggagaagaggggaaataggtctaccaggctatgggcaaaaactgtatgggcaaaaacctgggggtaagaggaagctgggtgcatccaaagcctgcatgaggcttgacggtgctagcctattggtttggggtagcagaggtatatagttattggaaaggcttcagccagattaaagaacttcacttttgtcccaactgaagkatttcatccaagaagggaagccaagatggtatgatcatgtccgagatatacattttaagatgatcacattggtgacagtatgaggacagggacaggggaggcacaactggaggtagagagaggattataggtttgatagaaa

SEQ ID NO: 359980 - DNA, 589 bp, Homo sapiens
atggttataaagttaccaacatattgcttgacccataataggtgcttattaaatgttacttcctttgctgtcttctctgctgtcaaaaagctcattgttggggggagaaaaagtctatgaacagagacaataagcataaagttgacagccaagttccaaaggacagttgggaccaagtactggcagggaaagtgtccagggcagtgaggagttcccattatctgggaaaattaagaaatgtttggtcccaccttgtttctggagtccctgaactctgccccctccctaactgcaggtgttattgaggtcctagcatgcctcataccacaggamccctgggtgaaggcaagactccctcccctagggcctcaaataaggccctcccctcctggcctcatccttgcagtgactggaaggaggtgggttgcagggaagtacagtgagagtccagaccacaggcagagcccagaacctgggcaaacagaatcccgctcccactgcactgcaggaaccgaacggtattgcgtaaaggctggctttgcagaatgcatctcgacaactcatcagagaatgtcaaattcagctaaag

SEQ ID NO: 359981 - DNA, 589 bp, Homo sapiens
atggttataaagttaccaacatattgcttgacccataataggtgcttattaaatgttacttcctttgctgtcttctctgctgtcaaaaagctcattgttggggggagaaaaagtctatgaacagagacaataagcataaagttgacagccaagttccaaaggacagttgggaccaagtactggcagggaaagtgtccagggcagtgaggagttcccattatctgggaaaattaagaaatgtttggtcccaccttgtttctggagtccctgaactctgccccctccctaactgcaggtgttattgaggtcctagcatgcctcataccacaggaaccctgggtgaaggcaagactccctcccctagggcctcaaataaggccctcccctcctggcctcatccttgcagtgactggaaggaggtgggttgcagggaagtacagtgagagtccagaccacaggcagagcccagaacctgggcaaacagaatcccgctcccactgcactgcaggaaccgaacggtattgcrtaaaggctggctttgcagaatgcatctcgacaactcatcagagaatgtcaaattcagctaaag

SEQ ID NO: 359982 - DNA, 581 bp, Homo sapiens
acggtattgcgtaaaggctggctttgcagaatgcatctcgacaactcatcagagaatgtcaaattcagctaaagctttagcaagacaatgatttgtttgtttccactgaagagctcaaaaaagaggcaggattttaacttgttccaaagaaaagagcatcatttggtaacagactggaatcatagaatcacagaatcacaatatcttatgactggaagagccagcaatgtctgtctcattgacagattgtaacaattatgtgagtcagtgtacataaagtgccccctacagagcttggcacacagtaggtacacactgactgatcrtatgttccaaaccccatgttttaaagatgaagccccagaccaacacatgacactcaacatgtcccaagccacctttgccctctgcacttccaccatcaccagcccctggtcccatcaaatagcactgcttcctcctacttgccacttctcttggtggcaccaccctcccaagttgtgagccagccatgaccaaagcccctgaggcagttgggactcctctcttgacctctgttcagtcacttgctaagtcacaga

SEQ ID NO: 359983 - DNA, 606 bp, Homo sapiens
cacaatatcttatgactggaagagccagcaatgtctgtctcattgacagattgtaacaattatgtgagtcagtgtacataaagtgccccctacagagcttggcacacagtaggtacacactgactgatcgtatgttccaaaccccatgttttaaagatgaagccccagaccaacacatgacactcaacatgtcccaagccacctttgccctctgcacttccaccatcaccagcccctggtcccatcaaatagcactgcttcctcctacttgccacttctcttggtggcaccaccctcccaagttgtgagccagccatgaccaaagcccctgaggcagttgggactcctctcttgacctctgttcagtcacttgctaagtcacagaggtcctgcccctacagkgacttccagttctgcttctagcttcttagtactgccaccgtcacactagttgagttccttgtcatttctcacctggatcattgtcgcagcctttgaattgtttctgccctgcccccactaccccccacccggttcccttctccagtttttgtgtctcttctctccaaataatgttacctgtgatgctaaatatatttttccaaa

SEQ ID NO: 359984 - DNA, 521 bp, Homo sapiens
agatgtgagagtgggaggtcagacaaagataaaggcacaagtaggaaaaaaatctaccactgatggtgctttaggagagctctggaaaaatatccaggrgaggaagggatttcatccttatggccctgtatctgcagcattgcccgtccctttcatgtaggcttcactgagacatttgcccagatgtttgtgcagctctctcacgtaaataccaagaagccctgtgcttcccagacttcaaaaacaaaaggaagggcaagaagggctagaaacccagcaggacagagcatgagaacttctttcatcaagggcttcaaagatcttacaggtcataaaagactaaagaccaggttgcccaagccctcatcagacacatttctacaacattctacaatattcccatcaaatattcactctacttttgctggagatcaggagctctctacttcctatagcaacatacttcagtttgcacagccctgatcaattggaatttgttcttgttgaacccaacatatggc

SEQ ID NO: 359985 - DNA, 606 bp, Homo sapiens
tgtgcctaacacaaagtaaggacacaatcgaagtgattccctttccccaacctcagcctctgttggctaattcctgtgttccaggcaatcagatgagagtagcctttgaagtgttgagctgctccattaacctggtgccatagaggccccacaagtgcctctgctgcctcagaggtctgctctgaagccaagtacatttgcttctggtagtccagaaagccttgaagacaaccaggtgaaagaatagaggcagacttccctggaaccactcatttaggaaagttcaaccagttctgaaaatcaaatccatggggccaggcacggtggttcacgcctgtaatcccagcactttgcgaggccaaggcgagtggattacttgaggtcaggagtttgagactagcttgaccaacatggtaaaaccctgtctctactaaaaatacaaaattagccaggtgtggtggtgygtgcctgtaatcccagctactcaggaggctgaagtgggagaatcgcttgaacctgggtggtggaggttgcagtgagctgagatcacacccctgcactccagcctgggtgatgcagcaagactccatcaaaaaaaaaaaaaaa

SEQ ID NO: 359986 - DNA, 519 bp, Homo sapiens
ttgtggggtttatagcatatgtagaagaaaaatgtatgacaaaaaagatggggtgtgggagagggaagtacacttttgtaagtttctgatactatacatacagtygtataacatttgcttgataagttaaagatttatgctgtaagccttagagctgtagttttaggagtgctccctggggatatctgtcacaatgtgtggatgggtattacccacatctagtgggtagatgccaaggatgttgctaaacactctgcaatacacaagagaaccccccaccccctaacaaagaattatctggctcaaaataccagtagtgccagagctgagaaaccctgttctacagcaaccactaaaacagaaagcgaagagatgggacaaagaagtcaacaaaggagatacaacggaatcataaaaaatagttcattaatctgaaagaaggcaggacaagtaagtggaaaagggaacaaagaccagatgggccaaaaggaaaacaaatgagttggcaggtttaaactc

SEQ ID NO: 359987 - DNA, 519 bp, Homo sapiens
ttgtggggtttatagcatatgtagaagaaaaatgtatgacaaaaaagatggggtgtgggagagggaagtacacttttgtaagtttctgatactatacatacagtcgtataacatttgcttgataagttaaagatttatgctgtaagccttagagctgtagttttaggagtgctccctggggatatctgtcacaatgtgtggatgggtattacccacatctagtgggtagatgccaaggatgytgctaaacactctgcaatacacaagagaaccccccaccccctaacaaagaattatctggctcaaaataccagtagtgccagagctgagaaaccctgttctacagcaaccactaaaacagaaagcgaagagatgggacaaagaagtcaacaaaggagatacaacggaatcataaaaaatagttcattaatctgaaagaaggcaggacaagtaagtggaaaagggaacaaagaccagatgggccaaaaggaaaacaaatgagttggcaggtttaaactc

SEQ ID NO: 359988 - DNA, 535 bp, Homo sapiens
gtttttgcaaaactctgaactatgccaccacccactttgtcttttctctttctaaactctgggtgttctgcttttctaataattaccaatatgttggaatcacacttgagttggaatcctggctctgccacctgggtggcacattctgtgtgaccccaggcagttaactttacctctctgagactcatttccttcacctgaaaaatgagggttaattcagtgctggattctagtaagtgcttagtgaatggttagagtatgggattatggccattacgatttaatctatgttcaaaccagmatcagagagaatagaattggaaagacaaagcttctgtgtcctcatctgtaaaacagggataatattattcaactgacagagttgtcctgagaaaccactccaagatgcccataatagtacctggtagatacctggctgtactctgtgttaacttccttccctcccctgccttctcttccccttcccttctgtttgggtaatcacacaggtccacaggactgcagaagaatatat

SEQ ID NO: 359989 - DNA, 547 bp, Homo sapiens
tgtcattttgggtcccttttctcaagacccagaggggagctgctacttagcacacccatgagccagagggagagcctcactgctctaaaagtctccgcagagaaagaaaaggagaaacaggcatggagtacctaccatgtacttggtrctttacctgcattatctcatttaatcctcccaggcttacaaggtgatgctgttatctctgatttatagagaagaaacctgaagttcaaacaggacaagcccagagtcaccaggatgagagggaacctggattcagctctgactggagttagtctgggctctttctacgacccaagctgtcagttcctttctttggtttacaaggtgctactccgggggagtggtggacacagaatgtttaaaggcgttcagcacagcctatgggaaagggcaagtactcaagaggcaaagactcaggctccgggctcgctcagccataacaagcgtcatgatgggaaatagactacgcaatcgtgcagagcctcatctgcaaaatgagtacgtgcgtgtgtgtttgtgt

SEQ ID NO: 359990 - DNA, 547 bp, Homo sapiens
tgtcattttgggtcccttttctcaagacccagaggggagctgctacttagcacacccatgagccagagggagagcctcactgctctaaaagtctccgcagagaaagaaaaggagaaacaggcatggagtacctaccatgtacttggtactttacctgcattatctcatttaatcctcccaggcttacaaggtgatgctgttatctctgatttatagagaagaaacctgaagttcaaacaggacaagcccagagtcaccaggatgagagggaacctggattcagctctgactggagttagtctgggctctttctacgacccaagctgtcagttcctttctttggtttacaaggtgctactccgggggagtggtggacacagaatgtttaaaggcgttcagcacagcctatgggaaagggcaagtactcaagaggcaaagactcaggctccgggctcgctcagccataacaagygtcatgatgggaaatagactacgcaatcgtgcagagcctcatctgcaaaatgagtacgtgcgtgtgtgtttgtgt

SEQ ID NO: 359991 - DNA, 560 bp, Homo sapiens
aaactactttaaagttcatatggaaccaaaaaagagcctgcatcccaagtcaatcctaagcgaaaagaacaaagctggaggcatcacacaacctgacttcaaactatactacaagactacagtaaccaaaacagcatggtactggtaccaaaacagagttatagaccaatgcaacagaacagagccatctgatacctttcagtcaatgctactggtggcatgtggggccctagaggtggccagtgttatagcatctaagcaaatgtccaggagtcatgatggggacacctgtactggtggaaggagagagaggacttctcccctgcggttttactcattgcacatggatattcctacacccttcccttcyttccaccatggaactggcactggagttgttgttccttccttcctttcatgtgcttcagcatctccactgcctttctccctcactctgtttttttttgtacacgcttggcctcacctaattctctctttttctggggtcttttttagatgcaccaagtggttttttgcccttttagtcattctcattttac

SEQ ID NO: 359992 - DNA, 613 bp, Homo sapiens
tctttcccaactatccctcattgttatgtttgtcaaatagtggagtcagataaaatgcttgactggctaatgacaggcaatttatttaacctctctgagcctcaaattcttcacttatgaaatggagaaaataatatctgcctccatggtttgtcatgagaattcagtgaagagctgaatgtaaggcccttagtacctgacacaagcaagcactcagttrtctagcaatgaagccactgctgaatatacacttctcaacccaaacaccccttttcccttgaggaaaaccagcagctcccagagctggggagggcctgtagaattgctgatgaactttttccccaaagggcctcctattttctttattcgtattcaattaggacttttagcacagttttctctgtctcactgccttgtccccatttccaaagtcagtccattgctgacttttggcaattattcctgtgtaatttcttttactttgttcctttcttccacacccacaacactgctcagtgtagatcccattcccttcttccagacccatcacaataacctttaaatgtttaactcatctcccaagtgcttgcccaatttgggcatgtacaaatac

SEQ ID NO: 359993 - DNA, 598 bp, Homo sapiens
tccccatagggtcaccagttatatggtggcattgtgtaacttctttctgaggagtatttacattttacatacaaacttggatcaagttcaagccttgggtctgtccttgacctctgtcccttaaccttaaacaaatcacttatcctctttcagttccagttttttttttccttcgccttcacaagggggattgtcattattgccatgaatgtttgtgaggatcagagacaatgagtctgtggaactatcaagaactatacccaggtaggtcattggatctgttcttttctcccaggaggagaatgtcttcagcagtgagaaggaggaacctacttggggcaagaggggaacgggctgtcctctcaccccctatggtttaggcatgaatgtgcattcctagatatcctacctgtccctgtaggaaaagggttgtgttctcatcatggctctgtatctggcttactttgtggtctgaggtcactttccctctcctgtgtttgtatgcatttatttttaatatatgaagggtagtgatggtgggatcagatgatctctaaakttgtgagcatactctcctgctgctgaagtcagtgctgct

SEQ ID NO: 359994 - DNA, 594 bp, Homo sapiens
ctaggcaactgcgaataggacaaaactttcttaacattgactgcacatgaacatcacctgtggagcttttgaaaaataggacatcatacccttccctggaccaactgaatcagggcccctggggcatacatcatagaacattagtgttttttcaagctgatcaattggttctgattttagcagtgaaggctaaaagctactgctttacctgcagaggattctttacatctaaatgatgatgcctagttgaccaagtggtgcctgcattccatatacccrttcgtgttatgaagattaccttggcctctgactcccttcttggtgccagggaggctaatactagagctacttgctaccagcgctgccttacagaaatacaatgtgagacacacatgcaattttacattttctagtaaccctatttttaaaaaagttgaaagaaacaaacaaaattaatttttaaaacatgttttatctaacccaatatagacaaaataataacatttcaacgtgtaataaacaaaaaaagaatcactaggaccctttacatttttattttttggtatcgaatcttggcgatctggtgtgtgtgtt

SEQ ID NO: 359995 - DNA, 594 bp, Homo sapiens
ctaggcaactgcgaataggacaaaactttcttaacattgactgcacatgaacatcacctgtggagcttttgaaaaataggacatcatacccttccctggaccaactgaatcagggcccctggggcatacatcatagaacattagtgttttttcaagctgatcaattggttctgattttagcagtgaaggctaaaagctactgctttacctgcagaggattctttacatctaaatgatgatgcctagttgaccaagtggtgcctgcattccatatacccgttsgtgttatgaagattaccttggcctctgactcccttcttggtgccagggaggctaatactagagctacttgctaccagcgctgccttacagaaatacaatgtgagacacacatgcaattttacattttctagtaaccctatttttaaaaaagttgaaagaaacaaacaaaattaatttttaaaacatgttttatctaacccaatatagacaaaataataacatttcaacgtgtaataaacaaaaaaagaatcactaggaccctttacatttttattttttggtatcgaatcttggcgatctggtgtgtgtgtt

SEQ ID NO: 359996 - DNA, 610 bp, Homo sapiens
tcactaattagcagcctcaagagttagattaaagttcaaggttacatccaagtagcaacaggccctcgctcctgctccaagttttacagcatggcccatcaaatgtaattctgaaaatctgactattgctttgcaaagtgtgtggaattgcattctaacagccactatgcacttttgatactcaccgcagccctgcgttaatgagttttattcccatttttaaaataagaaaaatgaagctctaaaaagctgtccaatgctcagagccagcaagttcaaagtccaaytttgcataccactaattgcattacacagaaaccacaggtacccttcctctctgaccttgggcctctcttctctcagaggacttacacaggactcttgccctctcccccacctctactcctaggaatcctgtccctcctaggagctgggagagtggaaagtggagccaccccatgtggcccaggtcatcagagtcttggcaacatgtccctgtggcatgcagaggacacagtcccttcaggagccacctgacttcaacctctgcagcaggcatggccatgagttgtgtgggtcaattgttagggagttgaagacagtaaggtcc

SEQ ID NO: 359997 - DNA, 620 bp, Homo sapiens
catatgtactgaaagcgaagaaaacagcatttagtttcatcacattttgtcacatcagacaagctggctgctacttgccaggacagaaagcaagaaatcatttcagcaacatattgtttaaaatcagctaactctgttgaaatggcactaggccaggcagtccagtagttgggaggatggatagctttagggaatcaagaaagatacttttgtctttagagaaagaggaataaataagctaatacatgtgaggtgcttagacccattcctggccctaagtaagcactcaggaaatgtgagctatttccattattatgacttgcggtgagaattttgagtgaaggacaaaggcaaatagcattgggcagctgtgatgtgccagactctggctgggcatgtttcatgtcatctcaattctgtgcaataaccctggaagactgtgtgaaaatctacattttataaatgggtgaactgcagtgctgggagcatctgtaatccacctaaagtcacagacycagcaggtgacaaagcttgggtttgaacccaagtcctcctgactgcaaaggtacatgcacgttctgcagctgcatgaggaaggagtccatcagtaggaggcaggg

SEQ ID NO: 359998 - DNA, 622 bp, Homo sapiens
agacttcaatggccttctgtatattgttacaattctagccaagaaacattatgtcattttcatatcacacctctctgggtaggtcagagcccttttatgtttcttccccattcagtactctgatcaaaattaaaaatcagagagggagattgagttgctcaaggtcacaccgcaggtcactgggaagcttgaaatagactgtaaggagattcattcttaagcctacagatgacacttttgtatcacagcaatatcagtttgttcctctgtaaactctctcttcttccaaaatatgtattctggccatccccatctgattctgatggcatatctgatctgaaagttgttgatactctgatcttagaaagtgaagggtttaatcttctcttggaacccctcccagtgaaaattattttsccactttgaaatggcacgggcatccactgtgaactcacatccataaatctaagtctactgctcaggaaagcagatgaggtttgattctgcttctcagcacagtctcacagagaaaattatggaaagaatttgatttatagaaccacctcaaaggctctggagtgagacgcatgttgattcactttattaccatttattttacact

SEQ ID NO: 359999 - DNA, 629 bp, Homo sapiens
gtctcctacgctcttaggtgggctatgatgctggggaaagacgaaaatggggcaggaacatgtaggcacccgctatgtgccaggagtgaggaggggtcagctcaccaaaagtggccttgctaataaatgatgtagctgagatctctacaaaggcaagtctggcaacttaggtggaatgggttgccaggaagtgggacacgggagagggataaaggaaggctactatatacatggctctgtgcctcccatttgttatcttctttaatcctcaggacaacactcwggggctatacccattttaccaatgaggaaaccgaagctcagaaggttagtagaaaaagtggtgatgaggatctgcatctcacactcttaaaatatagcatttggaatattcaatgcacgccaccacaactgtctaattttaaaaaaattatagagttggggtcttgctacgttacctaggcaggtgtagaactcctgagctcaagcagtcctcccacctcagcctcccaaagtgttgggattgcaggtgtgagccaccaggccagactggaatttttaatttatgttgacccctggctacctcactcccattgcctctctctcgtgctccacgttccaagaatttt

SEQ ID NO: 360000 - DNA, 629 bp, Homo sapiens
gtctcctacgctcttaggtgggctatgatgctggggaaagacgaaaatggggcaggaacatgtaggcacccgctatgtgccaggagtgaggaggggtcagctcaccaaaagtggccttgctaataaatgatgtagctgagatctctacaaaggcaagtctggcaacttaggtggaatgggttgccaggaagtgggacacgggagagggataaaggaaggctactatatacatggctctgtgcctcccatttgttatcttctttaatcctcaggacaacactctggggctatacccattttaccaatgaggaaaccgaagctcagaaggttagtagaaaaagtggtgatgaggatctgcatctcacactcttaaaatatagcatttggaatattcaatgcacgccaccacaactgtctaattttaaaaaaattatagagttggggtcttgctacgttacctaggcaggtgtagaactcctgagctcaagcagtcctcccacctcagcctcccaaagtgttgggattgcaggtgtgagccaccakgccagactggaatttttaatttatgttgacccctggctacctcactcccattgcctctctctcgtgctccacgttccaagaatttt

SEQ ID NO: 360001 - DNA, 565 bp, Homo sapiens
gtattatttctgttttctcatcaagcctgagagtgacttatacaaaatacttaccaaatataaatttagtcagcaagaatagtttatcataagttttagaaaaaaaaaagcagacatctgtctatgatgtttagctgtccagtatacaaatcattatatggacaacaaaattccaacacaaaaagactctaaaaatccttkctcaaccattaaccagtgagataaggcatgattcaatcaacaatggaaactggttgaaaatgatgataacatataataaaatttaaaaacagacaaggtgacctaatattacctttaaaacttctctacaacccattgggaatgagtaagttgcatttaacaacatttagatgcacagataaaattttaatcaaatttactttctccagtgactagaaaaaaatgtcactggttaatggaacgtgtgttttatagacaaagaactaaacagcatttctttaggtaaacttatggttcacaaatgaagtaatattatgaagtctttaaagtttggttggagtaaatgaattataacccagagtat

SEQ ID NO: 360002 - DNA, 578 bp, Homo sapiens
cgttaactcacaaaacaaatatataaaccaattaatatcaactacagtgaaaagtgaaacaatttaactcttactaagcctgaagaaaatgacatgatcacactatgtctgatttctattcacaacatttttattatctagtaagggatgcaatggaaacaaacgtctaagtataaatatataaaaatatgaataaaattaatcacacttctattatggtcaattgcagtaaacatactaaaatacagttattatagataactacaggaatccaggattctatcttggaggcggtactatttgatgcaagaactgcattttaatatgatgctatcagaacaaatgagctgaaatggggagagaatcccatagagaaaaaatcaacaaaatcataaggtgaagatttatgtatagagaaataagcctaaaaagcaagstattttctttattataaaacagattaaaaattctaaacaatagactacatagaatggccacatttgaaacctttctacagaagcaggacaatcaggaatcaaatgaaataaaataagaagaaataaattggaaaggcaaaa

SEQ ID NO: 360003 - DNA, 518 bp, Homo sapiens
  misc_feature (1)...(518): n = A,T,C or G
gcaagctgccattttagcattcagtggttaagccaaggggcaaacagctggagcagagctagcagaaaaacagtgggatgtagtttccaaaccacaagtaccttgtgtctaattcttgcattcttcagcatgaagattgttttttttgttgttgttgtttgtttgtttttgagatggagtctgactctgttgccaggctggagtgcagtggtgtgatcttggctcactgcaacctcagcctcccaggtacaagcgattttcctgcctcaacctcccgagtagctgggactacgggcgcgtgccactacacccagctaatttttgtatttttagtagagacagggtttcaccatgttggccaggatggtctctatctgttgacctcatgatccgtctgcctcggcctcccaaagtgctgggattacagacatgagccmccttgcctggccaaatgtttttaatattacaaaaatcagacaaatgaaattcctcatttgtcctcgcatgctcttgnnnnn

SEQ ID NO: 360004 - DNA, 618 bp, Homo sapiens
caaatagcagcaggacagtagtaagtatatgtctgtctctacatatagtattttcctatttatccagctcattacataactatttttactttattatttcaaaattggaaaatgatataactaataataatccccatacataggaagggatttgactgtaaagataaatttaggccgggagtggtagctcacacctgtaatcccagcactttgggaggctgaagcgggaaggatcacctgaggtcaggagtttgagaccagcctggccaacatggtgaaaccccgtctttactaaatataccaaatgttagccgggcatagtggcgagtgcctgtaataacagctactcaggaggctgagacaggagaatctcttgaacctgggaggcagaagttgcagtgagcccaaattatgccattgcactccagcctgggcaacaagagtgaaactccatctcaaaaaaaaaaaaaaaaaaagtataaattcaaagtcacactgkgtttcacatgtagcatactgggtactctccagggtttctgcaaaagccgttcttcagcatgttagtcattagtagactctgacacattctatatttgtcactcatcaggttagtttaat

SEQ ID NO: 360005 - DNA, 618 bp, Homo sapiens
caaatagcagcaggacagtagtaagtatatgtctgtctctacatatagtattttcctatttatccagctcattacataactatttttactttattatttcaaaattggaaaatgatataactaataataatccccatacataggaagggatttgactgtaaagataaatttaggccgggagtggtagctcacacctgtaatcccagcactttgggaggctgaagcgggaaggatcacctgaggtcaggagtttgagaccagcctggccaacatggtgaaaccccgtctttactaaatataccaaatgttagccgggcatagtggcgagtgcctgtaataacagctactcaggaggctgagacaggagaatctcttgaacctgggaggcagaagttgcagtgagcccaaattatgccattgcactccagcctgggcaacaagagtgaaactccatctcaaaaaaaaaaaaaaaaaaagtataaattcaaagtcacactgggtttcacatgtagcatactgkgtactctccagggtttctgcaaaagccgttcttcagcatgttagtcattagtagactctgacacattctatatttgtcactcatcaggttagtttaat

SEQ ID NO: 360006 - DNA, 601 bp, Homo sapiens
aggtttaataaatatcccctggccaattaaaaaaatgtagatggcatcttttccaaatttctgtgactttagctcttagtcccttgttcaattgcctcgtctattttaacaggtgatctaagtgagcctacccaagaacagaagatgaggatactcataacaatakattttattattaaaatatagactaatgtttcattactgtgttattcactagtgtattttttaaagcagggatatactggtcatgactactgaacataaatgaaccaaggagttcattactgagggtttaagtggaatatttttcagtctcctggagtagccttttccacttattttgttttccaaatattgcctttgtgtatatatgagttactgaagctggctatcaagggatttcagcaatcgagagtcccttcaagattgtaatcactgccatctggatctcaaagatcatccagtcgcctggttcccagcctgaccttcccattggagtcacctggggactaagttccacctgcagagcttctcatttaattggcatgggctgtgacctggacagtgggatatttttaaacctgcccagatgaatccaata

SEQ ID NO: 360007 - DNA, 592 bp, Homo sapiens
gtagaccatatgttaggtcacaaaacaagtcaaaacattcaaaaaattaaagtaatattaagcatcttctctgcaacaatgaaataaaactagaaatcaatagcaagaggaatttttaaaactatacaaatatatggaaattaaacaatatgctcctgaatgaccagtatgtcaataaagaaattaagaaggaaattgaaaaatttcttkaaacaaatgataatagaaacacaacataccaaaatctatggaatacagtgaaagcagtagaagaaaaacttcaaataaatcatctaattatgcatcttaaagaactatacaaacaagagcaaaacaaactcaaaattagtagaagaaaataaataataaagatcagagcataaaataattttaaatgaagaaaacaatacataagataaatgaaacaaaaagttgatttttttgaaaaggtaaacaaaattgacaaatctttagactaagaaaaagcaaaagaagactcaaataaataaaatcagagatgaataaaaagacattactgctgagaccagcttggtcatggagaccttaacccagcagcactagaggaattaag

SEQ ID NO: 360008 - DNA, 598 bp, Homo sapiens
aaaggcttgctgtatttgtgccttcatgagagggacaatattttttccaggatcatatccatgtaatttaacaatctgagttcacccatttcctatcatagtagcaatttgatccaaataaggagtcaaagtccctgaattagtatgtggaagagaaagacactgtacaagatcttgctcttgaacaataacaycagtaggtgaatgctgagttgaaaaaatttgcaaatctagagtcttctctggatctattctattgatttgagctttatggacttgctttttgatgacttgcagctctgcctcagcttcttttgttaactgctgagggctagtgagactaggatctcctctaaggatagaaaatagattactcaggtaggaatgcctagggcaggtcatgtccaattaatttctcctagtaatttttgaaagtcatttaatgttttcaattgatccctacatatggttactttctgtggcacaatggtggtatcatttactaaggtccccaagaaagaagtaaggagtagtagtctgaattctgtcaggagctataattaaaccagcatgagaaattaagttttgcaagagatca

SEQ ID NO: 360009 - DNA, 487 bp, Homo sapiens
gtatgaaactactacaagaaaacattggggaagctctccaggacgttggtctgggcaaaaacttcttgaataataccctataagcacaggcaaccaaaacaaaaatggacaaatggggtcacatcatgttaaaaaaaaaacttcagcatagcaaaggaaacaatgaacaaagtgaagagacaactcacagaatgggagaaaatatttgaagaaaaacccatttgacaaataattaataaccagaatatataaagagctcaaacaattctaggaaagaaatctaataattcaattttaaaatgggctaaagttttgaatagmtatttctcacaaaaagacaaacaaatggcaaacatgcatatgatgacgatcattgatcatcagagaaaggcaaatcaaagctacaatgagatatcatcctatccccattaaataggcttttttttttttctgagatggagtcttgctccatcaccaggccagaatg

SEQ ID NO: 360010 - DNA, 500 bp, Homo sapiens
gccaaggcaggtggatcccttgagctagggagttcaagaccagcctgggcaacatggcaaaaacctgtctctacaaaaaaacacaaaaattagccaggcatagtggcacccaactgttgtcccagctacttgggaggctgaagcgggaggattgctggcatccagaaggcacaggttgcagtgaaccatgatggcaccactgcactccagcttgggcaacaaagcaagtccycatgtcaaaaacaaaagcaaaaacaaattatatcttaaaacctagagaaattaatatgatacattagaaagtataaacagcaaggtaaagaataatgtgtattatatgatccaattttgtgaaagacaaaatgaaacaaattaaaattcttatttattggtatataggtcgatatgagcatagagaaagatatagaaatgtacaaaacaggctgttcacctcagaaacctggatctgaaaagagttgaagaactaaagttaatttttg

SEQ ID NO: 360011 - DNA, 539 bp, Homo sapiens
tttcactatcaaaatgttttgattggcagtactttacaacagtgaaatagaaattgatatgaatcaacaccaatgtaattcagcactgaaatcaagactaaaaatatattagtgaatttaattcctaagaataactattaagatgctgaggtaaagattcaaaaccggctaggcgtggtgggtcatgcccataatcccagcactctgggaggccaaggagggtggatcacctgaggtcaggagttaaagaccagcctggccaacatggaaaaaccccatctctactaaaattgcaaaaattagccaggcatggtggcatgcccctgtaatcccagctacttgggagagaagagaaagagaagaaaaaaaaagaagaaagcttcactcttcaattttgacwtctgcatttcttgactcaaatctaacctagaaagcagtctctgcatataaaacagagaacaaaacaggatgtgcatgctaagttccaaatgagttacataaacaagaagcaccacattagtaatgtggagagagagcta

SEQ ID NO: 360012 - DNA, 469 bp, Homo sapiens
acatcaaagaccaaaggtagataaatccacgaagttgaggaaaaaccagtgcaaaaaggctgagaattccaaaaaccagaaaggctcttctcctccaaaggatcaaaactcctcgccagcaagggaacaaaaccagatggagaatgagtttgatgaattgacagaagtaggcttcagaaggtgggtaataacaagtaagctaaaggagcatgttctaacccaatgcaaggaagttaagaaccttgaaaaaaggttagaggaatttctaactasaataaccagtttagagaagaacgtaaatgactgatggagctgaaaaacacagcatgagaactttgtgaagcatacacaagtatcaatagccaaatggatcaagcagaagaaaggatatcagagactgaagatcaacttaatgaaataaagcatgaagacaacattagagaaaaaagaatgaaaaggaactaacaaa

SEQ ID NO: 360013 - DNA, 602 bp, Homo sapiens
aaacttcacaatgggaaaggtctatggccaagtaacaatgattcctggattccttacaagaagtttagattttaccctctaagaacaagaacgctgttaaaactttttggagaagattgatgatatgatcagattggcatattaaactcattcttttggccttgaggagggtgtattagaggtgaggagaagaatagagagrgtgaggagaagaatagagagaatgaggaggttttagctgtgaacaagacagaatggattctgtttcaagtagtgacaaaggaaaagcagggaaccagataaatgagacattcttagaacatatcagtgacatgtcatcaatatcaagagtgtgtggtaaaaaaggaagaggaagaaagctaattccaaagcatcagcctaacaacttgatgtggttgtccaaaggttgtccaaatttaccaacttaggatctaaagacagtatcaggtatttgtggggaagctggttgtcttagtccattttctgctgctataacagaatacctgagactgggtgatttatgatgaacagagaaatgtattggctcacagttctgaaggctgggaagttcaatatcaagg

SEQ ID NO: 360014 - DNA, 602 bp, Homo sapiens
aaacttcacaatgggaaaggtctatggccaagtaacaatgattcctggattccttacaagaagtttagattttaccctctaagaacaagaacgctgttaaaactttttggagaagattgatgatatgatcagattggcatattaaactcattcttttggccttgaggagggtgtattagaggtgaggagaagaatagagaggrtgaggagaagaatagagagaatgaggaggttttagctgtgaacaagacagaatggattctgtttcaagtagtgacaaaggaaaagcagggaaccagataaatgagacattcttagaacatatcagtgacatgtcatcaatatcaagagtgtgtggtaaaaaaggaagaggaagaaagctaattccaaagcatcagcctaacaacttgatgtggttgtccaaaggttgtccaaatttaccaacttaggatctaaagacagtatcaggtatttgtggggaagctggttgtcttagtccattttctgctgctataacagaatacctgagactgggtgatttatgatgaacagagaaatgtattggctcacagttctgaaggctgggaagttcaatatcaagg

SEQ ID NO: 360015 - DNA, 493 bp, Homo sapiens
caatttgctcattttcttatttttaaaaaattattgatttgtaagaagtcattttgttctattgatgctattcattatatattggtttgtactctacaacctttataaaatcttgtgtagttatagtattttaactgtggtttcaattgtatttatgatatagtatatcttcttatttttgaataacagcctgttttctttctttccatttttaagcattctgtgttgttcttgcctaccgccatagcttgtactcctatattcttcagaataggaaaggcaatcaccagctaccttgtcttctccttgatcttagagaaaatgtcttaattatgtttttatttgtcggttgtttrtttttgcatgctttttatcaagtttaggaagtcaatttatttttctaatttgccaatagatttttttaaagtaatggatggatgtttaattttatcaccatttctattgagaggaccatatgatttcctttcattaa

SEQ ID NO: 360016 - DNA, 567 bp, Homo sapiens
tgttataatttgtaaaaatgcaaaaaaaatcattaaaaaagatcacatgcaatttcaggtgcaagctgctgaaattttagcatatttccttccagtctttcagtgtaatttttatatagttgagatgtcatacaagcaattttatattctgcttattaaaaaawttttttaattttagcttttgtgagtacatagtaggtgtatatttttatgagaacattagctgttttgtataaccatgcaatgcataataatcaaatcatgtaagtggggtatccgtcttctaaaacatttatcctttgtgttgcaagctatgcatttatacctttttatttattttaaaatgtgcaatcaaattattattgactatagtcaccctgttgggctatcaaatactaggtcttattctttctaactactttttttgtaccgattaacacttgccagcttccctcccacctctgtactccctttgccagcctctgataaccatccttctattctctttctccataagttcaattgttttgattttcagattccacaaataaatgagaacatgtaaag

SEQ ID NO: 360017 - DNA, 567 bp, Homo sapiens
tgttataatttgtaaaaatgcaaaaaaaatcattaaaaaagatcacatgcaatttcaggtgcaagctgctgaaattttagcatatttccttccagtctttcagtgtaatttttatatagttgagatgtcatacaagcaattttatattctgcttattaaaaaaattttttaattttagcttttgtgagtacatagtaggtgtatatttttatgagaayattagctgttttgtataaccatgcaatgcataataatcaaatcatgtaagtggggtatccgtcttctaaaacatttatcctttgtgttgcaagctatgcatttatacctttttatttattttaaaatgtgcaatcaaattattattgactatagtcaccctgttgggctatcaaatactaggtcttattctttctaactactttttttgtaccgattaacacttgccagcttccctcccacctctgtactccctttgccagcctctgataaccatccttctattctctttctccataagttcaattgttttgattttcagattccacaaataaatgagaacatgtaaag

SEQ ID NO: 360018 - DNA, 567 bp, Homo sapiens
tgttataatttgtaaaaatgcaaaaaaaatcattaaaaaagatcacatgcaatttcaggtgcaagctgctgaaattttagcatatttccttccagtctttcagtgtaatttttatatagttgagatgtcatacaagcaattttatattctgcttattaaaaaaattttttaattttagcttttgtgagtacatagtaggtgtatatttttatgagaacrttagctgttttgtataaccatgcaatgcataataatcaaatcatgtaagtggggtatccgtcttctaaaacatttatcctttgtgttgcaagctatgcatttatacctttttatttattttaaaatgtgcaatcaaattattattgactatagtcaccctgttgggctatcaaatactaggtcttattctttctaactactttttttgtaccgattaacacttgccagcttccctcccacctctgtactccctttgccagcctctgataaccatccttctattctctttctccataagttcaattgttttgattttcagattccacaaataaatgagaacatgtaaag

SEQ ID NO: 360019 - DNA, 610 bp, Homo sapiens
taatggtgtaactacatactgcaggagaaccctgacctacctaggcgtcattataactgaatatgtagcccaaagtctcttcttgcttgtaactccatgagagctgaggatggggagcacagcattttttttcactgctgatcccccacatctacagccatgcatggcatatagaaggttcttgaaagtatgtattgaacaaaatggagacatttattaatttgttgtgtgcttaggatacattgccagaagaaaagttgctgggatagggaatgcttaagacttttgttatgttacatcaaattgcctccaaatagaagcacaagtttctctacatcttggcatatattgagtgttattttatgttttgccaacctgatatacagaattattatctcattatttgatttacatttcttttttggtgaattactattaatgtcattttccaatttgtattggggtatttatcacatttttattaatttgtaaggaatatttatatattaagktatttacatattactatttcttttttttttggagatggagtcttgctgtctcccaggcacaatgccattatttcctttcaagccttttgtcttcacca

SEQ ID NO: 360020 - DNA, 532 bp, Homo sapiens
taagaagccctgccagctttgcctccaaagtatatcttaaagtttttagtgcttaatgtctaaatgccttctctagaattgaatttctatgagagtagggaccttaggtctcttatttttctctaccttaagtgcttgatacatagtagaaagtcagtaagtattgaataaataaattacaatagaaggtagacagaaactccctcagcttcctattacttcagcacccacactcattctacyctccttctccatcatctacatctcttaaggaaactcactgttatttatttttgcttcttcacaatatgatttgtgagctttcttttttaaattatactttaagttctgggatacatttgcagaacctgcaggtttgttacataggtatacacatgcagggtttttacataggtatacacgtgccatggtggtttgctgcacccatcaacccgtcatctacattaggtatttctactaatgctatctctcccctagctccccaccccctgacaggccccagtgtgtgatg

SEQ ID NO: 360021 - DNA, 561 bp, Homo sapiens
tgactctgacactttatttctaaatgtgattctccctcctacctgtagattgctctctgcaaatcatgggggacaayttttataatgttaatgtgtcttttgttgtcaaataatgtcctggtcagatgaaatgttggaaaggaattagaaggaaggactcattcgggagaaggatgtcccatctataatgaagatgactctgattccgtgtatgcttcttgaatagtttgggagatggtcagatctcaaggaagttataaactctgtgtcagatctcattccaccactccaagtgaaagtacttagccatgactcattgcctttaatgagtaaaaacacatttttctgtatgtcttacagtataggcatttggagtaggaagttttgatttacctttgatcatcaaaactgcatgatggattttcattgacaaaagcatttgttatatgtaaacaatatttagaattattaagccttcaataatatgcatccaagacattctattgggtactctgggtatagaacagataaaccctcctctttttcctgcaggtacttgta

SEQ ID NO: 360022 - DNA, 561 bp, Homo sapiens
tgactctgacactttatttctaaatgtgattctccctcctacctgtagattgctctctgcaaatcatgggggacaacttttataatgtkaatgtgtcttttgttgtcaaataatgtcctggtcagatgaaatgttggaaaggaattagaaggaaggactcattcgggagaaggatgtcccatctataatgaagatgactctgattccgtgtatgcttcttgaatagtttgggagatggtcagatctcaaggaagttataaactctgtgtcagatctcattccaccactccaagtgaaagtacttagccatgactcattgcctttaatgagtaaaaacacatttttctgtatgtcttacagtataggcatttggagtaggaagttttgatttacctttgatcatcaaaactgcatgatggattttcattgacaaaagcatttgttatatgtaaacaatatttagaattattaagccttcaataatatgcatccaagacattctattgggtactctgggtatagaacagataaaccctcctctttttcctgcaggtacttgta

SEQ ID NO: 360023 - DNA, 571 bp, Homo sapiens
taccaggtaccaactggatatttgtcaaaggtcaggtgcatctccactcagaatcccttcagaattacaaaaatgtgaacgctgaatatytgagacaggcttcagttaatttagaaagtttattttgccaaggttgaggatgcttcagtgacacagcttcaggctgctccagtgacacagcttcaggaagtcctgacaacatgtgtgtaaggtggtcagataacacttttgttttatacattttcgggagatatgaggcatcaatcaacatatgtaagataaacacagatttggttcagaaaaggcaggacaactcgaagcaaagccgggacaactcaaagctgggagggggcttccagatcataggtatataagagacaaatggttgcattcttttgagtttctgattagtctttcccaaggagtcaatcagatatgcatttatctcggtgagcagaggggtgactttgaatagaatgagaggcaagtttgtcctaagcagttccgagtttgccttttccctttagcttagtgatttgggggccccaatatttattttactttcacagcc

SEQ ID NO: 360024 - DNA, 587 bp, Homo sapiens
accagaatgttctcacagagtcagtgaaatggtggtgggctctttggaagcataaggtccatcctattgaatgacatcaaccccacttcatgtatcctaatggtcagcacagtagaagggtctacatctgtgggccagtggtgaagggggacgtgagccagggcagtgggctcagcagcaagaggaggcacagcacaaggggcggggacaggtggagatgacacaggttgggcgatagcaagtggtgtggcaggagactcggccacagactggacgcaggcagcagcaggggcggcagcagcatgggcggcagcagctggattcacagcaagaggggcggcagcagctggagatgcagcagctgggacggcagcaggttggctggcagcacacagactggcagcactggggcctgcagcacctggacacacagcagctggggcgacagcagctggagatgcagcagctggggyggcagcaggtgggctggcagcacacagactggcagcactggggcttgcagcagctggacatacagcagctggggcggcagcagctggagatgcagcacctagggtggcagcagg

SEQ ID NO: 360025 - DNA, 533 bp, Homo sapiens
agacactcagtcatgggattgctggatcaaatggtagttctagttttagttctttgagaaatctccatactgttttccayagaggttgtactaatttacattctcaacaactgtttatgtgttccctttcagctccatcttcatcaacatttgttatttctgtctttttgatagcagccattcttactggtataagatgatctctcatggtggttttaatttgcatttgtttaatgattagtgatgataagcattatttcaaatgcttattggccatttgtatgtcttcttttgaaaaatgtctattcatgtccttttcccctttttaatggaattatttgcaatgtttttgttggtagagttcctcttaaattctggatattaatcccctgttggatggatagtttgcagatattttctcccattctgcaggttgcctgttcactccattgattatgtcttttgctgtgcatgacagaccaggagcaccatcatcttggacaaacactgccacttgaagttgcagctccctt

SEQ ID NO: 360026 - DNA, 533 bp, Homo sapiens
agacactcagtcatgggattgctggatcaaatggtagttctagttttagttctttgagaaatctccatactgttttccacagmggttgtactaatttacattctcaacaactgtttatgtgttccctttcagctccatcttcatcaacatttgttatttctgtctttttgatagcagccattcttactggtataagatgatctctcatggtggttttaatttgcatttgtttaatgattagtgatgataagcattatttcaaatgcttattggccatttgtatgtcttcttttgaaaaatgtctattcatgtccttttcccctttttaatggaattatttgcaatgtttttgttggtagagttcctcttaaattctggatattaatcccctgttggatggatagtttgcagatattttctcccattctgcaggttgcctgttcactccattgattatgtcttttgctgtgcatgacagaccaggagcaccatcatcttggacaaacactgccacttgaagttgcagctccctt

SEQ ID NO: 360027 - DNA, 533 bp, Homo sapiens
agacactcagtcatgggattgctggatcaaatggtagttctagttttagttctttgagaaatctccatactgttttccacagaggttgtactaatttacattctcaacaactgtttatgtgttccctttcagctccatcttcatcaacatttgttatttctgtctttttgatagcagccattcttactggtataagatgatctctcatggtggttttaatttgcatttgtttaatgattagtgatgataagcattatttcaaatgcttattggccatttgtatgtcttcttttgaaaaatgtctrttcatgtccttttcccctttttaatggaattatttgcaatgtttttgttggtagagttcctcttaaattctggatattaatcccctgttggatggatagtttgcagatattttctcccattctgcaggttgcctgttcactccattgattatgtcttttgctgtgcatgacagaccaggagcaccatcatcttggacaaacactgccacttgaagttgcagctccctt

SEQ ID NO: 360028 - DNA, 557 bp, Homo sapiens
gggagggggtttcagtgtgagctggtrtttctgactgaggcacatgcaagagccagatggagggaattggatgaaattactttgagcttccctctctgcactcaggtccatgtaagtctaataagtggaatataatgttatactgttaaccagtttctactgctgccctggtcctgatttccaggcttacacaaccaggatgataacaatctggctcctgagtgggcccctgcttcagcactggctggtgttctgagtctgcactggctctgatgcacccagacacagcatcgtattgaggtcctgagcctttgtcctcagtcagagtgaacagaagcaggttccaagctgttacggggttaaaaccctggtgagcccctttatggtgtatgagaacaactctaagatttcatcgagaacttgaattatgggaaaagaatcacatccttgaagaaccctgatgactggtacctaccgatgacccggtggagatcacttttattcacatgaattgactattttttttctttgtaaggtgagcgtgtgtgttttgctta

SEQ ID NO: 360029 - DNA, 557 bp, Homo sapiens
gggagggggtttcagtgtgagctggtatttctgactgaggcacatgcaagagccagatggagggaattggatgaaattactttgagcttccctctctgcactcaggtccatgtaagtctaataagtggaatataatgttatactgttaaccagtttctactgctgccctggtcctgatttccaggcttacacaaccaggatgataacaatctggctcctgagtgggcccctgcttcagcactggctggtgttctgagtctgcactggctctgatgcacccagacacagcatcgtattgaggtcctgagcctttgtcctcagtcagartgaacagaagcaggttccaagctgttacggggttaaaaccctggtgagcccctttatggtgtatgagaacaactctaagatttcatcgagaacttgaattatgggaaaagaatcacatccttgaagaaccctgatgactggtacctaccgatgacccggtggagatcacttttattcacatgaattgactattttttttctttgtaaggtgagcgtgtgtgttttgctta

SEQ ID NO: 360030 - DNA, 557 bp, Homo sapiens
gggagggggtttcagtgtgagctggtatttctgactgaggcacatgcaagagccagatggagggaattggatgaaattactttgagcttccctctctgcactcaggtccatgtaagtctaataagtggaatataatgttatactgttaaccagtttctactgctgccctggtcctgatttccaggcttacacaaccaggatgataacaatctggctcctgagtgggcccctgcttcagcactggctggtgttctgagtctgcactggctctgatgcacccagacacagcatcgtattgaggtcctgagcctttgtcctcagtcagagtgaacagaagcaggttccaagctgttacggggttaaaaccctggtgagcccstttatggtgtatgagaacaactctaagatttcatcgagaacttgaattatgggaaaagaatcacatccttgaagaaccctgatgactggtacctaccgatgacccggtggagatcacttttattcacatgaattgactattttttttctttgtaaggtgagcgtgtgtgttttgctta

SEQ ID NO: 360031 - DNA, 557 bp, Homo sapiens
gggagggggtttcagtgtgagctggtatttctgactgaggcacatgcaagagccagatggagggaattggatgaaattactttgagcttccctctctgcactcaggtccatgtaagtctaataagtggaatataatgttatactgttaaccagtttctactgctgccctggtcctgatttccaggcttacacaaccaggatgataacaatctggctcctgagtgggcccctgcttcagcactggctggtgttctgagtctgcactggctctgatgcacccagacacagcatcgtattgaggtcctgagcctttgtcctcagtcagagtgaacagaagcaggttccaagctgttacggggttaaaaccctggtgagcccctttatggtgtatgagaacaactctaagatttcmtcgagaacttgaattatgggaaaagaatcacatccttgaagaaccctgatgactggtacctaccgatgacccggtggagatcacttttattcacatgaattgactattttttttctttgtaaggtgagcgtgtgtgttttgctta

SEQ ID NO: 360032 - DNA, 632 bp, Homo sapiens
ttttcacatatttttataaatctttttcttgatttgttctccttcttacaataattttaatacacaattatttttactctagttaatgggattttttaagtgccctgaattccatttcagaactatgaagggaattaaatrtttatgttacatggataatagtattcaatattcatcaaacgcatgcaaaataagcaattaagaatatgcaactgtatcccattatgaacatatccttgatacgccttccaaacttaaattccaaattctttctgctattcagctagaagtttttgctaatattttcttcatggaaaattgtattttctgcattgattaataattaataacaaaaaaatttccattttttgaaatagcctatttcttattaattttttaatcattcaattgccccccagcttatacaaagaattatatagtaattattttttaacagttaacaagtcacagtaggtttgggttataacgaacatactgtggcttacaagataatatggaatagtggctaacccatgaatatagtgagaaaactttttaaaagttatattggagtaatcccttagctaataattattattgtagtttagctatttggctatgacaaactaata

SEQ ID NO: 360033 - DNA, 632 bp, Homo sapiens
ttttcacatatttttataaatctttttcttgatttgttctccttcttacaataattttaatacacaattatttttactctagttaatgggattttttaagtgccctgaattccatttcagaactatgaagggaattaaatgtttatgttacatggataatagtattcaatattcatcaaacgcatgcaaaataagcaattaagaatatgcaactgtatcccattatgaacatatccttgatacgccttccaaacttaaattccaaattctttctgctattcagctagaagtttttgctaatattttcttcatggaaaattgtattttctgcattgattaataattaataacaaaaaaatttccattttttgaaatagcctatttcttattaattttttaatcattcaattrccccccagcttatacaaagaattatatagtaattattttttaacagttaacaagtcacagtaggtttgggttataacgaacatactgtggcttacaagataatatggaatagtggctaacccatgaatatagtgagaaaactttttaaaagttatattggagtaatcccttagctaataattattattgtagtttagctatttggctatgacaaactaata

SEQ ID NO: 360034 - DNA, 524 bp, Homo sapiens
atgcttttatttgtcaaccaggcacctttatctcattgacattttatgattaccttcatgtgtttttgagttattatgatcccttcttaagagaaaagtaatcctaggttgacagagtttaaatgccatgtctaagatcataggtggcatgcagtacagtcagaattcagcctcaactctgtataattctcaagtccacagaatatactctacattgagctgcttctgtttaaattagtttaaatcacatcatgggatgcagcttattgaagacagtttttttgtgctggcagttatattccacagctttcatgttatatgtgttagkttcaaaaatgtctcttaaattcttctcctgtttctactatgagactgaattctggcttggataaaatctaattggagaatgccaatttaatgttttaattattagggtgtttgacaacatgtactcttcttgtgttgtgcagaaaatagacagaaatatacatataccattatattataacaaatgaaaagagatg

SEQ ID NO: 360035 - DNA, 536 bp, Homo sapiens
attttcttacatattttgtaatatttgcctatgcatttatcttatgcagaaattgacccctgygggggatcccatgcaatctgtgtgtggtttcttagaggtttatttttccttgtgcttaatgcttttttatttttatatttttttctttttggggtgttctttctgtgtgctattccttttgcttttgtttctgattatttcaaggacatgcactatttagtatcagcagtttctcaccttgaggttcctccactatgcatacagtgtgaattaagaagcttggtgatattgcatggtttagttgttcatgactttattaccacataaaattcctgtaggcagactaaggttttcttgtctccatcttatgcacaaaaatgctttcagaatgtaaaccttaagtttacattcttctcttttgacatcaaagggatcttggcatcatgagaacaatctgcccaaacagcgttcttaagaatataaactttatataagggtcttacttcctagatcctgcctggtgatagtttcag

SEQ ID NO: 360036 - DNA, 538 bp, Homo sapiens
ccggacatggtcacagctgcttcagcagagcacaaaaaaggacaggtagcaaagggactttcaaatttactaagctcactctcttactaatatgtatatttagaattgttatatcttcttgctgaattgatccctttattattatataatgacctcctttctctgtttttactgttgttgattttaagtttgttttatctgttataagtatagctaccccttctggaaaaataagctcataatggtcaaaattgagacataatgttataaaagccttgaattttaaagaaaaacataataattatttaaagaaaastaatcatttgaacatccaggcaaaatgtccatgtcaaccagaaggaaataaaacgagcttgttttcacacattttgatgaaaatgtcagaagataatagagtaatgctcaaggaaagaaaatgtgaggcaaagattttaaattcagccaaactgaacttcaggtataaaggccacaaacaaactattataaacatgaaaaaactcagtgaatattctccacc

SEQ ID NO: 360037 - DNA, 563 bp, Homo sapiens
aatttcaatatttctgtaagcagagaatcaactgacagtagctaaaaaatagagctcatgaggtatataaaggtaaccgttagtacaaaatacaaacattcctaaataccaaaaggcatactgagaaagagagagaatttaaaaggtgaaagattagaattttaaaagtgaaagacagagagatagaaagataaagagacaggcaagagaaatatttaacaaatatagaagataacttattatatatcattattatatataagtataataaaaatgacataattaaatttaagcatattgattatatccatacatataataggctcaactgactttaaaaaaagattttcagattggcttatgaaaaggaaagctcarcattatgctgtctataaagagacacaagtgaatcaacaagcatcagaaggttaaaagtgaaaaggtaaagacagagatacatatatgaaaatgcaaatggaagaaagcaggggctacaattcttctatcccacaagttagacttacacaaaaagcattacagaagacaaagtaggaaaaagtatt

SEQ ID NO: 360038 - DNA, 606 bp, Homo sapiens
ctgatggagctactctgtgtcttgaaggtatcaatgtcaccattggacttgtgataccgtactgtagttttgcaagaagttatcattggggggaaacttggtaaagagtacagaggtttctttgtattatttcttgcaactgcatgtgaatctacaattatctcaaaaagtttaattataaaaaagaaaataacctttggttataatttcacttttcatgcargtatatctataggaagaaaatatcctggtcaaaaagacccatgaaaatgtcatcttctctttaagttatttctcatgtagattcttcaactggtactaatgttatgggcttggtgaaagtgagcctgctcccagaggtggtttcactcttagaatgtaaataatttcagtttctggagtgtgcaaggctgaaggccagatactggtacgtttttcaaggtagtatttactaccctggaagacagccttcctgtttcctccaaaggatgcctaataagtatgtatggcactttgtgtttctttttaaattttacatattttacatattttgttgcttatggacttcaaaaatcagcgaatggtcaattttgaatccaacaaaaa

SEQ ID NO: 360039 - DNA, 531 bp, Homo sapiens
ccacaacaggagttgaccatggtgtcagagggtggaggttctcggtgggtttccaggagagtgagtgttctgagtttgatctctccttgttctctcttttgctttttataccctgctgagaaccactatgaccatgtgaataatcttgtggtttgcacattactaatagagaatcagttgttttttagtaaattagatagttgtccttatctrgtaaatatttctataaatagaaaaggcaacatttccttttcctgttgtattctgagctatccaatttggttaagccaagtgaatcagctctcattctccttccttcatctgatgtgtcttctgatgtgtagacccattacatgacattgtttgattggatttcataagttaattatttatttgactcctggataataagttgaaaatagattttatgatgactaaatctcctctgctctcaaagaggttaaaaataaattacatagaatgctggtgggaaaatgtgatgaaagattcatctttggggggtgataggag

SEQ ID NO: 360040 - DNA, 519 bp, Homo sapiens
tttttacaaaatgagcctcaaaagcgggcgagatgtctgtcactgtatgtatttgctgctaaattctactcactgtctggtgaagcatacttgatattaacttgaggaccacacacacaagttacgccaagtctatctaaactgtccttcttttattatatagactagcagaaggagtgtaagtttttctttcatatacctttttaaattttaaactaattttatggttgtctttttagaagttcatgattaaagacttcacttaggtaaacatcaaggaaattagaatgaagtgaacccaactgrtatttgcaatcaacactgaagaacatgtgttgtgtttaccccgcaacctggacgcatcgtattaacataccctttaaagaatgacatgggaaatgggcttctcttgtcaggtatcacatctattatgttagtactctgacatttttggaatgaaaacctagtatgtattttggaaataaaatgtaatttcattaggtgaattactgtgactta

SEQ ID NO: 360041 - DNA, 547 bp, Homo sapiens
actcaccccttttggggtgttttgttttctttgtggagtttcaagagtcatgggtagattcttcttaactctaaacctctattttcctgtattgcatgacctgacctctttggctttgaccttgttgtgtatagtggtagatgagagctacaaagttaaggggtggctgagcaaggtttacaaaaagtggtcttggctgttgttttgttttccttctaggaatttgtcrtttaaagatcctaattctagttcacaaatgcattctaaaggatcttctctgttgctttttctccccaaattaagctcaattcagcttgtctgtgtgcatttgcatgaggaactgaactgttgttttcagtggtgacccactgtggagtcctgcccacaaatggcacatattgatccaccacagaaaacctctaagcctcagctcagttcctctttttaagaagaaaactgggaaacaaataatctaagaatgaggagaaagcaaagagaatgattccctttcaagcactccataggttttatggcacctgtacttgcc

SEQ ID NO: 360042 - DNA, 551 bp, Homo sapiens
cccagaacctccaccctctgacaccatggtcagctcctgtygtggctctgtcagctctgagcagagctgtggcctggagaactgctgccgccccagctgctgccagaccacctgctgcaggaccacctgctgccgccccagctgctgcaagccccagtgctgccagtctgtgtgctaccagcccacctgctgccaccctagctgctgcatctccagctgctgccgcccctattgctgtgaatccagctgctgccgcccctgctgctgccgccccagctgctgccagaccacctgctgcaggaccacctgctgcaggaccacctgctgctgccccagctgctgtgtgtccagctgctgcagaccccagtgctgccagtctgtgtgctgccagcccacttgctgccgtcccagctgctgcatctccagctgctgccacccctcttgctgtgaatccagctgctgccgcccctgctgctgcgtgcgtccagtctgtggccgagtctcctgccacaccacttgctatcgcccaacctgtgtcatctccacctgcc

SEQ ID NO: 360043 - DNA, 551 bp, Homo sapiens
cccagaacctccaccctctgacaccatggtcagctcctgtcgtggctctgtcagctctgagcagagctgtggcctggagaactgctgcygccccagctgctgccagaccacctgctgcaggaccacctgctgccgccccagctgctgcaagccccagtgctgccagtctgtgtgctaccagcccacctgctgccaccctagctgctgcatctccagctgctgccgcccctattgctgtgaatccagctgctgccgcccctgctgctgccgccccagctgctgccagaccacctgctgcaggaccacctgctgcaggaccacctgctgctgccccagctgctgtgtgtccagctgctgcagaccccagtgctgccagtctgtgtgctgccagcccacttgctgccgtcccagctgctgcatctccagctgctgccacccctcttgctgtgaatccagctgctgccgcccctgctgctgcgtgcgtccagtctgtggccgagtctcctgccacaccacttgctatcgcccaacctgtgtcatctccacctgcc

SEQ ID NO: 360044 - DNA, 551 bp, Homo sapiens
cccagaacctccaccctctgacaccatggtcagctcctgtcgtggctctgtcagctctgagcagagctgtggcctggagaactgctgccgccccagctgctgccagaccacctgctgcaggaccacctgctgccgccccagctgctgcaagccccagtgctgccagtctgtgtgctaccagcccacctgctgccaccctagctgctgcatctccagctgctgccgcccctattgctgtgaatccagctgctgccgcccctgctgctgccgccccagctgctgccagaccacctgctgcaggaccacctgctgcaggaccacctgctgctgccccagctgctgtgtgtccagctgctgcagaccccagtgctgccagtctgtgtgctgccagcccacttgctgccgtcccagctrctgcatctccagctgctgccacccctcttgctgtgaatccagctgctgccgcccctgctgctgcgtgcgtccagtctgtggccgagtctcctgccacaccacttgctatcgcccaacctgtgtcatctccacctgcc

SEQ ID NO: 360045 - DNA, 610 bp, Homo sapiens
ttttaacattatgctttattagctagagtgaaatcaaagactataggttttatatggtcttttcagtattaaagtatatgaggcttgtaatttcctgtgtccacaagaactgggccacagcaggaatgagatgacacagtgtatctgcgtaataaagagactatttgcaaaggtgtagctagagttcagggaaagcaacaagggaaagctcagtacccagggctcacaataacaaggagcaggtaccccgggtctgaaggcctatgcaataatttgggtgaaatgtcccaagggtggcatgcgaaacttcttagaataagtatgcacagacactcaagtacagtcattggctttggagagagttatggtgctctgaagggtccaaagatgatatggaagacattgtggtgaaacccaaggtagacataaatttatgaatgggaaagtgtgactgcagttattattctgtggtcacatcagctttatctaaatgcacagtagagatggattttaagtgaatgaaacattgacttagttgatgtttcattcacttcaaagtctctcagtaytatttgcccatgctaaatatatagctttggaattgctcaag

SEQ ID NO: 360046 - DNA, 587 bp, Homo sapiens
tgtctttccctcattaggttctggatctctgggcaatgttacatgactatggggaaatacttatttttttcacaaatacaggcttcttgtgagtgaaaatagaacatagacttttttaggaaaaagttggatactatcatctgtatttgaatatacaagattttcttggacattgtgatgttaaccagcagacaagaaaattagattacagtgtctcacaataatatctgctttagaccaaaaaaagaaaaagaaaacataatctgttgtttaacacatgtagtaatcatgtaaagacaagttaattccttggacacatctgaatttttttcctttgtatatttaaaatcacggaaggcataaaactagattaataaaagtccttttatttcycttaggtgaaaaagaatgtggcaattgctgattttaaaatgccttttaaaaataagaattacatcaagatagtgcagtcatttacactaaataaaaaataaaggttggcttggattaatgtatcactgcctattaaaaagcattgtaacgcttctgccctctaaagaaaggaacctatttctcattcacaaaat

SEQ ID NO: 360047 - DNA, 535 bp, Homo sapiens
  misc_feature (1)...(535): n = A,T,C or G
ttctcttcttcctcccctctttattctactttaatattaaattgtgcttaragtgcggtttaaatgcctggagactgctctccactctccactctctactttaagctttcttggaagtttctacctgagagaggttcattatttgtgcttgcatgccccctctggtgggaggtagccttctgtcacctgtttcttggtgtctcagcctggtggcgggggcagaggcattctctatcgtcatctttcatgcttggttgtagacaggcccgatgttcttgggtcttggggtgggactttctcagtgatccgatcactctatagtaataaaggatcagaggatctctagtggtgtcatcccaggaagatttactgctcctccctttctaatttcaatgagtcttcacctaaggtcagcagggtctgtcatttttgttctgtaggaaagaggatccaagtgggtctttgtacttttcctgcattactgctgttccccttcagcaggcatgtacctcnnnnnnnnnnnnnnnnnnnnnnn

SEQ ID NO: 360048 - DNA, 535 bp, Homo sapiens
  misc_feature (1)...(535): n = A,T,C or G
ttctcttcttcctcccctctttattctactttaatattaaattgtgcttaaagtgcggtttaratgcctggagactgctctccactctccactctctactttaagctttcttggaagtttctacctgagagaggttcattatttgtgcttgcatgccccctctggtgggaggtagccttctgtcacctgtttcttggtgtctcagcctggtggcgggggcagaggcattctctatcgtcatctttcatgcttggttgtagacaggcccgatgttcttgggtcttggggtgggactttctcagtgatccgatcactctatagtaataaaggatcagaggatctctagtggtgtcatcccaggaagatttactgctcctccctttctaatttcaatgagtcttcacctaaggtcagcagggtctgtcatttttgttctgtaggaaagaggatccaagtgggtctttgtacttttcctgcattactgctgttccccttcagcaggcatgtacctcnnnnnnnnnnnnnnnnnnnnnnn

SEQ ID NO: 360049 - DNA, 593 bp, Homo sapiens
acattagctacatgactaagtaaaattaataaaactgatcagtgtcatctgatttgtagttgatatttcctttttgggggaaaggccaaaatggcagactagaagccgctaacaagtgctacttctagaggaaacaaaagggctagtgaacactgaccctgcaggctgatcatytgagcaaccacatcagaatccatcaaggcagcagaggaacgcagagagcagaaaggagcaaagcaggacaccaccctgtctgggcttaatgtagagtcagcagaacctctccaaaatggaaaaggatgagtaagacccctcttggggatacacactgcctacagggacaaatgcaagactgggaatgagatcatccctttggcccactccacggccccccaccatgcttctagactgaggcagatgttttctggaggcaactctcaaagtgcaaggggaactctaaaagactttggccccagagcagaccatcaccagcacaatagccccaacagaggtcgcagtttggtgcctgagagcagtaagattgctccacccagctcactggacaaggtcccatgttaggttctagtccagcg

SEQ ID NO: 360050 - DNA, 593 bp, Homo sapiens
acattagctacatgactaagtaaaattaataaaactgatcagtgtcatctgatttgtagttgatatttcctttttgggggaaaggccaaaatggcagactagaagccgctaacaagtgctacttctagaggaaacaaaagggctagtgaacactgaccctgcaggctgatcatttgagcaaccacatcagaatccatcaaggcagcagaggaacgcagagagcagaaaggagcaaagcaggacaccaccctgtctgggcttaatgtagagtcagcagaacctctccaaaatggaaaaggatgagtaagacccctcttggggatacacactgcctacagggacaaatgcaagactgggaatgagakcatccctttggcccactccacggccccccaccatgcttctagactgaggcagatgttttctggaggcaactctcaaagtgcaaggggaactctaaaagactttggccccagagcagaccatcaccagcacaatagccccaacagaggtcgcagtttggtgcctgagagcagtaagattgctccacccagctcactggacaaggtcccatgttaggttctagtccagcg

SEQ ID NO: 360051 - DNA, 617 bp, Homo sapiens
caggacaccaccctgtctgggcttaatgtagagtcagcagaacctctccaaaatggaaaaggatgagtaagacccctcttggggatacacactgcctacagggacaaatgcaagactgggaatgagatcatccctttggcccactccacggccccccaccatgcttctagactgaggcagatgttttctggaggcaactctcaaagtgcaaggggaactctaaaagactttggccccagagcagaccatcaccagcacaatagccccaacagaggtcgcagtttggtgcctgagagcagtaagattgctccacccagctcactggacaaggtcccatgttaggttctagtccagcggtcccacttctgccayaacttggctggcagccaccacctcctgttgtccttggaagtacccagacagcagggctggtgactccatgacccccacagatagccagatgggaaacacctgctagaacttccagcccagcagactcacttccctgtgaactcagctggaaagtgcagcttcctgttatcccgggaagcacccagatgacaaggcaggtgaccccacccacccttgccttggatagccaggtggacaatgcttgc

SEQ ID NO: 360052 - DNA, 417 bp, Homo sapiens
accatgatcaaatgttacaggagctgctaactagaataaacagtttaaagaggaacataaatgacctggagctgaaaaacacagcacaagaactttgtgaagcatacacaagtatccatagccaagtaaatcaagcagaagaaataatttcagagattgaagactatcttgctgaaataaggtaggcagacaagactagagaaaaaaagaatgaaaaggaaccaacacaaccttcaagaaatatggaacaaaatcttcaagaaatatgagactaagtaaagagactgaacctrcaactgtttggagtacttgaaagagacaaggagagtggaaccaagttggaaaacttccccaacctagaaagacaggccaacattcaaattcaagaaatacaaagaaccgcactaagatactcca

SEQ ID NO: 360053 - DNA, 537 bp, Homo sapiens
aaattgacagaagtaggcttcagaaggtgggtaacaacaaattttgctgaggtaaagaagaatgttctaacccaaggcaaagaagctaagaaccatgatcaaatgttacaggagctgctaactagaataaacagtttaaagaggaacataaatgacctggagctgaaaaacacagcacaagaactttgtgaagcatacacaagtatccatagccaagtaaatcaagcagaagaaataatttcagagattgaagactatcttgctgaaataaggtaggcagacaagactagagaaaaaaagaatgaaaaggaaccaacacaaccttcaagaaatatggaacaaaatcttcaagaaatatgagactaagtaaagagactgaacctgcractgtttggagtacttgaaagagacaaggagagtggaaccaagttggaaaacttccccaacctagaaagacaggccaacattcaaattcaagaaatacaaagaaccgcactaagatactccattagaagatcagccccaagacacataatc

SEQ ID NO: 360054 - DNA, 580 bp, Homo sapiens
taggctcagtgcactacaatccatgataattcaattatatatagtaaaatgacagaatgtacagtgtccctgcctatactaatatccacacaatgagaattgcacaagcagttggaaatactctcttcactactatctgtttatggttatttcttagaagaatatgtctctatatcatgctgagttgatttatggccatgaatatatatcctcccatctttcttctgtattctctgtaaaatctttgagtctttaattcattgagagtagctctcatcttgtccttcctctcattttagcttattttcaatcgggcaagcctgctttttataattttcctttgacattattcttttttcttctcttctckgccatctcatatttcctctccaacatatgtgttactctcatcactctgaaagacgaggttatcaaagtcaccactcatatattttataagacttgggactctaggagtcaagcacacactgctcttaacaaaccacagcttctcccctcagttcactggttttaaagtctttatagaaacaaaacaaaaatgtgttatgttctccttaac

SEQ ID NO: 360055 - DNA, 584 bp, Homo sapiens
gaccatgcatcgctgccaacataagagatatttgttggaaaaataggaacaaatgtataaaagttggcattaaaaaattagaaaatgtgtgggtttttttagtttgttttcttctgtcttttaaggcactaagttctaaaaattaatgtcccaaattcaaagccagggtctttctctccaagaaagacaatacgcatataagggaaaataatagtactaattttaggtttctaaaaggtcagcggataaaagcaattcaatgtttaagactgaaagaaaagaaatcaacctaaggaatcagctcatacatacacataaactaaatgagtgaataaacacacagacaaataaataaagccatcctaatgcaagaatctcttaggcatattgaaataatgctagatactagtattcctatcttgcaatcataaaatgctaatattttccatattttagggtttttattattaaagataatacataaaacatgcaaagaaggtgaggygtggcaggaagcataatttgctaaatgcttaatatgtaccaggaagtattggccttagaccctttccttgtgttagctc

SEQ ID NO: 360056 - DNA, 590 bp, Homo sapiens
caaaaaaccgaacaccgcatgttctcactcataggtgggaattgaacaatgagaacacatggacacaggaaggggaacatcacactctggggactgttgtggggtggggtgaggggggagggatagcattaggagatatacctaatgctaaatgatgagttaatgggtgcagcacacgagcatggcacatgtatacatatgtaactaacctgcacgttgtgcacatgtaccctaaaacttaaagtataataaaaaaaatagtgtcaggcaggtatttaggagtttgagggagaataaagaaaataggggcctggaatgttgtcttgaggagttgacagtctyctgagggaatttgtttgggcaggaggtagcaagccgacagggaggcagctgttcaatccagatgacttcccatacaacacactgactcatggtctgggttttaccaaatcctgagcatgctttcccaaaccaaaatattcaggagaattgcattgtgcagatggtggttggttaagggcttgaattttaggaaatgatgtctaaattaaggttaaaaattatttaagtaattttttttcctgaaaatt

SEQ ID NO: 360057 - DNA, 592 bp, Homo sapiens
gttcttaaaaacatttctgcaagaagattggttgcttctttgatgctgtcataacataggaatcttcaggttacattgcaataattttggctccccaattctacacaggtatgcagtcaacagatacgcagtctaattatagaactcaacttgttcacctccagcctataagctgattcttcttgtcaattttctctaaaagaaccccaaggccaaaagactctatttctctaaaatataatatattcatttgcaaacaatgaaattttaaaggttaaatattcatttgaaattttaaaatggattactttttacaaataattgtgttggcaataattatgaaacatttcaagggaatatataaatatattgatttattttatgaataaatgtgtgaggataaagcaatggaattcatgcatatcagcccatagatatttattgaaygtccaaatgtgcccaatatgattctaggtgacagtttcacagcattgaacaagaaaataaattccccattttatggtgcttatagtctagtatgacaagaaatttttttaaaaaacaatgagaattctaaacagtgtaataaact

SEQ ID NO: 360058 - DNA, 594 bp, Homo sapiens
ccttgaagcttatatttctgaactattactacacatgtccaaaaacaatagatttttttttctggtaaaaatatgacttttttttctcttatcagtgtttgaatagtgagcagtttcatttttaagcatcatgggatactattgagaggagtggttgagttaagttgcaaggcagatctactttgagcctattgtgtccacagattggaattttgacatgtccacataactctgttttgatgggtgtctgctcagaagatgttaggaagctcatgataaggaagtagaaatttaggcagttaggtttkacccacaacctcatagcctaggtggtaagcagttattctttcaagcaccttttatgggtattgtaatagaaatatttgaaacactggtacataagcagtatgactgtgactatattgggaaaaaaagaaagcttccaaagtatattttatgaggactaggtaggtttaatactaaaacctgatgaatgtttttttaacagctataagtaaatttcaattaaaagcataggtgcaaagattataaatgtaacagtgttcagtaggattaatctatgaaaaaaattat

SEQ ID NO: 360059 - DNA, 533 bp, Homo sapiens
actctgagttggggatgaaatacagtggcttttactttctttcatccctcctgaatttgacatagaagaaaagccaggaaatgagatggtgaaacaggaaaaagagggttaaatatgtctaaaaatgtatgatggatggccacattctagatataattgtgakgtgtttccacattgcctattatttattttttgtgataatttttgttatattaatataaaattacaccagctaatgtagatttacccattttagagaaaaccaagaaataatggctctgttaaacaatttgaatcacaggttactcctattttatgtgctagtgaaacctatggtgaaggagtcagcacattttaaatttaagaggaaaaaacttttccaaagaaaattattctatacataatacatggattcttaaaataaaacagctccacaaaaggcaaaagatctaacaatcggttggcttcaaatcccatgtctctccatcctttactcactagatgttcagcagcatccaatcaccaggcctgat

SEQ ID NO: 360060 - DNA, 533 bp, Homo sapiens
actctgagttggggatgaaatacagtggcttttactttctttcatccctcctgaatttgacatagaagaaaagccaggaaatgagatggtgaaacaggaaaaagagggttaaatatgtctaaaaatgtatgatggatggccacattctagatataattgtgatgtgtttccacattgcmtattatttattttttgtgataatttttgttatattaatataaaattacaccagctaatgtagatttacccattttagagaaaaccaagaaataatggctctgttaaacaatttgaatcacaggttactcctattttatgtgctagtgaaacctatggtgaaggagtcagcacattttaaatttaagaggaaaaaacttttccaaagaaaattattctatacataatacatggattcttaaaataaaacagctccacaaaaggcaaaagatctaacaatcggttggcttcaaatcccatgtctctccatcctttactcactagatgttcagcagcatccaatcaccaggcctgat

SEQ ID NO: 360061 - DNA, 624 bp, Homo sapiens
agcagctgaaaccagtttgcaatacttccaacatttgcagtactattgcatggctttcagagatactagagctagcctgacccatgttccctctgcagaatgaatttcaggtctatgggtcttgtccaagttcaccattagtgggataaatttcagctctactagtcctttcctccaagatctaagttttaataactccaaagtcttctctctattccctacctctagagctggaagctgcatcctacagttgccacttctgtgattatttgtagttctcttttaccctttcattgattttattaacaacaatcttatatctagttaacagttacttacatttaatatctatgttcaaataactggcgtggtttctgttccctgatggaccctgattgattcaatcaccctataggggctgttagagaaagcatttttgtccccatttcagaaagggtaacattttgttaatcacttgataagagaaaaacctgggacttggactcagttatcaaatccatttatagcaccttttccatagaaactacttccttttggacactgaataaaattcttctcctaaatgctctacatatccagtcaaraaacgtagaaaataaataa

SEQ ID NO: 360062 - DNA, 617 bp, Homo sapiens
tctctcctcatttgcttccaggtcctcaagactgaaacacacacacatagattaaaagtacaattatatctgtagtacctatcatattctgtatgatgtgaaaatgatatttgtaattataaattaatatatatcatatatatatattacttttctacaccaaaaatattcccaacccatatgtgtacatgtcttaccargagtttaacaaattcacttgctactttaatataataggatcatacttcagctcccttttgggggtttatggcacaccactaacagagaacaaagtaagaaatgagaaaaacagaaacccttccacctctctaattacattttgttaattaaacacctatgaaagtgtaaacactcattcttataaactgaatattatcaggatttgccttgagaaattcatggtaaatattataacagcatccgaattgcctgtacttattactgaatacagcctgttgtgtaggaggcaatatcctataaaagtcacatgctacgttatccatggaaactttagctgatgacaagtggcctattcagttacaaatatagtcacttagaaatatagggtggtgttttttcagctcactacccatata

SEQ ID NO: 360063 - DNA, 593 bp, Homo sapiens
ttctgttgaaagaaaagtacaaatagaaactgtcccaaattcaatgcataaatttaacataattttaaataaaatctcaaaagtattttttatggagaggaatgttgggaattagatacgtttttttctttaaaattrtgggtaaatatcaatatccaagaatagccaaggaattttaaaaataatagtaagacttacctgatcaggcattgaaacataacataaaactacaatcaaatttgcatagtttttttaattgtaatagacaaaaagaagagtgaggaaaaatattgaatcctgaagcagactgcaagattcatgataattaactatgattttgatggttttagttaataggtaaagaacgggttatttaagaaaaaaagtgcaggtaaaatgactatccttctagaagaaaataatattacagtttattatattctatgtgtaaaaatgaacttcatttggattatttaagtgtagaaaattaaactacactacaacttctgcaagttaatctgaaagactatttgtacaatctagaggcaaggagtagggaaagtttttttaagaagtccagaaaagacatatat

SEQ ID NO: 360064 - DNA, 607 bp, Homo sapiens
tgatcagagggtcttttattctaatgaggtgactcttggtgggatgctggatggcggctggtcaccaggaagaccaaggcatggttacaagtttggagcttttagccccagccctcatcctgcaggaaggggtgagggattacayattgagttaaaaattgattatgcctacttgatgaagcctcaataaagaaccctaaactactgagttcagagtgcttccaggctggtgaatacaactatgtgccaagagggggcacaccccaactttacacatacaaaagctcttgcacacaggatcttgccagaccttgccctatttacctcttcatctgggctgttcagctgtatcctttaaaatatcctttgtgataaattagcaatagtaagtagaattgcttttctgagctctgtgaaccactttaggaaattatccaacactagaaggggatggcgggaatctctgatttgtagccaagtcagacagaaattgtgaataatctagggacccactacttgtgattagcatctgaagtgaggggcagtcttgtggtactgagcccttaacctgtggggtctttgctaacggcactggttagtcttagaa

SEQ ID NO: 360065 - DNA, 607 bp, Homo sapiens
tgatcagagggtcttttattctaatgaggtgactcttggtgggatgctggatggcggctggtcaccaggaagaccaaggcatggttacaagtttggagcttttagccccagccctcatcctgcaggaaggggtgagggattacacattgagttaaaaattgattatgcctacttgatgaagcctcaataaagaaccctaaactactgagttcagagtgcttccaggctggtgaatacaactatgtgccaagagggggcacaccccaactttacacatacaaaagctcttgcacacaggatcttgccagaccttgccctatktacctcttcatctgggctgttcagctgtatcctttaaaatatcctttgtgataaattagcaatagtaagtagaattgcttttctgagctctgtgaaccactttaggaaattatccaacactagaaggggatggcgggaatctctgatttgtagccaagtcagacagaaattgtgaataatctagggacccactacttgtgattagcatctgaagtgaggggcagtcttgtggtactgagcccttaacctgtggggtctttgctaacggcactggttagtcttagaa

SEQ ID NO: 360066 - DNA, 605 bp, Homo sapiens
cctctccttttttgccacaattatcaataagtaatgttgagaagataataacacattgactgtatctagctttatgctttatgctattcagattcaattatttcaaggatgtctagcttttggtatcccatacttactttaataacttgttatagagttaaaataacctttttgggcaggaaatcaggaaattctttttcatgtcaaagtttatccgatcatgctgaactttaatcccattttctctaggtttgttttctgtgcccatttaaaaaaatggaacttctgaaaactattattacatgatattgattgtagaaagaacttcaaagctttaaaaattatactagaatgttacaatatgtttttgagttaaatttcatatataagagggcctttaaagaaatattaaaagaaatagcataattttaacatttaggtaattttaaccataaaatggcccccattatagaccctgagatcagrattctgttaacatttctatgatttctgattctaatgttcatataaatataatacacacacaaccagtaattatgatgaaccatttcagagactgctatctataagggtaaatgagtagc

SEQ ID NO: 360067 - DNA, 574 bp, Homo sapiens
tttttgagttaaatttcatatataagagggcctttaaagaaatattaaaagaaatagcataattttaacatttaggtaattttaaccataaaatggcccccattatagaccctgagatcagaattctgttaacatttctatgatttctgattctaatgttcatataaatataatacacacacaaccagtaattatgatgaaccatttcagagactgctatctataagggtaaatgagtagccaatctggcagatataaaaccagggtcaaattacaaaacttgctcacttaagacttttaacattatttagtactttgttttgttccagagaagagggtggttacctaaaactatctgggttttgtgctgcatagaaagatgttaacagtcaaggtggttcaaaatcatcattgcagaagcaaacacagttgagacctgggaaattcayaggttaccctgaacgtacatatcacacgtttttatttccaacgactacttcattttacaaagacaagtgtagttactaatacactgaaaataattagtgctaaaatccctctctaggctgtgaag

SEQ ID NO: 360068 - DNA, 600 bp, Homo sapiens
tacaaaacttgctcacttaagacttttaacattatttagtactttgttttgttccagagaagagggtggttacctaaaactatctgggttttgtgctgcatagaaagatgttaacagtcaaggtggttcaaaatcatcattgcagaagcaaacacagttgagacctgggaaattcataggttaccctgaacgtacatatcacacgtttttatttccaacgactacttcattttacaaagacaagtgtagttactaatacactgaaaataattagtgctaaaatccctctctaggctgtgaagaatttgggtcatttcagggagagtgtaatatctatattaattctgcaaatcccacaggatccaggtcagagagctatacactgcaggaaagaaaaccatacttttacataatagtcamgatgatggttatggtgactacaatgatggaatgccatttaattatgtcaattcacaaaaatagtgattatcatttataacatgttaggtggaaaaagtagattctaattgtcatacgaatacagaaacctaccaaagtgactcaaaatctgtatcagtacttttgttgtaagagctgaat

SEQ ID NO: 360069 - DNA, 556 bp, Homo sapiens
aaacaataggagagcaagggcttgtaaaaaataaaagcatttcatgtttgatccccactgagctaagccttctcaataatctagataaatgcagatgcaaaaatcaactgagatcacgaagaaggaatggtgagctttagcagtgaaagaagaatattrtttgtgcttctccacagaaatgatttactgaaataaaaacaactcataagtaataggtggaatacaaagaagtgaacatttgcagccctttcagcagtatttaagcttttagattccttcttttacactcagatgtgggcaatgcacattgaggaatctagagaggtttacacttgacactacaaggaacatttatttcagacatgtggctacatcaattaaatgcgatgtgtattcacaacattagtcactccacacagcagctcattagaatgcatgtgccttgcaaaagcagccaagattcagtgaggcttaaaactacaaagcatcactatagatcacatgccactatttttaacaaatattaaatttttacaatttttttttctccaaatta

SEQ ID NO: 360070 - DNA, 417 bp, Homo sapiens
ccttaatctctcagattctaatctcttttcagcacctattttytgaaaggccagcaacctcccaatcaataaatccatttttttttcatcttccttgacagctctgtggagctagtcaacactgaccaaccttcctctttgtcttaaaattcttccataatttgtttttcaggacactgcactacttgcttccctcccccaccctttttttcttactactcttaatcttgtaactgaaagctgatcttttcattctccatatgtcagtgtcagtatttctcaaggttctttgatcattttctccttcaatgtttatttctcgagtcattttcaaagatcacttctgtaaggatgcctcccaaatctttattccaaaccctgtggctgtttgcttaataaaaaagtcatttccaacca

SEQ ID NO: 360071 - DNA, 587 bp, Homo sapiens
tatccttgatgaacatagatgcaaaaatctttaacaaaatactagaaattgaatccagcagcacatcaaaaagctaatctaccatgatcaagtaggctttatctctgggatgcaagtttgatttaacatatagaaatcattaaatttgattcatcacataaaccgaactaaaaacaaaaaccacatgattatctcaatagatgcagaaaatgctttcaataaaattcagcatccatttacattaataactctcaaccaactaggcattgaaggaatatacctaaaaataataaaataatacctaaaaataataaaagccatttatgacaaactcacagccaacatcatattgaatgggcaaaaggagaattccccctgagaacaggaacaagaaagattcccgctctcatcactcattcaatataatatgggaagttctagtcagagcaayaagtaagagaaagaaataaaagtcatccaaataggaagagaggaagtcaaactagctgtttgcaggctttatacatctataccgaaaaaacttcagtctctgcccaaaagctccgagatctgatagataaacttag

SEQ ID NO: 360072 - DNA, 583 bp, Homo sapiens
tgcatcagacactttggaacgggcagtgaataaaacaactaaaaatagcaaaamatgttcaagtacaatattttaaaatgtgccaaaataagacatttcttatagttaagatggtaaattttataatatgtgtattttatcacaataaaatgaaaattaagaaaaaatcaaaattaaatgagtgaataagtaaattttggcaacatttttaaaataacagaatttttaacttttttatataaaatgaataacttacaattttggttaagatgttttcatatgaataagattatttttgttaattcaactatagcattaactatatattataccaacactggaacctaaagtttccaaagggcatattcagggctacatgcagtatctgggtcattcccattatagaaatgactcccgttcagtctgaatcatttattccaccaccgcatcaaagcaggcggtcagccctgagctagccaggtctggggcaggctagttaggttcttacagagaaactcctcattcaaaacatatgcagctcacaagtctaagaaaaacaagcaaatcttaagaagtgtagatt

SEQ ID NO: 360073 - DNA, 604 bp, Homo sapiens
aagcacttaacctaaatatattaagatcataatattctaaaggcataagagatgagatggtgaatatttgtatgttttggaaggttaataaattgtgtgcatgtgttttaagrtagtttaaatatttggtcctagcaaaccattgatcatactagactgattcaggacgatcagatcttctatattggttgaatactaattagttgagtcagatgactaaattgcttgtgttttcctattgagcttattacttggagataaccggtgaaataaacacgttactttgccatttcatatcatttgcatacatatttgtactagatgtttttaaagagaaatgatggccttttctctgtgctcttgatgcagatgttacctcactaactagttgttcttgtgctcctctaaaaaactggatctaggattgattatcttagtaacttcagcagaaatgcaattaatcatcataacaaatgagaagagtctaactgttgattcagcataactattgtttccttctactacatccttcatccttcccattcactgccataagttggcagacggatacagaatgcttagcaggtgggggaggggtggggca

SEQ ID NO: 360074 - DNA, 513 bp, Homo sapiens
  misc_feature (1)...(513): n = A,T,C or G
nnnttgcactaggtaaatatttttttctgaatttaggtgcatctatagcagcagaggtggttcaraaaagggagacaaattctcataaaaatgttgaaatgggtcaaactgctcccacctcaaagctaaagattcccattttaagtcacaataatttcctgataccctgaaggaaagagatgaggaagcaatgaactataattgtcagaaacgtgatagaacatgtaaatgtgatcatccataaattttgctatgtaattataaaacaaaattcatagtgccattatgtgactgcataaacatcaccacattttgacaaaatcaccaccatcaacaaaaataaactataagctccatcttgcaaataatatgcttcttgtagcttttgcttatgatacaggggtgaagtggacaacggcattagagctgaagagggcgcatggtagatccctaccctaaccctgctactacaacaaggtcattgaagagcctgtctccacaagcctctaaatc

SEQ ID NO: 360075 - DNA, 513 bp, Homo sapiens
  misc_feature (1)...(513): n = A,T,C or G
nnnttgcactaggtaaatatttttttctgaatttaggtgcatctatagcagcagaggtggttcaaaraagggagacaaattctcataaaaatgttgaaatgggtcaaactgctcccacctcaaagctaaagattcccattttaagtcacaataatttcctgataccctgaaggaaagagatgaggaagcaatgaactataattgtcagaaacgtgatagaacatgtaaatgtgatcatccataaattttgctatgtaattataaaacaaaattcatagtgccattatgtgactgcataaacatcaccacattttgacaaaatcaccaccatcaacaaaaataaactataagctccatcttgcaaataatatgcttcttgtagcttttgcttatgatacaggggtgaagtggacaacggcattagagctgaagagggcgcatggtagatccctaccctaaccctgctactacaacaaggtcattgaagagcctgtctccacaagcctctaaatc

SEQ ID NO: 360076 - DNA, 578 bp, Homo sapiens
atcagatctgaaccagaatttgaagagtttccaacagtgacccgatgtcctgaagggaagcacatggacccactttgggaatgcagtgagtcagccatctgactcgttagattttgttctgtgtcattcagcaaaagggaaagcatcctgaagaattacaaagtgaagatgggaacacatgcttgatggaatctccatctgttctttgaaagggcttagctaaatctttaaaatacgggggtaaaatgtttcaacagaaggtagaattgaagaggtataaagaaactggtagtcatctcctttaaggatgggaacaccaaggctcaragacaaatctgaagagtttttcatgtatccagctgaccagtggccacacggggattaaagaggccttttgttttgatgtgagctttttactctgctgttcagtgtgtgacacttttggttgcttctcacatgtcatctaaaggatagaaactttcacaggatgttctcaaaaagacaaacttcatggaaactttttcttctataaatacttcacctgacacattggattttgcctacttaacaaaatattg

SEQ ID NO: 360077 - DNA, 578 bp, Homo sapiens
atcagatctgaaccagaatttgaagagtttccaacagtgacccgatgtcctgaagggaagcacatggacccactttgggaatgcagtgagtcagccatctgactcgttagattttgttctgtgtcattcagcaaaagggaaagcatcctgaagaattacaaagtgaagatgggaacacatgcttgatggaatctccatctgttctttgaaagggcttagctaaatctttaaaatacgggggtaaaatgtttcaacagaaggtagaattgaagaggtataaagaaactggtagtcatctcctttaaggatgggaacaccaaggctcaaagacaaatctgaagagtttttcatgtatccagctgaccagtggccacacggggattaaagaggccttttgttttgaygtgagctttttactctgctgttcagtgtgtgacacttttggttgcttctcacatgtcatctaaaggatagaaactttcacaggatgttctcaaaaagacaaacttcatggaaactttttcttctataaatacttcacctgacacattggattttgcctacttaacaaaatattg

SEQ ID NO: 360078 - DNA, 587 bp, Homo sapiens
cgtttcctccagcagtgtatgggggttccctttctgcacattcttgccagcatttgttatttcctgtcttttggataaaaagcatttaactggggtgaaatgatatatcattgcagttttgatttgcatttgtcttatgataagtgatgttgagtaccttttcatatacttgtttgctatttgtrtgtcttcttttgagaaatgtctattcaaatattttgcccatttttgataggattattagattttttttctatagagttgtttcagatccttatatattctgattattaaccccttgtctgatgggcagtatgcaaatattttctcccattctgtgaattgtctcttcatattatagactgtttccatcactaaacagaaactttttaacttgatgtgatccaatttgtccatttttgcttggttgtctatgcttgtggggtactcctcaagaaatattgcccagaacaatgtcctggagagttttcctaatgttttcttgtagtagttttatagtttgaggtcttagatgtaaatctttaattcattttgatttgtatatggtgagagatagggatctagct

SEQ ID NO: 360079 - DNA, 478 bp, Homo sapiens
tacataccagtcaatgtgtcagtcaagagagcaacaagacagtgacaatgttgaaaaaacaggatttgcaaatcccattttagagaagagttaactgagattaagaatagttacaaaatttgcccagagtcacactagaaacaagtaaagcagctgggatttaacccaggcttcaaaattcaccattgcttttattctgagaaaaatataatcgctgaaaacaataatttacagattacaagactcctgatgatttggtttggaaaattcctcctgaaagaggaaacagtaaagttcaatttggtgtcagataacatgctccccagatgccaactaattttcagatgggtgattattcaatccggctggaatatgatgtttttcttcctacatttaagtttcaatgttggtctattttctytcttttctttttttaagaatccattttcaattaagatttctaattagattccacgtt

SEQ ID NO: 360080 - DNA, 311 bp, Homo sapiens
cagggcacgctagccaggggctctgaacctgtagtaccyttaatccctgcccccaagggacaatcaggacagtttcttgccctggacaggaagttgtcatgatggggtagaaagagacgctaactcttggcctcgtgagggaaggaaggcatttctttggctttggtgtcagacaggctcagatccatcacaggtcctgagacacaggaggagtcttgctaagctcttaaactttctaagctccagacccttctgagacgctataaatgctgtggcctccagccagtggtgagctggtaaatgtttaacaa

SEQ ID NO: 360081 - DNA, 437 bp, Homo sapiens
ggaagggagatcccccagagaagctggggagctgagtgaggatttcagacctgaaggaaggcgactgcttcgctgagcactgtctgtgtgccagtccctgtgtcgctgctttgtccagccgccttatctcatataataaaactgactcactctcctcagcctctgtctttcataaggggaacctgaggtgtggttagttcttccgcaaaagaaggacacagacaggcctgtgacgctcagaaaggcgctgtatgccccagtgggaatggtggggacgcaactcccccacccctcctctgccaggccggctctatgagcctggactcctgctctgggcctcagtttccaagctctgctggggttggccgagaggargaggccccgtgaactcctcctcagggctgatacccttcaagtgacctcggctggcctcaccc

SEQ ID NO: 360082 - DNA, 482 bp, Homo sapiens
gtaatagcaacactctgctaaagttgctgtgaggactgaaaagcacagtgcacagaaagcacttggcactgtgtgtggygcaggataaaagctcggtaaatagcgactccccatcattagtgacaatcatgacaatcagccacccacagaggctcctgtcagaggccatgcagacagccttccctccacagcccctctcatgtgagtgtgtgtggggattatcacttttagcatctgaaaagggcgtccaacctgggagggaaagggctgcacctggacgcccctctgctctccaccctggtcccacccattggtcaccttggccatgcgtccacgaacttctctcctgatgctttaggcttccttcacctgagtctgtgaccccccggcccctcctgctccccaccaaaggccccggggtgccttctccttccttgggttctaccacttcacagcagaaagggctttctggttgattttgg

SEQ ID NO: 360083 - DNA, 538 bp, Homo sapiens
aattgcagtcctggctgacataatcattttagcctcatgagaccttgagcagagacctcagctaaaatgtgcccaaacttctgacccatagaaatggtgagataataaatgggtgttgtttcaagacactaaatttgtggtaatatgttatacaacargaaaaaactaatacaatctgataggcttgtattgaattcctgttctttagttactacaaatgtgatcttggacttaacctctctgagcctgagtttcctcatctgtaaaatgggtaatacctaccggtaaaatgagtaatagtaaaacctaccttatggtacatttgtgagggttaaatatactcagtacatttgagttgaatgaatgaatgatgctgagtcactttaaagaacaaatatagcacatgtaccgtctgaacctcaagtaaaaaaattttttaaaaagaacaggtataaacacagccttttcatctgattttttttttctaatttagtgctggtataatcctagttcactcatatataaaattaggtaccac

SEQ ID NO: 360084 - DNA, 607 bp, Homo sapiens
acttgctggaacaaaatcctgtgtctggaactcgcatgacagagagtagatgttggaggcctggggtcagggctgaatgaaggggattgagagcaaaaagactatcggggccaagggtaaacttccccttcatcctctgaagcttcactgaaaaaccacctgacaaaaggcagattcataggaggaaaggcatacaaatttactaacatgcgcgggagtcttacaaaatawaagatctcaaagaaatggccaaatagttgatggttttataccatcttgagattacagaaaaaagcggcatggtcaaaaacaggttatggtggcaaatcaggttatggtggcaagacaggtcacgggaagaagaggagagacccggcaagcaaaagtggtcttagtatacagaggaaacccacaggtagcagctctcagaaagaacagttggtaaacatttgtttcagacctttaaaggtgtcagactctctgtgattctttcctaaatctgaacaagagaggacttcagagaaagcctggctgcatcaatacagattctctctacaggtgcaaatctcctccacaaaaggcagcttttcagctattctgatatttc

SEQ ID NO: 360085 - DNA, 469 bp, Homo sapiens
gcattatatgtaatcattatattgcaaaatgactttagttcttttgagctattaattataaaataaaaatgtatacagatttttaaaaattaaagatttttctctattttaaaataatttattttactttatgaagaaaggcatgtctttaatcactagtttgtatattggtattctcaaaggattctaaccrtactttataatatctcatttattcaagaaaattaatttatgaaaattaaccaatatattcagaatatgaaggaaaaaattgagaaaataaaatatataaggaaatattggttttattgtcaatattttgtgctccctatcaacttgatgatttgtgtttaaaacttgataaaagtctaataattccagtttacttccaaaatacacattgatttcctgaagcatataaccatttatgaacggttatgtttatgtaaggctttatggctttatggat

SEQ ID NO: 360086 - DNA, 612 bp, Homo sapiens
taccattctattccactctaatctatttaaattattctaaaatttattcttggcatatgcaaaggcaaccaacaagtatgcaacaaaatatagaagaaaaaaagcattatagaaacataytaggctattaataaaaatatatttttgttaatttaaagattcttatagaattttccaattttttttatatttcaagcatgtggagatttatcttaaataaatattcacatttgtacctaattttatatgtataattttgtactctttcctaaagaaggcctccaaaatttataagctcaggccccacaaaacctgaatgtactgtttgcaagttgactttgagaggttaaaagtgacaaagtttagactacaagaagaggagtttgttctctgaaattggagagagggtagagtacacaggaaaatatacagggaagagagtagaagaggtagtggggtctcctagaagtttttcgattgcttgtgttttgttagtgaaatgggagacaaggtggttagcagagaatgaagataagaaaggtgttagaagtttgaggagtgaggaaatcattgccagagtgggaaagtaaatgagatagggaaatgtttgat

SEQ ID NO: 360087 - DNA, 672 bp, Homo sapiens
atatattagtcgtgttgtttcaaatgaatatttgggagaatttgatcaaatatgtttaatagatggaagatattaagcagcaagccaagtcatgatggtttctttaataggccccaccgcctcaccatcaccactagatattgaagattttttaacaattctaatcattttttaagggacacagggagggtgtggccttccttgggaatttttaagagccctggagataagtaatctgggaagctgaggatgggctctgggactcagagcatcacagtagcatagcccgtggcctcaggaatcctgacgggcgggatgtgcccctccagtggcccccagtcattctgtgttaacttcagtctgggtctcccataacatgcgaacacttcacttactcctatctctgtcttagtgttttgaaagcacagggcctccactttcctgaagcaactgttgaatggccaacttcaatagcatcctgttgcctgttttctccaaaagcctggatatttctctttattcaacttgctctcccttatgtgaggaatcccagaagaaagatcccaaaatctggtcacacttytgagagagaagagacagttaaaataatttttaaaaattcatttataatggcaaaataaccagttgaagatagttgtgtggtttttttgg

SEQ ID NO: 360088 - DNA, 538 bp, Homo sapiens
ctaataaatattatataatcttcaagaatcttagttatttatgttttttaaaatgttttaacactgaaaaggattgtctctagtttcacagacaaaaatttctattgaacacatactattacagtgttatttggcatgttatttgtaatgtataacatgtaatgttatacattaataacggtaataggatgtgtttaatagaaattcacatcctattatttctatcgaacagtgccaaataactgacatgttactgtagttaattagaatttcctgctctaccaatatcctatttaatgctataattcctgtactccaaagtcatattgtttaggtctttctctatattcacactctaaattgtagcagaagtaaatcctaagaagatttattttcttttcttaatttcaaatttatctaagaaaattctagacaatgtattttaaaataagcaaagaataagcaatcaaaactgcccagcatttccactgaagacagaacartcatactgaaacaacatttaatatgctttttaact

SEQ ID NO: 360089 - DNA, 538 bp, Homo sapiens
caggaggctgaggcaggagaattgcttgaacctgggaagcggaggttgcagtgagctgagatcatgccattgcactccagcttgggcaacaagagagagaaactttgtttcaaaaaaaaaaaaaaaggagagagagaaacaaaagaaaagagagccctttcagcaaatataaataaaattcttaaatctgtaagctttaraaaagcatatgtcgtggcttaattgagctggagctctatctgaaatatcttatttgcaatgatgaaaagcttgtagtagtgggaaccactaaagaccactaaatgtcctcagcatttgaaccactttatttatttgatttttttattgtagtaaaatacatacaacataacatttatcatttgtaagtgtacaattcattagtattaagtacattcatgttgtagtgccaatatttgatttttttttttttttcctgagacagaatcttactctgtcgttcaggctggagggcagtggtgcgatcttggcttactgccaatatctggtttttgagaag

SEQ ID NO: 360090 - DNA, 542 bp, Homo sapiens
actgtatggaagataagctgggagtgcaaatccactagataaaaagaaatgaattgaatatttcagttgagttatgataggtccaaaattagaactgcagactagtagatagagaaaattaggataaagattgcagaaggcacattatttgaggggaatgcaaatgagttccaccctagacatcctatgtttcgtatgtatgtgagacatctgtgtgaagccctccagcacagaactgaaaatagttcggagctcaaggaagatgtgaagctggagtcatcagctttgttcaagtaaactctcctaaygaacattcaaggaagtgaggaaaatggaatcaaggatggaactttgatgagatccagtatttagcagctcattaagagcaagtattcaacaatggacacaaataaggaataagtagagggaagaactaagagagaggaagacattgtaaacatcaaataaaggaagtattccaagtggcaagagcacctaacgacatcaaatattagtattaaagcagaacaaaaacttttcat

SEQ ID NO: 360091 - DNA, 533 bp, Homo sapiens
tatttgaatgttgggtttggcttttaaaaatggttacatataaacggtgattctttatatgactttgccaaaggtaaaactccaactgaataatgtcactttagtagaaaaatactgttgttcacttcttatcatgaattacaataaggcatgtatattagtaaagaaggagaggaggacaggcaaagaaagagcagcagaggagacagattatacccaggctgtatatattatcactctgaagtcagtagggaaggctgctaaatgctcttacaactgtaatagcctatctcatgttaattctagcccgaagcttcctggcacttcttgttcagagataatggggacaaacctactctttttttttttttcttggttgaacagcaratttcttttttcccaaggatgtcaaataaattaagcagtctttgcaaacagcaacacaaaagccctttgctttgtagaaattcccagtaataacatgcaagagttattacccttgatacttagtgtattttttaatggctggcaat

SEQ ID NO: 360092 - DNA, 455 bp, Homo sapiens
ttcattcctagttgctgagaaatacagtattttatagatgtaccacaattttttatccattttcctgttgatgaacttttgggttatttctagtttggggtgattatgaataaagtatctacaagtattcaggtaagttttctatgttttcatttcttcagggtaaatacatataaatgggaatgttgggttatatagagctatatagaaattctctaggccatagtttcttcatttataaaatagagataaattgtttttgtgtggattaaatgggtaaacatgatgtggcatttaraatagtctctggcacatagtaaaaactcaataaatgctagttattaacattatcagggacatattgtcaattccagtccaaatcccaaattggcctcttgcctgaaattcttttaagttcagaaggatctgtatctgtggatgtgtttatttatttt

SEQ ID NO: 360093 - DNA, 575 bp, Homo sapiens
gaaatttaggagggcagaacaaagcagtcaaatccaagtgatgagagctgtcaatagatctgccatgggataaaattggcaggttctgcttggctctagtcacaggtggaacataatttgatggctttatctatacctctcctgagcatttttttccacatcatggaaatctggttcaattcagtctgacagatggatatccgacttgtagaaatgtgggagcccttgcarctcacactaaaagaaacatgaccgccagccttcttgggaacagagatacaaagtcagaaagttgtgatattggggacatctgttactgagtttcatgttcctagcccaggcatgcactgtgtgaaccataatatacatatggccccctgcagataaatttgttaccttgattaagcttctggaaagaagaaccagaggagttgcataaatgttggatttacctaattgcatttaaatcgttctctgaacataacaaatgtgatttagctctgcaggttcactgtcgccaatatactaaatatatttggggccctgactctgatcaccaggatcaactaaagggg

SEQ ID NO: 360094 - DNA, 575 bp, Homo sapiens
gaaatttaggagggcagaacaaagcagtcaaatccaagtgatgagagctgtcaatagatctgccatgggataaaattggcaggttctgcttggctctagtcacaggtggaacataatttgatggctttatctatacctctcctgagcatttttttccacatcatggaaatctggttcaattcagtctgacagatggatatccgacttgtagaaatgtgggagcccttgcagctcacactaaaagaaacatgaccgccagccttcttgggaacagagatacaaagtcagaaagttgtgatattggggacatctgttactgagtttcatgttcctagcccaggcatgcactgtgtgaaccataatatacatatggccccctgcagataaatttgttaccttgattaagcttctggaaagaagaaccagaggagttgcataaatgttggatttacctaattgcatttaaatcgttctctgaacataacaaatgtgatttagctctgcaggttcactgtcgccratatactaaatatatttggggccctgactctgatcaccaggatcaactaaagggg

SEQ ID NO: 360095 - DNA, 572 bp, Homo sapiens
tgtgcaagttgaagtttctcaccatttctctcttatcacctgcataacatacccaattccatagaacaccaaccctgtgctcagcttttactgaaggacttgcaattggtgcccttgcagtaatgtacatcctgctttgaatgtttttttccccaaagattggttccctcttttaagtttcaaaagtcaccttatcaaaggacatttcttacttcatccacctgtctcatttttatttttttgctctgctttatttttcttcataacacatccctactcacatcatatttatttgtatattgtttgttcctcctcctgaaacataaaccacatcagataagttactttatctgtttttctctgttgtataccactgcctaaaacagtacstaaaacatacagtgtctgctcaataaatattagtcaaactaatgaagatgaattggcctcaggaaacatgaataagtgaaacctggaaccctcatagacttcccttgcagcttttctgttcctgctgtctgttaccgtattttcaatcaaaccaaagaggttgtaatgtctgtcataatttt

SEQ ID NO: 360096 - DNA, 572 bp, Homo sapiens
tgtgcaagttgaagtttctcaccatttctctcttatcacctgcataacatacccaattccatagaacaccaaccctgtgctcagcttttactgaaggacttgcaattggtgcccttgcagtaatgtacatcctgctttgaatgtttttttccccaaagattggttccctcttttaagtttcaaaagtcaccttatcaaaggacatttcttacttcatccacctgtctcatttttatttttttgctctgctttatttttcttcataacacatccctactcacatcatatttatttgtatattgtttgttcctcctcctgaaacataaaccacatcagataagttactttatctgtttttctctgttgtataccactgcctaaaacagtacgtaaaacatacagtstctgctcaataaatattagtcaaactaatgaagatgaattggcctcaggaaacatgaataagtgaaacctggaaccctcatagacttcccttgcagcttttctgttcctgctgtctgttaccgtattttcaatcaaaccaaagaggttgtaatgtctgtcataatttt

SEQ ID NO: 360097 - DNA, 572 bp, Homo sapiens
tgtgcaagttgaagtttctcaccatttctctcttatcacctgcataacatacccaattccatagaacaccaaccctgtgctcagcttttactgaaggacttgcaattggtgcccttgcagtaatgtacatcctgctttgaatgtttttttccccaaagattggttccctcttttaagtttcaaaagtcaccttatcaaaggacatttcttacttcatccacctgtctcatttttatttttttgctctgctttatttttcttcataacacatccctactcacatcatatttatttgtatattgtttgttcctcctcctgaaacataaaccacatcagataagttactttatctgtttttctctgttgtataccactgcctaaaacagtacgtaaaacatacagtgtctgctcaataaatattagtcaaactaatgaagatgaattggcctcaggaaacatgaataagtgaaacctggaaccctcatagacttcccttgcagcttttctgttcctgctgtctgttaccstattttcaatcaaaccaaagaggttgtaatgtctgtcataatttt

SEQ ID NO: 360098 - DNA, 583 bp, Homo sapiens
agagctaatcaaacttctctgtcaatcatgtttctaactgtaactaccctggatattttgctattcaaaaattgttgttttrttttaatccttttcaaaagatggtttataataagctatagaactgtaacaggtgctctcaaatacaggtttctgataactttggagactgtgaaattggaataaagaaaaatatataggactcataaagagctgaaatattaatgaatacaagcaaaacaaaaactaaatggactaaacttagaaactgaagcaatccttttaaccttgtttggaatattgctgatccttgttttgtttttcagagtaaaggaaacttattttgaactattttcagactttaataattaagtaaggtatacactcctgtgattaaaatttagaacatgtttgtttctctctgcctggttcctctagaatttggagaatatctgtgagtattcttaacttatggcaatgtagttgtttgcatcaatgcaataaaaatccatttttcttttgcaaaaggacacaattggaaaaatggttattttaccaaggctttgactggaagggtatgttt

SEQ ID NO: 360099 - DNA, 360 bp, Homo sapiens
gctggatataaacaatcatacagaacatcaacattagacaatgagatcatgataaagtgaaataaaaacaaacatttaataattttgcctaaacacagagaaaaacaaggtcactgtgcaaaccaccaaatactaagaatcmctgtttcttggctagtgtgagtgactgctatttctttaccttaattacagctttatccttcctgaagttttcgtttcttatagataatatttcatgagatacccaatcgtattattgccatcacttccttatggcattgaatctagagcaaatcactgctttcttagaacctgtcaaaactcacccaatcaaagcccaaatcctataataggttcttt

SEQ ID NO: 360100 - DNA, 566 bp, Homo sapiens
aagagacaaattcatgtgcaaagatattttagtatcagaaaggttttaatgcagtttttttcaacacgggctgtacattagaatcacctggagagttttaaaaaatgttgatggctggccccagaactgcatcagggttccccaagaactgcatcagaatttttcaagtgctccccacgcaaatgtctctaatgtgtctctgggactgggaagcacaactttaatttatgttctaatagcaataaaagttctatgacaatgaggaaagaaatggttttgaggaatagggagcattgaatgttaatrgaggatgctcatgaacttattgtatagcagatactttacatgagttaattcacttaattatcacacaaaaaaaccctgaaatagatgctataatcccttttttaacaactgagaaaaccaagttacagaaaaagtaacttacccaagaccgaggagatagcggagtccaaaccagggactctaacgtcaaggcttgttctcaaatactatgctattcttcctaaagaatgggaatttagaaagtagatcaatgtaaatac

SEQ ID NO: 360101 - DNA, 533 bp, Homo sapiens
gtcattttaagaacacaaaatctcctttacctattgtcacatttccaaactttgctttcagagagagacagaaagatcctagagtttattacttctgtggtgattactgaaaataatattttaataatgatctccaatatatttttactattaaatatcttcatcttgttttactaattcctattcgtctaatttctgaggttttacaggctctttcgtactgcattactcttagccagattcctatccatgcaacataaggaggtctctgatgtcaaaatgaatctcatataatttgttagtaaatcagaccaacaatttaagaagtagttttcagagaaagcccaattgtgtttaaatacatctgcaaagtactttgttcccctcagcatctagaaggcacacatgaaattgattgaggttattagacatraaatacttcaatcaagttattccacaagaagaaataagaatttgttatgttcattagcaattaatacgcaggttatcacttgattcattagcatgctttt

SEQ ID NO: 360102 - DNA, 445 bp, Homo sapiens
atgacattctagcattttggagtcatggatagagagagagatcatcagcttctgcacattttttccttcacttttgtccctctcactttctccattacaccactttcagaggtttatctgaaattttccttccttattttgtttttttaaaataaattctatcatgaagtatataaaagcagaaatctgagtaaagaatagacaccgaaattacttaagtaatggatataaagtaccaataaaatakttgaagctgaataacactgatctgtaatgggatattctaaccacattacttatttattaagaataaaaacaagtaatacataattttaattaacattccaaagtcagcttcagatttgacataaaaaaaatcactatttgattatgtttccttcctctgtgtatcccaaataacattatttgcacagttttagtcctt

SEQ ID NO: 360103 - DNA, 596 bp, Homo sapiens
ctaaataatatatttttacagaataaaggaatataaaaactgaacttttcacatgtgaagaaaattttatattcatagatgtaattttgcttttaattttgttaagtgcctatatatatatgmaagcattggcaaaatgagcatttgaagaaatatttctatgtcatattactaatgctggccaatgatgtgaggtgttattaaagtatttttaattgataaggcagtcctcatctttattctgtcttaagatcagagcaaaacatctcagggatgttaaagtggagaaaaatttgtatgttagaattaatgaaatatggcataacacttgtcagagaaagataggcatcataggaaagatacaaccgaagctttttgagtgctaaaatgagaaagattatttttgtcagggtgatcaggaaggtatttctgaagataatggtagctatggtggactttgataaatttggatttgacaatctgaactcatctatcaacatgtcatatcattacagaaaatagcaagaacaaagcatgcctgggaaatagcaagtacacagggaaaaacctagaggatgcgcagggattgttagaga

SEQ ID NO: 360104 - DNA, 596 bp, Homo sapiens
ctaaataatatatttttacagaataaaggaatataaaaactgaacttttcacatgtgaagaaaattttatattcatagatgtaattttgcttttaattttgttaagtgcctatatatatatgcaagcattggcaaaatgagcatttgaagaaatatttctatgtcatattactaatgctggccaatgatgtraggtgttattaaagtatttttaattgataaggcagtcctcatctttattctgtcttaagatcagagcaaaacatctcagggatgttaaagtggagaaaaatttgtatgttagaattaatgaaatatggcataacacttgtcagagaaagataggcatcataggaaagatacaaccgaagctttttgagtgctaaaatgagaaagattatttttgtcagggtgatcaggaaggtatttctgaagataatggtagctatggtggactttgataaatttggatttgacaatctgaactcatctatcaacatgtcatatcattacagaaaatagcaagaacaaagcatgcctgggaaatagcaagtacacagggaaaaacctagaggatgcgcagggattgttagaga

SEQ ID NO: 360105 - DNA, 596 bp, Homo sapiens
ctaaataatatatttttacagaataaaggaatataaaaactgaacttttcacatgtgaagaaaattttatattcatagatgtaattttgcttttaattttgttaagtgcctatatatatatgcaagcattggcaaaatgagcatttgaagaaatatttctatgtcatattactaatgctggccaatgatgtgaggtgttattaaagtatttttaattgataaggcagtcctcatctttattctgtcttaagatcagagcaaaacatctcagggatgttaaagtggagaaaaatttgtatgttagaattaatgaaatatggcataacacttgtcagagaaagataggcatcataggaaagatacaaccgaagctttttgagtgctaaaatgagaaagattatttttgtcagggtgatcaggaaggtatttctgaagataatggtagctatggtggactttgataaatttggatttgacaatctgaactcatctatcaacatgwcatatcattacagaaaatagcaagaacaaagcatgcctgggaaatagcaagtacacagggaaaaacctagaggatgcgcagggattgttagaga

SEQ ID NO: 360106 - DNA, 615 bp, Homo sapiens
ttagtgcctttttgtaagctatttttttactctaatttagtctctgcctttatttgtcattctggagaaatgttataaactgaaatggctggcaaagcaggtagaaaatatagtactagagggacatcaaaaactcctagaaaaattgtcacactgggtgttaaaatgcaaattttatgaatgttcagggcaggtgaatgttccaggaattagtggaaaaaacagatggcaacaatagcttatgaggcattgctacacattgttttataaagaatatcataaaaaatactacaatctgagcagaagtaaataacaaygcatgaatggtggttgaaagaaactatgtctcatggccaaatctcaaactctaaggagttaatgaggaggaaatattaactgtttttctgcacatgtccacaaggtctacactctaaaagacactacatacctcattgtaaggatcacacccacctttaatggacatcatttgcctgttgttttaatgttgcatggtggctaaagagattctgatagggaaagaaaatcataagttgcattgagtgttattttctcctgagagaaaaacaagttgtggtaagctaaatgctacttaat

SEQ ID NO: 360107 - DNA, 615 bp, Homo sapiens
ttagtgcctttttgtaagctatttttttactctaatttagtctctgcctttatttgtcattctggagaaatgttataaactgaaatggctggcaaagcaggtagaaaatatagtactagagggacatcaaaaactcctagaaaaattgtcacactgggtgttaaaatgcaaattttatgaatgttcagggcaggtgaatgttccaggaattagtggaaaaaacagatggcaacaatagcttatgaggcattgctacacattgttttataaagaatatcataaaaaatactacaatctgagcagaagtaaataacaatgcatgaatggtggttgaaagaaactatgtctcatggccaaatctcaaactctaaggagttaatgaggaggaaatattaactgtttttctgcacatgtccacaaggtctacactctaaaagacactacatacctcattgtaaggatcacacccacctttaatggacatcatttgcctgttgttttaatgttgcrtggtggctaaagagattctgatagggaaagaaaatcataagttgcattgagtgttattttctcctgagagaaaaacaagttgtggtaagctaaatgctacttaat

SEQ ID NO: 360108 - DNA, 578 bp, Homo sapiens
tgtcagctctgtcgtccatggtctcaagtcaagtttcccacaaatattactggtaatatgagattgagcttgtggggacatagtgatcttgcttagttcaatactaaaaaattcagagaggaaatctaccatctatcagaatgctacattctatatgtctgctgtgccaattgctttgcacacattttttttctaatcctcacaagcactttttgggtgggcattattacttccattatgatgatgaagragttaaatacaaaataaaggctggcttaaactcttaagaccttattggtctaggaatcaaggcagggcttaatgtttgaatagggatatgaaaagctaaggattgcacagagagacaactgacagatggctttcagctgatttcctgagagcattatcatctatctgcaagtcttgtagttacctaccatatgtagtagtcatggggatctgaatatctattcaagatgatatggtgaagccctgcaatgtgccagaaaaatctcagcattgagaatatagtcacaaactagtcagacattgtctattcttgggagtccttatgctat

SEQ ID NO: 360109 - DNA, 578 bp, Homo sapiens
tgtcagctctgtcgtccatggtctcaagtcaagtttcccacaaatattactggtaatatgagattgagcttgtggggacatagtgatcttgcttagttcaatactaaaaaattcagagaggaaatctaccatctatcagaatgctacattctatatgtctgctgtgccaattgctttgcacacattttttttctaatcctcacaagcactttttgggtgggcattattacttccattatgatgatgaaggagttaaatacaaaayaaaggctggcttaaactcttaagaccttattggtctaggaatcaaggcagggcttaatgtttgaatagggatatgaaaagctaaggattgcacagagagacaactgacagatggctttcagctgatttcctgagagcattatcatctatctgcaagtcttgtagttacctaccatatgtagtagtcatggggatctgaatatctattcaagatgatatggtgaagccctgcaatgtgccagaaaaatctcagcattgagaatatagtcacaaactagtcagacattgtctattcttgggagtccttatgctat

SEQ ID NO: 360110 - DNA, 497 bp, Homo sapiens
gttgtcctttcaacaatgttcacagcatcttcaccaggagcagattccatcccaagaaaccactttctttgctcatccataaaaagcaactcctcatttactcaagtttaatcatgagttgcagaaattcagtcccatcttcaggcttcactccaaattctagttttcttgctatttctaccacatctatagttactttytccactgaaatcttcaacccctcaaagtcattcgtaatatttgcaatcaactgctaaactcctattaatgttaatattttgaactcccccaataaatcatgaatgttcttaatgacatctgtgatagaatggtgaatcctttccagaaagttttcaatttactttgcctctatccatcagaggaatcgatatctatggcaactatagccttttttaaataataagactcgaaagtcaaaatggcttcttgatccatgggctgaagaatggatgttgtattagcaggcataaaaatca

SEQ ID NO: 360111 - DNA, 605 bp, Homo sapiens
tgacttgtttcactcagttgaaatttgtgagaatcatctatgttttgtgtagcagcagttcattgtttaattgctgtgtggtattcatcgcgggaagcaaaagtaatttatttattcattctactgtgaatgggcatttgtgttgtttttagtttagaagttatgacacatcagtgattttatttgataagaaccctaggagttgctgagttatatagaatygattgccttacacatgttgtttacgttttgcctactattttatatatttcatccttgatctgtttgtctcgctactgtttggaacaaacctggagctccttataggaaattgatatctttttttttcttttctcaacttctattttaggttcaggaggtacatgggcaggtttgttacgtgggtaattgcatgttgctggggtttggtgtacaaatgatttcatcacccagctagtgagcatagtccccagcaggtagtgttttgaccctcactctcctctcaccctgcgcccatcaagtatattttaaaaggactttcacaatcaagctaattaacatattcatgtcttcacatagttatcatgtgttgggaaagggtaata

SEQ ID NO: 360112 - DNA, 437 bp, Homo sapiens
actgctgtacatgtaagaaaagaaacacacttggctattgttttgaggacatgcatttaattttaaattttacaatttagattcagcatgaattgcaataaatggatcttcagcagagttactaatagaaaaatgagctttgccatcatcagaaacgtaaattttaatgcctgtgcaattgccattaattttatctccagaaatgacatcacagtatgtgccagcaggaagaccagtttgcaaagttaaagaaaatgacctgtaaaataaaatttaaggttgatyttcaatacaatgaaaatcaagaatacagactaacacaaataaacagcataactttatgttgtagaaacaaacctaagcagtgaagtcttattaagaagaaaacccatatgcctctctagtaggtggaaatagctttctaggaccaaaagtaa

SEQ ID NO: 360113 - DNA, 550 bp, Homo sapiens
cctgaagcaaaacagtaaccacaagatacatattattcatacatgtgctttaaaaatgttatttgtcacaaggagacagagaagtgaagaaagtgtaccaaaaaactacgtagagcagtcattgagaaaaagagttagaaataaagatattttagtacctaggcagcatttctccatggttaaaaaagcaggattataagacacttttttttaatgatttcacaatccttatattgattgtgattttatatattgattttgtggcatgtgtaggtgagcatatgcatgtgcatcrtatatatgcatatgatactgcaagggtgcacagaaaggattctgcttacaacagaaagcacttatgaaaaaaaaagaacgaaggagtaacagccatcatccttttgcttctgcccaattttgatctctattgtcttcttgctccactgactacatgatttttcagatatgataaaagtcaatgaacagtagaaaaaaaagaataaaccaagaacatactggtacaaaatattatttttaattgatatttacttac

SEQ ID NO: 360114 - DNA, 593 bp, Homo sapiens
ctaaaaacacaataccatataaaacgttgatattcttaaacttcaactgttttaaataaaatgcagtggaaagtttactattagaggacatgtctaaatacatattctcaccttatttggcgccatcgatgttcacagacccagtcattgccacaagtagtgtctggattaatagtaacttctttaattactccattattatttggtggcccaacccaatcrttaacatccttaagtaggggggaaaaagccaaattttactatgcatgtatttacctcttccttctcctttacaccaaacccaaccaatcctgttacttgtgtctctgcattcagtgactttatctagaatccaatgccttcattaatgtttatagccctttactgggtctttatcatctctctatcctctggttttcttctggcatatttcaaacaaggtaacaaatttttatcctctccttttcattccaaagaactgcaaaggcttctttgctctgtcacccaggctggagtacagtggcatgatcatagctcactgcagccttgatctcccaggctcaagcgatcctcccatctcagcctcccaagta

SEQ ID NO: 360115 - DNA, 612 bp, Homo sapiens
tagcatgcagcagtcctggcaaagtggaaatgttatagtaatagaaaaaataaaaatactctatgactcctaacatcagaaataagaccaattagtagaaattaaaagaagttggctcaatataaaagtacaccttctaaatattaaagctgtttaacaatagaatmaattgctatacaaagtgcggacttctcaaactgaaaggaatctaaaaaaagctagctagatatccgtgtgactcataggaaggaggaatttctgctttagttctgaagtctctgatgctgtttctgaaccctttagtttaaaagaaaaccttctactagctttccaaatatctttacactgtaatttctctgttcctttttgaaacttctcatcagattaatgtctttaccatactcccaaatatttttctcattcttacctttcttggaatactctctaaatttctattctttagtacatatcatttccttcctcttatatgatactttccctatttaactcagctcaattgattcatttctttctattccatataactttttaaaagtatttaacaaacatttatattgttctcactacgggcagatgatgttttaagttctc

SEQ ID NO: 360116 - DNA, 607 bp, Homo sapiens
caaatctgattttattcctttggaaaggctaatcagaaactcaaaataccaggggattgcaagatttcagtctacaccttcacctagtaagtgctttttgtcccacaatgacagtcatttatggcactctatgagaagatatttcaccccaagtgaatatcttcctccctctccatttyggttgcttttccttcatgtaaaagctcagcactgctgactgaatttaaagagtctattaataagaaaagttaattttctactgctgggaggcatgtatggttaaaccccaaacctctctttctaacctctctttctaacttccccaaacttctctttctaacttctgcctggaaaaaatttagagtcacagattttacctaactgttcagaacctacagcaccacctcatgaaataggatttttttctctgcaaagagtcttttcagccctttgccaaaaacctctagtacccagatttcttctccttttgtgttcctctatcagtaagcagactctctgccccatttgtaaggaaaaatctccacattcaacagttgggaggaagccagccttgagagacaaattctagcctcagtgctgttcccat

SEQ ID NO: 360117 - DNA, 588 bp, Homo sapiens
caaatctgattttattcctttggaaaggctaatcagaaactcaaaataccaggggattgcaagatttcagtctacaccttcacctagtaagtgctttttgtcccacaatgacagtcatttatggcactctatgagaagatatttcaccccaagtgaatatcttcctccctctccattttrgttgcttttccttcatgtaaaagctcagcactgctgactgaatttaaagagtctattaataagaaaagttaattttctactgctgggaggcatgtatggttaaaccccaaacctctctttctaacctctctttctaacttccccaaacttctctttctaacttctgcctggaaaaaatttagagtcacagattttacctaactgttcagaacctacagcaccacctcatgaaataggatttttttctctgcaaagagtcttttcagccctttgccaaaaacctctagtacccagatttcttctccttttgtgttcctctatcagtaagcagactctctgccccatttgtaaggaaaaatctccacattcaacagttgggaggaagccagccttgagagacaaattcta

SEQ ID NO: 360118 - DNA, 478 bp, Homo sapiens
catgattactcctgccagctagcacctccagatccatgggtgcaattcatgcttgcatccatgggcagcacctatgatggttgctgggacccaaaggagrtgggaggaaagaggagaagagggacacccctgtaatctttctcttcatcctgggtcactttgaaaggagaaaggagaccaagtgacaccttctactcccctccttttctgcatgggtaacaacccatcttcaagcctgcattccccttgggtatagcctggctagtctctaaacttcagatactgaagatcactctgggcaagtgccaacttcactcatgtatagaggccttccaggatataacccaagtatttaaactctcctgcaaggatgttatgttactcttaaaccctaactgctcctgagagacaggcagccctacaggtagcagaaaaaatcagagatgaacagcatgtctcctatagccattcaaaatgg

SEQ ID NO: 360119 - DNA, 578 bp, Homo sapiens
atttagtggaaactggccaataatttcttaggccttaggataattttacctttgattctctagttaatcaaaaatatataaaaatattaaccaaaartatatatttttaaaatacctacataatctaatgcagtatgtttcgctctcttcttgaagtgaattaaattccttatcactgaccataaaatttaactacatagatgattcttgtttaaaatagttaaaagtgaacgtaaagatcagttttggttttccttttcttacccccgttttttacacttatatttgcctgtgtcattcatatacttttagaatccaaaacaataattaaaaacataatcatttggttttcaaaagctttttgcatctctagaaagttaatatagagtcttataaaacttttagctaattcaaaaacaaatcacacatatataattgaagcaaactttgtttggtagacttcttcgaaccacagaaatttcagttatggcatggtaggtcttttgaaatgtttcattttttatatttggagatgcacaacaaaagtctttccactccaactcccctttaataaaaac

SEQ ID NO: 360120 - DNA, 486 bp, Homo sapiens
acaggtgttcttctcaagctaacaagaaacatcctccaaaatagagcatatttgaaattacaaaatgtcttaatacatttaagaagattgaagttgtatcaagtatcttttttaaccacaatggtatacaactagaaatcagcaacaggaggaaaactggaaaattcaaaaataagtgaacataatgcaatccttaacaaaaagtgttttaaaaaggaaatgaaaaggaaaataaaaaatcttgatacaaaaatgaaaacacaatactccaaaacttgtggcatgcagtaagaccgtgctaagaagaaaatttgtatgacaaacacctacattaaagaaaaaacatctcaaataatctatcattaaacctcaaggaactagataaaaagaagagcaaactaagcccaaagctaatacaagaaagcaaagaaatatcaaagcaaamtaaagaaatagacagtagaaaaataatagaaattgaaagac

SEQ ID NO: 360121 - DNA, 647 bp, Homo sapiens
aacagcatttttacagaagagctgagtctttttgggcagtgcctctaaggtaaaggtgtaatcacagcctcaagaaagtatccgtaaaaaggaatcaaatagaacaaaaggaagttttcctacttatatacagctgaaactcatttcattaaaggaacagaataattttatgtgggaaatattttcacctttgagtgatgttctgacagatgaaagatttggggtacaaaaatagaagactgtattatggcaaggatacaaattttctaaattgggataaataccctacttccaaaaaaccaaaagcccaataaaactcaatgccagacaagtataaaataattatwaaaaagattacaataaaaaaagtgaaactgcattgatatccatgtaagaatttttaaaggcagtttttataatcataaataaaatatattataaaattgccttaaaaagaaattatgtaatcatctagttatgttctgctgcacatcttaaaccaggtaaacaaaaaatgcaaacactattccattggaaagaaaacaatttattatatctgaggaaagtcattacaatacatgtaatatatttccaatttactgatttaaaggcgtatggatttaatttttaaatacactttcaaagct

SEQ ID NO: 360122 - DNA, 617 bp, Homo sapiens
ttctagacttatttgatttcctagctttttcttcattgctttgacctygttcatgttgggtacagggtatatctttcctgaagtttttcaatgttttgtgtgtgtgtgtgtgtgtgtgtgtctgtgtgtgtgtgagatttcctgttagcttttatgtggacactctatataacgtttgttttcagaaaacatagggtgggatatttcacagcttacacacttaggatgagaagtctctattcctcttgaagaccatcagttctacctcttaggtgtctgacagagggggttagctcacatatctactgaataatcccactgagctcactattttttagtatgcattactaaagataattgaacctaataaagtatcttacaattgacacatgaaagaactttccattactcacaaaaggaagtgctgtcttctcacagagtagtaaacataaaataatgactacaagcactcagcacagctcttgttgagatttcaaaattcatttagataatcctttcagtctcctaggttctcaattcctttaactcatctccttccatcactttgcctctatgctacccccatcttcacatcctaaaacttatactcacaagat

SEQ ID NO: 360123 - DNA, 570 bp, Homo sapiens
gttttcctacgtatatacagctggaactaatttcactaaaggaaaagaataattttatgtgggaaatattttcacctttgagtgatgttctgacagatgaaagatctgggagaacaaaaatggtagactgtwttacggcaaggatacaaatttctaaattgggataaatcccccacttccaaaaaactaaaacccaataaaactcgaagccagacaaatataaaataattacaaaaagcaagattacaatttaaaaaatgtgaaactgcattcatatccaggcaagaacttttaaaaggcagtttttgtaatcataaataaaatatattataaaattgccttaaaaagaatttgatgtaatcatctagttatgttctcctacatgtgttaaaccaggtaaagaaaaaatacaaacaccattccattggaaagaaaacaatttattgtatttgaggaaagtcattaaaatacatgtaatatatttccaattcactgatttaaaggcatacagatttaatttttaaatacactttcaaagctgttacgcacagttccatagtccgggtggtc

SEQ ID NO: 360124 - DNA, 540 bp, Homo sapiens
tagaattttttggcgaacggccaccaagaatttttacggagaaaaatagcctatctcatgargtggtgctgtagggtctgaaaagttatgtaaaatctgtgactctaaattttttccaggaagaagttagaaagagaggtttggggtttaacaggctgtcactgtatatgcctcccagcagtagaaaattaacttgtctcattaataaactgttcaaattcattcagcagtgctgagcttttacatgaagaaaaagcaactgaaatggagagggatgagggtattcacttggggtgaaatatcttctcatagagtgccatgaatgaccgctattgcgggacaagaagcacttactaggtgaaggtttagactgaaatcttgaaatcccctggtattttgtgtgtctgattacctttccaaaggaataaaatcagatatgtatccatctcagtgagcagaggggtgactttgagtagaatgggaggaaggtttgttctaagtagtttcccgcttgcattttccccagtgatttcaggggcc

SEQ ID NO: 360125 - DNA, 540 bp, Homo sapiens
tagaattttttggcgaacggccaccaagaatttttacggagaaaaatagcctatctcatgaagtggtgctgtagggtctgaaaagttatgtaaaatctgtgactctaaattttttccaggaagaagttagaaagagaggtttggggtttaacaggctgtcactgtatatgcctcccagcagtagaaaattaacttgtctcattaataaactgttcaaattcattcagcagtgctgagcttttacatgaagraaaagcaactgaaatggagagggatgagggtattcacttggggtgaaatatcttctcatagagtgccatgaatgaccgctattgcgggacaagaagcacttactaggtgaaggtttagactgaaatcttgaaatcccctggtattttgtgtgtctgattacctttccaaaggaataaaatcagatatgtatccatctcagtgagcagaggggtgactttgagtagaatgggaggaaggtttgttctaagtagtttcccgcttgcattttccccagtgatttcaggggcc

SEQ ID NO: 360126 - DNA, 540 bp, Homo sapiens
tagaattttttggcgaacggccaccaagaatttttacggagaaaaatagcctatctcatgaagtggtgctgtagggtctgaaaagttatgtaaaatctgtgactctaaattttttccaggaagaagttagaaagagaggtttggggtttaacaggctgtcactgtatatgcctcccagcagtagaaaattaacttgtctcattaataaactgttcaaattcattcagcagtgctgagcttttacatgaagaaaaagcaactgaaatggagagggatgagggtattcacttggggtgaaatatcttctcatagagtgccatgaatgacygctattgcgggacaagaagcacttactaggtgaaggtttagactgaaatcttgaaatcccctggtattttgtgtgtctgattacctttccaaaggaataaaatcagatatgtatccatctcagtgagcagaggggtgactttgagtagaatgggaggaaggtttgttctaagtagtttcccgcttgcattttccccagtgatttcaggggcc

SEQ ID NO: 360127 - DNA, 537 bp, Homo sapiens
ttttctaggatgaagagatcttatctctgaaataccctttgcaggttgctcctgactgaaacaaattcacagattctttcttcttgctcaattttgctgttgattcttcattttacattctttatttcatttattttatgctttagctctagaattttagtttgggttctattttttcaatctgtctgtggaacttctcaattggtttgtgttttgttttttttcaagttttggttgaattgcctatttattctcttgtaactaattactctcctttaaaacaattatttgacatgaaaaaccktgcaaaaatacaaaaatctataaacttcttgacaaagaattcaaaataattattttaaagaatttctgaatttgcagcaaaagtttgctatagagcaacatgaaagcacagaaaagtatgaaactcattgattaaggtaaatatataaaaaatacagaacactctaatagtgtagtagtggtgtgtaaatcagttttattgctagtatgaagcttaaaatccaaaataataat

SEQ ID NO: 360128 - DNA, 551 bp, Homo sapiens
agaacactctaatagtgtagtagtggtgtgtaaatcagttttattgctagtatgaagcttaaaatccaaaataataataattatagctacaataatttgttaatagatatagaatattaaaaatatataatgtgacaccaaatatataaaatatagtgggctgagtaaaagtatagagttttgaatatgatcaaacctcagtttaaaatagtttgctccaactacaagatagtatgtataagcttcatgctattcggaaagcaaaaacctatagtagatacccaaaagacaaagagaaatcaaagcrtgtcactacagaaaatcataaaatctcaaagaacgacagcaagggagaaataaaggaacaaaaatatgttaaaaggctgaaaagcaatgaacaaaatgtcaattgtatgttcttatctatcaataattacctgtgaagataaattcattctattctacattcaaaagccagagtggctgaatggattacaaaaggagacccaacaatatactgcctacaagagactcacttcagcttcaaggac

SEQ ID NO: 360129 - DNA, 606 bp, Homo sapiens
tgtgagatgtacattggttcggtccagaaaggtgggacaactcgaggcaggggaggaggcttccaggtcataggtagataagagacaaaaggttgcattcttttgagtctctgattagcctttcactgaatacacagtttaccagaacagtcacctatgccttagttaggcttagtgaaaaacagggcgaaggaagcaattggatatgcctttgtctcccatgagcagagggatgactttcagttctgtctgtcctttgtccacaaggaatttccctgtgggcagaatgtgagggaggtatkcagcttaaaaaaaaaaaaatctggccaggacggtggctgatgcctgtaatcccagcactctgggaggctgagacaggcggatcacctgaggttgggagttcgagactagcctgaccaatatggagaaaccccgtctctactaaaaatacaaaatagccaggcgtggtggtgcatgcttgtaagcttgtaatcccagctactcaggagcctgaggcaagagaatcacttgaacccgggaggcagaggttgcagtgagccaagatcatgccattgcactccagcctgggcaactagagtgaaactc

SEQ ID NO: 360130 - DNA, 527 bp, Homo sapiens
agttctcaggcagatggcctcattggggacgttttaggagctatgggacatgaagccacaaaggagcatggacgtgtctgagaaccttctcagagccccagaagaaagggagatgccaacagcacgcacagagcacagacctgcaaagcgttgatgagctgccggtcttcctgccttgtaaggaacaagggggtgatccccgcatctgagagyttgagcacagcctctctgagctgtggggatgctcttgtgggtgtgttgctgaagaaaacagccactttcctcattaggaatccattcctcacacgcttaaatgtgttcctggccacaaacgacatggcagtctccagactctgctgtttggatgtcagagccacctgaaggttcttaatcttgtccaggaggaccgacttcctcttggagtcagcaaaccggatctccgtggtcacctcgttgttgtaggtgaccacagccacccgggccccccgtgggcagttgctctcagcaatggtcaggtcattcacaat

SEQ ID NO: 360131 - DNA, 527 bp, Homo sapiens
agttctcaggcagatggcctcattggggacgttttaggagctatgggacatgaagccacaaaggagcatggacgtgtctgagaaccttctcagagccccagaagaaagggagatgccaacagcacgcacagagcacagacctgcaaagcgttgatgagctgccggtcttcctgccttgtaaggaacaagggggtgatccccgcatctgagagcttgagcacagcctctctgagctgtggggatgctcttgtgggtgtgttgctgaagaaaacagccactttcctcattaggaatccrttcctcacacgcttaaatgtgttcctggccacaaacgacatggcagtctccagactctgctgtttggatgtcagagccacctgaaggttcttaatcttgtccaggaggaccgacttcctcttggagtcagcaaaccggatctccgtggtcacctcgttgttgtaggtgaccacagccacccgggccccccgtgggcagttgctctcagcaatggtcaggtcattcacaat

SEQ ID NO: 360132 - DNA, 529 bp, Homo sapiens
agtacgtatctgctgaggattatccaagcgtccttgctgccagsaggctccaaggacaacttctgatgtgttgtgttttaaaagaattatttctttaaaaattgtctttgtatttgagtgagtgttttcttttgatgactcagcagacatttctttctttcaaggtcaatttattttagatgaatttaaattagaaccaagtattaaataatctatttttcctttatagggagaaagaggatttcctggatacccaggaccaaaggtaaataatccctggtcggtgaagcatcatcatgattttgggatggctctggtatgtccatggactgagaatcagaatatcttggcattagtcttgggtcagccactcagttaactgggctaccctgagaaagacccttccttccctaaaatactctctcatctgtcaagtggaggtcataatacgtacttgtcctggtgtttatgagatttaaataaaatatgctgcaatcaaagtactctgtaagctgtgaaatgctataac

SEQ ID NO: 360133 - DNA, 529 bp, Homo sapiens
agtacgtatctgctgaggattatccaagcgtccttgctgccagcaggctccaaggacaacttctgatgtgttgtgttttaaaagaattatttctttaaaaattgtctttgtatttgagtgagtgttttcttttgatgactcagcagacatttctttctttcaaggtcaatttattttagatgaatttaaattagaaccaagtattaaataatctatttttcctttatagggagaaagaggattycctggatacccaggaccaaaggtaaataatccctggtcggtgaagcatcatcatgattttgggatggctctggtatgtccatggactgagaatcagaatatcttggcattagtcttgggtcagccactcagttaactgggctaccctgagaaagacccttccttccctaaaatactctctcatctgtcaagtggaggtcataatacgtacttgtcctggtgtttatgagatttaaataaaatatgctgcaatcaaagtactctgtaagctgtgaaatgctataac

SEQ ID NO: 360134 - DNA, 584 bp, Homo sapiens
atgtgagccatgtagactgcaacttatacccctttctatggtaagaaacaaggaggagaagagatcaaaacacagtgacagacttatcataacattttggaaatgtcatccaaaaaatgaaagatcaggtgctattaccagatgcaaaggacagaaaggmtaaacaaacaagaacaccagaaatttgctacttaattatttaaaccaatcacttattcaatctgaaaaataagcgtaagaatatcactattgactttacatggaagtacaaagacaaagcacaaaaagtgcttccaaaaaaggcctttggggagaaacttgttagatactttacaaaataaattacattgcttgtacattgctattgaaagtataaatttgcatgatgacttaggaaaacaatttggcattgtcttgtaaagctatatattataaactctaaagcctgggattttctttcccaagtggctgagacaggggtgatcatcaaacattttatctgctcccctacagttcttacttcacttgagttaggtttgaccactgggctacttcaggtaaaggaaatgtggatagaagttgta

SEQ ID NO: 360135 - DNA, 584 bp, Homo sapiens
atgtgagccatgtagactgcaacttatacccctttctatggtaagaaacaaggaggagaagagatcaaaacacagtgacagacttatcataacattttggaaatgtcatccaaaaaatgaaagatcaggtgctattaccagatgcaaaggacagaaaggataaacaaacaagaacaccagaaatttgctacttaattatttaaaccaatcacttattcaatctgaaaaataagcgtaagaatatcactattgactttacatggaagtacaaagacaaagcacaaaaagtgcttccaaaaaaggcctttggggagaaacttgttagatactttacaaaataaattacattgcttgtacattgctattgaaagtataaatttgcatgatgacttaggaaaacaatttggcattgtcttgtaaagctatatattataaactctaaagcctgggawtttctttcccaagtggctgagacaggggtgatcatcaaacattttatctgctcccctacagttcttacttcacttgagttaggtttgaccactgggctacttcaggtaaaggaaatgtggatagaagttgta

SEQ ID NO: 360136 - DNA, 510 bp, Homo sapiens
tggaccaaactacaccacagtgacatccaccagtctacaaattttactaggcatatagagcttccaatgtgttttagtttcccactttcaaacaagaggagacagctaaggatcactggacatatgaaaaaggcgaggtaatgagcaaagtaagtaaaaaaggtacttgcagaaaacagaaactgaagaaatayttatgaaaagggttagatgaacctaatgtcaaggaatataataaaaatttagatcactaaagacagatgacatgatcctaaaagcctgcaaagaggaaaaaaatagtcacaaaggatcatggaatcacaacagtattctcaacaggagaagctaaaataaaagaaagcaacatttgtaagtctaagggaaaatacacctgactaaaagggaggcttgatatgaaaaaatatatattattttttaattaaaggaaaataatttctaatctagaattctgtactcacccaaattacccatcatgaaggtaaaaccatg

SEQ ID NO: 360137 - DNA, 598 bp, Homo sapiens
ggtggaccactatacccaatttcaagtcatacataatcaagacagtgttgtattggcagagaggtagacacatagatcaacagagaatctgagcacagactgcctggaatctagctagctgctgctaatgaaacactgcgggtatgatacccaccttgccaagtgcaaaggagctgggtaggtttactaccacctgctactccccattccctatgtgaactcttttgtgcaacagaagcagctgtactcctacctgtaacatcaccccggcagccagaaaagtgcccgctgaycgctactgggaccactgcttgccctacacacagaaagtcagagtgcacacttacctgacccagcctccacttggctttgcgcctctacctgccctggtagcttaacacaaacaatagaaacttttgggagcactatagcactgcccattgcctgagacaccagagtaccttccctgggtaacataaagcaagcacaaatctcaccagtaccactgcagctggcactctttggcaagcaccacctcctagctggaggccaaccaacacagtccattacagcacgtctaggtagaataacacagtgc

SEQ ID NO: 360138 - DNA, 406 bp, Homo sapiens
tatttggacctcttcgagactttccttagaaaagggatttcttcatataatgctagacagaakaattctcagtaacttctttgtgttgtgtgtattccactcacagacttgaaccttcctttagacagagcacatttgatacactctttttgtggaatttgcatgtggagatttcaagcgctttcaggccaagggtagaaaacgtagtatcttcgtataaaatctagacagaatcattctgagaaactactttgtcatgtgagcgttcaactcacagagtttaacatttcttttcatagtgctgtttagaatcactctctttttaatatctgcacgtggaaaattggacctctttgaggccttcgttggaaacgggatttcttcatatactgctggacaaagaatt

SEQ ID NO: 360139 - DNA, 406 bp, Homo sapiens
tatttggacctcttcgagactttccttagaaaagggatttcttcatataatgctagacagaagaattctcagtaacttctttgtgttgtgtgtattccactcacagacttgaaccttcctttagasagagcacatttgatacactctttttgtggaatttgcatgtggagatttcaagcgctttcaggccaagggtagaaaacgtagtatcttcgtataaaatctagacagaatcattctgagaaactactttgtcatgtgagcgttcaactcacagagtttaacatttcttttcatagtgctgtttagaatcactctctttttaatatctgcacgtggaaaattggacctctttgaggccttcgttggaaacgggatttcttcatatactgctggacaaagaatt

SEQ ID NO: 360140 - DNA, 406 bp, Homo sapiens
tatttggacctcttcgagactttccttagaaaagggatttcttcatataatgctagacagaagaattctcagtaacttctttgtgttgtgtgtattccactcacagacttgaaccttcctttagacagagcacatttgatacactctttttgtggaatttgcatgtggagatttcaagcgctttcaggccaagggtagaaaasgtagtatcttcgtataaaatctagacagaatcattctgagaaactactttgtcatgtgagcgttcaactcacagagtttaacatttcttttcatagtgctgtttagaatcactctctttttaatatctgcacgtggaaaattggacctctttgaggccttcgttggaaacgggatttcttcatatactgctggacaaagaatt

SEQ ID NO: 360141 - DNA, 406 bp, Homo sapiens
tatttggacctcttcgagactttccttagaaaagggatttcttcatataatgctagacagaagaattctcagtaacttctttgtgttgtgtgtattccactcacagacttgaaccttcctttagacagagcacatttgatacactctttttgtggaatttgcatgtggagatttcaagcgctttcaggccaagggtagaaaacgtagtatcttcgtataaaatctagacagaatcattctgagaaactactttgtcatgtgagcgttcaactcacagagtttaacmtttcttttcatagtgctgtttagaatcactctctttttaatatctgcacgtggaaaattggacctctttgaggccttcgttggaaacgggatttcttcatatactgctggacaaagaatt

SEQ ID NO: 360142 - DNA, 557 bp, Homo sapiens
ttaaccctgtcattaattcaatggaagggttaattaaagctaggcataatagttatggtttccaaaaatattttaaccttttaataatctccatctcatttgtgtccagggaacagcaagaaatgagaatttgacttgctgagaataaatctacatttctttttggtttaaggactagaacctaacaaaatcgattacagtcagtagacacaaagctcaaatatgctaagatctccctggaattcaaatgaagtgaattgttttacattttggtcccaaattctcatatagggagaggagattaggaaaaaaaagaagtacctttttttctataatgaatttggaaaaagtagattcagaagcaagttaggctaaacttcctacctcacattattgtgaggcaggccaagttaagaagagtgaagaagaaaaggaagaggagagaaatgatagaaargggttgagctaattttataataaaaggaaacctttctgatgcattactgtggctttccatgttatatctttaaatccttcccatgatcctatgaggtgag

SEQ ID NO: 360143 - DNA, 566 bp, Homo sapiens
tatccattcacttatttactcaacaagcatttgcctactaagtgccagctcctggagatacgatgaaaattcaaatcagacttgatccttgttatcaaaaatttactattttttggaagctatggttattaatcaaataataccaatgagtataaactggaaagcattctgaaggagagaaacataatttgtcaagatcatgcaaaaaaggaattgcatctgtaatctccactcagtgtgttctgggaaaaaataaaaaatcatataattgttttatgtattgagtttaaaacctaaaaatgtaagggatgctctattgaaatcaaagatcatgcactatctcaaagtccctctatggctccctttcttcttccctccctccctgcctctttctcttgattgatgctttactcttaccaggcattccttccacgttttaactcgagtaaaacaccatcccttagcagtggaaaccagctttmcgaatgaacaggaggggatcatttacacaatctagctccccatgaagtgaatctcaaccaacgcagaaacagaacaccaaaaaa

SEQ ID NO: 360144 - DNA, 566 bp, Homo sapiens
tatccattcacttatttactcaacaagcatttgcctactaagtgccagctcctggagatacgatgaaaattcaaatcagacttgatccttgttatcaaaaatttactattttttggaagctatggttattaatcaaataataccaatgagtataaactggaaagcattctgaaggagagaaacataatttgtcaagatcatgcaaaaaaggaattgcatctgtaatctccactcagtgtgttctgggaaaaaataaaaaatcatataattgttttatgtattgagtttaaaacctaaaaatgtaagggatgctctattgaaatcaaagatcatgcactatctcaaagtccctctatggctccctttcttcttccctccctccctgcctctttctcttgattgatgctttactcttaccaggcattccttccacgttttaactcgagtaaaacaccatcccttagcagtggaaaccagctttccgaaygaacaggaggggatcatttacacaatctagctccccatgaagtgaatctcaaccaacgcagaaacagaacaccaaaaaa

SEQ ID NO: 360145 - DNA, 470 bp, Homo sapiens
ctgccaccaccaatttttgtggaagaaaaattgtctttcacaaaccagtccttggtgccaaaaaggatggggaccattgtaatacaggaagagatttcttttatttttccttattttgtttttccttattacttactggcttatgaaaattctacagccactgtaaagattatcacctacactataaagattatcaccgcactgggcgcagtggctcacrcctgtaatcccagcactttgggaggcctaggtgggcggatcacgaggtcaggagatcgagaccatcctggctaacacagtgaaaccccatctctatgaaaaatacaaaaaattagccaggcgtggtggcgggcacctatagtcccagttactcgggaggctgaggcaggagaatggcgtgaacctgggaggtggagcttgcagtgagctgaggtcacgccactgcactccagcctgggtgacagagcgag

SEQ ID NO: 360146 - DNA, 470 bp, Homo sapiens
ctgccaccaccaatttttgtggaagaaaaattgtctttcacaaaccagtccttggtgccaaaaaggatggggaccattgtaatacaggaagagatttcttttatttttccttattttgtttttccttattacttactggcttatgaaaattctacagccactgtaaagattatcacctacactataaagattatcaccgcactgggcgcagtggctcacgcctgtaatcccagcactttgggaggcctaggtgggcggatcacgaggtcaggagatcgagaccaycctggctaacacagtgaaaccccatctctatgaaaaatacaaaaaattagccaggcgtggtggcgggcacctatagtcccagttactcgggaggctgaggcaggagaatggcgtgaacctgggaggtggagcttgcagtgagctgaggtcacgccactgcactccagcctgggtgacagagcgag

SEQ ID NO: 360147 - DNA, 470 bp, Homo sapiens
ctgccaccaccaatttttgtggaagaaaaattgtctttcacaaaccagtccttggtgccaaaaaggatggggaccattgtaatacaggaagagatttcttttatttttccttattttgtttttccttattacttactggcttatgaaaattctacagccactgtaaagattatcacctacactataaagattatcaccgcactgggcgcagtggctcacgcctgtaatcccagcactttgggaggcctaggtgggcggatcacgaggtcaggagatcgagaccatcctggctaacacagtgaaaccccatctctatgaaaaatacaaaaaattagccaggcgtggtggcgggcacctatagtcccagttactcgggaggctgaggcaggagaatggcgtgaacctgggaggtggagcttgcagtgagcygaggtcacgccactgcactccagcctgggtgacagagcgag

SEQ ID NO: 360148 - DNA, 553 bp, Homo sapiens
gaggacaagtccggggtgttaagtgtcccctggagctgtctgatatcaatattcccccacagttgtcttcacataggttgctcgttggaattagactcttctggactttagcactgatagaattggggagagaaagggaragtagacaggccaatcatcaagcaagcaatattttcttacaaattgtttaattaagtattttcagtatcatgcctgatcttacccatgagaataatctctcttgtttctgggtcctttaccctcgttggctgcaaaggatctccaagaggtatacctagatttaccattaagttagtctctgcaaaagaaataccattgaaatacaaactacttacttaaaattattctcaatcccaaaaagttcagtacaaaatatagctatagagaagttataaaactgtcaaacgcaaagaagtctcttcctatttataaatcactctgataaacaaaaattcaaacttaaaaacccataatgatttaatataaaagcaaacaccctaaacttcctattttctgtaagccttaacatgta

SEQ ID NO: 360149 - DNA, 598 bp, Homo sapiens
attcagtcaattttcttagtggtccctctcaaaagtttaaagaaactactcttataataagacagtgatatttctcgttttccttatgactagagtttgttcagtagatgctgaccctattcctagcattttccatttccaattttgctttcmttttcctggtggactttcctactttcccttccagtagttcttagaccttatacatcacaaagatctttagctggtaagagacgagaatatgtctccccaaaatatgagggattgttgagctgaagacagttaagaagaagaagatgcagaagagctctctgtcctccttttatttgtctagaagtggaacataaaatttacttggagaaaatatatactacctgctgtggtttgggtatgatttgttttgttcccaccaaactcatgttaaaatttgatctccagtgtgtgatgttgggaggcctagtgggaggtgtttgggtcataggggcagatcccttatgaatggcttgattctgttctcttgtttgtaaattctcactctcctgagactgggttagttctcatgtgaatggattagttcccacaggagtgggttgttata

SEQ ID NO: 360150 - DNA, 601 bp, Homo sapiens
tacttcctgcctctactctcttgttattaatatcccccaagagagtggtacatttgctacaattgatgaacctagattgacacatcattgtcacccagacttcatagtttacatcagagttcactcttgatattgtacattctctgtgtttgaacaaacgtataatgacatgtattcaccatcacagtattatacagagtagttttactacactaaaaatcctctatgctccgcgtattcgtcccaccttccttcctaatccytggcaatcactgatctttctactgtctccatagttttgctttctctggaatgtcatatagtttgaatcatctagtatatgaccttttcagattgatttctgtcacttagtaatatggattcatgtttccttcatgttttcaaaggttgattgctatctttttattgttgaataatattccattgtctagaagtaccacagtgtatccactcacctgctgaaggacaccttggttgcttccaagttttggcaattatgaataaagctgacataaacatccatatgaaggattttccatagaacataagttttcaattcctttgataaatacaaaggagt

SEQ ID NO: 360151 - DNA, 235 bp, Homo sapiens
aagaaaaccatgcttttgaaatgttacgttttatatatttctaggataaccaccaaattcacttagcatgtyaccatacttgaggaaaatcaattcctaagattaaagaaaaaaaaaagtctgggttatacagttatttcccacttacatcaaattaaatttaaaattaaactgccaagttgaagttcctggagggtattctccttgctcattcataaatgtcagccctagctga

SEQ ID NO: 360152 - DNA, 588 bp, Homo sapiens
agaaaagctcaggcacaggtggcttcactgcttttaccaaacattcaaagagaattacgacaaattattcacaaaccgtttcaaaaaatagagagataatacttcccaactcattgtataaagccagtattaccctgataccaaaactaaacaaagacaacagaagcaaagcaagctaccgatcagaacccctcaacaaaatactagcaaattccagcaacacaataaaataaaagagagagaaaagcagagaatggcctgaaaaagtgaaacagaatgggtatgggatttctttatgcactataatgatatacgctaatatattttaggacacactgtcatttatttcagtatatcctcagcaccttactgattccaacacaaagtatgtattacctcaataggttgttggaactaataagaattcattaaaagyatctagcaaatatttggcacatagtatgaactcaaaaaatgttaactattatcatcctaagaagaaaagtattaagctatattcctaactattgaaatcacattaatctcacttaaaaggaaacaatttgaactatacacttaaaaaagatt

SEQ ID NO: 360153 - DNA, 487 bp, Homo sapiens
cagcctcccaaagtgctagaattacaggcatgagccaccaagcccagccaactcaatttttcaaaacaaaaaaattagtttaaaaaagtggcatggttttacatttttgccaatttataatatctagcttaatagaagacagttgtattctcatcttgacttctgtatgcaatgtgatacaatatgctgtttgaaagaaatctggtcacacagatatgtaattggaaaagggagaaatactatcatagcctttttagattctagggtgtatgcttcttttacattgagctaacattgataagtggtattttcttaaagtttgttgtaaggtggcatctgaacagccawattaacaaactttttaaactttatgatgttaaaatttgttggactttcttacatctcaaatagatctttttacacatacataattttgtatcatgcatggctcatttgaaaatattggttcactgagttatgtggatca

SEQ ID NO: 360154 - DNA, 577 bp, Homo sapiens
gaagatacaggctaaagatacaggacccagcctacatatggtttgtctgtgttcccacccacatctcatcttgaattacagctaccatgattccctcatgttgtgggagggacccagtgggagataatttactcaggagggcagtttccttcatactgttcttgtggtagtgaataagtctcatgaaatttgattgttttataagggaaaaactcttttccttggttctcattctcttatcttttctgccgccatgtgagatgtgccattcaccttctgccatgattgtgaggcctccccagccacgtggaactgtgagtgcactaagcatctttttctttytgtaaattgcccagtctctgataagtctttgtcagcagcatgaaaatagactaatacagtaaattggtaccagtagagtggggcactgttgaaaagatacccaaaaatgtggaagtgactttggaactgggcaacaggcagaggtaggaacagtttggagggctcaggagaagacagaaaaatgtgggaaagtttggaactccttagagacttgtcaaatggctttaaccaaaat

SEQ ID NO: 360155 - DNA, 408 bp, Homo sapiens
taatacacagcccatagctggctctgccttctcatttcacttccagctcaatcctgcattatgagggtctttatgtacattcctatgtacacctcagccacaagtccaaattctgaccatatctttgcaagcatttttcttgtggccacaccttgggcctaagactgggcacattagaagcagagcttggagaagactggcataggtcctggaagcagcttagagacaatggagctccctagcatatagtgtacaaaggagagtgcagttttcacataggcatgtctcctttggttcacagactccttaccagtgaggagggacacagctgaagaagggccagggaagcgtcctytaaagtatgggtttgaggacagggtcctcactgggacagtgaaagaatgatcc

SEQ ID NO: 360156 - DNA, 363 bp, Homo sapiens
agggtcccatcaaaccaatttcttcttccttttgggtacacagttgtattacgttttttyaggttcctttaaaggtaggtgggcacacaggcctaagttctggctgatggaatgggagggggaagtgatggatgtcatttgcaggcctggctcctaaaaccttcctgtaagtccttctcattggcttactcttctttttctccttttttttttttttttttttttgagacagagtcttactctgtcacccaggctggagggtagtggcaccatcttggctcactgcaacctccgcctcccaggttcaagtgactctccttcctcagcctcccaagtagctgggattacagatgcatgccacca

SEQ ID NO: 360157 - DNA, 363 bp, Homo sapiens
agggtcccatcaaaccaatttcttcttccttttgggtacacagttgtattacgtttttttaggttcctttaaaggtaggtgggcacacaggcctaagttctggctgatggaatgggagggggaagtratggatgtcatttgcaggcctggctcctaaaaccttcctgtaagtccttctcattggcttactcttctttttctccttttttttttttttttttttttgagacagagtcttactctgtcacccaggctggagggtagtggcaccatcttggctcactgcaacctccgcctcccaggttcaagtgactctccttcctcagcctcccaagtagctgggattacagatgcatgccacca

SEQ ID NO: 360158 - DNA, 599 bp, Homo sapiens
tgctggttggatgcagaagatttagtggaggacttcgaggctgtggagggagtggaatmgttaaatgaaaagatctcagtgtctgaatgatagtgcagattatagccaccagatgactcacattcatctgtggctaagtaaaaaataactgttctttgatttaagacattgaaatattgaggttgtttgatacagcagttagcttgttttgatgaatatatcttacattcctccattcatgtaatagatacatactgattacttacagagtgctagagtctatgttatatgctgatgttacaacagtgaaaaaaatatatagaccttggcttcgctgctcttataatctactggtgactaataagggtggggatggaagggctggtggaaggagataaaattcaaagaagcatgattaacattttcaagaaactgatgtctataaaattggataagaacaatttcctgaggttatggaccttgacttgttattaaaatagagtagaatgtgagctagtaggtaaagagttgctagtttatgtggagtaaaggattttttttaacataaagattaaatgacctagaaaaatgtaccatat

SEQ ID NO: 360159 - DNA, 585 bp, Homo sapiens
attaggattacaggcatgagccaccgtgtctggccttgctcttcttttaattgctggttggatgcagaagatttagtggaggacttcgaggctgtggagggagtggaatcgttaaatgaaaagatctcagtgtctgaatgatagtgcagattatagccaccagatgactcacattcatctgtggctaagtaaaaaataactgttctttgatttaagacattgaaatattgaggttgtttgatacagcagttagcttgttttgatgaatatatcttacattcctccattcatgtaatagatacatactgattacttacagagtgctagagtctatgttatatgctgatgttacaacagtgaaaaaaatatatagaccttggcttcgctgctcttataatctactggtgactaataagggtggggatggaagggctggtggaaggagataaaattcaaagaagcatgattaacattttcaagaaactgatstctataaaattggataagaacaatttcctgaggttatggaccttgacttgttattaaaatagagtagaatgtgagctagtaggtaaagagttgcta

SEQ ID NO: 360160 - DNA, 599 bp, Homo sapiens
tgctggttggatgcagaagatttagtggaggacttcgaggctgtggagggagtggaatcgttaaatgaaaagatctcagtgtctgaatgatagtgcagattatagccaccagatgactcacattcatctgtggctaagtaaaaaataactgttctttgatttaagacattgaaatattgaggttgtttgatacagcagttagcttgttttgatgaatatatcttacattcctccattcatgtaatagatacatactgattacttacagagtgctagagtctatgttatatgctgatgttacaacagtgaaaaaaatatatagaccttggcttcgctgctcttataatctactggtgactaataagggtggggatggaagggctggtggaaggagataaaattcaaagaagcatgattaacattttcaagaaactgatgtctataaaattggataagaacaatttcctkaggttatggaccttgacttgttattaaaatagagtagaatgtgagctagtaggtaaagagttgctagtttatgtggagtaaaggattttttttaacataaagattaaatgacctagaaaaatgtaccatat

SEQ ID NO: 360161 - DNA, 511 bp, Homo sapiens
tcacacagctaattagtggtagaactggcattccagccaaagcctactgggtcttggcaccatgctatttagtttttgtcagtggtattgagagcacagcatacgtgagaagagatctgatcattacctggtatggcaggctttagtcttgggaataaaagcaaatgctgcgttcttcccctccactgagagatacacactccattagtttttcatttgccagaagcatcagttttttaatattttctctttcgttttatctcaggggaatatcaatctgtacagatttattattaattccctggtaacatgcttagctgctcaaaaattttttactgttgcttgtaaaagaagamctgcctgttcttgaaatttcagggactgcaatcactctggatgaaatattaccttaagagacattataagaagaagagaagagtacaggataaagaactcctctacctcccacccatctgccttttctctggaacaagcaatagctactttagtg

SEQ ID NO: 360162 - DNA, 549 bp, Homo sapiens
ttctctggaacaagcaatagctactttagtggaggctgtttttccagcagactgatcctttactttttctccacaatcttccctgtccaaggaatatcaagtttatacttaaaataacatttccaaaggaaagtaatcctctcagcagaggctctttcttttttttctccaaatttctttttactcctcagattctcatttttaattgactagtctgatatttatatcttttatatgtggataccacaagcacatttttgactattattctgaacaattgaaaaatgttaaatgaaaaatcaaaagcattcgcttctgcatatattcatttatttattcaacaaatattaattagaggcccactatgtgtcagagctgggctggtgctggagatgtaacctctgcctccatggaaattatggtctactggaagacataaacattaagcaaataaacacactaagaactttataaaactacagaattaycacaccagctaattaagctgcatgaatatggtgggatgcaagcatgaaatagttgtgtttt

SEQ ID NO: 360163 - DNA, 639 bp, Homo sapiens
tcgggatcaggaaggctatgtgcacagctaggctgcacccagttgggaacactcagagcagaatgtrgggtagtcttacaaacattccccaagaagcacatagccatcaacacaaggcagaagcttcactgccgtggaagtgttaaatacaacctttgaccaaacattgactgaataagaagctacttttacttagggtcaactcctaggaagtcaggcttaaaactataatcctactcatccttggcaatgtaaaagactatgtgccatgtctgtgattgttaattttatgtaccaacttgggtaggccacagtccccagatgtttatcaaacactgatctaaatgttgccatgaaggtagtttttagatgagatttacatttacatcagtagacttcgagtaaagcagattaagcttcatgatgtgggtggacttcattgaatcagttgaaggccttaacagagaaaagactgaggttcaacacaggaaaagagaattctgcctctaaattgccttcagactcaagcaacaatgtcaacttttccctgggactccagcctcctttgtagatttcagacttgccagaccaaccaacatgtaagcctattccttaaaataaatatttctacatatacat

SEQ ID NO: 360164 - DNA, 525 bp, Homo sapiens
atagcaacatttaaggaatgggcctaagagagtgaggagtggccaaataggcagaataaaatccaagaaggaatcttccatattaatcaaaagagaaggtttcaaagagggttcgtcaattggcaggtactgaagggatatctgaaaacataaagactttagactctctaatactgtagcaactttaaggtcactgctatcacctacaaaagtaatttcagtggcaaaagccaaaacgtaatggtttaraagggtatgtgaggtgtggatgtggaaatagtgggtatagactattgcttctcaaaatgtaatcacctgaaaaatcttattttaaaatgcagattttgattcattagctctagagtggagcctgagattctgcatttctaacaagttatcaggtgatgctgatgctgctcatacacaaaccatcctttaagtagcactggtgtaagccactctcccacaaaggaggaagacatagggtttccatcaggggacgcaggtggggtgtaggaccaaagg

SEQ ID NO: 360165 - DNA, 596 bp, Homo sapiens
gatcatctaatgatatgttaggcctattatcacatctagatagtttcttttctgtgacttgtaagtgacctaagatgataaactgaaatatttttgcatagatatacatcaagcttttctcctaacttcaggctttcatcttaascaatagtttccaacacccccaaaagagaagtcattatgtttttaaaaaaattattcattttaatgtgatcaaataatatcacatttcagcattcacctatttaattaataaaacaacttacatgtttcattatgactggatgttgatattttttcataatctattatcctccaaccagtggtaaaaacccaatcctcctctcacccagctcatctttccgtatgggaagcaatacatacttccctatgttttattaccaaaacaggagaatgagctttctttagaaggttaactcattttctctattagaatattcagcatacttttaaggaggtaatctggtctttgacagtctgttgattagaaaattaagagacctgcctaaattccatttccaactcctctccatacacattgtgactttgagcaaaacgttttgccatttccactc

SEQ ID NO: 360166 - DNA, 497 bp, Homo sapiens
ctgttgatcttttccatgttccaaactaaccttaaatgttaggctaatattataaaattttaaaatttagtcatttgttctgggtctggcttccatgaacttaaccaaaatgcttggctgtttctgcattctagctttttgggatttagagaaaaagcaacttggtcatcatagtggccaggatttatttatgtgccaataactcccctctgtttttagctttttgatctgttacatctcaaatactttattctctatttgtaaaacaaccacattcctccttttctatatctaagtgaaaaaaaatgcccgttcatactagctacatggttagcatatatgtttcttcctctttgkgggtttgagttgaaacttcttttgcaaagcttaactatagataggtcttccacagaaccctgtttaaatgccttgtggaagtagaagggacatatcttaatattccttataatctgtgttattatttggactttcctcag

SEQ ID NO: 360167 - DNA, 568 bp, Homo sapiens
cccttcctctttagttttccaaaagagtttgagaaagatttgtgttaggtcttctttaaatgtttgtagaattctcccatgaagccatctggtcttgagctttcctttgatgtgagaacttttaaatactgatgcaatctccttaactstttccttagctgttactggtcttttcagatttccaattttcattattcagttttggtagattatgtatttctaagaattcatccatttctgttaggatgtccaatttcttggtatataattgttcatcgtagtctcttaggatcctttgtatttctgtgttatcagtcataatgtcttctctttgatttctgatttgatttatttgagcctgctctcttcattcttagtctagctaaggatttgtcaattgtgtttagcttttcaaaaaaccaacttttagttttattgactttttttctattgtttctctagtctctatttcatttatttctgctctgatctttgttattttcttctttctgctaactttgggcttaattcattcttctttttgtagtttcctgaggtataatgttag

SEQ ID NO: 360168 - DNA, 564 bp, Homo sapiens
tcttccgtcatctgaaaacttgccccaaagttccttttgccatctcttgcagcaaacctagtggttgttatctgttaaggattcctggtggcttgctttagtttcctacagttcttgagctgcmtgtgttgaatggaactccaccattaccatgtaacacatctgaatactcttattttcctccagttaaattctgcgctccttggaaataatggtcatgcaccctaccttagtgatttctaaatagaggtagtatgtaaaaatacatatttacttgaattgcatcttaagaggccagcccatgggaggcatgaagaaacctatgttactaattaatattcaataattgacagttacacattcaggtagtagtgtcatggaaccatcacgttacatggaactgaagagctgatgagaggtttagggtctaggaggacaaaagtgagtgtattagtcagggcctgaggttatatgtacccagacaggataaaatgggacaatattttattagtggaaatatctatgtgaaagaaaagaaggaggaagccaaggaaggtgcaagag

SEQ ID NO: 360169 - DNA, 575 bp, Homo sapiens
actaggtgggtttttgatctctgttcagtaaagcattgtgctcttcagagcaagcaattgaaaagcaaatagtgagtatttctactgtaaaagtttaacattaaaagatatacacacagccaggcaaggtggctcacgactgtaatcccagcaatttgggaggctaaggcaggagaatcgcttgagcccaggagttcgagaccagtctgggaaccatagcaagactccgtctctaccaaaaaaattttttaaaaaatagttggatgtggtggaacacctctgtaatcccagctactcaggacgctgaggcaggaggattgcttgagcctgggaggtcaaggctgcaaggctgcagggagctgtgactatgctactgtactccagtctaggtgacagaatgagaccctctctctctcaattaaaaaaaaaaaaacaagatacacacacatatatttgcgtaggtaactctaatttcatttcaagtatgttatgtaacaaccatttrtgtagtgcttgtaacagtcaatatgtaaatactgactcatcttctttgacaattctacctagatacttat

SEQ ID NO: 360170 - DNA, 598 bp, Homo sapiens
ctaatatttggcaatattaataccatctcattgagaaacctggaatatatgcacattttggatgtctattatatgttgggcactggactagtcattgataatacagagattagtaagactcaggttgacttcagccatgttgtcaggaagcacacactctagtttgggacagcgaggagaaattyaataagagaaatatatataaggcataatgctctaggagaatatgcagtggataactgcccaataggaccaggcaaggctttttagaggaggaggtggcatttgagtcaagtgttaaaggctgaatggaaattcactggttgagataaactccttaggaggaactactttaatagaacttgccgttagtcctgaaataaatggtgtgcaaaatcattaccatctgtcaattcactcagtctactttgctcttaacttcagaaaaaaatcagaaatacaattaaaacatttgagcctattttactgtcttttaaaatgagttaattcaaagaggaaattaaatataatgagagagaatctcccccgaggattgggggctggggaaatgctattgattctttgcttgtgtttattt

SEQ ID NO: 360171 - DNA, 598 bp, Homo sapiens
ctaatatttggcaatattaataccatctcattgagaaacctggaatatatgcacattttggatgtctattatatgttgggcactggactagtcattgataatacagagattagtaagactcaggttgacttcagccatgttgtcaggaagcacacactctagtttgggacagcgaggagaaattcaataagagaaatatatataaggcataatgctctaggagaatatgcagtggataactgcccaataggaccaggcaaggctttttagaggaggaggtggcatttgagtcaagtgttaaaggctgaatggaaattcactggttgagataaactccttaggaggaactactttaatagaacttgccgttagtcytgaaataaatggtgtgcaaaatcattaccatctgtcaattcactcagtctactttgctcttaacttcagaaaaaaatcagaaatacaattaaaacatttgagcctattttactgtcttttaaaatgagttaattcaaagaggaaattaaatataatgagagagaatctcccccgaggattgggggctggggaaatgctattgattctttgcttgtgtttattt

SEQ ID NO: 360172 - DNA, 527 bp, Homo sapiens
cactttctccccccattctcttacctccagcccagctcattcttctcttctttctctttcctctgaaatttcctcaaatatctgtctgcttagtagtctataattcctcaggataaaagaaaaaggaaaaggaagaaaattgcttaataactatgttttatcaagcarcatgcatagtgctttgcatgcgtttaatcccttcaaacttagtatttactagtcagtttgaaaagcccttaaatgttaaacaatggttaagctttagggtattttgagcagggaagtaacatggtaggaggttgatcagattgggcacttgatcaaaaccctctatagatattttatctgacagaaaaggccttttgctaaaccagtatctgattctcaaattggttatgtcatctaagaaggaaaccgtatcattttcttggatgaaatggcttccatttccaaattagtcaggttaggctatgctaagctatagtaagaaatgaactctgaaatctcaatagcttaacacaataaag

SEQ ID NO: 360173 - DNA, 635 bp, Homo sapiens
caagaggagagattttgaaaagtgttgtttgtgcttctgtcattgccttgtgctactctgtcataccccgagtagctgatgtcccttcagcttgagtctcagaagaaaatatgtggtatagacccgaacagaaccgacggcctagagataagcatagctaaaccatttccagccatgattggccaaaccctaccaaactgcagctccatgaataaatcaatattgttgttattagccactgaattaaatttttttggttgtttattgtgcagcaaaatggactgatatgaactgaaatgtggtttataatcaatacaatccagtaaagttctactaaatgtatgtctatcaagcaaaagaaaaaaaacagatgattagaaagttgtcaaattcttctaacaaagtccatatacataccaggtaccagaatgagttatcaataattgcctaggggtaagggttagaaataaaaaaagtcaagttgaacccactaggtcgtatttccaggttttcaagcagactrttctggtttgcaatatttgaaaagagtctgctgtggtatgctaatgactgtgaattctgtggtctttggaatagttccaaaatgctaagctcaagtttaaaacaaaattgga

SEQ ID NO: 360174 - DNA, 605 bp, Homo sapiens
ctgttgtcataattcagtcaagagatgactgtggctgggatcagaatgggagaggtgaatgtggtgaggagtggttggattctactatattttgggtacagagcacaacagattttataatggaataaatttaggtgtgagagaaagagtcaagaagactcaagaatttttagcctgagcaacggaaagatggggtcatcatttactgagatggggaaggctccaggagtaacatattttgggaggaagatgtggatatgttacatttgaaatgcctattatacatctaggagatgtgtggagtagatagctggatatatgaatcttaagttatggggagtagctcaagatacaaagttgggagttgtaacaatgatcagtgcaagttctctgtcttcaatgcaattttaaatgttgatgttccattcttaattgkctctcttctttctctctgcacattttgagtagctttgtctgttggcttcagttaacattaagactcctcagtgtcaacttccatcttacactcttctcctgatctccagaactgtactttctgccacctaacctacattaccacctggatatgctacaggctgcaaaat

SEQ ID NO: 360175 - DNA, 605 bp, Homo sapiens
ctgttgtcataattcagtcaagagatgactgtggctgggatcagaatgggagaggtgaatgtggtgaggagtggttggattctactatattttgggtacagagcacaacagattttataatggaataaatttaggtgtgagagaaagagtcaagaagactcaagaatttttagcctgagcaacggaaagatggggtcatcatttactgagatggggaaggctccaggagtaacatattttgggaggaagatgtggatatgttacatttgaaatgcctattatacatctaggagatgtgtggagtagatagctggatatatgaatcttaagttatggggagtagctcaagatacaaagttgggagttgtaacaatgatcagtgcaagttctctgtcttcaatgcaattttaaatgttgatgttccattcttaattggctctcttctttctctctgcacattttgagtagctttgtctgttggcttcagttaacattaagactcctcagtgtcmacttccatcttacactcttctcctgatctccagaactgtactttctgccacctaacctacattaccacctggatatgctacaggctgcaaaat

SEQ ID NO: 360176 - DNA, 535 bp, Homo sapiens
actacaagattgattgcaacttgctggaattcaagtgaaaatgggctcctcccccgacaatcctgtccttgtgtttgtgtgtgctaacagaaataagttgcagtatggtcgtacttttaactctagtatcctttgcttgcttcttacsccctttcctaggtgaattctcccacagtggtctgtatctcaacattttctttttaaaggaaaaaatatatatatatagtttctttttattgatcaggtctgtaaatgtgtactaaaaaaatcagagtttatttataaacagaatagtttatttaaagagaaggtctcttccttattgatatcatggtatgcattaattccatttgttactattgtgcacaaaagccctgttcacaggggaatggtgtaaacatttatactgttttgttcactgtatttagtagacataactgttgaatagttactgaatcatgatgtaaagaatatgtgaccatcttcaggtatgggatttctgaacgtttcaaatttcaatcaatgagcactgtca

SEQ ID NO: 360177 - DNA, 535 bp, Homo sapiens
actacaagattgattgcaacttgctggaattcaagtgaaaatgggctcctcccccgacaatcctgtccttgtgtttgtgtgtgctaacagaaataagttgcagtatggtcgtacttttaactctagtatcctttgcttgcttcttaccccctttcctaggtgaattctcccacagtggtctgtatctcaacattttctttttaaaggaaaaaatatatatatatagtttctttttattgatcaggtctgtaaatgtgtactaaaaaaatcagagtttatttataaacaraatagtttatttaaagagaaggtctcttccttattgatatcatggtatgcattaattccatttgttactattgtgcacaaaagccctgttcacaggggaatggtgtaaacatttatactgttttgttcactgtatttagtagacataactgttgaatagttactgaatcatgatgtaaagaatatgtgaccatcttcaggtatgggatttctgaacgtttcaaatttcaatcaatgagcactgtca

SEQ ID NO: 360178 - DNA, 458 bp, Homo sapiens
tcactttcttttctaaaataaatgttttggatggctcttatctttacaaccaggcacacagcttcatttcctcctaactaggaaagttaactcttcagctacatggtggtacacaatgttgtccctgctcagcagcccttgaacactcattaaatcccacattagagctgcaaggagatagtaacatttattaggtgcctcattttttttttttttctctgagagcggatctcgctctgttgmccaggctatagtgcagtggtaccatcagggctcactacagcctcaacctcccaggcccaagtggtcctcctgcctcagcctcctgagtaggtgggaccacaggcacactcagatattttaaaaaatttttgtagagactatgttgcccgggctgccattgtttatccattgattttttattttatttacttatttttcttttgtcttttttgttg

SEQ ID NO: 360179 - DNA, 415 bp, Homo sapiens
atggagcacatgagatgttttgatacaggcatgcaatgtgaaataagcacatcatggagaatggggtatcyatcacctcaagcatttatcttttgagttgcaaacaatctagttatactttgttatttcaaaatgtatgattaagttattattgactatagtcaccttattgtgctgtcaaatagtaggtctcattcattctttctgcctttttttgtttgtttgttttttgtaaccggcctgctgatatcttggtcctggacttctggcctccagaactgggaaacagcaggtttccgttgtttaagccatgcggtttgtggcactttgttatggcagccctagcaaactaatgcaagtgtgtttatgagcactaacactgtgaacatttggaaataataagagagacggattt

SEQ ID NO: 360180 - DNA, 530 bp, Homo sapiens
ctcaccattgacacaaggcgtaaacccagtaaatgtctttgtaactttacttgatcctcttcatttacacagggcgtacaccaagtaaccaatggaaacctctagagggtatttaaaccccagaaaattctgtaacagggctcttgagcccctatgctcggggccactcccacctyattttcaataaatctctgcttttgttgcttcattctttccttcctttgtttgtaactttgtccagttctttgttcaagaccccaagaacctggacaccctccactggtagcaagggggccatgtgatagagatcctgcccctctcctgtatggacatttggactcagcaagcgaggccagagtcacagagaccctcttaaaatgaccttgcttttagatgcaggctgattagttgccgaagcccagcaactggcaggatgggagacatggtgacagtgtctgggtggctcatggagcccctcacagccatgggtggtggcaggaaatgggcagaggtgcctggtgcccagggtg

SEQ ID NO: 360181 - DNA, 530 bp, Homo sapiens
ctcaccattgacacaaggcgtaaacccagtaaatgtctttgtaactttacttgatcctcttcatttacacagggcgtacaccaagtaaccaatggaaacctctagagggtatttaaaccccagaaaattctgtaacagggctcttgagcccctatgctcggggccactcccaccttattttcaataaatctctgcttttgttgcttcattctttccttcctttgtttgtaactttgtccagttctttgttcaagaccccaagaacctggacaccctccactggtagcaagggggccatgtgatagagatcctgcccctctcctgtatggacatttggactcagcaagcgaggccagagtcacagagaccctcttaaaatgaccttgcttttagatgcaggctgattagttgccraagcccagcaactggcaggatgggagacatggtgacagtgtctgggtggctcatggagcccctcacagccatgggtggtggcaggaaatgggcagaggtgcctggtgcccagggtg

SEQ ID NO: 360182 - DNA, 187 bp, Homo sapiens
acatcttaactttccttggttcagtaatccatgtttactttattttgattatatagtgatatcgagagcagagtcatctagtaagcttagactactttttcttccttacacaacttttaattttccttgggaataatttttyatttgcttagttttctacttattaccagtccaacttcaaactgcc

SEQ ID NO: 360183 - DNA, 515 bp, Homo sapiens
acttgtgtcatggaagtctggtgtacagattatttagtcacccaratactaagcctagtacctgatagttattttttctgctcctctccctcctcccaccctccaccctcaagtagaccccagtgtctgttgctaccctctttgtgtccatgaattcttatcatttagctcatacttataagtgagaacatatgatatttggttttctgttcctgtgttagtttgcaaaggatagtggcctccagccccatccatgttactgcaaaggacatgatctcactctttaaaatggctgcatttaatggtgtgtatgtaccacattttctgtattcgagctgccgttgatgggcatttaggttgatcctatgtctttgttattatgaatagaacagtttctttggagatcttttcatcagtctagggattcccttcatcttttgcctgggtcctggctccaaacttttctttcctgttttggtggaatgcgtcttctagttacttcttcagaagtgcat

SEQ ID NO: 360184 - DNA, 515 bp, Homo sapiens
acttgtgtcatggaagtctggtgtacagattatttagtcacccagatactaagcctagtacctgatagttattttttctgctcctctccctcctcccacyctccaccctcaagtagaccccagtgtctgttgctaccctctttgtgtccatgaattcttatcatttagctcatacttataagtgagaacatatgatatttggttttctgttcctgtgttagtttgcaaaggatagtggcctccagccccatccatgttactgcaaaggacatgatctcactctttaaaatggctgcatttaatggtgtgtatgtaccacattttctgtattcgagctgccgttgatgggcatttaggttgatcctatgtctttgttattatgaatagaacagtttctttggagatcttttcatcagtctagggattcccttcatcttttgcctgggtcctggctccaaacttttctttcctgttttggtggaatgcgtcttctagttacttcttcagaagtgcat

SEQ ID NO: 360185 - DNA, 515 bp, Homo sapiens
acttgtgtcatggaagtctggtgtacagattatttagtcacccagatactaagcctagtacctgatagttattttttctgctcctctccctcctcccaccctccaccctcaagtagaccccmgtgtctgttgctaccctctttgtgtccatgaattcttatcatttagctcatacttataagtgagaacatatgatatttggttttctgttcctgtgttagtttgcaaaggatagtggcctccagccccatccatgttactgcaaaggacatgatctcactctttaaaatggctgcatttaatggtgtgtatgtaccacattttctgtattcgagctgccgttgatgggcatttaggttgatcctatgtctttgttattatgaatagaacagtttctttggagatcttttcatcagtctagggattcccttcatcttttgcctgggtcctggctccaaacttttctttcctgttttggtggaatgcgtcttctagttacttcttcagaagtgcat

SEQ ID NO: 360186 - DNA, 509 bp, Homo sapiens
cacaagtgatatttcaaaaacagaaaatcaaattattctctcttttaatgaaaatacttttcattgcccctaaaacaaaatccaaacttgttaccatgttttctgcaccagacttgcttttcccactagggccccttgttaattccctggatgctaccacttctgggtactagtctcctgctaggacatggagctctagaggtgccaaagcacatctctctcccacttttgtacatgttgcttctggtcagaagagtgccaaatgagtggaatctatccctgaacatcaaagagctttgagtgaaattattttccaagtttcacttatagcctcctcctttctataggatttggccacaggttcayggaggaagggaatttggggagccgaggaatgagcggggcaggaagcacatacgaacgtcctgcaccaggctgcactaagaaccttccctctgtttgatggctaaggccttgctttgtgagcaagcttgctgtcctaaaacctt

SEQ ID NO: 360187 - DNA, 551 bp, Homo sapiens
agtggcctatggtggcaggatgaagagagggggcatgcagtgagctgcactcatagcccaggatgcaggagggtgcttcccackgctggatgaggaccccacagaagagagcaggcactgagttaacttgaatgggactctgccccaaaggaccatctgcaaggcaaggtgatcccagcagagtaactcaggggggagtggacttcagaagccaggggctggggaagtcatacatgacaaagcttgaggaacatcatcggggacctccaaggaacctacaggagtccacatgggagagagtgagcatggggtgtgtcacgcccagggcactgattccagaaaactcctgcagtcatcaaaaactgcactggagctttctgctccttatccacatccccaaagttggaggtgccaggaaagtatttgagcaagataaggaaatggagagaagtccccagtcttctccttccctgtgttgagtttttgagcccatatcggttctgagttttaaagtggatgtgggattatagctttggtagtcgaccaaacta

SEQ ID NO: 360188 - DNA, 618 bp, Homo sapiens
atacatgacaaagcttgaggaacatcatcggggacctccaaggaacctacaggagtccacatgggagagagtgagcatggggtgtgtcacgcccagggcactgattccagaaaactcctgcagtcatcaaaaactgcactggagctttctgctccttatccacatccccaaagttggaggtgccaggaaagtatttgagcaagataaggaaatggagagaagtccccagtcttctccttccctgtgttgagtttttgagcccatatcggttctgagttttaaagtggatgtgggattatagctttggtagtcgaccaaactatctcagagtagactgaactatcccacagttttatggggcctcattctgccctattctggactttccagtatctgaaaaagaagacccttcattaataaaagggatgactggaaaagctatgggacctttctgagaattcatccaggcgcagggaaaaataatwtgagagaagttgctcaaagaggtagaggtcagaaagagtcaagactttttctgttggtaccatttggaatattactctctcaacaaagaagtgtggttaggtaaatgttagccttggaaccttctttcccaga

SEQ ID NO: 360189 - DNA, 529 bp, Homo sapiens
caaatatggagtattagaagccattgttctctttcattaattttatwtagattgaatcctgatttagcaataaaaatgcacgtctccacttaagaaatgctatttgccttcaaagaaggaaatgagactttcttaaattgtgctttgctatgatgttgttgaattgagatgattggaagagattatgattaagatatcagtgtcatatgtcatataggtttgtaggcactttgaaatgaataggaatgcattaagtcataaaatattattagaacagctgtatagtttacaaacaatctgatgcatactgagtaccacaaattctggtgcttgagtctcatacatactgctgttggcatttgtcagaaattctttggctaagagtaaaaggaacccaatttaaattagcttgagctgaaaaagaatacattggttcatataattgggaagtgtctaggggtgaatttgctttcagagatggctgaatatagggctgcctctctgtgtctcagctctgctatttatgttt

SEQ ID NO: 360190 - DNA, 529 bp, Homo sapiens
caaatatggagtattagaagccattgttctctttcattaattttatttagattgaatcctgatttagcaataaaaatgcacgtctccacttaagaaatgctatttgccttcaaagaaggaaatgagactttcttaaattgtgctttgctatgatgttgttgaattgagatgattggaagagattatgattaagatatcagtgtcatatgtcatataggtttgtaggcactttgaaatgaataggaatgcattaagtcataaaatattattagaacagctgtatagtttacaaacaatctgatgyatactgagtaccacaaattctggtgcttgagtctcatacatactgctgttggcatttgtcagaaattctttggctaagagtaaaaggaacccaatttaaattagcttgagctgaaaaagaatacattggttcatataattgggaagtgtctaggggtgaatttgctttcagagatggctgaatatagggctgcctctctgtgtctcagctctgctatttatgttt

SEQ ID NO: 360191 - DNA, 550 bp, Homo sapiens
cctctggttgtgtaaatctcctttcaatatgtttaagtaaattaggaattctatcacaattttttcttttaattgcccttggagttttctgaactgctccagtctgggctggttgctgtccaggctggctgcatacctcttggccttgactctttctttgacattaacctgaggatttccttagcctctctcctgtgttgaattgatctcatarttcctgtattctgtgtctttctcttccttggtttgttctcttgtttggccaagaacatcctcaagtagctttctatgtaagaggtgacatttttttgaaactttacttttcaaaaaattttttatgccttctacatttaatcgatagtttggcggggtataaaatctcatttccttaaggttttcaaggtgttgttgacaagtctgaagtcattctgattctcaatccttagtatgagatttgtccgttcctcctgcccccatctccctgtgtcttttaaaaaaatctcatagccttcaattatgaaaacattttctcaagttattattattatta

SEQ ID NO: 360192 - DNA, 655 bp, Homo sapiens
actctttacaggggtgggtttatgatggatgccagctggtctgatagaaggaaacagatattgatttttaatattttctcccaacttgtttactctaggataatacagcagctgtgtggcagcttgtctcagagtggaaaggattattacctctgccttttgatgagataaattacctaggatgacttgaatggctaaaggggatactttgatgttatgttgcttcatttacccttatgactaaatgrttattgattttatatttttaagctcttgaaacgtgaaaataagttggtggagaaggccggctgtgttagttttattaatttatttcttcagggcataattcactttggaccaggttgtgaaggttttgggttcatgaccggctgcagatacagttgcaaagaaatggcttatttatatagtcattgcaagtagtcccaaaatcaatacagtctgggattggatgattaaactcagtccttttgtgggattcattcccgtagctgctgctgaaatcatgttgactgcagcagattcatgtgatcaagtctactgatagcaagtttgttcaagttgaaatatatttttttgctcatcatttttttttatctgctgtgttcactcaatgacattttaacagccaaggggg

SEQ ID NO: 360193 - DNA, 655 bp, Homo sapiens
actctttacaggggtgggtttatgatggatgccagctggtctgatagaaggaaacagatattgatttttaatattttctcccaacttgtttactctaggataatacagcagctgtgtggcagcttgtctcagagtggaaaggattattacctctgccttttgatgagataaattacctaggatgacttgaatggctaaaggggatactttgatgttatgttgcttcatttacccttatgactaaatggttattgattttatatttttaagctcttgaaacgtgaaaataagttggtggagaaggccggctgtgttagttttattaatttatttcttcagggcataattcactttggaccaggttgtgaaggttttgggttcatgaccggctgcagatacagttgcaaagaaatggcttatttatatagtcattgcaagtagtcccaaaatcaatacagtctgggattggatgattaaactcagtccttttgtgggattcattccygtagctgctgctgaaatcatgttgactgcagcagattcatgtgatcaagtctactgatagcaagtttgttcaagttgaaatatatttttttgctcatcatttttttttatctgctgtgttcactcaatgacattttaacagccaaggggg

SEQ ID NO: 360194 - DNA, 633 bp, Homo sapiens
agaaatctctaaaaagagaatcaggagaacctgcctgctcttcccttggattgaagggaccaacgtcccagctcccagcacatcggccaggcctcagggggccgtgtgcaccgggcagtgagaacctgaagaggagctctccaggccctccctgccaccgccygcgcctgccgggcccctcttctctgtttctttcacttcatgactctgaactcttggcccttcaccctgacctcagcccagcctgtttcatggcccagccttgggagctcagttccctcccgctgtgctgaatggatcccctccccaggccctgatccactaggggcttgcagagagacccccacattggccctggcctcagaggctgaccctgcttggggtccctctgtacctggagtgctgccaggggaggtaggagcaggctgggatcctctgtccaaggtgcctccagatagagggagccttttcacagcactgagctctccagccctaggtgctcagcgtggccgcagcagttcctggggctcccgctcacagtcacccgacacccagccacgaggacaacagcagccaggggccacgcatccctcagaggcacacaacagcaaatcggctaggtaggtaggacag

SEQ ID NO: 360195 - DNA, 633 bp, Homo sapiens
agaaatctctaaaaagagaatcaggagaacctgcctgctcttcccttggattgaagggaccaacgtcccagctcccagcacatcggccaggcctcagggggccgtgtgcaccgggcagtgagaacctgaagaggagctctccaggccctccctgccaccgcctgcrcctgccgggcccctcttctctgtttctttcacttcatgactctgaactcttggcccttcaccctgacctcagcccagcctgtttcatggcccagccttgggagctcagttccctcccgctgtgctgaatggatcccctccccaggccctgatccactaggggcttgcagagagacccccacattggccctggcctcagaggctgaccctgcttggggtccctctgtacctggagtgctgccaggggaggtaggagcaggctgggatcctctgtccaaggtgcctccagatagagggagccttttcacagcactgagctctccagccctaggtgctcagcgtggccgcagcagttcctggggctcccgctcacagtcacccgacacccagccacgaggacaacagcagccaggggccacgcatccctcagaggcacacaacagcaaatcggctaggtaggtaggacag

SEQ ID NO: 360196 - DNA, 633 bp, Homo sapiens
agaaatctctaaaaagagaatcaggagaacctgcctgctcttcccttggattgaagggaccaacgtcccagctcccagcacatcggccaggcctcagggggccgtgtgcaccgggcagtgagaacctgaagaggagctctccaggccctccctgccaccgcctgcgcctgccgggcccctcktctctgtttctttcacttcatgactctgaactcttggcccttcaccctgacctcagcccagcctgtttcatggcccagccttgggagctcagttccctcccgctgtgctgaatggatcccctccccaggccctgatccactaggggcttgcagagagacccccacattggccctggcctcagaggctgaccctgcttggggtccctctgtacctggagtgctgccaggggaggtaggagcaggctgggatcctctgtccaaggtgcctccagatagagggagccttttcacagcactgagctctccagccctaggtgctcagcgtggccgcagcagttcctggggctcccgctcacagtcacccgacacccagccacgaggacaacagcagccaggggccacgcatccctcagaggcacacaacagcaaatcggctaggtaggtaggacag

SEQ ID NO: 360197 - DNA, 633 bp, Homo sapiens
agaaatctctaaaaagagaatcaggagaacctgcctgctcttcccttggattgaagggaccaacgtcccagctcccagcacatcggccaggcctcagggggccgtgtgcaccgggcagtgagaacctgaagaggagctctccaggccctccctgccaccgcctgcgcctgccgggcccctctkctctgtttctttcacttcatgactctgaactcttggcccttcaccctgacctcagcccagcctgtttcatggcccagccttgggagctcagttccctcccgctgtgctgaatggatcccctccccaggccctgatccactaggggcttgcagagagacccccacattggccctggcctcagaggctgaccctgcttggggtccctctgtacctggagtgctgccaggggaggtaggagcaggctgggatcctctgtccaaggtgcctccagatagagggagccttttcacagcactgagctctccagccctaggtgctcagcgtggccgcagcagttcctggggctcccgctcacagtcacccgacacccagccacgaggacaacagcagccaggggccacgcatccctcagaggcacacaacagcaaatcggctaggtaggtaggacag

SEQ ID NO: 360198 - DNA, 520 bp, Homo sapiens
cactgtacagccctggtggagagagggtgaaggcttccctgggaacagcccactgagccccagaggccaggggaccaaagaggcggccgggaggacaactcggcccaagcggggaacaggggggcgaatcaggctccttggtacccaggatgacgttagtttatttaaataggaggccatggcccgtccaggtttattctccctggctctcaagcaatggaaaaacaatttgttttataatgctaatgtaatactcaactcctcaaataaaaktgcccttcatgataatgggcccagatataaacagaagcggctgagagggcccaacctgcttcttccaggcaggcctgtgaccgggaaggggctgagtccaagcccagaggagagagacagtttgtttaaaatttctatggagctggactgttttataaaggaaggggctgagttaaggcatgctttgaaagaagacaaacagactttgcaggagctagaccctcaaatgagttatattttaaacaat

SEQ ID NO: 360199 - DNA, 520 bp, Homo sapiens
cactgtacagccctggtggagagagggtgaaggcttccctgggaacagcccactgagccccagaggccaggggaccaaagaggcggccgggaggacaactcggcccaagcggggaacaggggggcgaatcaggctccttggtacccaggatgacgttagtttatttaaataggaggccatggcccgtccaggtttattctccctggctctcaagcaatggaaaaacaatttgttttataatgctaatgtaatactcaactcctcaaataaaattgcccttcatgataatgggcccagatataaacagaagcggctgagagggcccaacctgcttcttccaggcaggcctgtgaccgggarggggctgagtccaagcccagaggagagagacagtttgtttaaaatttctatggagctggactgttttataaaggaaggggctgagttaaggcatgctttgaaagaagacaaacagactttgcaggagctagaccctcaaatgagttatattttaaacaat

SEQ ID NO: 360200 - DNA, 411 bp, Homo sapiens
cgagatcatgctactgcactctggcctgggcggcagagtgaaactctgtctcaaaaataaataaataaataaaataaaataaaataaaataaaataaaataaaataaaataaaataaaataaggcaaatttcaaatgaggtcagattctctcaatacctccagtcccgggcagagagctgcctaccttggtccagtgatctggtcaggtggtgaagaccaaacaggatattgaacaccccaaaaataagagttgccgagttgcccagggttggtcacaacacagtggccagtgtcccaggaggccagctctgctcccrtggttcagagccgcccgggccgaggtgcagggtacttcccacacagcttcatgaggaggcagcacctcaacgttagcccagacagtttcgttg

SEQ ID NO: 360201 - DNA, 643 bp, Homo sapiens
gaaattaaatatgcatctgtcaaccattataaaaattaaaatcaactatggaaattccaagcaattagtgaaaaagagaaatggtaatcaaattgtttctaaatatgataagaaaagagaaaacatatagaaacaacggatataaatagcttttcaaawgtatagtaaaaaatcaaactacaaagataatcaacacatgtgtacagcctaaacgttccagttaaaagtgaaagtttttcaagtataattattttttaaaatccagtaaaagcagtttgcagtaaatacaactgaagtataatgacataaaaagattaaaaataaaatatgagaaaagattttaagtgctaagggtaggttagaaaaatcatgttaagataagaaaaataaataaattacatcagtaattggaaacatttccaaaaaggaaacatcaaaaacagatggtttttaaactagttctatcaaatattcaaggaacacaaaatgttggttgtccaggaattcttctagaaaacaagttaagagaaccgttttaatttatttgaggaaaggaatacataggttagtctccctaaagaacatatatgcaaaatttctaaataaaagttaacaaatcaaatctagaaatgtactctcaaaa

SEQ ID NO: 360202 - DNA, 643 bp, Homo sapiens
gaaattaaatatgcatctgtcaaccattataaaaattaaaatcaactatggaaattccaagcaattagtgaaaaagagaaatggtaatcaaattgtttctaaatatgataagaaaagagaaaacatatagaaacaacggatataaatagcttttcaaatgtatagtaaaaaatcaaactacaaagataatcaacacatgtgtacagcctaaaygttccagttaaaagtgaaagtttttcaagtataattattttttaaaatccagtaaaagcagtttgcagtaaatacaactgaagtataatgacataaaaagattaaaaataaaatatgagaaaagattttaagtgctaagggtaggttagaaaaatcatgttaagataagaaaaataaataaattacatcagtaattggaaacatttccaaaaaggaaacatcaaaaacagatggtttttaaactagttctatcaaatattcaaggaacacaaaatgttggttgtccaggaattcttctagaaaacaagttaagagaaccgttttaatttatttgaggaaaggaatacataggttagtctccctaaagaacatatatgcaaaatttctaaataaaagttaacaaatcaaatctagaaatgtactctcaaaa

SEQ ID NO: 360203 - DNA, 643 bp, Homo sapiens
gaaattaaatatgcatctgtcaaccattataaaaattaaaatcaactatggaaattccaagcaattagtgaaaaagagaaatggtaatcaaattgtttctaaatatgataagaaaagagaaaacatatagaaacaacggatataaatagcttttcaaatgtatagtaaaaaatcaaactacaaagataatcaacacatgtgtacagcctaaacgttccagttaaaagtgaaagtttttcaagtataattattttttaaaatccagtaaaagcagtttgcagtaaatacaactraagtataatgacataaaaagattaaaaataaaatatgagaaaagattttaagtgctaagggtaggttagaaaaatcatgttaagataagaaaaataaataaattacatcagtaattggaaacatttccaaaaaggaaacatcaaaaacagatggtttttaaactagttctatcaaatattcaaggaacacaaaatgttggttgtccaggaattcttctagaaaacaagttaagagaaccgttttaatttatttgaggaaaggaatacataggttagtctccctaaagaacatatatgcaaaatttctaaataaaagttaacaaatcaaatctagaaatgtactctcaaaa

SEQ ID NO: 360204 - DNA, 582 bp, Homo sapiens
ttacaaaaataattgagttagtagaagcttaaggtgaaacacaagaagaataaaaataaaaactcaatgagcaagaacattcaacagagcaaatagcattctcgttcattctatgatttagygtaataaatatgtattattttcttataactgagtataagaaattctagtatgttgctacccgggctaaaaataaacacaaagccctcttccatctggaaggaggatatcagctacacacaagggccttaagaaaaagacagtgctcaggagagttgaaagaaaaagctgtcaccctaaacttggaggatcaggaaagactttctgaaagggggtgcattgaaaataaaaggtgaaatatcattataattttacagttaaaattcagagccaattaatctatataatgatgacttctcattctgcctttacttctagccagaccggctggcccgaggcatgtcaagccacattgctctaacttttccttagcttgatattgagacagggcatgtaggagtgggcagtctgaacgtactcccttgccctaaggaaagggctctgctcttcccagaacttaca

SEQ ID NO: 360205 - DNA, 610 bp, Homo sapiens
ttttagaagataataaaaaatattttcatgatctcagggcaaggaaatgtttagtaaacaagacataaaaataaatatttataatagaaatgtgtattmattgagttacattaaaattaagatcttccttttatcaaaagcaccatttggggtataaaaatgcaaataacataataggagactattattacagtatatgaaattaacaaagggcttatatccaggacatataaagagtaccagaaatcaataggaaaagtcaatccaatggaaaaatagaaaaaatgaggaactataacttcacaaaagggaatatgtaattggccaatgtgcacatgaaaaggaacaacctcatttatatcagaaaaatttaaattaaatctataatgaaatagcactatgaaggtaacaaaatatattttttaaatgtctgataatatcagatattagaaaaaatatggagcaacagaaattactccaatgctcctaggaatgcaaacttgtacaactacattggaaaaaaatccagaaattatctaataaagccatcaacgtgcaaaacttcaaacagcaaatttattccttgtgtttagccatggaaattgtgggc

SEQ ID NO: 360206 - DNA, 407 bp, Homo sapiens
tgaaagaggccatacataaagttacaggagaaatgtcttctaatgtaattgcaatcaaatatttctacttycatgtatattgactatccatttcaagttttaacttgtaagaaacagctaattattaactagtattttattcttgtgcatataaaattaatattcattagataattttcaaataatatcagatatggaaaacatgaggacaacttaagtggaaaattcttccagaatattgcaatgttttcaactgtaaaatgaataataaatcagaagtcctgattaaggctggttatatttataaggaaatataagaaatattaagaataatcattttaattacaacaatttggaatgggaactaatgggtttgtttgttgttctaaatagtaataaaaatgccc

SEQ ID NO: 360207 - DNA, 552 bp, Homo sapiens
gtaaaactgtcaggttttgcaggctaagtcacaactactcaactttgccctgcagcaggaaggcagccacagaaaacaggaaaacaaacaggtgtggatatattccaaaaacactttatttacaaaatcaggcagtggtctggatttggcccaaggggctatactttgtcaacctctatcctagaaaatcatgttctctatcattaattttgacactaatcctactctgggttgtgcctttaattagtgggtgtgtgtatatatataatcacacacacacatatatatatattcacacatacwcacacgtacacacacacacaatatctctaaaatttcagtctcctttggaggatgacagacagaaaagatgtcttatacatatttgtccaggtatttttgcagagtacttcatatagcaatgcttaattatttactgatttgaattgatttaaggtatgggagccaagatctagttgtcattagcatcttacctgcactgaaacatcggctgaggcactgactcttggggtgctataatggccagcctca

SEQ ID NO: 360208 - DNA, 553 bp, Homo sapiens
aatttttcttgattacatctcaaagttgattatattggtttaataataagataaatatcagaatttgtatacttaaacttattttttaaataaagaatcagcagggatctgttcatctatatattccaatttttttaactgtcttaagtagcaatattaatgttaattaatgttattattaataattatattttaatcaactattatgtggtgccatagttataacatagggttagtggtgatgtgaacaaatttaactaaataatctgtatctaaaggaktctttaaatagaaccttggagctttaagagaagagttaatagttaatagttattaatacttaataatattaactattaataacaattattataatcaataacaattattcagtcaacaatttattattcatgttgttgtcatttcattgccaaacactatatgtattgatattttacaaatgttaactagcttaattcaatagtcacaattttggggtaaatactagtatacctttgttttcaagtaaagaagttggacagagaaatgaaaa

SEQ ID NO: 360209 - DNA, 566 bp, Homo sapiens
cttgaaaggagctgcaaggtgagaactactcttcattccgtttccttccatcctcttccccatgcttaaatctctcwaacttgtagggatctcctgatgaacaggaatattattacaggaaataatttggttaggaaaaaatactaacaattgttccacaattttttgaagcagttctataaaaacatatttgcaatgagccacagaagtatctagataaaaaaaaaaattgctggcacaggtaaagctgggactcccaactgtatgcttacagagctagtgtactgacaaacatcctaggagtttatttgcatgaaatgacaattttgtttgctttgcaatgtggctaaagacagacaggacagtgcatggatgcccaggagggagtaaaacaataaacaagatggatgacatggtacatacacttgtctcgcctgcaggaaaatttgaggttccaggggataggtgattaagaactgatgctacagaagctgttttcacaaaatactttgagactctaaacacaatgatgttttaagattcggatggtcaggtgtggcatggat

SEQ ID NO: 360210 - DNA, 636 bp, Homo sapiens
aacacattttcagtctaaaagaaataagactagacataattcctataaattccaaggttatttttcaaatctggttaaataatatcttgaaaacactacattggaaaaagtcctctatcttctgtgatgttcggccccaggactcttggaagctctcaggaccacctcactgatgccctgtttcattctttcttggctatgaatcccacagacttggactggtttccacttttcctgtcctttgcctctctattctctgtaaaagttctattcttggacattttgattgcaaagtgggatagcctccctaacttgcttttccttgatgccagtaaagttaggcagaaaacgcctttatttttcaggttattactaatcattactgtggaaaaacacatgagcattgyaaaaatgattaacatgaataagttccacagcttggagttatggaatattaactgtgctggtcttcaattacagatcctgcctgtctctgaaatgatcgtttcagtggcaataactttctaccttgggtttttacacttagaagtaactcttactatgcttctttcttaattctaattttgcccttatgattaaatcaaggtaaaacattgcatttaatgtcttgttgtc

SEQ ID NO: 360211 - DNA, 554 bp, Homo sapiens
caaaaagactgcactcccaagatctcatcctagattccattataaattcaaagtatcaaaaattcatgattcattaaatatttctattataagaaaaaacacatacacacacacgagcaatgggctaaaacatataataaagtttaaaataagctgtctctgtatggaacagggtgcagatgaaacaggaaaggaataaactcatttcaagtgacattctagtaagttcttcagttgaatggtagtcctctggatattaattatgttaatatgctttctaccttatgcaaatgttacttaaaatcttttgcatttaatgaaagatttttaagtaacrtttgcataagtagaaagtataaattatataggaaacttaaaataaaaatatgtccctttacctacttagtagatacaaatactctaggaaggaattatgtattatctgtactccctccattttttgcattttgtttccttctttaatgtcacatactttaattcttaaaaaattaaacattataataacttagagtaattgaggagtaaagaaaagc

SEQ ID NO: 360212 - DNA, 610 bp, Homo sapiens
aaaactctgggtgttgaggatggaagaagcaatctgatggtatggcttggtgaaggatgcctggtttagagataaaacatgtgtgtggctttaaaacttcacaggtttacttataaagcggttaattattttattcaagatgacaaagaagcagttggtaaaccagagcaggaaagtattcatctctttatcttgaacttgaccccagtgggtgacctcatttctagggagtttcttttcattgagaagtgtgcttgaagcttacgttagtgacaattggcaaagtcttcctcattttaaaattataacccattaaggcaagcttctgtttactctcccatgtagcaaggctctcaagtttctaatttctaatgatagactgaattattcataaaatacatctatctttcttactccaattattaatctcttgatgccattgggggtcttgaggctctgctgtaaaagcttaatgcattttgcatcacygtgtcacactcactggcaatgtttctggcctggcttaaaggggttaaaaaataggacttgaagtggtgccagacaattaggtaattacaaaacacttttgtacattaaagtaatcttgtaa

SEQ ID NO: 360213 - DNA, 558 bp, Homo sapiens
aatttgactaagtttatgtgatggaggacatctagtcagtcgtctggagttttacaacacctggatatgaagtgatggactggtcatgtctaggggaccagatgaaaatttcaccttccytctaaatcatctggcactatttgggggtggaggcactgacctgtcttgtgaagagcagggttatggttcggccgtgaccttggcagtcgccatcacaactttggttttgcttcagtcagttgccacctcttgggactgtaaatattgacactcccctttagagaaatcaatatctgcatattagcctccaatttcatatatcgatgtgcagatctgagggcctcgggtgaatatgagatgacttcagcatttgctgcctctgagctgaaaagccagcggatttgcatttcccccagtgattcttggctgcatgacttgtatcactattatctcttcacagtgtgtttgtatgcaaaacttttggcagaaccattttagaagcaagcagacaataaatgaaggctctgctttctcagagttcaaaattaactttctcaa

SEQ ID NO: 360214 - DNA, 560 bp, Homo sapiens
agcattaactactggggaatccyttacatttcagtgacaggttgttatttggggcctcatataatggatgctgtggaaattaacttttttagtgaaatgaaatgacctcactaaattagaaacaagctcttcatcgtccacctgagtttagaaacaacaactgaagttttatcattttactttatctgcttctatcacaacctgcagagggtgcaagaaggtttcattttctacaatttatagagaatgttctagaccgtggcctgaggaacacagagatctctgccagccctctttattgatttcttgggggctaggctcaatgtgaaacaaaaatgatccacagatttctcaagacacatgaactgtaagagtggttctgagttggtgcttattatatgttactagtcattgagtaacatatttttcaatgtttaattctttttgaattaccctgtatgtattggctaaaaactataagtattcagtaatgcttttgaattaatttgcattttcctaatcatcaaaacatctaaacatgccataaaacagacacacat

SEQ ID NO: 360215 - DNA, 560 bp, Homo sapiens
agcattaactactggggaatcctttacatttcagtgacaggttgttatttggggcctcatataatggatgctgtggaaattaacttttytagtgaaatgaaatgacctcactaaattagaaacaagctcttcatcgtccacctgagtttagaaacaacaactgaagttttatcattttactttatctgcttctatcacaacctgcagagggtgcaagaaggtttcattttctacaatttatagagaatgttctagaccgtggcctgaggaacacagagatctctgccagccctctttattgatttcttgggggctaggctcaatgtgaaacaaaaatgatccacagatttctcaagacacatgaactgtaagagtggttctgagttggtgcttattatatgttactagtcattgagtaacatatttttcaatgtttaattctttttgaattaccctgtatgtattggctaaaaactataagtattcagtaatgcttttgaattaatttgcattttcctaatcatcaaaacatctaaacatgccataaaacagacacacat

SEQ ID NO: 360216 - DNA, 611 bp, Homo sapiens
aaaaaattatctccatttgtgagcctgtgaaacctaaaaaacaagttacttgcttacaaaacacaatagcgaggcatagataggatagacattcccatttctaaaagggacaaaatagaagaaataaaggggttagtgatttaaggcatatttgcaaccaaacagggcaaattccaccaggtttccaggcctgagactaattctctttggctcatcgctctgcccctaggcctgctggggcagccccaccctttgggttcttggtgkcagtcctgccctttgggcacctgactctgccctcaaagtcattctttcttcatttcatctcatctctatttcattcaagatgagcagtgtttcttctactctcaaaactcaaatcagtcttccctggatgtcaaggggatctatgccattagacaaaagggttttttacagatccttcctaggtaactcaatctctattgttggtttctgctgagatggttgattggatctgtgagtcacacacctaatctccttagcaaacagttgttcaaccacacccttagccctgtttccagatagatgtagaatttctcaaataatcaagtgctggttcttttttgcct

SEQ ID NO: 360217 - DNA, 591 bp, Homo sapiens
gacagctccctcccattattctttcagcaaatgcttacaaagcacctactatgtgttttgtacagtttcaggcacaggagattccatggagagtgtaacaaagtctctgccatcttggaacttactttcttctgtcaaaataaggtcatgaacttacaaatttcctgccctagatgactatttgctaccttttttattacaaactatggctctactgcaaggtgaggttcatgggcaataagaagatcttgcccagcaggtggaacatagttgatcaaggacacgatgggcatctacttcaaacttcatccctccttcactgtcaaawactttgccacacaactgtaaggccctgcctgtctgagcagtgggataacacttggccttacagttggatggtggggcttccaaacacacagggtcagggtgattagcatcacatccaaagcctcctctccttcattcagggtgagcaagggcttatttcatgtatgacttaagcaaagaaagagaaatcattagagtgaaatcaaggagagcttcccaggctggtccagtctgcacaatgctagttccagcatttttgaacag

SEQ ID NO: 360218 - DNA, 524 bp, Homo sapiens
ctgccatggtggcaggaagatgacgacagggtcgacgttttgaatcctccagagaggagaccaaggaggaaatgctggttggtgaacaaacgtttgtgagggaaaacaaaaagaccttaccaggaaggaataatggacataggctactattatgccaagtgtgttaccatgaaccatggagtagctcaataaatattatccgagttgaattgaaagatctctatcagcctgaacaaaggcaaagacagaactcaaattctattaaggatatgcatttgcaaaaaaaggataatgaagcaaaagaattctactcgaatgcacttgactttggattgactttcctgtcctcaggtattggggaggagctgacaagaatgttccctgaaataagaaggtaaaagatcatggaaactaagaaccggaagtaagaaagatgaggtgccttgagtccagggatatgartaactccaaagacaagaaaaataactcctcatccaggacttttgacttaaaattattttgcc

SEQ ID NO: 360219 - DNA, 533 bp, Homo sapiens
ttaaataatatttataacttataaaattaccatagttatctataaatgtatatttatagataatatgtatattataatttcttataataatattctgattgggaatagctgagaaaatacaaagaaatataaacaataaaactaaagtcaccagtaatcaaaccatttaagaaaagtctcattaatattttggtgagttttcattcacatttatataaaatatatattcatatatgcataagcayatatttaacggagttgagaataatattgcagaagaagttgcattctacttttctcctttaaccttctattataaatattttgcatccctcaaaaaattcttagtaaacaattttaaatgatttcatactttcgtattattatattaagattggcttaaccaatcccttattgttggatatttaagtcatttctgggtgttaaatgatattgtaatgcacatttttacatgaatgtttataatggctttattaacaatagtcaaaaactaaaaatagcccaaatgttta

SEQ ID NO: 360220 - DNA, 533 bp, Homo sapiens
ttaaataatatttataacttataaaattaccatagttatctataaatgtatatttatagataatatgtatattataatttcttataataatattctgattgggaatagctgagaaaatacaaagaaatataaacaataaaactaaagtcaccagtaatcaaaccatttaagaaaagtctcattaatattttggtgagttttcattcacatttatataaaatatatattcatatatgcataagcacayatttaacggagttgagaataatattgcagaagaagttgcattctacttttctcctttaaccttctattataaatattttgcatccctcaaaaaattcttagtaaacaattttaaatgatttcatactttcgtattattatattaagattggcttaaccaatcccttattgttggatatttaagtcatttctgggtgttaaatgatattgtaatgcacatttttacatgaatgtttataatggctttattaacaatagtcaaaaactaaaaatagcccaaatgttta

SEQ ID NO: 360221 - DNA, 533 bp, Homo sapiens
ttaaataatatttataacttataaaattaccatagttatctataaatgtatatttatagataatatgtatattataatttcttataataatattctgattgggaatagctgagaaaatacaaagaaatataaacaataaaactaaagtcaccagtaatcaaaccatttaagaaaagtctcattaatattttggtgagttttcattcacatttatataaaatatatattcatatatgcataagcacatatttaacggagttgagaataatattgcagaagaagttgcattctacttttctcctttaaccttctattataaatattttgcatccctcaaaaaattcttagtaaacaattytaaatgatttcatactttcgtattattatattaagattggcttaaccaatcccttattgttggatatttaagtcatttctgggtgttaaatgatattgtaatgcacatttttacatgaatgtttataatggctttattaacaatagtcaaaaactaaaaatagcccaaatgttta

SEQ ID NO: 360222 - DNA, 533 bp, Homo sapiens
ttaaataatatttataacttataaaattaccatagttatctataaatgtatatttatagataatatgtatattataatttcttataataatattctgattgggaatagctgagaaaatacaaagaaatataaacaataaaactaaagtcaccagtaatcaaaccatttaagaaaagtctcattaatattttggtgagttttcattcacatttatataaaatatatattcatatatgcataagcacatatttaacggagttgagaataatattgcagaagaagttgcattctacttttctcctttaaccttctattataaatattttgcatccctcaaaaaattcttagtaaacaattttaaatgatttcatactttcgtattattatattaagattggcttaacmaatcccttattgttggatatttaagtcatttctgggtgttaaatgatattgtaatgcacatttttacatgaatgtttataatggctttattaacaatagtcaaaaactaaaaatagcccaaatgttta

SEQ ID NO: 360223 - DNA, 607 bp, Homo sapiens
ttttctttgtgtctagcctaagttagattcctttcacccagaagttgaacatcaacctttaagtgttgcaaccccaattttgggactcccctccagaaggttctyggttttgcctaagaaggaattcaagggcgagccagtggtggaaggaaacagctttattgagggagtagtattagagcttcatgactgctgctgcagagtagggctgccccataggcagtgtgtcaagagtagcagctcagggcagttctacaaccacatttatattcacttttaattatgtgcaaattagggggcaggctattcggaaatttctagaaaaaggagtggtaacttccaggtagggttgtttccagaaaatgagtaaactgtcatgatattggaaggcctgccttatagagccagtcttcaatgtggtccagagccgagccctgcctcttgagttgagtcccacctcctaccccataaagaggcaacctctttcaacaaattgaagccctcttgaaattccttccaaacatagtgtataaaagaagacaaaagaaaagaaaaatgtgtgtgtgtgaatgtctcactgcaaattcccagcattaacaaaaaaata

SEQ ID NO: 360224 - DNA, 605 bp, Homo sapiens
tcacatactgtatgactgcatatatgtaacatttactaaatgacaaaattacagagattgaggatattttaggtcactgccaggggttagagagggttgtggagaagaggttgggcatgactataaaggattcacatgaggggctttttcgtggtgatggagttgttttgtatctttttttttctttctttttagggaccgaatctcccctttcacccaggctggagtgcagtggcacaatcactgctcattgcagcctcaaactcctaggttcaagtgatactcccacctcagcctcttgagtagctgggactacaagtgcaccccaccatgcctggctaatttttaatttttwtttttttggtagagatggggtctcactgtgtagcccaggctgatgtcaacctcctgaccttatggccttatgtttatggagaacacagagggtgaagcacttgtaaaagactgaagaatgaaacagaaaatgagtaggaggcccagggtaatttgtaaaaaaggttagatatctttctgccttggcctccctaagagctaggattacaggagtgagctaccctacctggcatagttttgtattttgattg

SEQ ID NO: 360225 - DNA, 589 bp, Homo sapiens
gaggcgtgaagaagtaagcaaacagaaatgagcagcaagtccgtggagatttcctcactttatgaggatcaaatcccacacatgggaacatcgtaaggcaggaccaagagtgtttcttcatgtctcctttttttcctgtttccctttcccaatatattttccctttcttatttgtttaaagggagaaattaaatgcatactctgatgaaatctttgggtcctggtcaattcgttttcagttacactggagtagggaggatgcggtgaaggrgagacatatcaactccctcagctctttcttgttttcagtaaacttcctgagtcatgctggaggcagtcttagccacagggaatttcatatgctgagaagatggtcttctagagcagtgcttctcaaactttaatgagaatgtgaatcacccgagcatcttctgagtcagtgggtctgggatggcacaggatgatctgcatttctaacaagcacccaggtgatgccaatgctaatggtccctgggccacacttggagtattgaggtcctatcattgtcatcataagacatagcatttgctgaatatctacctgcactag

SEQ ID NO: 360226 - DNA, 529 bp, Homo sapiens
atatttttgcaattgcaaattgtgctgctataaatatatgtccaagtacctttttcatataacgacatcwttccctctgggtaggtacccagtggtggaattgttgaatcaaatgttagttttacttttagttaaggaatctccacactgttttccatagtggttttactagtttacattcccaccagcaatgtaggagtgttctgtgttcactgcatccacaccaacatctattattattctatcttttgattctggccatttttgtgggagtaaggtggtatcacatcacggttttgatttgcatttccctgatcattagtgatgttgagcattttttcatacatttgttggccacttgtatatcttcttttgagaattgtctattcatgtccttagcccactttttgatgggattgtttttttcttgctaatttgtttaagttccttaaagactctggatattagtactttgtcagatgtatagattatgaagattttcttccactctgtgggttgtctgttgact

SEQ ID NO: 360227 - DNA, 583 bp, Homo sapiens
tttaccagaatctaatttgctagggttttatcagagcctaacctacctagggaaaaggaaatatccaacttcagcttagacttccatgtagggaaagggaaatactcaaaactctagtcctctctagctttctgtgtgtgagaaaggaaataccagactctagcccactccatccatcttgatgcgtctaaggagatttttaaaactgagaaagaagcactggtgacattcacagcccagtgacrtaggctcaccaaaagactgagacctaatcatagggtgatagaaggctttcattccctcccataccttacaaccacattactaaaagcttgcttatagcagttccttgaaaccagtacactatggtcacttttcaacaaaaaattacaaggcatactcaaagggaagacacatagtttgaaggaactgaagaagcatttgaatcagagtgagatatggcaggaatgtcgaaattattaaagcaggaatttttaaacaaactacagttaatacgttaaggtctttaatcgaaaaagtagacaacatgcaagaacagacagataatgtcagcagaaagatg

SEQ ID NO: 360228 - DNA, 583 bp, Homo sapiens
tttaccagaatctaatttgctagggttttatcagagcctaacctacctagggaaaaggaaatatccaacttcagcttagacttccatgtagggaaagggaaatactcaaaactctagtcctctctagctttctgtgtgtgagaaaggaaataccagactctagcccactccatccatcttgatgcgtctaaggagatttttaaaactgagaaagaagcactggtgacattcacagcccagtgacgtaggctcaccaaaagactgagacctaatcatagggtgatagaaggctttcattccctcccataccttacaaccacattactaaaagcttgcttatagcagttccttgaaaccagtayactatggtcacttttcaacaaaaaattacaaggcatactcaaagggaagacacatagtttgaaggaactgaagaagcatttgaatcagagtgagatatggcaggaatgtcgaaattattaaagcaggaatttttaaacaaactacagttaatacgttaaggtctttaatcgaaaaagtagacaacatgcaagaacagacagataatgtcagcagaaagatg

SEQ ID NO: 360229 - DNA, 491 bp, Homo sapiens
acaataaattaatatctaactttcgtgactaaataaaagatataactgaaatatttgatatgaaagcatttaagttgtggggaagatgataagggttaaagtgtcataaggttttttattgtctgagaggacaataaaggtgttaagtaaattaaaatactagagtagccactaaagaagactgcttaatgtcccctatatctatcctctttcttatataatgatgaagcctcaatttttagctaaacacatttgttaatctrttctcatgctgctaataaagacatacccgagactgggtaatttataaaggaagagttttaattaactcacagtcccacatggctggggaggcctcaaaatcatgacggaaggcaaatgaggagcaaagtcacgtcttacatggcagcaggcgagagagcgtgtgtggaagaacccccctttataaaactatcagatctcataagacttattcactatcactagaagag

SEQ ID NO: 360230 - DNA, 491 bp, Homo sapiens
acaataaattaatatctaactttcgtgactaaataaaagatataactgaaatatttgatatgaaagcatttaagttgtggggaagatgataagggttaaagtgtcataaggttttttattgtctgagaggacaataaaggtgttaagtaaattaaaatactagagtagccactaaagaagactgcttaatgtcccctatatctatcctctttcttatataatgatgaagcctcaatttttagctaaacacatttgttaatctgttctcatgctgctaataaagacatacccgagactgggtaatttataaaggaagagttttaattaactcacagtyccacatggctggggaggcctcaaaatcatgacggaaggcaaatgaggagcaaagtcacgtcttacatggcagcaggcgagagagcgtgtgtggaagaacccccctttataaaactatcagatctcataagacttattcactatcactagaagag

SEQ ID NO: 360231 - DNA, 586 bp, Homo sapiens
ttcacctttgttgttgcacagtctatggatggcatgtgtctaccattatagtatcatacagaatatagtttcggtgcactaaaaatcckcggtgttccacctattcatttcttcttcccctctaactcctggcaatcagatttttaaaatgtcttcctagttttgccttttccagaatgttctatagttaggatggtatagtacacaatctttttttttttttttttgaggtggagtctcgctctgtcacccaggctggagtgcagtggtgcgatctcagctcactgcaagctctgcctcccgggttcacgccattatcctgcctcagcctcctgagtagctgggactacaggcgcccgccaccacacccggctaattttttgtatttttagtagagatggggtttcactgtgttagccaggatggttcgatctcctgacctcgtgatctgcctgcctcggcctcccaaagtgctgggattacaggcgtgagccactgcgcccagcccagtatgtaaccttttaagattgatgtattttatttaataacatgcatttgggattctcccatgtcttttcagggctca

SEQ ID NO: 360232 - DNA, 429 bp, Homo sapiens
ctaggggaagaggaagggaagggaaatttcacctaaaccatacaggctgagcaaaattgctatggactagggaggggtaattctccaaaggaaagcatgctgaacagacaaatcatacttccatatgggaaccaaacaacaaaagaaaaaagtcctcgatgtatatagtagatgttcagtgcagagtgtaactaaaatttcagaacttaaacccacaaacaagccatrttcccactgctgctttgatagaatagattcttcattcaaaatgctatcgttggttaaaagtgctttagaaaatgttttgatgaaagtaagaagaatgagaaacagcacaaggatgcttggaatggggaagaaaagagggctctttcgagggctgggcaagagaagagattgtctagaaaatactgcttatttctgtcaaat

SEQ ID NO: 360233 - DNA, 623 bp, Homo sapiens
tgtactccaattccagccgcgttccaactccaataaaacagtgataagatgccctggagggttgcagccaagcctgtgggtgcaaacagggtcaaatcacatcatgggaatgagatgggattctacatagtttgagtgttgactgttttcctcttgccaacagtgggacgtttgttctcattgttaaataattaaataggcagtttgtatttatttaacatacagactgtagccaattcctgctgacagctaccaaaataaccccatatttcctagctctgaatggctcagaagactgtttcctgactgcgggagcatcaccgcagagcaaaactctcctccaagtctccgaacacctttttcatcactttaaacaataaatcaattcacagcatgtgatccaaaaacaacagcccagttttattggatgaggttcattcccattctctcaggcactccttcactaccagcactgagctgtcttgaagctgtacttggctgtggatggaaaaaaaaaatctacyagttttcctcatttacacttgcccattaaaaaaagtgaattgtgacctaataacttaaaaaagaaaaaaaaaaagaagaattataacttggaggagaaa

SEQ ID NO: 360234 - DNA, 626 bp, Homo sapiens
ttttacgattatcattaagataaaaccccaaataaagaatgtctagggtttctaaaaattactcagactccagtttcagaaacattgagatcatagactcaggatgcaggcttcatgacaagatgaaggtgagaccctgaggcagaggaccaggtccttgtacgaagatacctttgatcttcatttcacagatttacattcagtaaggccaagggcaaatctgcacaagagagtaagcaagctggcatgcacacgtcctaracacaaaagttgccatgactacctgtggttgtgtctgtgtgcagggccctactcgcacgggaggccggtacacaatacccttggcacaggactcccagctatctccctgtcccccaaagaacctttttactgttccctttggtcttgccatcgtgcctgagaagagaatgtagaggcctggaagattacagcaggctggcccctggccccacaagctcagcccattatctgcccaagtgctgcccatttgccaactcagcaaactgctatctcctggagatttacaaaaacatttgaaaattgaaaagtatgcttcctatgtcaacaggatgccacgtgtccgtcctctgaaacctgccgtctac

SEQ ID NO: 360235 - DNA, 626 bp, Homo sapiens
ttttacgattatcattaagataaaaccccaaataaagaatgtctagggtttctaaaaattactcagactccagtttcagaaacattgagatcatagactcaggatgcaggcttcatgacaagatgaaggtgagaccctgaggcagaggaccaggtccttgtacgaagatacctttgatcttcatttcacagatttacattcagtaaggccaagggcaaatctgcacaagagagtaagcaagctggcatgcacacgtcctaaacacaaaagttgccatgactacctgtggttgtgtctgtgtgcagggccctactygcacgggaggccggtacacaatacccttggcacaggactcccagctatctccctgtcccccaaagaacctttttactgttccctttggtcttgccatcgtgcctgagaagagaatgtagaggcctggaagattacagcaggctggcccctggccccacaagctcagcccattatctgcccaagtgctgcccatttgccaactcagcaaactgctatctcctggagatttacaaaaacatttgaaaattgaaaagtatgcttcctatgtcaacaggatgccacgtgtccgtcctctgaaacctgccgtctac

SEQ ID NO: 360236 - DNA, 521 bp, Homo sapiens
ggattcaatatgttttcaaattttccccaatctgggggactccacaaagataagcaagggatcaattattgtaggactaagctagggattctgacctcttcaggagtaagaatggggtatctgaccaaagctagagttctaggctgtggaaagcaacccattctcaagggcctctccccatcctcagaggcccctagatyaactctatagctaggctgggccaaaggcctgtgagcccctgcttttgtgttagtcatagaccgtgcaaagttatgactccaactttgctgcttagagatgtgacctaggatggctgtggtagtcattaatggtagatggcagtacacgccatggccctcttgtggttgctggggccatgtgactaattctggccaatgaatcttgagcagatgagatgacatcacttccaggccagatcatttagttgctactttgagaccctacagggctttctttccctctggaaaaggaaagcatggtattggagatggtggctgttc

SEQ ID NO: 360237 - DNA, 521 bp, Homo sapiens
ggattcaatatgttttcaaattttccccaatctgggggactccacaaagataagcaagggatcaattattgtaggactaagctagggattctgacctcttcaggagtaagaatggggtatctgaccaaagctagagttctaggctgtggaaagcaacccattctcaagggcctctccccatcctcagaggcccctagattaactctatagcyaggctgggccaaaggcctgtgagcccctgcttttgtgttagtcatagaccgtgcaaagttatgactccaactttgctgcttagagatgtgacctaggatggctgtggtagtcattaatggtagatggcagtacacgccatggccctcttgtggttgctggggccatgtgactaattctggccaatgaatcttgagcagatgagatgacatcacttccaggccagatcatttagttgctactttgagaccctacagggctttctttccctctggaaaaggaaagcatggtattggagatggtggctgttc

SEQ ID NO: 360238 - DNA, 577 bp, Homo sapiens
aggagggcgggccctcccagaagctcagaaaacacaaaactcatgcctttatgctttatggatgtcaattcagttttctccacaggcacaacctttttttgtgcatgactgtatatgacattttgaatgttggcccatttgaattgttttagtcctgtaccctgatcctctctggggctcttgaatacacttgggcttgtgtttagacagttgcgatgatgtattctcaaacccagtgtttagctgcacactttaatgacaggcaaggagtaattgggcagtttggcacgtgtcatgtcctaaatgtagagatgaaggttctaatggtaacagagggagaaatagatttgtcctgaacttggcaggaatgtcactctgccaagctctgccagcctgatgcttagacacttccagatccaggacccttctgaaaartgcaaaagcaccctgaaatcaccaatgaaacaggaaagaaaaaaaccatctctgctttgcaacacctttagcacacataagtgacttcggtgtgactctttggggtgaaggtttttttaaaagcatgacatttaaactcggc

SEQ ID NO: 360239 - DNA, 577 bp, Homo sapiens
aggagggcgggccctcccagaagctcagaaaacacaaaactcatgcctttatgctttatggatgtcaattcagttttctccacaggcacaacctttttttgtgcatgactgtatatgacattttgaatgttggcccatttgaattgttttagtcctgtaccctgatcctctctggggctcttgaatacacttgggcttgtgtttagacagttgcgatgatgtattctcaaacccagtgtttagctgcacactttaatgacaggcaaggagtaattgggcagtttggcacgtgtcatgtcctaaatgtagagatgaaggttctaatggtaacagagggagaaatagatttgtcctgaacttggcaggaatgtcactctgccaagctctgccagcctgatgcttagacacttccagatccaggacccttctgaaaagtgcaaaagcaccctgaaatcaccaatgaaacaggaaagaaaaaaacmatctctgctttgcaacacctttagcacacataagtgacttcggtgtgactctttggggtgaaggtttttttaaaagcatgacatttaaactcggc

SEQ ID NO: 360240 - DNA, 529 bp, Homo sapiens
tcaagaaccctattttgatacggaaaacccatctctttcatttataaacatcctgtgtattctgtcctttctgtgacttttatttaagagtctctgttaagagtctggatttgtatgtcttttccacccaccttagatatcctggcttgtatttcctttgtgatactccacagggaccttcacagagccattgtcctctgtatattgatggctgtttcatcagtctaatcccaagatatttttcacacacacacacacacacacacacacacacacacaccatgaacacattagttttcacgttagaaaagaaggrtagaataacttttttcattcagatgcatctttttatgggattatctccccaaaggaagatggtaaaatatgaaggagtagggaaaagttcaggagccttactctgagcaaaaacagcataaatagaaaacactgcagtgccccaactagctaataatgcatacacctttggaactcaaaatatcagtataaaagattcacaaaatgagtttgg

SEQ ID NO: 360241 - DNA, 529 bp, Homo sapiens
tcaagaaccctattttgatacggaaaacccatctctttcatttataaacatcctgtgtattctgtcctttctgtgacttttatttaagagtctctgttaagagtctggatttgtatgtcttttccacccaccttagatatcctggcttgtatttcctttgtgatactccacagggaccttcacagagccattgtcctctgtatattgatggctgtttcatcagtctaatcccaagatatttttcacacacacacacacacacacacacacacacacacaccatgaacacattagttttcacgttagaaaagaaggatagaataacttttttcattcagatgcatctttttatgggattatctccccaaaggaagatggtaaaatatgaaggagtagggaaaagttcaggagccttactctgagcaaaaacagcataaatagaaaacactgcagtgccccaactagctaataatgcatacacctttggaactcaaaatmtcagtataaaagattcacaaaatgagtttgg

SEQ ID NO: 360242 - DNA, 483 bp, Homo sapiens
atggcttgcttatacacattttagaattagcttatccatatttatcaaaattcttgctggaattttcgtagcaattgctgtaaatttgtatcaattttcaggaatcaacattcttattatgtggtgttttccaattcatgagcacagtatgcttctttattcatcaaagtaccttaaaatttctcacatcggcattgtcatttcagcatccttattttgttagatttatacctatttcattttcttctgaatgactgtaaatagtatttttttaattttgcattcatgtgtttattactagcatatggaaaaacagttgatttctcacacatcaraagcttatcttatattctgtggccttgttgaattcacttattggttctaggaactttttttgtatattctccattatattctacatagaccatcatgtcctcttcaaataggggcagttttatttctttctttctaaactgtgtgcct

SEQ ID NO: 360243 - DNA, 621 bp, Homo sapiens
tccttttgagataataaaatattgggagaaaccagcccccgatatttcacgtaggttcttttctagtttccctaagtgtcagccagtctgagaaataaagggaaagagtacaaaggagaaattttaaagctgggtgtccaggggagcatcacatgtcagcaggttccgtgatgccccctgagccataaaaccagcaagtttttattagcaattttcaaaggggagggagtgcacaaatagagtgtgggtcacagagatcacatgcttcaagggcaacaaaagatcacaaggcagaagatcagggtgaaactagaatcactaatgaacttccatgtcctactgtgcatgcattgtcagggttcaagagcagagaaccggtctttctagaattcaccagtctggaatttcctaatcctagcaagcctgggggcgctgcaggagactmgggcgtgtttcatccctatctacatctgcataaggcagacacccccagggaggccattttagaggccccgccctgggaatagattcttttcccagggctgttaattattaatattccttactgggaaaagaattcagccatatttctcttacccattttcggtaataagagaaata

SEQ ID NO: 360244 - DNA, 642 bp, Homo sapiens
gtactagtaattagaagtggttgatagggacacagatgatttttattttcttatatttttaactcatttttttcattttatattgcactataacatgcaatataaacatttattttttatcaaaatattaaaagaaattatgttcacatacatatctctagaagaagaaatgtcattgaaaaactttttaatataagcaaataaattaaagtacagagtctatttgcttttcagaaataagtataaacgttggctgccaacttttatcatccaattttcacggaaataaaattctttccttaatgcctgaagataytattttggatggcagtaaaaaaaaaaaaagatgaagaaggaattcaataatttttttaatttcaatggaaaagactaatattttactacacataaatgtgctggctgatcacactttaaatttattaccgcaaacctccagtgggccttccgagctacctagcaatcttctcatttctccactcagctcactctccctctttagagcttttctttctcatttcactaaatcattgccatcagaagatagctttcatattcttacgattcctccacgtttaccaacttgcctattatttgtccccatgcactgtacctttctgatag

SEQ ID NO: 360245 - DNA, 642 bp, Homo sapiens
gtactagtaattagaagtggttgatagggacacagatgatttttattttcttatatttttaactcatttttttcattttatattgcactataacatgcaatataaacatttattttttatcaaaatattaaaagaaattatgttcacatacatatctctagaagaagaaatgtcattgaaaaactttttaatataagcaaataaattaaagtacagagtctatttgcttttcagaaataagtataaacgttggctgccaacttttatcatccaattttcacggaaataaaattctttccttaatgcctgaagatactattttggatggcagtaaaaaaaaaaaaagatgaagaaggaattcaataatttttttaatttcaatggaaaagactaatattttactacacataaatgtgctggctgatcacactttaaatttattaccrcaaacctccagtgggccttccgagctacctagcaatcttctcatttctccactcagctcactctccctctttagagcttttctttctcatttcactaaatcattgccatcagaagatagctttcatattcttacgattcctccacgtttaccaacttgcctattatttgtccccatgcactgtacctttctgatag

SEQ ID NO: 360246 - DNA, 617 bp, Homo sapiens
tcaggtggatcagagagatacagtcatgggggtccggtgtggtatcaggaataatgtgggaggccagattgaagtctgggccgggaacaatggtaattgtaggacttaacaaagagtgagtacagctgaaggagccggggagcagmaagtatatgcgtcaggtatgaggaagaaaatagattttggaagttaggagaaatgtagggagtgagttgagcatagtttgtaatttttagggcctctaaaagtattaaagcagcagcagctgctgcatgcagacatgagggctaggctaaaacagtaaggtcaagttgcttgcacagaaaggctaccgggtgaggtcctggctcttgtgtaagaattctgaccgcactaaccatgcctaggaaggaaaggaattgttttgtaagggattgaggtttgggagattaattggacccgatcagcagggaaagcacgtgtgtttttatgagaattatgccgagataggtaacagatgaggatgaaatttgggcttgactgaagtaataggagctgtctgtgaagccttgcggcaggacagcccaggtaatttgctgagcctaatgggtgtcagggtcagtctaagtgaaagcaaa

SEQ ID NO: 360247 - DNA, 617 bp, Homo sapiens
tcaggtggatcagagagatacagtcatgggggtccggtgtggtatcaggaataatgtgggaggccagattgaagtctgggccgggaacaatggtaattgtaggacttaacaaagagtgagtacagctgaaggagccggggagcagaaagtatatgcgtcaggtatgaggaagaaaatagattttggaagttaggagaaatgtagggagtgagttgagcatagtttgtaatttttagggcctctaaaagtattaaagcagcagcagctgctgcatgcagacatgagggctaggctaaaacagtaaggtcaagttgyttgcacagaaaggctaccgggtgaggtcctggctcttgtgtaagaattctgaccgcactaaccatgcctaggaaggaaaggaattgttttgtaagggattgaggtttgggagattaattggacccgatcagcagggaaagcacgtgtgtttttatgagaattatgccgagataggtaacagatgaggatgaaatttgggcttgactgaagtaataggagctgtctgtgaagccttgcggcaggacagcccaggtaatttgctgagcctaatgggtgtcagggtcagtctaagtgaaagcaaa

SEQ ID NO: 360248 - DNA, 617 bp, Homo sapiens
tcaggtggatcagagagatacagtcatgggggtccggtgtggtatcaggaataatgtgggaggccagattgaagtctgggccgggaacaatggtaattgtaggacttaacaaagagtgagtacagctgaaggagccggggagcagaaagtatatgcgtcaggtatgaggaagaaaatagattttggaagttaggagaaatgtagggagtgagttgagcatagtttgtaatttttagggcctctaaaagtattaaagcagcagcagctgctgcatgcagacatgagggctaggctaaaacagtaaggtcaagttgcttgcacagaaaggctaccgggtgaggtcctggctcttgtgtaagaattctgaccgcactaaccatgcctaggaaggaaaggaattgttttgtaagggattgaggtttgggagattaattggacccgatcagcagggaaagcacgtgtgtttttatgagaattatgccgagataggtaacagatgaggatgaaatttgggcttgactgaagtaatrggagctgtctgtgaagccttgcggcaggacagcccaggtaatttgctgagcctaatgggtgtcagggtcagtctaagtgaaagcaaa

SEQ ID NO: 360249 - DNA, 617 bp, Homo sapiens
tcaggtggatcagagagatacagtcatgggggtccggtgtggtatcaggaataatgtgggaggccagattgaagtctgggccgggaacaatggtaattgtaggacttaacaaagagtgagtacagctgaaggagccggggagcagaaagtatatgcgtcaggtatgaggaagaaaatagattttggaagttaggagaaatgtagggagtgagttgagcatagtttgtaatttttagggcctctaaaagtattaaagcagcagcagctgctgcatgcagacatgagggctaggctaaaacagtaaggtcaagttgcttgcacagaaaggctaccgggtgaggtcctggctcttgtgtaagaattctgaccgcactaaccatgcctaggaaggaaaggaattgttttgtaagggattgaggtttgggagattaattggacccgatcagcagggaaagcacgtgtgtttttatgagaattatgccgagataggtaacagatgaggatgaaatttgggcttgactgaagtaataggrgctgtctgtgaagccttgcggcaggacagcccaggtaatttgctgagcctaatgggtgtcagggtcagtctaagtgaaagcaaa

SEQ ID NO: 360250 - DNA, 539 bp, Homo sapiens
taaaataaatatttttaatttttatctggaatttcacaaacttcattttggttaggatccacagctagagttagtgttgatcttttgagattcactctgcttttgcatacttcaagtattgttacatttgttcttttatttttgcatatggagaaagaamcacttcttatttttgaatttactttcatttggacaggatttgttttcttcttctcttcttaagaatgcaactataatatattttaagtagtacagtttgctttgctgatgtgcgtactcagttgaaaaaagtgtgtaaaaattgttttacttatagatagccttcatgtggtggctttctcaaatgttagctgtattattggtgtactgaatgggtgagaagactcatagcctcctgagactccatgctggtggaggtcatgagaagcttatctcattcctaagcactgtgcatttatgtccagaatttgtagtgggttgttaggttgacttccaggatagtaggtggcactcacaggtaagagctggctgctgtggta

SEQ ID NO: 360251 - DNA, 594 bp, Homo sapiens
acgtagtgaaatattttatggaattttgttttatataattcacatacttcgtaagagggttgtattgatttctctctgtataatttggggtcattgagactaggrtctggtaagttggagagtcaggcattggactgagcaaatcaatagaaatacttcttcgtatgggggttaagaatcatgttaagaaaagagtgtgagatccacttcttaaataatatttatatgagctctacgttcaaaagcagaatcccaacttgaactagcttttctgttccactaaaaaacatgagcaatacttccattaggatagctaactaatcggatgggacaaccaactttttacttagctcctccaaaatcatcctaaaacagtctttaaatagtttttccaagaatttgagggaaacagtgttcagacaagaagctctaattttatttcaaatttgaaactaaaaattgtattttagccctacttttgttctaagtaattcattgggtttgtgtaaatcactgtcatatgtttgcaaagcactcctgataagcaagagttattttactctctttcttggtagcaagaaaaatgcatccctg

SEQ ID NO: 360252 - DNA, 594 bp, Homo sapiens
acgtagtgaaatattttatggaattttgttttatataattcacatacttcgtaagagggttgtattgatttctctctgtataatttggggtcattgagactaggatctggtaagttggagagtcaggcattggactgagcaaatcaatagaaatacttcttcgtatgggggttaagaatcatgttaagaaaagagtgtgagatccacttcttaaataatatttatatgagctctacgttcaaaagcagaatcccaacttgaactagcttttctgttccactaaaaaacatgagcaatacttccattaggatagctaactaatcggatgggacaaccaactttttacttagctcctccaaaatcatcctaaaacagtctttaaatagtttttccaagaatttgagggaaacagtgttcagacaagaagctctaattttatttcaaatttgaaactaaaaattgtattttagccctacttttgttctaagtaattcaytgggtttgtgtaaatcactgtcatatgtttgcaaagcactcctgataagcaagagttattttactctctttcttggtagcaagaaaaatgcatccctg

SEQ ID NO: 360253 - DNA, 594 bp, Homo sapiens
acgtagtgaaatattttatggaattttgttttatataattcacatacttcgtaagagggttgtattgatttctctctgtataatttggggtcattgagactaggatctggtaagttggagagtcaggcattggactgagcaaatcaatagaaatacttcttcgtatgggggttaagaatcatgttaagaaaagagtgtgagatccacttcttaaataatatttatatgagctctacgttcaaaagcagaatcccaacttgaactagcttttctgttccactaaaaaacatgagcaatacttccattaggatagctaactaatcggatgggacaaccaactttttacttagctcctccaaaatcatcctaaaacagtctttaaatagtttttccaagaatttgagggaaacagtgttcagacaagaagctctaattttatttcaaatttgaaactaaaaattgtattttagccctacttttgttctaagtaattcattgggtttgtgtaaatcactgtcatatgtttgcaaagcactcctgataagcaagagttattttactcwctttcttggtagcaagaaaaatgcatccctg

SEQ ID NO: 360254 - DNA, 571 bp, Homo sapiens
taaataaaagtttggctcatagtaacaactgattaatataaatttaktttactttttgtatttttttcctgagagagatagacagaaaaatcatagggctcgagggaaaatagatagcaatgcagtcctagatcactggaaaagaaaatgagaataatgtggaaccacattttaggatttcctatataaaggtggagcagaagtgagaatgagaattgttcaggtcatacatgaagtggaaaatgactgcgcatcatccactttgcctgacttccaggaactcacatgttgtggaagagctctagtgttccatttacaactaagtactagtttcttgatgtaagttttcataaaataaaatttcacttaaaagttagaaaatgtgagtgattaatatattttattttcactttttatgtcagttttgtaaaattgtgcttcattaagaatttgagtatttaatttttcaaatttcatgacataaattgtggatagtatcttactaaattattttatttttgtaagatctttagttacgtctctttttcccatctaaatattaataatgttc

SEQ ID NO: 360255 - DNA, 582 bp, Homo sapiens
acatatgtaccaataatttgagggaaagatatctcaatgaaactttaaatataaatggttgaagacaaagcagtaatggttaaataagtactataaatatttgtgtgtgtgtgaaacagaaagaatgaataagataccttaagaagctaaggctaacagaacacaagcagaaaacaggcactcaatgcaaagatcagagaagtagtttgaatacagtagctgaaactaaaakgctattgcacactgagagaagttcgtggtaaggtctgaaggagctgaagcaatctatgctctccctatgaagtgtccaaaccatgaagccaaggctaccttctcaaagccaagaactgaagagagactactgtgatttggatccatatgaacagcataagacaaaagaaggaaaaggctcagacaaaaatgaggaaggaaaccaatgcctggagatatctgcaagaataaaacccatatttttgatcccttcacaaaagtaagagaaatgataatgttgaagtgcaaagctaaacaattatcttgacccaaccctccttcttaaagttcaggaaaattaaaattacataa

SEQ ID NO: 360256 - DNA, 582 bp, Homo sapiens
acatatgtaccaataatttgagggaaagatatctcaatgaaactttaaatataaatggttgaagacaaagcagtaatggttaaataagtactataaatatttgtgtgtgtgtgaaacagaaagaatgaataagataccttaagaagctaaggctaacagaacacaagcagaaaacaggcactcaatgcaaagatcagagaagtagtttgaatacagtagctgaaactaaaatgctattgcacactgagagaagttcrtggtaaggtctgaaggagctgaagcaatctatgctctccctatgaagtgtccaaaccatgaagccaaggctaccttctcaaagccaagaactgaagagagactactgtgatttggatccatatgaacagcataagacaaaagaaggaaaaggctcagacaaaaatgaggaaggaaaccaatgcctggagatatctgcaagaataaaacccatatttttgatcccttcacaaaagtaagagaaatgataatgttgaagtgcaaagctaaacaattatcttgacccaaccctccttcttaaagttcaggaaaattaaaattacataa

SEQ ID NO: 360257 - DNA, 552 bp, Homo sapiens
cgtggtaaggtctgaaggagctgaagcaatctatgctctccctatgaagtgtccaaaccatgaagccaagrctaccttctcaaagccaagaactgaagagagactactgtgatttggatccatatgaacagcataagacaaaagaaggaaaaggctcagacaaaaatgaggaaggaaaccaatgcctggagatatctgcaagaataaaacccatatttttgatcccttcacaaaagtaagagaaatgataatgttgaagtgcaaagctaaacaattatcttgacccaaccctccttcttaaagttcaggaaaattaaaattacataaaatttgggaataaaaatgttgtgtttgctttccgtggaaacatactgcaagaaaaaagttggaggagaaggaagaagccacataacagatctgtagacagaaaaatggaaaaccaaacagatgaaactataacctactattccaaaatgggctaaaatggacaagaaaataaagagaaaacatgaaagaacagtacagattgccatcagtaaaaactcagaaatg

SEQ ID NO: 360258 - DNA, 609 bp, Homo sapiens
caaaactctcatttaaggtcccaacaaactgaaaagagtaggaaatctttcaaataatatacatttaaattcagctctaartactgccatccaattctcacggcaagtattggctatcaatactggttaaacttcctgcaatagagttattttgtgcctgattcagtgtcacaaaataactatgagttggttttctgtttaatttaggaaacattttacaatgacctgtgagtcctaggtgctctcaaaagttggagataaagataaatatggtacaatcccttccctcaaatatctcatagtttaaggatagtttacaatcttctttgatcctacttattctattttatcatggatacctaaaattgtatgccttagtataaggtctatgattaaatactggtggaggaaggtgctacatacttaagacctatggtaaaacatgttttcattgcttgtactattaaacaaatgaacaatccatagaaagttggttaactttcaaagcggtaagtggagaattttctcacctaagtcagtagaatatagatctaaattaataacaataataatgagaagacagcttaagttttgttacattacacaatg

SEQ ID NO: 360259 - DNA, 552 bp, Homo sapiens
aatggctttctcacatggctgacagatgacatgttcttttggcttggagcttaactgaggctgttgaccagaacttacactcagtctctccctgtaactttggtttctgagaagcagatggattttgagaggtagtatccaaagagtaattgttctaagagtgaacaagcagaagctgatagagattttagaggctaaacttggaattagcacaatgtgatctctaccatgttctactgtttgagtagtcacatggcaaaaaaaaataaaaaaaawtcaaaggaagggcagattaattatttttctttacacaactgtggcaaagaatttgatagtcatctttaagccaccacatacccagtgatcagatatttcaagtttcatgagaaaatgtttaacccacttaatttcattgaaagacctcaacattctgatttgcctgagaatctcctgttgctatgagttttttattgacaagtgtaatataatttcagacattcagtatgattgctctaaatgtaattaaacttaaataaatctgtggtggaaaaa

SEQ ID NO: 360260 - DNA, 587 bp, Homo sapiens
ctcataaagctcataatgaccactcaagttttgctagctccagattcttgtttcaaattatgctgaagttaataacaacaatccctgctctsaaaactgagagagacctgagagattccatgtcattgcctgaagttcacacatcacagttattgctggaggctgacactcattatccaccccgaaactctaaggagtgtatctgtgcttttcaaaggtgcctttttcaatagagacagacagaggatgtaagatgagcagctatgttaaaaatgtaaagtctgcaccaacccttcatttccccatcttagacattttgttggaaactatcatccaactctgttcgcaaaggatgtttcccaaggctcaactgccctcagttagacagacaggaagttcaatcaaaatctatgctgaagaatttgagacagtatatattttttctattcataaaacttcaattgctactcacatatataagaaacatattgataaacttcaggtgcatattcagatagttatcagaaattttcttactttgatattacataggcaactcaaaatttagcatgtccaagaatgaaata

SEQ ID NO: 360261 - DNA, 587 bp, Homo sapiens
ggcctttaatctttctctgatggcttcatttctgttgattttattatagcagattaggaaaggacaacagtgaaattcagtatttattgtcaacctgaattgtgaccagaacattttggcttcttccaatgacagaaaatataccattcaataaaatttataattacaaataaacaaaaaataatgcattaaagaatgtaatttaaatcaatgctgtgctttaaaaaattttcttgaagagattccagtggcaaaactgaagattttatgagggaagtgtttgagataagaaatgaaaatgcaacagggcatgtcagaaaaaagttcagacartgtaagaaggtagttcacagctggcgcttcccagaagagtcgtcaaggacaaaggcagagtggtaagagaaactacttcctctccctgcttacgccacttctttcatgtcagggggctaggagtattctctccttaaaatgcatagtcctaagacatatatatctttcttctatctaaaatcataattcacatacaacacagccagattttccaaaatatcagaactatagtactagaaatggcagatttcagt

SEQ ID NO: 360262 - DNA, 514 bp, Homo sapiens
agcccattcttatgctgctaataagaacatacccaagactgagtaattcataaagaaaaagaggtttaatggactcacagttccacgtggatggggaggcctcacagtcatggcagaaggtgaaggaggagcaaaggtacatcttacatggtagcaggcaaggaagagtgcagagcgaagggcaggggaaacaccttataaaaccatccgatccctaattcactatcatgagaacaggatggggaaaaccacccccataattcaattatctccacctggtcccttccacaacacgtgaggattatgggaactacarttcaagatgagatttgggggagggacatagccaaagcacatcagttggcttagtagctcaccttttgttggctgtcttccttcctttttatcacatctctacctgtgttatctgaatttaccaaacataccatttacatttaaatcgtggtttcaatttccgtaaagcctaaataagagagcctgtacgctgtgaaag

SEQ ID NO: 360263 - DNA, 588 bp, Homo sapiens
gaggattatgggaactacaattcaagatgagatttgggggagggacatagccaaagcacatcagttggcttagtagctcaccttttgttggctgtcttccttcctttttatcacatctctacctgtgttatctgaatttaccaaacataccatttacatttaaatcgtggtttcaatttccgtaaagcctaaataakagagcctgtacgctgtgaaagccacatgagtgaggagtgatattattattaatttttaaaattaataatatttggatgaatttaatatttatcaacttaagaatacctttgataaagaagaaacttaaaaggtttttctttggtttggggtttttcgttaaatataaggaagaggtatgtgaagagatctagtgataggcagggtagaaagcagatcaagggaagagtctagctgagcccaaagatttggcccagagacttctagttccaaaagggcagcatagttgcaagctggcttcatctatgaagccagaaaaccaaaaataaatatgctgcaccaagattatctccagcaatatttcagaactcaaacatgagaataagttagttc

SEQ ID NO: 360264 - DNA, 616 bp, Homo sapiens
agctgtaagacagatttgtattctagtcaactcctttactcttatttacacacacacacacacacacacacacaatcatacatgcatgtttgagatttgtttaattgtgttgtgattttcacaataaaggttatattatgaatccacatggaataactaaattatttgtgggtttatcctacactaactttttgggtgttattaatcttgtttagcaccttcctttatagtgcatagagattgtagaaatgaaatatagcattattatgacattgttctgaatttgatacaagggcagccaagctaaactgacatggccaatttacccagcttagtttgtcagaatgggtttgcatgttgaaaatggtayactcaactcagaaagacatatttccccccaaaatacatatttggaatccccatgcattactaaatatgtgccaagtgatattctccctaaattgctataagaaaatcaaatgacccatggttctgacgaattttgggtggaaggaactatacattgaaagcataaagtctatcctcttattataacaagggaaagaggtttctatgttcagtgttctctggaagttcttgaattgcagtactcaaa

SEQ ID NO: 360265 - DNA, 615 bp, Homo sapiens
gcaaactaataaatacggaattattgatggtgctaaactcacacataaatgctaaaattagtgagtamactttcattaaaaaaatacctataatctcatggtacatccccacaaattagttactaattacaaagaaaaaaatatacaggcatacctcattttactgcatttcatttttaaaattgtactttgtagatattgcatttttcacaaattgaaggtttatggcaactatgttggcaaatctgttggtaccatttccaacagtatgtactcactttgtgtctctatgtacattttggtaattctcacaatatttcaaagtttttcattattatatttgttatggtgatctgtgatcagtaatcttcaaggttactattgtaattgttttgggatgctaagaaatgcacccatatgagacggcaaaattaatcaataaatgttgtgacaataaatgttctgactgcttcactgattgtctgtttctctgtctctctcctactttttgggcctccctattccctgaaatacaaccatattgaaattaagctagttaataaccctaaaacggcatctaagtgttcaagtgttaaagttcaaggcacacgtctt

SEQ ID NO: 360266 - DNA, 615 bp, Homo sapiens
gcaaactaataaatacggaattattgatggtgctaaactcacacataaatgctaaaattagtgagtaaastttcattaaaaaaatacctataatctcatggtacatccccacaaattagttactaattacaaagaaaaaaatatacaggcatacctcattttactgcatttcatttttaaaattgtactttgtagatattgcatttttcacaaattgaaggtttatggcaactatgttggcaaatctgttggtaccatttccaacagtatgtactcactttgtgtctctatgtacattttggtaattctcacaatatttcaaagtttttcattattatatttgttatggtgatctgtgatcagtaatcttcaaggttactattgtaattgttttgggatgctaagaaatgcacccatatgagacggcaaaattaatcaataaatgttgtgacaataaatgttctgactgcttcactgattgtctgtttctctgtctctctcctactttttgggcctccctattccctgaaatacaaccatattgaaattaagctagttaataaccctaaaacggcatctaagtgttcaagtgttaaagttcaaggcacacgtctt

SEQ ID NO: 360267 - DNA, 648 bp, Homo sapiens
tgatatcctaggctcttcttgtgcaacataatgggtatggtaggagggagtcacaagaagactaatttataaagaaatatttacattgctgggtttgtatagtatcatataatttgataatgaactatctagaaagtatacagaaagatgaaataaatatgccttaaggataggaagaaatcactttctcttttaggagctaagccaagatctatataagctaaatttaagagaaagcagaatttactatgaaaataacagaaattgatctgacccacagtgatgacttgacaagggaagaaattgcaaattacttcaatagttttatccctagtggatttttaagccaaagtagataacatgcagcaaagtatattaatatgaacaacaatatgctggcagaaagatagagcagaaagcctcttaggtcattttcattattattcattgactttaaaaatctgtttgatatcttaaaaggtcttgaagtttatgaacacatttttctgtagtgttytaaggcaaaaaagaaaagaaaagaataaaaaaattttaaataaaatattgtacctgaaagcaattttaaccattttctcagcaagttgaacatttagaaatgtcttatggtgcagattaacataataccct

SEQ ID NO: 360268 - DNA, 560 bp, Homo sapiens
cagcctaccacaggtataaagatcatgaagtcactagacawactatcactttttcttcaatgcagttgtagcaatttaagtactgcctccagtgtttctatgtcttcatcaatacctggcattgtcagcttctctggaaggcataaaacctgaactaattgctattacgtataacttaaaattttgatgtaattttaaataaacaaaaaagttgcaagaataaaataaggaaccattgtatatcacctacattcgcctatttttaaatttcatcccatttgagactaaggtgcaaatgcatatttatctataaccgtttatctagaaacattttggtatgtattgcctaagaataaagataatcttttattcactcatattgcaattatgtaaatcaggacagttaatattgatttaatattaattgatccccagtcctattcaaattttgtcaattgcttaataataccctttatgcttcttgttccttgattcaggactcaattcagaatcatgttgcatttgtttgtcatctcttcttagattcctttcatttgaaa

SEQ ID NO: 360269 - DNA, 560 bp, Homo sapiens
cagcctaccacaggtataaagatcatgaagtcactagacatactatcactttttcttcaatgcagttgtagcaatttaagtactgcctccagtgtttctatgtcttcatcaatacctggcattgtcagcttctctggaaggcataaaacctgaactaattgctattacgtataacttaaaattttgatgtaattttaaataaacaaaaaagttgcaagaataaaataaggaaccattgtatatcacctacattcgcctatttttaaatttcatcccatttgagactaaggtgcaaatgcatatttatctataaccgtttatctagaaacattttggtatgtattgcctaagaataaagataatcttttattcactcatattgcaattatgtaaatcaggacagttaatattgatttaatattaattgatccccagtcctattcaaattttgtcaattgcttaataataccctttatgcttcttgttscttgattcaggactcaattcagaatcatgttgcatttgtttgtcatctcttcttagattcctttcatttgaaa

SEQ ID NO: 360270 - DNA, 661 bp, Homo sapiens
ttcagctaaaaatctgcacagcaaaggaaacaatcaacaaactgaagagacaacccacagaatgtgagtctttagaaattagccatctaacaagggattaataaccagaatatataaggagctcaaacaactaaataacaaaaaagtaagtaatccaatttaaaaatgagcaaaagatgtgaataaacatttctcaaaataaggtatataaatggccacatatgaagaaatgctcagcatcattaagcgtaagaggaatgcaagtcaaaatcacaatgaggtatcttctcgcttagttataatgcctttttatcaaaaaggcagaggataacagatgctggtgaggacatggagaaaggggaattaatatcacacactgttggtggsaatgtaaaatggtacagctattatggaaaacagtatagatgttcctcaaaaaaattaaaactaaacaaaaaaatctaaaaatagtgctataatacaatgcagaaatttcactactgagtatatatccaagagaaaggaaatcactgtatcaaagaggtatctgcactcccatgtttagcactattcacaatagtcaaaatatggaatcaacctaagtatccattaatgggtgagtggataaagaaaatctggtgtatgtacacacaatggaata

SEQ ID NO: 360271 - DNA, 501 bp, Homo sapiens
tttaatcattatatagagttcatctttgtcttttttaactgctgttgctttaaagtttattttctatgatatatgaatagctactccttctcacttttaatctccatttacatggaatatttttttccacccctttacctaaagtttatacgaatccttatgtgttaggtgagtctcctgaagacagcagaaacttggttgatgaattcttatccattctgccattctgtaccttttaagtgtgggtcatttaggccatttacattcaatgttastattgctatgtgaggtactattctattcatcctgctatttgttgcctgaataccttttttattattgtgttattgttatataggtccttgaaacttatgttttaaggagattctattttggtgtattttgaagatttgtttcaagattcagagctccttttagcagttcttgtagtgttggcttggtagtgttgaattctctcagtgtttgtctgaaaaagacttt

SEQ ID NO: 360272 - DNA, 617 bp, Homo sapiens
ccctcttaaaaataacagctttggaattcaatatagcacagaacgtgaggactaagctctgatttttttttatcttacccaaatgtctttctaaagggtctggggagtcatgccctacaaaccataagttctcattagatgggttttatttaaccttgtatattgtgacttactttccagtctgactctggsataacaagggaaaaattcaaaatgttttgccccaaaataaatttccttgccataccctggaattgcccctgaaagtcttgtaggaaaaatccatattctatagagaatcccctttcccctttgttttccttgcttcctttccagattcaggaggtaatcaactaagagccaggcacccttttaagtctgataagaaacatttttcaacctgctctctctgaagtctgctgagagtttcttctgcacaataaaacttggtctccacagtcctttatcttgacctgaacatgtcgtttgattccaggtcttcagataaactctaccaattgtcaactagaaaatgtttaaatttacctatagcctggaaacccccaccttgagttgtcctgcctttctgaacaaaaccagtgtacttcttaaatgta

SEQ ID NO: 360273 - DNA, 617 bp, Homo sapiens
ccctcttaaaaataacagctttggaattcaatatagcacagaacgtgaggactaagctctgatttttttttatcttacccaaatgtctttctaaagggtctggggagtcatgccctacaaaccataagttctcattagatgggttttatttaaccttgtatattgtgacttactttccagtctgactctggcataacaagggaaaaattcaaaatgttttgccccaaaataaatttccttgccawaccctggaattgcccctgaaagtcttgtaggaaaaatccatattctatagagaatcccctttcccctttgttttccttgcttcctttccagattcaggaggtaatcaactaagagccaggcacccttttaagtctgataagaaacatttttcaacctgctctctctgaagtctgctgagagtttcttctgcacaataaaacttggtctccacagtcctttatcttgacctgaacatgtcgtttgattccaggtcttcagataaactctaccaattgtcaactagaaaatgtttaaatttacctatagcctggaaacccccaccttgagttgtcctgcctttctgaacaaaaccagtgtacttcttaaatgta

SEQ ID NO: 360274 - DNA, 617 bp, Homo sapiens
ccctcttaaaaataacagctttggaattcaatatagcacagaacgtgaggactaagctctgatttttttttatcttacccaaatgtctttctaaagggtctggggagtcatgccctacaaaccataagttctcattagatgggttttatttaaccttgtatattgtgacttactttccagtctgactctggcataacaagggaaaaattcaaaatgttttgccccaaaataaatttccttgccataccctggaattgcccctgaaagtcttgtaggaaaaatccatattctatagagaatcccctttcccctttgttttccttgcttcctttccmgattcaggaggtaatcaactaagagccaggcacccttttaagtctgataagaaacatttttcaacctgctctctctgaagtctgctgagagtttcttctgcacaataaaacttggtctccacagtcctttatcttgacctgaacatgtcgtttgattccaggtcttcagataaactctaccaattgtcaactagaaaatgtttaaatttacctatagcctggaaacccccaccttgagttgtcctgcctttctgaacaaaaccagtgtacttcttaaatgta

SEQ ID NO: 360275 - DNA, 608 bp, Homo sapiens
atgtaattgtctgcataagttcaataatagtttgttttttaaaaaaaaaaaaaaaagcaattggagacactggttattttaccaagactgaaactaaaatagcctattttcaggtaaagttttggcaaaaccaactttaaaaggaacctatttggccagtcactttcttgctgcattttatgcaaataatcagacaagcataataagcctaaaactaaccttgaacacaaattggccttgctataatattctctttaataaaaaaggcggctaaaaaaatatttcaagggtaaaacgtaacacttaatactagatttcrgccctaaatttttgagtgcagattaaagcattatttgttggctacaataatcctctagaaagtaccagattataatttttttcatatttttagttggtgcccggacggaacaggttactttttccgttctgacatatgaattactcttaaagttgtcaaactataaatgttatttatctcttttggttttatttccaaggaaaccaaaatcatggtattctgaagaccggagatatgaatctccatcatttggcatctcactgggcccgatctgtttcaccgttaatgc

SEQ ID NO: 360276 - DNA, 585 bp, Homo sapiens
caaagcttttaaacttcatgtgccatttgccttgtggctacatttgacttcttttctcaagcctgccatttaaatttctactttatcttccccatagccttggaaacaagtcaacaattactttcaaacaaaaatttctgtaatataaatgtcacagtctcctatttggttacagaaacattttacctttaattaagtttgttgtgaaaatccatgtytttaatcaaagagaaaacatgctgtgaagtttgaaaaggtttcatttttagagaaggtggggtgttaaggaatatttcagagaggtgtgtggaacatgctaagataatttgttcccttttggcataggtattttcttctatatagtctaaatatcagtgctactattttgcacaactgcaaggagcagcactctttgtacttcggaggatacaatataatgttgcctccttggacttagcaacccactgtaaatattttgataaccttagctatgatcaaaattgccaaggtcatcacagaggaagaccttaaggtaaaattattaaggaaattaactacaaggaaatgtgcacctcacattattgg

SEQ ID NO: 360277 - DNA, 585 bp, Homo sapiens
caaagcttttaaacttcatgtgccatttgccttgtggctacatttgacttcttttctcaagcctgccatttaaatttctactttatcttccccatagccttggaaacaagtcaacaattactttcaaacaaaaatttctgtaatataaatgtcacagtctcctatttggttacagaaacattttacctttaattaagtttgttgtgaaaatccatgtctttaatcaaagagaaaacatgctgtgaagtttgaaaaggtttcatttttagagaaggtggggtgttaaggaatatttcagagaggtgtgtggaacatgctaagataatttgttcccttttggcataggtattttcttctatatagtctaaatatcagtgctactattttgcacaactgcaaggagcagcaytctttgtacttcggaggatacaatataatgttgcctccttggacttagcaacccactgtaaatattttgataaccttagctatgatcaaaattgccaaggtcatcacagaggaagaccttaaggtaaaattattaaggaaattaactacaaggaaatgtgcacctcacattattgg

SEQ ID NO: 360278 - DNA, 571 bp, Homo sapiens
gaaagaaaactgggctaaaatagctctactcagtgtatgtcatttttcactttgctatcctgagcatgttctcaagataaaattggagaagcatgaaagagagttggaagcaggcaaagcctctggcatattctgtggaccaaagaagtcacaaaacaattcagattcaagggctcagggaatagactttacttcttgatgggagatgctacaaagttacattgtaagtggcataaacacagagagggctatagaattagaaatatttttataatcaatctatcatagttaacaatcttttcatataagaaatatgcttacttctttccaagatccctaaaagtctgtccaatcatggcatcatgctcaaagtccaggatcctatgaccagcattgcatttggatgcagctcctcttatccgcagacccactctaatagataccacggtgctccacccagataacatcttcaggrccaaggtactcatccccaaggtcctaagatactgatgactgatgaatcatccctagaaatttctttggccatagggaaatgccttggccaaggttt

SEQ ID NO: 360279 - DNA, 566 bp, Homo sapiens
cactcagtagcctatttgatataatcttaaagatgcagataaggacttcctagttttgttttgttttgctttttagttgttaacaaacactttaatcctaaaattagggatatgaatcagaatttaaattacataaaatgtctgaaatacaaamggataccacagctatttaaagatacccttttaagagtggataaatatttgaggtaactgtgtgtttagaagatgagaaagtatgcaaagataagtaagacagaatattagaatccagtgctctgaaatctccggcttcctcccctcactgctttctggctgcattattgttattcagctccagggcttcctactagagtgataaatatttcccccctccttgtgcccttactacagaatgtgaggggatattacataacaggatacactaatatattatattgatgagaaagcagtttatttattttgtaaggactgaatctcagagtgaggcagtcaattaatttaaaaagagtcaacggattctctccttcttctataatcctcagtgagagggctttttggtaaggcag

SEQ ID NO: 360280 - DNA, 566 bp, Homo sapiens
cactcagtagcctatttgatataatcttaaagatgcagataaggacttcctagttttgttttgttttgctttttagttgttaacaaacactttaatcctaaaattagggatatgaatcagaatttaaattacataaaatgtctgaaatacaaacggataccacagctatttaaagatacccttttaagagtggataaatatttgaggtaactgtgtgtttagaagatgagaaagtatgcaaagataagtaagacagaatattagaatccagtgctctgaaatctccggcttcctcccctcactgctttctggctgcattattgttattcagctccagggcttcctactagagtgataaatatttcccccctccttgtgcccttactacagaatgtgaggggatattacataacaggatacactaatatattatattgatgakaaagcagtttatttattttgtaaggactgaatctcagagtgaggcagtcaattaatttaaaaagagtcaacggattctctccttcttctataatcctcagtgagagggctttttggtaaggcag

SEQ ID NO: 360281 - DNA, 566 bp, Homo sapiens
cactcagtagcctatttgatataatcttaaagatgcagataaggacttcctagttttgttttgttttgctttttagttgttaacaaacactttaatcctaaaattagggatatgaatcagaatttaaattacataaaatgtctgaaatacaaacggataccacagctatttaaagatacccttttaagagtggataaatatttgaggtaactgtgtgtttagaagatgagaaagtatgcaaagataagtaagacagaatattagaatccagtgctctgaaatctccggcttcctcccctcactgctttctggctgcattattgttattcagctccagggcttcctactagagtgataaatatttcccccctccttgtgcccttactacagaatgtgaggggatattacataacaggatacactaatatattatattgatgagaaagcagtttatttattttgtaaggactgaatctcagagtgaggcagtcaattaatttaaaaagagtyaacggattctctccttcttctataatcctcagtgagagggctttttggtaaggcag

SEQ ID NO: 360282 - DNA, 498 bp, Homo sapiens
tataatctttccatagggtagatgcaggttttcatgaagttattattatttttcgagacaggatttcactcctgtagcccaggctggagtgcaatggcatgatttcagctcactgtaacctccgcctcctgggctcaagtgattctcccaccgcagccttcttagtagctgggactacaggcgcatgccactatgcccaactaatttttgtattttttggtagagatggggtttcaccatgttgcccaggctggtctygaacttctgagcttggacgatccgccagcctcagcctctcaaagtgctgggattaccggcgtgaaccaccgcgcccggcctactggttttcatgaaattataaaatgacccagaaatttaaaaaaaccttttctcctgtggatagacttttgtcattaattttttacagtggataaaattattgtttacatttagatttagccctaggttttagaaaacatcctcctttttcctttctgg

SEQ ID NO: 360283 - DNA, 541 bp, Homo sapiens
atatcctgcaccagagtggtatttttaataactttttttctaaagaagtttgcagttcacagcaaaattgggtgaaagttacagagctcctaaatacccccaccccatacatgcatagcttcctccattatcaacatactccaccagagtagtcaatttttataatcaataaacttatattgatatatcatgatcacccaaagtccrtagtctacattagggttcactcttggtgttgtgcattctatgggttttgagaaatgtataatggcatttataccctcttacagtattgtacacaatagtttcactactgtaaaaattctctgtgctctatctaatcatccttccctcccaccaatccctggaaaccactgatctttccactatcttcaccattttgactctttcaaaatgtcagagagttagaatcatgaagtatgcagcccttttcagattgacttctttcacttaataatatgcattgcattcaagtttcctccctatttttaatggcttgatagctagcttttttagcaag

SEQ ID NO: 360284 - DNA, 607 bp, Homo sapiens
gtcacctgattgtctaaatcaggggtccccaacccctgggccatggaccagtaccagtccgtggcctgttaggaactgggctgcacagcaggaggtgagtggcaggagctagcattatggcctgagctctgcctcctgtcagatcagtggcagcattagattctcttaggagcatgaaccctattatgaactgcacatgcgagaaatctaggttgcatcctccttgtgagaatctaacgcctgattatctgaagtggaacagtttcatcctgaaacccccaccaattcgtggaaaaaatgtctccacaaaaccagtccctggtgccaaaaaggtttgggatcactggtctaaatggcttccctatctgttcaaatagacaatttgagcttaggaaatagcygcatttgggtaacataagtgagtactttatttaaaagaccatacacacattaccccaaacataaaacacatgagagaaggaggctctgctttctaatttttactttttcttgttctataaaactttctgggaaatgtgaaggatatcaaaatcgtactgcatgcagtttcaattgaagcatttgtttacaaaaagaatccagttgt

SEQ ID NO: 360285 - DNA, 526 bp, Homo sapiens
ttttcggtgactttgcttgctgtcttgttttataccctttcagggcttcaacacttctggggaggaaggagtggttcttaagcatttattctcatcttttctgcctcctaaacagaaatgtttcctgttttggaacacaagattggaaaatgttgctttatgaagcagaagctaaccgaaatcataaaaataaataaatataaaataaaaaataagaaagactggccattagcagaagtgacatcattaaagtgatttgtttctgtgttactgatcaaactggattatttcccaaatcttgaccagtgtgacttctcaatccaatcttatcagagaatttaggtgtatttccccatttctgagkgtgaaggtcattttaaacttctgctttgatttctgaagtttcaataatttgagtctctggaattaaccaacagtagaaagataaacaggaaaaaaaaaaggcatacaaatttattacctgcatatgcacaggagcctcacaaaatacagtactccaagaaat

SEQ ID NO: 360286 - DNA, 607 bp, Homo sapiens
gtgacagctatcctcagtgagaatgtaagtggctctgaaaagagcctttggaagcttggaagcaattaagaaacccaagatagagcaggggattatgctcgctcgccacggatacgacgcgcaagctggatgtccttaggcataatagtgacacgcttggcgtgaatagcacagaggttggtgtcttcaaagagacccaccagataggcctcgcacgcctcttgcagcgccatcaccgccgagctctggaaacgaaggtcggttttgaaatcctgcgcgatttctcgcaccaggcgctgaaatggcagtttgcggatgagcagctcagtcgacttctgataacggcggatctcrcgcaaggccacggtgcctggcctgtagcggtggggcttcttcacaccgccagtcgctggagcgcttttgcgcgctgccttggtggccagctgcttccgcggtgccttgccgccggtagacttgcgagctgtctgcttcgtccgggccatagttgagaaagctatgctctgaaagcaagcagctgaatgagcagtggcttctaccagaatttataacgatgatctgatcctgattggtcagaactgttgtagga

SEQ ID NO: 360287 - DNA, 655 bp, Homo sapiens
gtgagttgtttcaggttggggacctgggtgatataaatgggaatgtgatgaaatgatatacataggaatatagatgaaattttagtgttgaaagaggaagagtaggggtgacctgaagatggatyactcataatacagcaagaggatgtagtgtgaggaaagctaaaatgtaaggacttttgagtcacaaaacatccatactcttgcttattttcacacctttcgcagccacccactggacacgatgagatcatatcattttagcattatttgatctttggcaatatgcatttaaggccactttttatccataacaaatgctaataattatggaaatattactgatttccttttcttattgttttcatttttttaatgctagaaaaattgataccatttactttctattctggcatttttcttctctacatccatgctaacttaatttttaaattatctattagctttctgaattcgttagcaatatgaatcttttcatgttttccagtgtcatacaaatacaactgtaaaaggcctctgaaggcatcgtcaataaagagaggcaagttgccttttcttattactcatagaaaggaatagagataaaagtaccctcttagagtttggccttgcattgacggttttaactcacttc

SEQ ID NO: 360288 - DNA, 655 bp, Homo sapiens
gtgagttgtttcaggttggggacctgggtgatataaatgggaatgtgatgaaatgatatacataggaatatagatgaaattttagtgttgaaagaggaagagtaggggtgacctgaagatggattactcataatacagcaagaggatgtagtgtgaggaaagctaaaatgtaaggacttttgagtcacaaaacatccatactcttgcttattttcacacctttcscagccacccactggacacgatgagatcatatcattttagcattatttgatctttggcaatatgcatttaaggccactttttatccataacaaatgctaataattatggaaatattactgatttccttttcttattgttttcatttttttaatgctagaaaaattgataccatttactttctattctggcatttttcttctctacatccatgctaacttaatttttaaattatctattagctttctgaattcgttagcaatatgaatcttttcatgttttccagtgtcatacaaatacaactgtaaaaggcctctgaaggcatcgtcaataaagagaggcaagttgccttttcttattactcatagaaaggaatagagataaaagtaccctcttagagtttggccttgcattgacggttttaactcacttc

SEQ ID NO: 360289 - DNA, 655 bp, Homo sapiens
gtgagttgtttcaggttggggacctgggtgatataaatgggaatgtgatgaaatgatatacataggaatatagatgaaattttagtgttgaaagaggaagagtaggggtgacctgaagatggattactcataatacagcaagaggatgtagtgtgaggaaagctaaaatgtaaggacttttgagtcacaaaacatccatactcttgcttattttcacacctttcgcagccacccactggacacgatgagatcatatcattttagcattatttgatctttggyaatatgcatttaaggccactttttatccataacaaatgctaataattatggaaatattactgatttccttttcttattgttttcatttttttaatgctagaaaaattgataccatttactttctattctggcatttttcttctctacatccatgctaacttaatttttaaattatctattagctttctgaattcgttagcaatatgaatcttttcatgttttccagtgtcatacaaatacaactgtaaaaggcctctgaaggcatcgtcaataaagagaggcaagttgccttttcttattactcatagaaaggaatagagataaaagtaccctcttagagtttggccttgcattgacggttttaactcacttc

SEQ ID NO: 360290 - DNA, 569 bp, Homo sapiens
gaaatgtaagattccaaagcagaatgtttctaattctcaccctctaatttccctgtatacaaaagggaagaaagtcttcttcaaattatcctgtgccatctcctaaacactagcacactcactgtgggtcaaatcaagtgagaaaaaatgtatcatggattgtgtacccagggcttgtctgaaaatatctgtgtgaattcctagggcaggaaagctttatctgcatgaattatcctatgccgatgtaaaatctgtggtcagtacatataattttccatttccaaaattaagacattttcttatggtatcttttcctccaggaaaaagtaaacaagttttaaatcgtatcctattggatcaatgtgacgcttaaaatgaattactcttwaggcattttaaatgtctacattttaaaaactgcacagaaacacagtgatttgaagaatgcttttgctagcttagtaaccctttccagataaggtcaccaattgcatattttatgagatatctactcatccttttagagaggataagaatatgaaacatctatgagtgttcttaatcattgt

SEQ ID NO: 360291 - DNA, 553 bp, Homo sapiens
tccagagactagttgagaggtttctgtagcccaggcaagcataaaactgccacgttgaagccagtaggaaagttcgagacagcctcttgccataatccctgcccctggcacagcactatgattagggagaatcctcaagctccccacttctccctggggaagtaagataagaactatactgatgttcaattttctgatttctctgggggctgcttgaggcactaagtgttggttttctgaaaagacaaaccractgagaaaactttagctagtcttactaaaagaagaaaagggagcatgaagacaaagaaaatgtaaatgaaagaggagactttaaaactgatgccacagaaatacaaaaagatcatgagactactatgaacaatttcacatatataaattggataacttagaaggaatggataagtttctacaaacatacaacttaccaagagtgagtcatgaagaaatgaaaagtctgtacagacctataacaaataaagaaattgaatcagtaatcaaaaatcttttaacaacaacaacaacaaaaaac

SEQ ID NO: 360292 - DNA, 553 bp, Homo sapiens
tccagagactagttgagaggtttctgtagcccaggcaagcataaaactgccacgttgaagccagtaggaaagttcgagacagcctcttgccataatccctgcccctggcacagcactatgattagggagaatcctcaagctccccacttctccctggggaagtaagataagaactatactgatgttcaattttctgatttctctgggggctgcttgaggcactaagtgttggttttctgaaaagacaaaccaactgagaaaactttagctagtcttactaaaagaagaaaagggakcatgaagacaaagaaaatgtaaatgaaagaggagactttaaaactgatgccacagaaatacaaaaagatcatgagactactatgaacaatttcacatatataaattggataacttagaaggaatggataagtttctacaaacatacaacttaccaagagtgagtcatgaagaaatgaaaagtctgtacagacctataacaaataaagaaattgaatcagtaatcaaaaatcttttaacaacaacaacaacaaaaaac

SEQ ID NO: 360293 - DNA, 571 bp, Homo sapiens
gataaacattgatgtaaaactcctcaaccatacactagcaaaccgaattcaataacatatttaaaggaccatacactgtgaccaagtgacatttatccctgggatgcaaggatggttcaacatacaaaaatcaattaatgtgataaaccatattgatagaacaaagaagaaaaatcacgtgatcatgtcaatagatgcagaaaaaacatgcgacaaaattaagcattttttcagggtaaaaactctcaacaaactcaggatagaaggaaattacttccagctactcaaggggctgaggtgggaggatcgcttgagctcgggaggcggaggttgcagtgagccatgattgcaccactgcacaccatcctgggtgacagagggatactctgttcmaaaagaaataaaaataaaagaaagaaagaaaagaaattgaacccttatcttaaaccatctacaaaaatcaactcaaaatgaattaaagacttagatgtaagaccagaaactgtaaaattcctagaagaaaacacaggggaaaagcttcatggcattggtcttggcaatgatttcttgg

SEQ ID NO: 360294 - DNA, 597 bp, Homo sapiens
tttagtttgtcattttcccctgtacttcactgcatcacacttcacatcttccctctctctttatgtccacaacattcagctttttagttccctcccacttcttcccttcaacactctgctcagtatccttttctcttstctccctggtctctcttttgaaaatcccagggctttgggttgcaacaggaagtaagttattgaattgatatttaccactgaaatcacagtgaagttggagaagtcagctggacagtatggcagcaacaggaggaagcaaaacagccagtcagcagccaaaatcttattctgatagcagcttcatgagggtggttgtttctgcttctgtgcttccaatgacacagcttacattttcaatggcattgttctagatgcaggatgcacatgataggatcttgatatttttgcttcaactgactttgcactatttttttctttattcgtgtgcatttgtctccatctatctccaaatcttggatgggtttggttggaaaatctaggtgaaattctttgtctgccacagtcatgtagcagaaaagtgttccagattttatccatctcatgaatgacctttttaca

SEQ ID NO: 360295 - DNA, 597 bp, Homo sapiens
tttagtttgtcattttcccctgtacttcactgcatcacacttcacatcttccctctctctttatgtccacaacattcagctttttagttccctcccacttcttcccttcaacactctgctcagtatccttttctcttgtctccctggtctctcttttgaaaatcccagggctttgggttgcaacaggaagtaagttattgaattgatatttaccactgaaatcacagtgaagttggagaagtcagctggacagtatggcagcaacaggaggaagcaaaacagccagtcagcagccaaaatcktattctgatagcagcttcatgagggtggttgtttctgcttctgtgcttccaatgacacagcttacattttcaatggcattgttctagatgcaggatgcacatgataggatcttgatatttttgcttcaactgactttgcactatttttttctttattcgtgtgcatttgtctccatctatctccaaatcttggatgggtttggttggaaaatctaggtgaaattctttgtctgccacagtcatgtagcagaaaagtgttccagattttatccatctcatgaatgacctttttaca

SEQ ID NO: 360296 - DNA, 597 bp, Homo sapiens
tttagtttgtcattttcccctgtacttcactgcatcacacttcacatcttccctctctctttatgtccacaacattcagctttttagttccctcccacttcttcccttcaacactctgctcagtatccttttctcttgtctccctggtctctcttttgaaaatcccagggctttgggttgcaacaggaagtaagttattgaattgatatttaccactgaaatcacagtgaagttggagaagtcagctggacagtatggcagcaacaggaggaagcaaaacagccagtcagcagccaaaatcttattctgatagcagcttcatgagggtggttgtttctgcttctgtgcttccaatgacacagcttacattttcaatggcattgttctagatgcaggatgcacatgataggatcttgatatttttgcttcaactgactttgcactatttttttctttattcgtgtgcatttgtctccatctatctccaaatctyggatgggtttggttggaaaatctaggtgaaattctttgtctgccacagtcatgtagcagaaaagtgttccagattttatccatctcatgaatgacctttttaca

SEQ ID NO: 360297 - DNA, 501 bp, Homo sapiens
ttatgtcaacaaggatttttatgggaaatacccctgttcctggcattcttggtaatagatctcatcaccatcatggggaatcttggtctgatttttctcatctggaaagaccctcaccttcatatttcaatgtacttattcyttgggagtttagcttttgtggatacttggttatcatccacagtgactccgaagatgctgatcaacttcttagctaagagtaagatgatatctctctctgaatgcatggtacaattttttttcccttgcaatcagtgtaaccacagaatgttttatctcggcatcaatggcatatgatcgctatgcagacatatgcaaacctttactttatccagtcattatgaccaatgaactatgcatctggctatttgtcttgtcatttctaggtggcctttttcatgctttaatccatgaaggttttttattcagactaaccttctgtaactccaacatgatacaacatttttactgtgacattat

SEQ ID NO: 360298 - DNA, 536 bp, Homo sapiens
actttgatggctataagactactgagaaaatacagcataccaggaagattacagtgatgactatcacaaggaaaacaacaaggtactggtatatactcgatagccaaagtgccagtgaaccaaaccaacagaaataaaccaaataaaaagaaaaggttaatggttataacaatctgtgaatttagtattgagcccagagagcagttagttgagaagatttttagatttaagctcaaagcaactttagatgatgaaataaaatggtagttgcaatctaatgatttttctggttagtaatctgaatgtctctgtttatgtcaggtatgtccaatgtcttagcttccatgggccatattggaagaagaataattgtcttgggccacacataaaatacattaacactaatgatagctaaaaaatgatgagctaaaaaaatcacaraaaaattcataatattttaagaaagtttattaatttgtgttgggccacattcaaagccatctttggctgcatgcagcctgtgggccacatgttgg

SEQ ID NO: 360299 - DNA, 604 bp, Homo sapiens
aatgatagctaaaaaatgatgagctaaaaaaatcacaaaaaaattcataatattttaagaaagtttattaatttgtgttgggccacattcaaagccatctttggctgcatgcagcctgtgggccacatgttggayaagcttagtttatgtcattggatgttttggtgaacttccttagcagcccacacagcagcatgcatgaagattgtcctctgaagtttatatcaagttgcccagccctagcttgcagggcttcaggaatagggcagtttataggtagataataaaacctcaaagacaatggacagaacaagaagttaataatgggtgcattacagttatctactgaaacataaatcttccctctatagtcacacccatttctttcaaatatagttatagtaagattaatttgtttacaaaacaagtctactctcattaaacttcaactgagtatttacataagtgcagtaggaataggattgatcatctctttttaagtttaccttgttagaacttttaataaataatctcggattcaactttaaaagcctgtccaggctatgaaatcataccaagaacataaaatcagtgtttacctgca

SEQ ID NO: 360300 - DNA, 497 bp, Homo sapiens
ggagaactaggtgtatgtctaaaatttgagctgcagttttcatgggaaagacaactgtatttgggtttgtctcctaaagggaatcagaaaatgtggccttattaaaactatgttttaattaccttagacaagcttatactaatcaaagcactaagagtaaatttcacatttaactaaagtttacacaaacatgacagaagtgtcatctgtggtggtaaatggtatataaaatattatttcatttgttaaaactagaagtgtttacatgaaatagtgtttatgattccagaagttaaatgccattggggacaatctggacttctcatatatgtccaaatccgcaatacatacaagaacagcttcagtttgttccccagagaatcccttggtactcttatgagaatttcagttttccattcaatcgtcttctggcaaaygtacagagttgtacaattgaatgactcttctgtttaatccaaatttatataaacagcagt

SEQ ID NO: 360301 - DNA, 541 bp, Homo sapiens
aaatgtacagagttgtacaattgaatgactcttctgtttaatccaaatttatataaacagcagtttcctgagtttggggaaagaagcctccaaaaagaatgaataggcaacgaattgctacctgtgttatcggcattcccatgcaattgtattttttctgttttagaaagcctaatggttttagaggctctcttaaatttctttcaaaatatgggtaagaaaaaatatctataattttcattacactttgtagaaatgttgaaaatgctatttaacttaccataattttagattgggtatacaaactgtcaaaatagccaggttgaaattagatarctattactggcttatctctatattttagtttcatgactatgatatggatagaataaatagttataagacaacattcttcctttaatgatattttattttgttgttaagcttattatgactttatttgacaacttgtggcaaactaggacattaaacaattgaaactggttttgattataatgattctaagaattattcagattat

SEQ ID NO: 360302 - DNA, 604 bp, Homo sapiens
cctggggctgggtccggccctgcctctgcttcccattgcaaggggcagccactgagtgctggcaggagcagaggactataatcttacaggctttttcatacctgcattcagcaagtccctagttcttgtctcatatccaagaagaatgaggttatgctgacagctgatgggtgcacaaggtgaagagttttaytgagtgacaaacagctcttagtggagaggtggacctgagttgggtacccccttacctgaagtcagagggtctctcttctctcgcccataggtgggtagtccctaagtgtagctgaatcaggttcttttatgggctcagaatgggggagtgcatgctgattggtttgtgagtatgcaaaataggctaaagtcaccactcaaaggtgggcatgacagtgtaaaaaaccaattagggaagggtagttatttgtaaaataggtgaagggtgaggattaatcagaggaaagtgcaccaaatgggaagagaggttctcaatccagtccatggatttatctgagacttgtagcttggatttcaggctttaatctgtctttggtttgaaggtggggtttcatcagggaccttcccctgt

SEQ ID NO: 360303 - DNA, 604 bp, Homo sapiens
cctggggctgggtccggccctgcctctgcttcccattgcaaggggcagccactgagtgctggcaggagcagaggactataatcttacaggctttttcatacctgcattcagcaagtccctagttcttgtctcatatccaagaagaatgaggttatgctgacagctgatgggtgcacaaggtgaagagttttattgagtgacaaacagctcttagtggagaggtggacctgagttgggyacccccttacctgaagtcagagggtctctcttctctcgcccataggtgggtagtccctaagtgtagctgaatcaggttcttttatgggctcagaatgggggagtgcatgctgattggtttgtgagtatgcaaaataggctaaagtcaccactcaaaggtgggcatgacagtgtaaaaaaccaattagggaagggtagttatttgtaaaataggtgaagggtgaggattaatcagaggaaagtgcaccaaatgggaagagaggttctcaatccagtccatggatttatctgagacttgtagcttggatttcaggctttaatctgtctttggtttgaaggtggggtttcatcagggaccttcccctgt

SEQ ID NO: 360304 - DNA, 604 bp, Homo sapiens
cctggggctgggtccggccctgcctctgcttcccattgcaaggggcagccactgagtgctggcaggagcagaggactataatcttacaggctttttcatacctgcattcagcaagtccctagttcttgtctcatatccaagaagaatgaggttatgctgacagctgatgggtgcacaaggtgaagagttttattgagtgacaaacagctcttagtggagaggtggacctgagttgggtacccccttacctgaagtcagagggtctctcttctctcgcccataggtgggtagtccctaagtgtagctgaatcaggttcttttatggkctcagaatgggggagtgcatgctgattggtttgtgagtatgcaaaataggctaaagtcaccactcaaaggtgggcatgacagtgtaaaaaaccaattagggaagggtagttatttgtaaaataggtgaagggtgaggattaatcagaggaaagtgcaccaaatgggaagagaggttctcaatccagtccatggatttatctgagacttgtagcttggatttcaggctttaatctgtctttggtttgaaggtggggtttcatcagggaccttcccctgt

SEQ ID NO: 360305 - DNA, 604 bp, Homo sapiens
cctggggctgggtccggccctgcctctgcttcccattgcaaggggcagccactgagtgctggcaggagcagaggactataatcttacaggctttttcatacctgcattcagcaagtccctagttcttgtctcatatccaagaagaatgaggttatgctgacagctgatgggtgcacaaggtgaagagttttattgagtgacaaacagctcttagtggagaggtggacctgagttgggtacccccttacctgaagtcagagggtctctcttctctcgcccataggtgggtagtccctaagtgtagctgaatcaggttcttttatgggctcagaatgggggagtgcatgctgattggtttgtgagtatgcaaaataggytaaagtcaccactcaaaggtgggcatgacagtgtaaaaaaccaattagggaagggtagttatttgtaaaataggtgaagggtgaggattaatcagaggaaagtgcaccaaatgggaagagaggttctcaatccagtccatggatttatctgagacttgtagcttggatttcaggctttaatctgtctttggtttgaaggtggggtttcatcagggaccttcccctgt

SEQ ID NO: 360306 - DNA, 556 bp, Homo sapiens
ggtgggtagtccctaagtgtagctgaatcaggttcttttatgggctcagaatgggggagtgcatgctgattggtttgtgagtatgcaaaataggctaaagtcaccactcaaaggtgggcatgacagtgtaaaaaaccaattagggaagggtagttatttgtaaaataggtgaagggtgaggattaatcagaggaaagtgcaccaaatgggaagagaggttctcaatccagtccatggatttatctgagacttgtagcttggatttcaggctttaatctgtctttggtttgaaggtggggtttcatcagggaccttcccctgtctgcctatgaatttgtctgcctcctgctgctatcacctgttccaaacaaaagccccrgaaattttctgtgaaattttgaattcttcttggatcacatgatccaggactctgtgatcttcaccaattcattcaaatgatactggaagctggtgaagctggtagcagaagcaaaatgtgtggtacctaagataggtagcaaagatctacccctcagtcttccagagaaagacaaaa

SEQ ID NO: 360307 - DNA, 556 bp, Homo sapiens
ggtgggtagtccctaagtgtagctgaatcaggttcttttatgggctcagaatgggggagtgcatgctgattggtttgtgagtatgcaaaataggctaaagtcaccactcaaaggtgggcatgacagtgtaaaaaaccaattagggaagggtagttatttgtaaaataggtgaagggtgaggattaatcagaggaaagtgcaccaaatgggaagagaggttctcaatccagtccatggatttatctgagacttgtagcttggatttcaggctttaatctgtctttggtttgaaggtggggtttcatcagggaccttcccctgtctgcctatgaatttgtctgcctcctgctgctatcacctgttccaaacaaaagccccagaaattttytgtgaaattttgaattcttcttggatcacatgatccaggactctgtgatcttcaccaattcattcaaatgatactggaagctggtgaagctggtagcagaagcaaaatgtgtggtacctaagataggtagcaaagatctacccctcagtcttccagagaaagacaaaa

SEQ ID NO: 360308 - DNA, 495 bp, Homo sapiens
cctatttattaatgggatccatgctgaattcattgatctaattactaaacaaagctggattgggaagctggccaaattaatacccaaaatattttgcctctctggcataaagactatttcaagctggttattttaaggtagcattagaagagaaatttaaaggaatttccatttttaggatgtctccctttctggtccagaaagagatggaggactaaatcactaaataatggagaaagaattgattcaatctacaccacaaacctgacctttttaaggtgtttrtcttggttattttgtcttaactgggcttttaccaacacattttttatttttttgttttcacagatgactgtacctaagcctgaattctaagcattgtgcctttgtaatattaaattttctagcctgtctgtgctagggcatgagggtaaacaggttaaaaatctatatgcaaatttcaagaagatgacacgtttgaaagaaaaaaaaagg

SEQ ID NO: 360309 - DNA, 543 bp, Homo sapiens
aatgactatgtaaggtaaattctggataactagaacattaaatgctttaaaactgggtttaaagctttaattcatttctatggttatataagaaatctttctgatgattctgacataaaggtttattctgtgtagtcaacatttctgattaaaacttttaagatctgttaattaaatattaactcctctatatcatcaccacttatggcagtaatttcattgatcatattaaatataggcatataaataaatatataaaattagtacaaagaaataaatatatttttattgagtattttatttataaataatactagtaattcacatatatacatctcagaaaatatacagcaaatatacttcccctaccttttttgacatttatagttttaaaaagtacctgcataaattgactttgagaatgtgtgattatattgttaattgggtttgaatggaataaaccaattatataaaaatttacataamaagcggaattattgccctttgttctttatatagtctgcctcaggatcccgtctttgg

SEQ ID NO: 360310 - DNA, 543 bp, Homo sapiens
aatgactatgtaaggtaaattctggataactagaacattaaatgctttaaaactgggtttaaagctttaattcatttctatggttatataagaaatctttctgatgattctgacataaaggtttattctgtgtagtcaacatttctgattaaaacttttaagatctgttaattaaatattaactcctctatatcatcaccacttatggcagtaatttcattgatcatattaaatataggcatataaataaatatataaaattagtacaaagaaataaatatatttttattgagtattttatttataaataatactagtaattcacatatatacatctcagaaaatatacagcaaatatacttcccctaccttttttgacatttatagttttaaaaagtacctgcataaattgactttgagaatgtgtgattatattgttaattgggtttgaatggaataaaccaattatataaaaatttacataaaaagyggaattattgccctttgttctttatatagtctgcctcaggatcccgtctttgg

SEQ ID NO: 360311 - DNA, 481 bp, Homo sapiens
tgggggaactggcaaccctgaagggaaggacacaagcctgagtggatttaccacctgctgattgaagagccccaggagcttgagggaacataggtggtagcaaagaagaaattaaagaaggccttgggcgagacctggtgctgtgctggcttcaggtctcacatagtgcagtcctaaaggtggtggccacaggagtgcttgggtcactccatccccaactccaaatgtctcagaatagagagagagagagagaccttttgtatgggagaaagtaagggaagagaacaagagtttctgcctggtaatccagtaaattatcccaaatctttttcgagacccttaaggtggtacctttacaagaccgcaagaaccacagkgttactgggcttgagatgccccgtaaaacagatatagcttagatcacaacactcaaatcttttcaaacatctagaaagcctccccaagaagaatgggtacaaag

SEQ ID NO: 360312 - DNA, 458 bp, Homo sapiens
tacaaccaggagagagtggcatgacacatcgaaagtactgaaggaaaaataacttttaccctagaatagtttatctggtgaaaatatccttcaagagttaaggagaaataaagactttcccagacaaacaaaatatttcatcaataccaggcccatcctacaagaaatgctaaagagagtacttcaatcagaaagaaaagaacattaatgagcaataaataatcacctgaaggtacaaaacttaccggtaatagtaagtacacagaaaaacacagaataggataaaactgtaattatggtgtttaaacaattctaatcctaaacagaaagamttaacaatgaaccaatcaaaaataataactacatcaacatttcaagacatagtacaataagatataaacagaaacaacaaaatgttaaaaggcagagagatgaagttaaggcatagagttcttact

SEQ ID NO: 360313 - DNA, 588 bp, Homo sapiens
aacataaacatcatttcattgtggacaattctagttttaacaattgaaataatattttatgcactattaaccaccacagatgacayttctgtcatgtttgtacaaactttagtttacatatgaaaattactcagtgctttgattagtataatcttgtctgaggtaatcaaaacataatattaataaggccaaagtttctgattcccttcagaagccaaacctaaatacaattgtcttccccatgaaaattgcagctcaaattttagacacatacttagttctcccattttatgataaaatatgatgggaaatcttattaaaggccaagggatgagccaatgaaaaacaaagacaaggactgcagtgggaggtgccctagaactttgcttctcaaattataatagctaagacctctctaaatgcagattctattttaataattctggtgtgagttttccaggagcctttatttccaaaaaaaagtaatgtccatggacatttgccatccaacaggccttcatcatgggaggacctggattatcagagaaccttgatcattggagaaacaataaatagcaaatgtggtgg

SEQ ID NO: 360314 - DNA, 588 bp, Homo sapiens
aacataaacatcatttcattgtggacaattctagttttaacaattgaaataatattttatgcactattaaccaccacagatgacacttctgtcatgtttgtacaaactttagtttacatatgaaaattactcagtgctttgattagtataatcttgtctgaggtaatcaaaacataatattaataaggccaaagtttctgattcccttcagaagccaaacctaaatacaattgtcttcmccatgaaaattgcagctcaaattttagacacatacttagttctcccattttatgataaaatatgatgggaaatcttattaaaggccaagggatgagccaatgaaaaacaaagacaaggactgcagtgggaggtgccctagaactttgcttctcaaattataatagctaagacctctctaaatgcagattctattttaataattctggtgtgagttttccaggagcctttatttccaaaaaaaagtaatgtccatggacatttgccatccaacaggccttcatcatgggaggacctggattatcagagaaccttgatcattggagaaacaataaatagcaaatgtggtgg

SEQ ID NO: 360315 - DNA, 609 bp, Homo sapiens
agtatttatttatttatttattttttgcttatttgtttgtttatgcaaatagtattgttattaggttaaaataatgggttgtagatggaaataaatgaactattttcaagccctgtggtaacctcaagccaaaaagcacacaccagatacagaaaaaataaaaatcaagaaactaaatcatatcaccagagaaaatcattttcattagaggaagacaggaaggaaagaaagaaaaaagagaagaccacaaaataagcagaaaacaaatgaaaaatggtaggagtaagttgttacttatcaataataatattaaatgtattacaaatgggctaaactctccaatcaaaatatggagtgactgaataaataaagaaacaagacccattgatctgttgcccacagaaaacacacttcacctacaaagacacacatagactgaaaacaaagggaaraataataatattttatgccaatggaaatcaaaagagagcagtagtcactatacttatatcagacaaaatagatttcaagacaaaaactataagaaaagtgagttactatataatgataaaggaataaattcagcctaaggatataacaattttaatt

SEQ ID NO: 360316 - DNA, 609 bp, Homo sapiens
agtatttatttatttatttattttttgcttatttgtttgtttatgcaaatagtattgttattaggttaaaataatgggttgtagatggaaataaatgaactattttcaagccctgtggtaacctcaagccaaaaagcacacaccagatacagaaaaaataaaaatcaagaaactaaatcatatcaccagagaaaatcattttcattagaggaagacaggaaggaaagaaagaaaaaagagaagaccacaaaataagcagaaaacaaatgaaaaatggtaggagtaagttgttacttatcaataataatattaaatgtattacaaatgggctaaactctccaatcaaaatatggagtgactgaataaataaagaaacaagacccattgatctgttgcccacagaaaacacacttcacctacaaagacacacatagactgaaaacaaagggaagaataataatattttatgccaatgraaatcaaaagagagcagtagtcactatacttatatcagacaaaatagatttcaagacaaaaactataagaaaagtgagttactatataatgataaaggaataaattcagcctaaggatataacaattttaatt

SEQ ID NO: 360317 - DNA, 455 bp, Homo sapiens
attatatgccaataaattggaaaacctggaagaaatgaacaaattcctggacaaattcaatttaccaagattgaaccaggaagaaatccaaaacctgaacagaccaataacaagtaacaatactgaagctgtaataaaaagacatccagtaaagaaaagccagggatctgatagcttcactgctgaattctaccaaacatttaaagaactaataccaatcctactcaaactatttcaagaaatagacaaggaacctcatttgacaagaccagaattattctgataccaaaaccaaacaaatacacatcaaaaaaaagaaaactacaggmcaatatctctggtaaatattgatcaaaaatcctcaacaaaatattagcaaactgaattcaacaatacatgataaagatcattcattatgaccaagtgggatttatccctaggatgcaggtatggtt

SEQ ID NO: 360318 - DNA, 455 bp, Homo sapiens
attatatgccaataaattggaaaacctggaagaaatgaacaaattcctggacaaattcaatttaccaagattgaaccaggaagaaatccaaaacctgaacagaccaataacaagtaacaatactgaagctgtaataaaaagacatccagtaaagaaaagccagggatctgatagcttcactgctgaattctaccaaacatttaaagaactaataccaatcctactcaaactatttcaagaaatagacaaggaacctcatttgacaagaccagaattattctgataccaaaaccaaacaaatacacatcaaaaaaaagaaaactacaggacaatatctctggtaaatattgatcaaaaatcctcaacaaaatattagcaaactraattcaacaatacatgataaagatcattcattatgaccaagtgggatttatccctaggatgcaggtatggtt

SEQ ID NO: 360319 - DNA, 418 bp, Homo sapiens
aaaagggcgactgtagtaaataatttttaaaaactatttattaagctttaagttctgggatacatgtgcagaaagttccggtttgttacatatgtatacatgtgccatggtggtttgctgcacccatcaacccgtcatctaggttttaagctctgcatgcattaagtatttgtccttatgctctccctccctacggcycccacaccccaacaggctctgatgcttagtgttaccctccctgtgtccatgtgttctcatggtttaactcccacttatgagtgagaacatgcagtgtttgattttctgttcttgtgtcagtttgctgagaatgatggtttccaacttcatccatatccctgcaaaggacatgaacttgttcttttttgtggcagcatagtattccatggtgtatatgtgc

SEQ ID NO: 360320 - DNA, 418 bp, Homo sapiens
aaaagggcgactgtagtaaataatttttaaaaactatttattaagctttaagttctgggatacatgtgcagaaagttccggtttgttacatatgtatacatgtgccatggtggtttgctgcacccatcaacccgtcatctaggttttaagctctgcatgcattaagtatttgtccttatgctctccctccctacggcccccacaccccaacaggctctgatgcttartgttaccctccctgtgtccatgtgttctcatggtttaactcccacttatgagtgagaacatgcagtgtttgattttctgttcttgtgtcagtttgctgagaatgatggtttccaacttcatccatatccctgcaaaggacatgaacttgttcttttttgtggcagcatagtattccatggtgtatatgtgc

SEQ ID NO: 360321 - DNA, 418 bp, Homo sapiens
aaaagggcgactgtagtaaataatttttaaaaactatttattaagctttaagttctgggatacatgtgcagaaagttccggtttgttacatatgtatacatgtgccatggtggtttgctgcacccatcaacccgtcatctaggttttaagctctgcatgcattaagtatttgtccttatgctctccctccctacggcccccacaccccaacaggctctgatgcttagtgttaccctccctgtgtccatgtgttctcatggttyaactcccacttatgagtgagaacatgcagtgtttgattttctgttcttgtgtcagtttgctgagaatgatggtttccaacttcatccatatccctgcaaaggacatgaacttgttcttttttgtggcagcatagtattccatggtgtatatgtgc

SEQ ID NO: 360322 - DNA, 588 bp, Homo sapiens
acagaggtaaatcccaagaattctgctagccatcaagggatcttttattccacttcattgggaaagagtgaattctacttcttgtagaaaatcaactcacatatcaggtaaagaaataaacaaaaatggaaatgcaatgaggagaaaaactgagaagggagttaacagtgaagatcttgccaaagcctaaaagggtactctttacgtagtgtgcttgcaaaagtaagaagaggtaagttgcctctaactttctacaatggtttctaatgccttttccagctgtggctgtatgtatttagataatctgaaaagctcccttaattcagaaaattaaaagatgaactagaagaactaagctgaagtaggcattgagaagaaaagataagtggcataataagaacaaaatggccttaatcttcccagaaaaaaaaatgaagctatgagatttttaatattcagtgatgttgcaagattattggaatgattttttgacaaccagagactttaaattcttattaccaaagttcaaataatgatcakatgatctgacatcatagtgcctagtgagtgaagggaaaaaacatgaaa

SEQ ID NO: 360323 - DNA, 574 bp, Homo sapiens
aaactagacctctgtctctcaccatatacaaaagtcaaaatggactgaagactgaactagaatacctgaaactatgaaactactacaagaaaacaatgggcagcacattggactgggcaaagagttcttgagtaataccccaaaagcagaggcaatcaaagcaaaaatggataaacagaatcatatcaagttaggaagcttctgcacagcaaacaatcaaaaaagtgaagagacaacccacagaatgggagaaaatatttgcaaactacccatctgacaaagtattaattatcagaatacataagaaacccaaacaactaataggaaaaaaatctaataacctgattaaaaatcggcaaaagatatgatagacatttctcaaaagaagacatacaaatcactaacaggtatatgaaaagatggtcaatatcaatgatcgtcagagaaatacaaatcaaaactacaakgagataacatcttactccagttaaaatggcttatatccaaatgataggcaatgagaaatgctggttagtgtgtgtagaaaaggaaactgccatatactgttattggg

SEQ ID NO: 360324 - DNA, 607 bp, Homo sapiens
gctcctttcatttgcaacaacatgtataaaactggaggtctttatgttaagtaaaataagtcaggcacagaaagacaaactttgcatgttctcacttatttgtgggagctaaaaattaaaacgttgaactcatggagatagagtagaagaatgtctaccagaggttggtgaggatagtaggcaggaaggagtggttatggttaatgggtacaaaaatatagttaagtagaatgaataagatgtagtatttgatagcacaacattgtgactgcagtcaacaataacttattgtacatttaaaaataacagagtataatcggattgtttgtaacacaaagaaagaataaatgcttgaggcaattgawaacccatttaccctgatctgattattatgaattgtatgcctctgttaaaatatctcatgtacccaacaaatatataccacctactacgtacccacaaaattattttaaaattttttaaaagttcatctataagatgtgcacttgctataatggtatgatatttaccacatctactaaagtaccttctacatgagacttatatgagggcaatagataatggtaacatcatgatatccccttta

SEQ ID NO: 360325 - DNA, 607 bp, Homo sapiens
gctcctttcatttgcaacaacatgtataaaactggaggtctttatgttaagtaaaataagtcaggcacagaaagacaaactttgcatgttctcacttatttgtgggagctaaaaattaaaacgttgaactcatggagatagagtagaagaatgtctaccagaggttggtgaggatagtaggcaggaaggagtggttatggttaatgggtacaaaaatatagttaagtagaatgaataagatgtagtatttgatagcacaacattgtgactgcagtcaacaataacttattgtacatttaaaaataacagagtataatcggattgtttgtaacacaaagaaagaataaatgcttgaggcaattgaaaacccatttaccctgatctgattattatgaattgtatgcctctgttaaaatatctcatgtacccmacaaatatataccacctactacgtacccacaaaattattttaaaattttttaaaagttcatctataagatgtgcacttgctataatggtatgatatttaccacatctactaaagtaccttctacatgagacttatatgagggcaatagataatggtaacatcatgatatccccttta

SEQ ID NO: 360326 - DNA, 627 bp, Homo sapiens
tacagtgtttataaaataaagtccacagtagtggacagaaatgtcccaggccttcacattcactcatcacttactcactgactcacctagaactacttccaatcctgcaagctccatttacggtaagttgtataatttttaaacttttaggttgttttattactctaccttttatatgtgtggatatatttagatatacaaatccttaccattgtattacaattgcctacagtattcagtatagtaacatgatgtacaggtttgtagcccaggagcaataggtgatacygtatagcctaggtgtgtgggcaataccatctagattttttgtaagtacactctaggatgttttcacaatgacaaaatcacttacttcttgcaagaacactataggatgtaatcataatgacaaatttctcagaacatattcccatcatgaagtgatgcatgactgcttgtaactatccatatgcttgttaatttgtatgtacagattttgtgatatacatatagatacacatacacataaaaatatataaatataaaatctaaataaataagtgtgatatacagtcatccttctgaatccctggggcttctggatctgtgggggatctagcactgccc

SEQ ID NO: 360327 - DNA, 627 bp, Homo sapiens
tacagtgtttataaaataaagtccacagtagtggacagaaatgtcccaggccttcacattcactcatcacttactcactgactcacctagaactacttccaatcctgcaagctccatttacggtaagttgtataatttttaaacttttaggttgttttattactctaccttttatatgtgtggatatatttagatatacaaatccttaccattgtattacaattgcctacagtattcagtatagtaacatgatgtacaggtttgtagcccaggagcaataggtgataccgtatagcctaggtgtrtgggcaataccatctagattttttgtaagtacactctaggatgttttcacaatgacaaaatcacttacttcttgcaagaacactataggatgtaatcataatgacaaatttctcagaacatattcccatcatgaagtgatgcatgactgcttgtaactatccatatgcttgttaatttgtatgtacagattttgtgatatacatatagatacacatacacataaaaatatataaatataaaatctaaataaataagtgtgatatacagtcatccttctgaatccctggggcttctggatctgtgggggatctagcactgccc

SEQ ID NO: 360328 - DNA, 627 bp, Homo sapiens
tacagtgtttataaaataaagtccacagtagtggacagaaatgtcccaggccttcacattcactcatcacttactcactgactcacctagaactacttccaatcctgcaagctccatttacggtaagttgtataatttttaaacttttaggttgttttattactctaccttttatatgtgtggatatatttagatatacaaatccttaccattgtattacaattgcctacagtattcagtatagtaacatgatgtacaggtttgtagcccaggagcaataggtgataccgtatagcctaggtgtgtgggcaataccatctagattttttgtaagtacactctaggatgttttcacaatgacaaaatcacttacttcttgcaagaacactataggatgtaatcataatgacaaatttctcagaacatattcccatsatgaagtgatgcatgactgcttgtaactatccatatgcttgttaatttgtatgtacagattttgtgatatacatatagatacacatacacataaaaatatataaatataaaatctaaataaataagtgtgatatacagtcatccttctgaatccctggggcttctggatctgtgggggatctagcactgccc

SEQ ID NO: 360329 - DNA, 411 bp, Homo sapiens
ctgcaagacaaagtctcctttattcttccgttttttttcctcaagcagaaygaatgttccactatagccaccacagctgtgaatgtaatgggtcacatctgaaaccagcacatctctgagtcttacccaaggcccatggtgagtactgcctgggtaccactgatgactattcagggcccaagagcactttaaatagcaagggatgaatcctgccaggactgggctcttcccttcaaggcagcaggttcctttctggcccagggtgtgtctagaaatgtcatccaggaacttggacctggaactggggcctcctggtgccctgtcctactctgattgagctggtatccaaattgcagatcaaagtcctctttactttttcctttctgctcctcaagtggaaggaaggaatga

SEQ ID NO: 360330 - DNA, 446 bp, Homo sapiens
aacaaatatgtatagagagacacagagagactatatatgtatatgtatatgtatatatatatatakagagagagagagagagagagagagagagaaagagaaatctatgaatacttaaatgtcaagattaagtaaaaaatacatcttcataataaagagtatttctactgctattggtagttccatagggtgctttcaacccaacatgagcagtgttataggcaacatatgaaatttcaatatgatattattctttatgtctaaatactcattaaataatacatatatatttctataatttctttttaaaaaatacagaagaatatcttgtccaaaatgggggggtttcccaagtgtataatttatctattttctaatatcccactaaatacaaaaataatgtactaaaaggaataaatctataacacaagtgagaatgagattat

SEQ ID NO: 360331 - DNA, 574 bp, Homo sapiens
cccacaatatcaccccttactccaaaatcttttttcagtttaatctctcccgctctaggttcccacactgcccctaatcctgctcaaagcagccctgagaaacattgcccattatctctccatattaccccccaaaatttttgccaccccaacacttcaccactattttgttttgtttttcttactaatataagaagacaaaaatgtcaggcatctgagcccaagctaagccatcakatcccctgtgacctgcacatatacatctagctgtcctgaagcaactgaagaaccacaaaagaagtgagaatagtcggttcctgtcttaactgatgacattccaccattgtgatttgttcctgccccaccctaactgatcagttgaccttgtaacattccttctcctggacagtgaatctcaggaactccccaccaagcaccttgtgaccctgcccctgcccgcaagagaacaactccctttaactgtaattttccactacctacccaaatcctataaatctgccccacccctattccctttgctaactccttttttggactcagtctgcctgcaccc

SEQ ID NO: 360332 - DNA, 555 bp, Homo sapiens
aaataaaactatctttactcatagatgacatgtttgccagtgtagcaatccttaagaatcttcaaaaaccatgattagaagtaataaacaagtttatcagggttgcatatataagatcaatatacaaaaatcaattaattgtatttccatatatcagcaatgaacatccaaaaataaaatcaagaaaatttattccatcaaatagcatcaaatatgagagattacctaatgggtacaatatatgttattcgggtgatggaaaacctaaatctctgacttgtgtgtaacaaaattacacttgtaccccatacatttgtataaataaattttaaaatatcgaatagaataaaatacttggcaataaattaaacaaaatgggttatagaccaaaatctaaatgcagaactgtaagactcctagaagataacataggaagaaarccagatgaccttgtatatggtgatgactttttaaatataacaccaaaggcatgaaataaaagaaccaccatgagtactatgcaataaaaaatgtattatataggtcatggtggat

SEQ ID NO: 360333 - DNA, 534 bp, Homo sapiens
ctcatcatcaatgtgactcaaactaatcatcctttaaccctccagtttgatgctcgttcagtcatcccatgtgaagacgaacgagctcagaggcagctatcaaatgtagataagtatctatgtccataccgtagtggctcaaccaagtataagtatggagtcttaaaaagtccctgtggtaactggacggatgttggtggaccaccaaatgtggagggtggacagtcaggcccccttcttcaaacaagttgcaaaaactgaaacaggaactccaacttgatttgtggtcccaccccaccaaattgtaagtcattgcagtgtaacccctttttgctaattatagatattccccaaacaacggcccaatggccaatgaccatattcgaatggtatgggttyggagcagatgttacagaatgggaccccataggaatcttctctctgaggttggctagaccatcggctaagaacaataaaaatccatacccagagtccgggaatgtatgggaaccaacactctctgcaaacatatca

SEQ ID NO: 360334 - DNA, 348 bp, Homo sapiens
ctacttacaacacattaacaggatcatgaaaagcatagctattcaagtaaccaaataattatgcaatcaatgtttttcctcatctctaaagcatagtaatggactgattattttaagaatacaactcggtgacaaatagtttatgtttaactcagttttggtttgttgtttgttaaggccattgyttaggataatgaaaacaagaggaggagaaacaagaatataaaaaagaaatagaagcagcagcataagaaaatgaagaggaacaagaagatgatgattagaagaagaaaaaacagactgaaagaaaggaagaagaacaggtgtgggaattagaaagcctattat

SEQ ID NO: 360335 - DNA, 608 bp, Homo sapiens
ctgtcagccaggccccaaattctctccacgtggtctctcatctgccatcagctggagctgacttatacctgaatgagagcttgttttacattatcaggggttttgtgaggtagttattatacacttggtggcttgaaatctgccatagtgggagtatttgtaccayagacattggaaaatactacatatcagagccttctctgccccctttaccccaagaaacagctcctaaacatttaccaggacatcattgcttcttgtcttccaaaagactggcttaggctcaattccatggtggcctcagtattccaatagtaacaatagagggcagtcccaatgcaaaactctcttgtgctattattcctttcagcagaacaagacacatggccaagtccagagtcagtgcagaataccactcatgaatttaaaggaaccaacgattgattcacagagtaactggggtgaatctcaaaggcattatgttgagtaaaagaagccagtgtcaataaaaacatatgtatgaccccattataacattctcattttttaaaaaaagagttttatggtatttttgagaggtaaaaagtaaccacctcgcagccgcttgt

SEQ ID NO: 360336 - DNA, 601 bp, Homo sapiens
aaattaagctgactatatctgcatttgcctaataggtttattttgcaacactagaaactgggattgaattctaaattgtgccacaacttgtgcttatacttttacaaacatgaatgactattttacatatcccctgaattgtgtgagttgaccttatatccacatttttaaaatgttttatcccagtgacttrtttacaaatatagatgtccatcaagaactaatcaataaaatactatttaagttaaagcaactgataaactttaattttaaccacaaattttttttattaaaaaattgcattcacccttattaccttgaatgtgatataatcataatcaggatcttctgattcttcctttactgtcacagctgccacttccagggaaatgactataaaagcaaatgaaattatatgattgcatgtcagggctttcagctaaactgtgtagggaaatcctctccatgctccctataaatacagcaatgaatacccattttaaataaagactttaaaagtctttgaaaggacaaaagttcaccaggtagcagagtgtaggaatcacctatagtcccaaccgagacaaagttttaaccattt

SEQ ID NO: 360337 - DNA, 601 bp, Homo sapiens
aaattaagctgactatatctgcatttgcctaataggtttattttgcaacactagaaactgggattgaattctaaattgtgccacaacttgtgcttatacttttacaaacatgaatgactattttacatatcccctgaattgtgtgagttgaccttatatccacatttttaaaatgttttatcccagtgacttatttacaaatatagatgtccatcaagaactaatcaataaaatactatttaagttaaagcaactgataaactttaattttaaccacaaattttttttattaaaaaattgcattcacccttattaccttgaatgtgatataatcataatcaggatcttctgattcttcctttactgtcacagctgccacttccagggaaatgactataaaagcaaatgaaattatatgattgcatgtcagggctttcagctaaactgtgtagsgaaatcctctccatgctccctataaatacagcaatgaatacccattttaaataaagactttaaaagtctttgaaaggacaaaagttcaccaggtagcagagtgtaggaatcacctatagtcccaaccgagacaaagttttaaccattt

SEQ ID NO: 360338 - DNA, 452 bp, Homo sapiens
ttttgccgtgttgcccaggctggtctctaactccttgtctccagcaatccacatgccacagcctgccaaagtgctgagactataggcatgagtcatcacactgagccataagatattttttgaactcatgtgaaagcatagttaaaagccccacaatggcaggatctgcaacagtgagaattcagatataatgcaactgacaactggctcccaccctctgcaagaggttaagcccagagacattgactatttttcaacaatgtaaaattgtgtttcatatgattaaaatttttggaccccacatataacctaaagacaggttatatagcttaaaggaacatataagctataaatcccttaatatacaaactagtaccaggcacggtgatgcatgcttgtaatcctagcactttgggaggccaagttgagtgractacttgagcccaagagtt

SEQ ID NO: 360339 - DNA, 504 bp, Homo sapiens
cttttcaacagatgctgctggtacatcacatgcaaaatggtgactttaaactcttacctcacaatatgtgcaaaaaataactcacaatggatcttacccctaaacataagagctaaaactataaatttcaggaagaagatctaagtctaaacctttgtgacmttaggttggacaaagattctttagatacaacaccaagagcatagtaataaaaggaaaacttgaaaaactgaatttcaccaaaacaaaagcttttgagcaataagggacaccaccaagaaaatgaaacaactagccagacagaagcagtatgtgcagaatcttacttctgataaaagacttgtatccagagcatatcgagaactcctgtaactcgtaaaagaagaaaaacacaatttttaaatgggcagacacttacatagacatgtcaccaaaaaaaaaaaaagtaaaacaaaataaaatcttcatgcctttgggttaggcaatggtttcttaaatatgaag

SEQ ID NO: 360340 - DNA, 504 bp, Homo sapiens
cttttcaacagatgctgctggtacatcacatgcaaaatggtgactttaaactcttacctcacaatatgtgcaaaaaataactcacaatggatcttacccctaaacataagagctaaaactataaatttcaggaagaagatctaagtctaaacctttgtgaccttaggttggacaaagattctttagatacaacaccaagagcatagtaataaaaggaaaacttgaaaaactgaatttcaccaaaacaaaagcttttgagcaataagggacwccaccaagaaaatgaaacaactagccagacagaagcagtatgtgcagaatcttacttctgataaaagacttgtatccagagcatatcgagaactcctgtaactcgtaaaagaagaaaaacacaatttttaaatgggcagacacttacatagacatgtcaccaaaaaaaaaaaaagtaaaacaaaataaaatcttcatgcctttgggttaggcaatggtttcttaaatatgaag

SEQ ID NO: 360341 - DNA, 504 bp, Homo sapiens
cttttcaacagatgctgctggtacatcacatgcaaaatggtgactttaaactcttacctcacaatatgtgcaaaaaataactcacaatggatcttacccctaaacataagagctaaaactataaatttcaggaagaagatctaagtctaaacctttgtgaccttaggttggacaaagattctttagatacaacaccaagagcatagtaataaaaggaaaacttgaaaaactgaatttcaccaaaacaaaagcttttgagcaataagggacaccaccaagaaaatgaaacaactagccagacagaarcagtatgtgcagaatcttacttctgataaaagacttgtatccagagcatatcgagaactcctgtaactcgtaaaagaagaaaaacacaatttttaaatgggcagacacttacatagacatgtcaccaaaaaaaaaaaaagtaaaacaaaataaaatcttcatgcctttgggttaggcaatggtttcttaaatatgaag

SEQ ID NO: 360342 - DNA, 504 bp, Homo sapiens
cttttcaacagatgctgctggtacatcacatgcaaaatggtgactttaaactcttacctcacaatatgtgcaaaaaataactcacaatggatcttacccctaaacataagagctaaaactataaatttcaggaagaagatctaagtctaaacctttgtgaccttaggttggacaaagattctttagatacaacaccaagagcatagtaataaaaggaaaacttgaaaaactgaatttcaccaaaacaaaagcttttgagcaataagggacaccaccaagaaaatgaaacaactagccagacagaagcagtatgtgcagaatcttayttctgataaaagacttgtatccagagcatatcgagaactcctgtaactcgtaaaagaagaaaaacacaatttttaaatgggcagacacttacatagacatgtcaccaaaaaaaaaaaaagtaaaacaaaataaaatcttcatgcctttgggttaggcaatggtttcttaaatatgaag

SEQ ID NO: 360343 - DNA, 593 bp, Homo sapiens
tgcacccggccccttatctatagttaataatgcttcaatcaacataggagtgaaaatatctcttcaagatagtgaatttatattctttggatatttacttagatgtgagattgctgaatcacatgatagttttatttttaattatttgatgaacctccatgccatcttccataacggctktaccaatttacattcctggtgatagtgtacaaggtcccttttctctatattcttgataacacttgctttcttttgaatttttgataaatatcaccttaatatgtgtttgaatgctaactcactgtggttttgatttgcatttttctcagaattactaatggcttctttaaaaaaaactagttttttggctactttttaaaagtatgtgttacgttttgttgttatttttattttgggggcttaagttttatgagtttcttgcagattttgaacattaatcctttatctgatatttggcatacaggtatttttctccaattctgtagatagcgttttaatgtctatgatggtcttttgctatgcagtagaaactttttagtttgatgtagtcctacttttttttcttgtgcttt

SEQ ID NO: 360344 - DNA, 593 bp, Homo sapiens
tgcacccggccccttatctatagttaataatgcttcaatcaacataggagtgaaaatatctcttcaagatagtgaatttatattctttggatatttacttagatgtgagattgctgaatcacatgatagttttatttttaattatttgatgaacctccatgccatcttccataacggctgtaccaatttacattcctggtgatagtgtacaaggtcccttttctctatattcttgataacacttgctttcttttgaatttttgataaatatcaccttaatatgtgtttgaatgctaactcactgtggttttgatttgcatttttctcagaattactaatggcttctttaaaaaaaactagttttttggctactttttaaaagtatgtgttacgttttgtygttatttttattttgggggcttaagttttatgagtttcttgcagattttgaacattaatcctttatctgatatttggcatacaggtatttttctccaattctgtagatagcgttttaatgtctatgatggtcttttgctatgcagtagaaactttttagtttgatgtagtcctacttttttttcttgtgcttt

SEQ ID NO: 360345 - DNA, 573 bp, Homo sapiens
cttgactatgcagtttcctgtggttgagagcaattcctaattgagtgatgaagctgtaaatggttttcttcataaactgggaaatggttttcttggaggccccgaagaggaaaactgacagagtatcacaataacagctacaatatcccagatctaaaacaatttaaaaatatttattagggtgattcatttctttatttctttcaaaacatgtttacaaaaacatgytttgaaaacattaaatatctttgatatagtttagtaggaaaatactcaaaatcaaaattgtaaaaacaatgtttcttatacaattaaactgcatttgaagtagatggtaatgtaataccaatcttgaaaagtttttcttttctaaaacaaggtgccaatgatgtactacactgtaattaacactgaaattctgggaactacttcatcatttccagtcactatagttgcaaagctgggaagtaaacactgtacatcagatgattgctttcccatggaatacaacaggctgaagttcccttcattatacaaattaataaaattcaaactatataaaatatatattag

SEQ ID NO: 360346 - DNA, 573 bp, Homo sapiens
cttgactatgcagtttcctgtggttgagagcaattcctaattgagtgatgaagctgtaaatggttttcttcataaactgggaaatggttttcttggaggccccgaagaggaaaactgacagagtatcacaataacagctacaatatcccagatctaaaacaatttaaaaatatttattagggtgattcatttctttatttctttcaaaacatgtttacaaaaacatgttttgaaaacattaaatatctttgatatmgtttagtaggaaaatactcaaaatcaaaattgtaaaaacaatgtttcttatacaattaaactgcatttgaagtagatggtaatgtaataccaatcttgaaaagtttttcttttctaaaacaaggtgccaatgatgtactacactgtaattaacactgaaattctgggaactacttcatcatttccagtcactatagttgcaaagctgggaagtaaacactgtacatcagatgattgctttcccatggaatacaacaggctgaagttcccttcattatacaaattaataaaattcaaactatataaaatatatattag

SEQ ID NO: 360347 - DNA, 622 bp, Homo sapiens
agttatgtttagagggagttgggctaaacatacagcattcatttaaaatgaaggcctcccgtcacactttgctgatggtatttaagtattgaaagccaactttttctacctgcttactattatgtcatagtagcatgatttcccagacagcagaaactttgtctttttgtacatagctaggcatttgatgcttgtaacagtgacttctcgataattattcattgccaggaaagataattactttaaaaatttatttrggaaattatttagcaaatagtaaataaacagtattagctggttgctattatttctgaatatcagtttccctaaattttctcatctgaaaaatggagatatgtatttcacagcagcattgtgagagacaatagagtcaatatagataaaattctccaaagaccaaaactttatctagctcatatgttctgcatgagtattcatttttttaattactgtatctttttaactcattatgactaaaattaagtatttttttctctttcaagaccttatgcttctcctatgttcccaatatgctggacatcaggtgtgggtaataatagtaccatgattttcctttggagaaatcagtccaaatgacttt

SEQ ID NO: 360348 - DNA, 621 bp, Homo sapiens
tcatttaatatctaaattatgtatatatatttacatacctatattttacttgyaattcgatgaagataaggctttgtatgtatgctctgtgtaaaatatgctgtctatattctcatgattacaaagaatagtttgagtaatggaatgtatttgaattttacatatgtctttcatttactagcagaaataaaatcttagcacttgatttagtaaattcctccatttaaaataagatgttactttagcagaaacaaaatttatcttaatgggataataattcactagtttacctctgatgagcatcagctaatatttaatccattgtgaaattacacagaatcaaaataaaatataatacagttagttaaaatagaaaaattatcttattgattaatttagacatcagaagttagattataaaatcaaggtattttttgtgtttgttttgtttttagtatattagcatatactaccaaacgtgaaccatagtaaaagctgttcagtaacacttaccattccattttcaaataacccgagtttatgtgtcaggttgaaaagcttttagatgagtggtttatgttactgtatgtatccaaatatttgtatatcatgtagacagcc

SEQ ID NO: 360349 - DNA, 621 bp, Homo sapiens
tcatttaatatctaaattatgtatatatatttacatacctatattttacttgcaattcgatgaagataaggctttgtatgtatgctctgtgtaaaatatgctgtctatattctcatgattacaaagaatagtttgagtaatggaatgtatttgaattttacatatgtctttcatttactagcagaaataaaatcttagcacttgatytagtaaattcctccatttaaaataagatgttactttagcagaaacaaaatttatcttaatgggataataattcactagtttacctctgatgagcatcagctaatatttaatccattgtgaaattacacagaatcaaaataaaatataatacagttagttaaaatagaaaaattatcttattgattaatttagacatcagaagttagattataaaatcaaggtattttttgtgtttgttttgtttttagtatattagcatatactaccaaacgtgaaccatagtaaaagctgttcagtaacacttaccattccattttcaaataacccgagtttatgtgtcaggttgaaaagcttttagatgagtggtttatgttactgtatgtatccaaatatttgtatatcatgtagacagcc

SEQ ID NO: 360350 - DNA, 532 bp, Homo sapiens
attactttcaaacattatatcagggccaggcaccatggctcatgcctgtaatctcagccctttgggaaattgacgtgggtggatcacttgaggccaagagttccaggccagcctggccaacatggcaaacacctgtcttgactaaaaaaaaaaaaaaaaaaaaaaactaggcacgggggcacccccctgtaataccagttacttgggatgttgaggcaccggaatcatttgaacctgggaggcaggggttgcagtgagctgagatcatattactgactccagcctgggcaacagagcaagactctgtctcaaaaaaacaaaaccaaaaacattatatcatggtatgtgattaatctgaattcaaaacatcttaacataaactaaatgaaaatyatacaaaattttgcttgttttattgcattctcctaattcctctagcatctatttaattctatttgttttgaatttaccaacaattcaaatcttgctgagaatatttgcactgataaatatttttgtgattattgattat

SEQ ID NO: 360351 - DNA, 607 bp, Homo sapiens
caagatcccagcaacagcgattcaggaacagagacagagttagctgacacagccctgaatctgcttctcttgctactaacagaacagtggaaatggctgtgtaytgaaaacatgcagaagtttcttcgtcttatctttggtaccctagttcaaaggtggctagaggtgcaggtagctaatttaacaagtccacagtgctgggtgcagtacctctggcttcttcaggagtccatctggcctggtggagttttgcctaagtttccacggcctgtaaggacccaggagcagaaactggctgctgagaaacaggctttgcagagcctaatgggagtcttcccagatctcatagtagaaattcttggggtgaacaaatgccagctgagtgtttagtcttggagtcactacaacaaccactcatcaacaggcatttgatttactgccttggggacattatcctggaattcttggatctcagtgcctctgttgaggagtccgctgctaccacctctgcttaagataccccaggcagccctaagaggatgggtgtctcctcatagctggttattcccgcatccttcccaggtcagggaagtagagttactcagcc

SEQ ID NO: 360352 - DNA, 182 bp, Homo sapiens
tttgcctaagtttccacggcctgtaaggacccaggagcagaaactggctgctgagaaacaggctttgcagagcctaatgggagtcytcccagatctcatagtagaaattcttggggtgaacaaatgccagctgagtgtttagtcttggagtcactacaacaaccactcatcaacaggcattt

SEQ ID NO: 360353 - DNA, 607 bp, Homo sapiens
caagatcccagcaacagcgattcaggaacagagacagagttagctgacacagccctgaatctgcttctcttgctactaacagaacagtggaaatggctgtgtactgaaaacatgcagaagtttcttcgtcttatctttggtaccctagttcaaaggtggctagaggtgcaggtagctaatttaacaagtccacagtgctgggtgcagtacctctggcttcttcaggagtccatctggcctggtggagttttgcctaagtttccacggcctgtaaggacccaggagcagaaactggctgctgagaaacaggctttgcagagcctaatgggagtcttcccagatctcatagtagaaattcttggggtgaacaaatgccagctgartgtttagtcttggagtcactacaacaaccactcatcaacaggcatttgatttactgccttggggacattatcctggaattcttggatctcagtgcctctgttgaggagtccgctgctaccacctctgcttaagataccccaggcagccctaagaggatgggtgtctcctcatagctggttattcccgcatccttcccaggtcagggaagtagagttactcagcc

SEQ ID NO: 360354 - DNA, 182 bp, Homo sapiens
tttgcctaagtttccacggcctgtaaggacccaggagcagaaactggctgctgagaaacaggctttgcagagcctaatgggagtcttcccagatctcatagtagaaattcttggggtgaacaaatgccagctgagtgtytagtcttggagtcactacaacaaccactcatcaacaggcattt

SEQ ID NO: 360355 - DNA, 574 bp, Homo sapiens
gtgctgggtgcagtacctctggcttcttcaggagtccatctggcctggtggagttttgcctaagtttccacggcctgtaaggacccaggagcagaaactggctgctgagaaacaggctttgcagagcctaatgggagtcttcccagatctcatagtagaaattcttggggtgaacaaatgccagctgagtgtttagtcttggagtcactacaacaaccactcatcaacaggcatttgatttactgccttggggacattatcctggaattcttggatctcagtgcctctgttgaggagtccgctgctaccacctctgcttaagataccccaggcagccctaagaggatgggtgtctcctcatagctggttattcccgcatccttcccaggtcagggaagtagagttactcagccacccagagaccagtgaggaagcctgcatcctctggaagtargctacagctcagaaggcctaggctcccagtggctcaattctctcccacttctccatttgtagcaggtgacacagggtatgtgtcccagttgcatgcacatttatttccatgtcccttttg

SEQ ID NO: 360356 - DNA, 438 bp, Homo sapiens
gacacagggtatgtgtcccagttgcatgcacatttatttccatgtcccttttgtggtgttgggattgttgttggtgagtagattctgtttcctttgggaaaagaagatgtgaggtagaggaacaatccccttttgcttctccttttgccgtcctccctgagattgtttgccagaaccctggccctgtgcacagatgtatttaatccaccagcacacaagctctggatagaacaggaaaaaagcaatggccagatttccttggaggaaagaacaaccttctgagctctctgttcctacccggaaactaaaaattcattccgggccattctcaaaaaccagactcctgggtcttacctagtttcccaacagttccagaagaagaaggagggargaaaatttttcaagggacttcttgctcatgtgttgctatttcccaac

SEQ ID NO: 360357 - DNA, 553 bp, Homo sapiens
caagtacattaatgactacatactgtaaactttctttgccatgtggcacaaatagttaatttaccttttctttctctgtttatctatcttctatgtcctagtctatttcagttttctctcaagtagtggttttcattgaactaccaaaaagttgcaagggcaaccacacttgaagaaaaacgtgttartaacatatagtttaaagctttttttatttataaaattatattccaaattgttaaattaattttattatgcagacttgatgtctgaaaacttcttaaaatagagaagttcacaatattagatactgtgtctttcttcatataatgacaaaagacttcagttctgaaattttaggaaaagttttgctttaagattaattaaaacataagattgcataagcagagagcatgtaggtacagctattctatggaaaactttttttgtgattagaactgttaggaacatcttttgagaatattcaggctatatatgatgctgcaaatttattttcataattgctataactggcagggcaagcagatgatat

SEQ ID NO: 360358 - DNA, 553 bp, Homo sapiens
caagtacattaatgactacatactgtaaactttctttgccatgtggcacaaatagttaatttaccttttctttctctgtttatctatcttctatgtcctagtctatttcagttttctctcaagtagtggttttcattgaactaccaaaaagttgcaagggcaaccacacttgaagaaaaacgtgttagtaacatatagtttaaagctttttttatttataaaattatattccaaattgttaaattaattttattatgcagacttgatgtctgaaaacttcttaaaatagagaagttcacaatattagatactgtgtctttcttcatataatgacaaaagacttcagttctgaaattttaggaaaagttttgctttaagattaattaaaacataagattgcataagcagagagcatgtaggtacrgctattctatggaaaactttttttgtgattagaactgttaggaacatcttttgagaatattcaggctatatatgatgctgcaaatttattttcataattgctataactggcagggcaagcagatgatat

SEQ ID NO: 360359 - DNA, 553 bp, Homo sapiens
caagtacattaatgactacatactgtaaactttctttgccatgtggcacaaatagttaatttaccttttctttctctgtttatctatcttctatgtcctagtctatttcagttttctctcaagtagtggttttcattgaactaccaaaaagttgcaagggcaaccacacttgaagaaaaacgtgttagtaacatatagtttaaagctttttttatttataaaattatattccaaattgttaaattaattttattatgcagacttgatgtctgaaaacttcttaaaatagagaagttcacaatattagatactgtgtctttcttcatataatgacaaaagacttcagttctgaaattttaggaaaagttttgctttaagattaattaaaacataagattgcataagcagagagcatgtaggtacagctattctatggaaaacttwttttgtgattagaactgttaggaacatcttttgagaatattcaggctatatatgatgctgcaaatttattttcataattgctataactggcagggcaagcagatgatat

SEQ ID NO: 360360 - DNA, 553 bp, Homo sapiens
caagtacattaatgactacatactgtaaactttctttgccatgtggcacaaatagttaatttaccttttctttctctgtttatctatcttctatgtcctagtctatttcagttttctctcaagtagtggttttcattgaactaccaaaaagttgcaagggcaaccacacttgaagaaaaacgtgttagtaacatatagtttaaagctttttttatttataaaattatattccaaattgttaaattaattttattatgcagacttgatgtctgaaaacttcttaaaatagagaagttcacaatattagatactgtgtctttcttcatataatgacaaaagacttcagttctgaaattttaggaaaagttttgctttaagattaattaaaacataagattgcataagcagagagcatgtaggtacagctattctatggaaaactttttttgtkattagaactgttaggaacatcttttgagaatattcaggctatatatgatgctgcaaatttattttcataattgctataactggcagggcaagcagatgatat

SEQ ID NO: 360361 - DNA, 540 bp, Homo sapiens
ttgttttctttcctaaatatttaaaaattaataggatttatccatagtataacatggttttaaaaagtaatttaactttagttttattgaatacctatttgtgtagtatattacatttatttttgttaatattaaattttttaaaatttaggtataaattgtgcattttatatgatatttataccattattttactttgggttctctcatttaaarttataaccaaagttacactgttattcattttttgtgctatgcatttaatattttcatggattccttttttttctattttaagctagtatatattgcattatatttaaaaccaccacaacaggtaggaaatggggagttgttacttgatggctatagagttacagttttgtgagatggaaaatatctgcagctctgttgcacagaaatgtgaatatagttaatacttatgatatctacacttaacatgattacgatagtcaattttatgtgtatatttttgctgtaattaaaaaataccatcacaagtttgaatgataacttatt

SEQ ID NO: 360362 - DNA, 540 bp, Homo sapiens
ttgttttctttcctaaatatttaaaaattaataggatttatccatagtataacatggttttaaaaagtaatttaactttagttttattgaatacctatttgtgtagtatattacatttatttttgttaatattaaattttttaaaatttaggtataaattgtgcattttatatgatatttataccattattttactttgggttctctcatttaaagttataaccaaagttacactgttattcattttttgtgctatgcatttaatattttcatggattccttttttttctattttmagctagtatatattgcattatatttaaaaccaccacaacaggtaggaaatggggagttgttacttgatggctatagagttacagttttgtgagatggaaaatatctgcagctctgttgcacagaaatgtgaatatagttaatacttatgatatctacacttaacatgattacgatagtcaattttatgtgtatatttttgctgtaattaaaaaataccatcacaagtttgaatgataacttatt

SEQ ID NO: 360363 - DNA, 485 bp, Homo sapiens
agaaaaaggaaacgactttttaaaaacttaacaaaactggtataaagatttaatagttttctagttgtcccttggtatccatagaagattggttccaggacccccgctgataccaaaatccatggatgttcaaatccctgagttaaaatggcatgatatttgtatacaatctaaacacatcctcccatatactttaaatcatcttagattacttatgatgcctaatacaatataaatgctatgtaactagttgttatackgtatcactttctgaatttgtattatttgtattgttttttattaatattttggatccgctattggttgaatccaagaatatggaacccacagaaaaagagggctagctgtaaatctaaaatatgtatccaattgtaaaacaagaaataaggatatatagtaattattagagtaatcctggaaaactgtataaatcctggaaaacaggtataattattattagagta

SEQ ID NO: 360364 - DNA, 485 bp, Homo sapiens
agaaaaaggaaacgactttttaaaaacttaacaaaactggtataaagatttaatagttttctagttgtcccttggtatccatagaagattggttccaggacccccgctgataccaaaatccatggatgttcaaatccctgagttaaaatggcatgatatttgtatacaatctaaacacatcctcccatatactttaaatcatcttagattacttatgatgcctaatacaatataaatgctatgtaactagttgttatactgtatcactttctgaatttgtattatttgtattgttttttattaatattttggatccgctattggttgaatccaagaatatggaacccacagaaaaagagggctagctgtaaatctaaaatatgtatccaattgtaaaacaaraaataaggatatatagtaattattagagtaatcctggaaaactgtataaatcctggaaaacaggtataattattattagagta

SEQ ID NO: 360365 - DNA, 590 bp, Homo sapiens
aacagtttgcaaatattttcttccattcaggaggttgtctcttcgttctgctgattatttcttctgctgctcagaagctttctaagttaactaagccccatttgtctatttttatttgtgttgtttgtggcttttgaggtgttagtcataaattctttgcctagacaaaaggccaggaaatttttccctaggttttcttcaagtatttttatagtttcaggtcttctgtttaagtttttaatctactttgagttgattcttgtatatagtgagatagtggtccagtttcattcttctggatgtggctatccaattttcccagcaccatttattgaagagtgtgtcctttccccagtgtcagctttgttgaagatcaaatctgcaaacaaattataaaactgtaatatctaagtaatattggagaagcacaraaaacaactgacaatgtaagggacttgagaacaatgaattatatatagaccaagtatatataagaccttacaatattataatgtgaatatgttacctgaattgccaaaagggactttgtagatggatttaaggttgctaatcagcttgccttccaaatg

SEQ ID NO: 360366 - DNA, 522 bp, Homo sapiens
cttgctttgggatgttatggaaacatatcccattagagctgtagaaagacttaggaaatctacagagaagagcaggygacaaagacaaaagtaaatgttgtggcacagagtgagtgcccaggaaatttgatgagcttaattgaggaaaggagcccaatcgttagcccagactgatagaccacgtttcttcttcacatcttctgtttaattttcacaggcatttcagttcttctgtttccaaatctagtcctcctttagtctcccttaacccaggtaacggcatttgtattcccgcagtggcttcaaccagaaacttcgctccttccattttctcactcccacttccatcaaagctttctattacaatttcccttgtctaaaccttccctttctttctccttaaatgtttcgaagggcttctagtaatctccagctctctgcactgattttttttccagtcaatttctcctgaatgctcagagcagtctttaaaaataagataaatcattaaaaataagataa

SEQ ID NO: 360367 - DNA, 486 bp, Homo sapiens
agaatttttttctttttttacttttatggcaygacttctaatatttttatatccttaacactttatacaaaaaaatcaaaggaagaagaacatttaagtttactttgtttcatttttcagagttaatagttgtttcacattctcaccaagatttgatttttaaatgttgatcttgtatcctgcaacccttgataaatttccttgtaaattatagttctttaaagacaccatagtatgctctacacatatatttcttctatgaataaatagatttttattttttcttcctaatattaatacctttaaaaaaaaactttatttcagtggttagcacatgttgaatagaagtggtgaaagcatgaatacttgcattcttcctaatcttaaaggggcatgcattcaagattttatcatatgttataatggttgctataggtttttcataattgccctttattggactggagaggttccctttcatttcca

SEQ ID NO: 360368 - DNA, 486 bp, Homo sapiens
agaatttttttctttttttacttttatggcatgacttctaatatttttatatccttaacactttatacaaaaaaatcaaaggaagaagaacatttaagtttactttgtttcatttttcagagttaatagttgtttcacattctcaccaagatttgatttttaaatgtkgatcttgtatcctgcaacccttgataaatttccttgtaaattatagttctttaaagacaccatagtatgctctacacatatatttcttctatgaataaatagatttttattttttcttcctaatattaatacctttaaaaaaaaactttatttcagtggttagcacatgttgaatagaagtggtgaaagcatgaatacttgcattcttcctaatcttaaaggggcatgcattcaagattttatcatatgttataatggttgctataggtttttcataattgccctttattggactggagaggttccctttcatttcca

SEQ ID NO: 360369 - DNA, 486 bp, Homo sapiens
agaatttttttctttttttacttttatggcatgacttctaatatttttatatccttaacactttatacaaaaaaatcaaaggaagaagaacatttaagtttactttgtttcatttttcagagttaatagttgtttcacattctcaccaagatttgatttttaaatgttgatcttgtatcctgcaacccttgataaatttccttgtaaattatagttctttaaagacaccatagtatgctctacacatatatttcttctatgaataaatagatttttattttttcttcctaatattaatacctttaaaaaaaaactttatttcagtggttagcacatgttgaatagaagtggtgaragcatgaatacttgcattcttcctaatcttaaaggggcatgcattcaagattttatcatatgttataatggttgctataggtttttcataattgccctttattggactggagaggttccctttcatttcca

SEQ ID NO: 360370 - DNA, 486 bp, Homo sapiens
agaatttttttctttttttacttttatggcatgacttctaatatttttatatccttaacactttatacaaaaaaatcaaaggaagaagaacatttaagtttactttgtttcatttttcagagttaatagttgtttcacattctcaccaagatttgatttttaaatgttgatcttgtatcctgcaacccttgataaatttccttgtaaattatagttctttaaagacaccatagtatgctctacacatatatttcttctatgaataaatagatttttattttttcttcctaatattaatacctttaaaaaaaaactttatttcagtggttagcacatgttgaatagaagtggtgaaagcatgaatacttgcattcttcctaatcttaarggggcatgcattcaagattttatcatatgttataatggttgctataggtttttcataattgccctttattggactggagaggttccctttcatttcca

SEQ ID NO: 360371 - DNA, 505 bp, Homo sapiens
ttttaaagtgttcatgcacatctatttaatttctagatatcgtgagggaatcgtcactgtatctggaagccagatgccaaagatgttcagttattatcaatgtatctatgcataaaggattgaaaatgattcttcatgccataatttatctaaatattcattcctttggaacactgttttccaccaatagtaacaagacttggaacaaaataaaatagcaatatcatgtgcattttctatttstgcacttttccacttctggaaatagtcatagaatcattttgtgacagattaatatcatccatgatcctaagtcactaagaataagtgttagattctttgggttaaattgccataaggactaaatttatttttttaaccaattccctaaagaatcaactgattttagttttacagcatatgtatgacctctccatccattttgccttaattctagttctttttatccttcagtggtgagaatgagaaaacctggatgcatatg

SEQ ID NO: 360372 - DNA, 505 bp, Homo sapiens
ttttaaagtgttcatgcacatctatttaatttctagatatcgtgagggaatcgtcactgtatctggaagccagatgccaaagatgttcagttattatcaatgtatctatgcataaaggattgaaaatgattcttcatgccataatttatctaaatattcattcctttggaacactgttttccaccaatagtaacaagacttggaacaaaataaaatagcaatatcatgtgcattttctatttctgcacttttccacttctggaaatagtcatagaatcattttgtgacagattamtatcatccatgatcctaagtcactaagaataagtgttagattctttgggttaaattgccataaggactaaatttatttttttaaccaattccctaaagaatcaactgattttagttttacagcatatgtatgacctctccatccattttgccttaattctagttctttttatccttcagtggtgagaatgagaaaacctggatgcatatg

SEQ ID NO: 360373 - DNA, 438 bp, Homo sapiens
gtagacagggtctcactatgttgtgcagactggttttgaactcctgggctcaactcatcctmccacttcagcctcctaaaatgctgggatcacaggcatgagtcactgtgcctggctttgtgttcatttcttcttgcttcttttacacactaccctacattgagtggtttaaaacaccacaagtctactatctgacagttctgaagctcagaaatccaaaataggcatatcaaggctaaagtcaaggggtcagtagggctgcattctcctggagggcctagagagaatgtgttcccttgccttttccagcttcatgaagccacccacattccttggctcatggctcctaactccgtcttcaaagcaagaagtggagcatcttcaaatatgcctctctcacctctgcttccatcatcacatctcgtccaattctgactc

SEQ ID NO: 360374 - DNA, 579 bp, Homo sapiens
ctactatctgacagttctgaagctcagaaatccaaaataggcatatcaaggctaaagtcaaggggtcagtagggctgcattctcctggagggcctagagagaatgtgttcccttgccttttccagcttcatgaagccacccacattccttggctcatggctcctaactccgtcttcaaagcaagaagtggagcatcttcaaatatgcctctctcacctctgcttccatcatcacatctcgtccaattctgactcttctacctccctcttgctattataaagacccttgtgattgcttggcatggtagctcacacctgtartcccaacaccctgggatgccaaggtgggaggattgcttgaggcctggggttcaagaccagcggcaacatagtgagactccacctctacagacatagtagtaataatgaatattagccagtcgttgtgatgcacaccagtagtccaagctacatgagaggctgagataagagaattgctttagcccaggagtttgagaccggtctaggcaacataaaaagatggcatttttataaaaaataaaaaaaattatctgggcgt

SEQ ID NO: 360375 - DNA, 579 bp, Homo sapiens
ctactatctgacagttctgaagctcagaaatccaaaataggcatatcaaggctaaagtcaaggggtcagtagggctgcattctcctggagggcctagagagaatgtgttcccttgccttttccagcttcatgaagccacccacattccttggctcatggctcctaactccgtcttcaaagcaagaagtggagcatcttcaaatatgcctctctcacctctgcttccatcatcacatctcgtccaattctgactcttctacctccctcttgctattataaagacccttgtgattgcttggcatggtagctcacacctgtaatcccaacaccctgggatgccaaggtgggaggawtgcttgaggcctggggttcaagaccagcggcaacatagtgagactccacctctacagacatagtagtaataatgaatattagccagtcgttgtgatgcacaccagtagtccaagctacatgagaggctgagataagagaattgctttagcccaggagtttgagaccggtctaggcaacataaaaagatggcatttttataaaaaataaaaaaaattatctgggcgt

SEQ ID NO: 360376 - DNA, 579 bp, Homo sapiens
ctactatctgacagttctgaagctcagaaatccaaaataggcatatcaaggctaaagtcaaggggtcagtagggctgcattctcctggagggcctagagagaatgtgttcccttgccttttccagcttcatgaagccacccacattccttggctcatggctcctaactccgtcttcaaagcaagaagtggagcatcttcaaatatgcctctctcacctctgcttccatcatcacatctcgtccaattctgactcttctacctccctcttgctattataaagacccttgtgattgcttggcatggtagctcacacctgtaatcccaacaccctgggatgccaaggtgggaggattgcttgaggcctggggttcaagaccagcggcaacatagtgagactccacctctacagacatagtagtaataatgaatattagccagtcgttgtgatgcacaccagtagtccaagctacatgagaggctgagataaragaattgctttagcccaggagtttgagaccggtctaggcaacataaaaagatggcatttttataaaaaataaaaaaaattatctgggcgt

SEQ ID NO: 360377 - DNA, 592 bp, Homo sapiens
cagatgttaggccacaaaacaaatctcagcaaatctgtaaaaatcaaaatcaagtatctcttttgaccatgatggaataaaactagaaatcactaacagtaaaaactttagaaaccatttaaatacatgtaaatttaacaacatactcctctataacaaatggattaatgaataagttaaaaagaaaattcaaacacttcatgagacaaatgaaattggaaacacagtatatgaaaacttatggaatacagcaaaagcagttccaagagggaagtttacagcaataaacacctacrccataaaagacaaaaagtctcaaataaacagtctaacctcatacctcaaggaactagaacaacaagaacaaacataaaattagtagaaaaaagaaataaatgagtggatataagtggaatagtgactaaaacaatacagaaatccttgaacagaaacaaacctttaattagattaacttagaaaagtagatggaaggttcaaataaaatcagaaataaaaaagtatacattacaactgatgtaacagcaatacaaaggattataagagactattatgaacaactacatgccaacat

SEQ ID NO: 360378 - DNA, 592 bp, Homo sapiens
cagatgttaggccacaaaacaaatctcagcaaatctgtaaaaatcaaaatcaagtatctcttttgaccatgatggaataaaactagaaatcactaacagtaaaaactttagaaaccatttaaatacatgtaaatttaacaacatactcctctataacaaatggattaatgaataagttaaaaagaaaattcaaacacttcatgagacaaatgaaattggaaacacagtatatgaaaacttatggaatacagcaaaagcagttccaagagggaagtttacagcaataaacacctacgccataaaagacaaaaartctcaaataaacagtctaacctcatacctcaaggaactagaacaacaagaacaaacataaaattagtagaaaaaagaaataaatgagtggatataagtggaatagtgactaaaacaatacagaaatccttgaacagaaacaaacctttaattagattaacttagaaaagtagatggaaggttcaaataaaatcagaaataaaaaagtatacattacaactgatgtaacagcaatacaaaggattataagagactattatgaacaactacatgccaacat

SEQ ID NO: 360379 - DNA, 639 bp, Homo sapiens
ctaacagtaaaaactttagaaaccatttaaatacatgtaaatttaacaacatactcctctataacaaatggattaatgaataagttaaaaagaaaattcaaacacttcatgagacaaatgaaattggaaacacagtatatgaaaacttatggaatacagcaaaagcagttccaagagggaagtttacagcaataaacacctacgccataaaagacaaaaagtctcaaataaacagtctaamctcatacctcaaggaactagaacaacaagaacaaacataaaattagtagaaaaaagaaataaatgagtggatataagtggaatagtgactaaaacaatacagaaatccttgaacagaaacaaacctttaattagattaacttagaaaagtagatggaaggttcaaataaaatcagaaataaaaaagtatacattacaactgatgtaacagcaatacaaaggattataagagactattatgaacaactacatgccaacatatacatatacaacctaccaaaattgaattatgaaaaagtagaaaatctgaagagaccaatagtgagcaacaacatagaatctataataaaaagtctcccatcaaagaaaagctccagatatgatggcttcactagtgaa

SEQ ID NO: 360380 - DNA, 592 bp, Homo sapiens
cagatgttaggccacaaaacaaatctcagcaaatctgtaaaaatcaaaatcaagtatctcttttgaccatgatggaataaaactagaaatcactaacagtaaaaactttagaaaccatttaaatacatgtaaatttaacaacatactcctctataacaaatggattaatgaataagttaaaaagaaaattcaaacacttcatgagacaaatgaaattggaaacacagtatatgaaaacttatggaatacagcaaaagcagttccaagagggaagtttacagcaataaacacctacgccataaaagacaaaaagtctcaaataaacagtctaacctcatacctcaaggaactagaacaacaagaacaaacayaaaattagtagaaaaaagaaataaatgagtggatataagtggaatagtgactaaaacaatacagaaatccttgaacagaaacaaacctttaattagattaacttagaaaagtagatggaaggttcaaataaaatcagaaataaaaaagtatacattacaactgatgtaacagcaatacaaaggattataagagactattatgaacaactacatgccaacat

SEQ ID NO: 360381 - DNA, 546 bp, Homo sapiens
aaatgaaattggaaacacagtatatgaaaacttatggaatacagcaaaagcagttccaagagggaagtttacagcaataaacacctacgccataaaagacaaaaagtctcaaataaacagtctaacctcatacctcaaggaactagaacaacaagaacaaacataaaattagtagaaaaaagaaataaatgagtggatataagtggaatagtgactaaaacaatacagaaatccttgaacagaaacaaacctttaattagattaacttagaaaagtagatggaaggttcaaatamaatcagaaataaaaaagtatacattacaactgatgtaacagcaatacaaaggattataagagactattatgaacaactacatgccaacatatacatatacaacctaccaaaattgaattatgaaaaagtagaaaatctgaagagaccaatagtgagcaacaacatagaatctataataaaaagtctcccatcaaagaaaagctccagatatgatggcttcactagtgaaatctaccaaacatttaaaagat

SEQ ID NO: 360382 - DNA, 546 bp, Homo sapiens
aaatgaaattggaaacacagtatatgaaaacttatggaatacagcaaaagcagttccaagagggaagtttacagcaataaacacctacgccataaaagacaaaaagtctcaaataaacagtctaacctcatacctcaaggaactagaacaacaagaacaaacataaaattagtagaaaaaagaaataaatgagtggatataagtggaatagtgactaaaacaatacagaaatccttgaacagaaacaaacctttaattagattaacttagaaaagtagatggaaggttcaaataaaatcagaaataaaaaagtatacattacaactgatgtaacagcaatacaaaggattataagagactattatgaacaactacatgccaacatatacatatacaacctaccaaaattgaattatgaaaaagtagaaaatctgaagagaccaatagtgagcaacaacatagaatctataataaaaagtctcccatcaaagaaaagctccagatatgatggcttcactastgaaatctaccaaacatttaaaagat

SEQ ID NO: 360383 - DNA, 546 bp, Homo sapiens
acctcattttgacttttctgccaaaattctcatctttgtttttgaatattaatctctgctcctgaaatgtcaatctttacttcaataattatttgttggacatgtactctgtttcaggccctcactgggtgccggagatccactagaatacaagatctgtttctgtgtctttgagggacatgtatccagcaattagttacatcagtcccttgtagatgtcaattccagtgtcacaaatttcttgttttgcaacgttgagcaagtttttttcaatgtttctaagcctcagttttttkacctacaaaatgtaataatatttaaccattagtaatgttgtgaaaattaagcaaaaatacatgtaatatatttaacaatgcttggtgttcattaatgctttaatatatactaactacttatattattgttgctgttgtgttaaacatgcataagacagcaggtactagaatggaaataagggttcttacttgaaattaaatggcagaatttcatactgtaataggatgtatcaatttacctagtattaat

SEQ ID NO: 360384 - DNA, 546 bp, Homo sapiens
acctcattttgacttttctgccaaaattctcatctttgtttttgaatattaatctctgctcctgaaatgtcaatctttacttcaataattatttgttggacatgtactctgtttcaggccctcactgggtgccggagatccactagaatacaagatctgtttctgtgtctttgagggacatgtatccagcaattagttacatcagtcccttgtagatgtcaattccagtgtcacaaatttcttgttttgcaacgttgagcaagtttttttcaatgtttctaagcctcagtttttttmcctacaaaatgtaataatatttaaccattagtaatgttgtgaaaattaagcaaaaatacatgtaatatatttaacaatgcttggtgttcattaatgctttaatatatactaactacttatattattgttgctgttgtgttaaacatgcataagacagcaggtactagaatggaaataagggttcttacttgaaattaaatggcagaatttcatactgtaataggatgtatcaatttacctagtattaat

SEQ ID NO: 360385 - DNA, 546 bp, Homo sapiens
acctcattttgacttttctgccaaaattctcatctttgtttttgaatattaatctctgctcctgaaatgtcaatctttacttcaataattatttgttggacatgtactctgtttcaggccctcactgggtgccggagatccactagaatacaagatctgtttctgtgtctttgagggacatgtatccagcaattagttacatcagtcccttgtagatgtcaattccagtgtcacaaatttcttgttttgcaacgttgagcaagtttttttcaatgtttctaagcctcagtttttttacctacaaaatgtaataatatttaaccattagtaatgttgtgaaaattaagcaaaaatacatgtaatatatttaacaatgcttggtgttcrttaatgctttaatatatactaactacttatattattgttgctgttgtgttaaacatgcataagacagcaggtactagaatggaaataagggttcttacttgaaattaaatggcagaatttcatactgtaataggatgtatcaatttacctagtattaat

SEQ ID NO: 360386 - DNA, 546 bp, Homo sapiens
acctcattttgacttttctgccaaaattctcatctttgtttttgaatattaatctctgctcctgaaatgtcaatctttacttcaataattatttgttggacatgtactctgtttcaggccctcactgggtgccggagatccactagaatacaagatctgtttctgtgtctttgagggacatgtatccagcaattagttacatcagtcccttgtagatgtcaattccagtgtcacaaatttcttgttttgcaacgttgagcaagtttttttcaatgtttctaagcctcagtttttttacctacaaaatgtaataatatttaaccattagtaatgttgtgaaaattaagcaaaaatacatgtaatatatttaacaatgcttggtgttcattaatgctttaatatatrctaactacttatattattgttgctgttgtgttaaacatgcataagacagcaggtactagaatggaaataagggttcttacttgaaattaaatggcagaatttcatactgtaataggatgtatcaatttacctagtattaat

SEQ ID NO: 360387 - DNA, 355 bp, Homo sapiens
cacatagccagaatcacatttaggtgattacttactgactttcactaagaatatttctatgagagtcaaattatttaaaaatrttatagagtacatagtattccattttatggatacaccataattcctttagtgctagcatcatttcaaaggtcagtgattccaattttccctcctaaaaataacactactgtaataacctgggaagcaaatatttatgtacatcttcagtgactttctcaaaaaagacatgagagtcaagaaaaacaaccattaagagtcaatactccaaatactcaaaatctactaaaatttgctttctaataaggttcataatatcctagcaaatgttacc

SEQ ID NO: 360388 - DNA, 355 bp, Homo sapiens
cacatagccagaatcacatttaggtgattacttactgactttcactaagaatatttctatgagagtcaaattatttaaaaatgttatagagtacatagtattccattttatggatacaccataattcctttagtgctagcatcatttcaaaggtcagtgattccaattttccctcctaaaaataacaytactgtaataacctgggaagcaaatatttatgtacatcttcagtgactttctcaaaaaagacatgagagtcaagaaaaacaaccattaagagtcaatactccaaatactcaaaatctactaaaatttgctttctaataaggttcataatatcctagcaaatgttacc

SEQ ID NO: 360389 - DNA, 643 bp, Homo sapiens
gtaaaatttataaatttcaggaatgaagacatgaataccttttgggagactaccataccttcacatgaactcagccacatgactatttaatagattgatctaaagaacattaccagcccctaagttattcttccttttaaactttctatcagtttttgactttgttaactgaagagtaattagtcccctgacttctaacaaaatggattacatttgccattttagaatttatataaagtaatacagtttgttttaactattgtctgactttttgctcagcatacatctatgttttggtgtacaattatagttcttttattctcgttgttgtatggtaatctattttattaatataccagtatttagtctattgttgatgggcatatggcttgtattacagttctgctactaatagaactgctatgaatatttcatacatgccttttagtatatattgtatgttggacatacaactaggagaaaattagtagaattagtgtgtggtagagtagtatatgtgygttcacttttggtatattcttccagctttccaaaacgattgtataaatgcatgtttcagtaatagtctgtgagagtttctgttgctccacatcctaattaacatctaggagagtattacttt

SEQ ID NO: 360390 - DNA, 609 bp, Homo sapiens
tttaatatttcaacaagtgcatgagtatctgtgtatgccaggccttctgttacttgttggcaatagagagtaaatatgatgtatttctctctaccctcaaggaattccagtctagaggggggatataaaggtattcaataaagaatagcaaaatcatttctaattataattatgctgggcactattaggaacatgtatagaatagcgaaagaacatataatgctggaaccttccccggttgctgtggtcattggaagacttcttggagaaattccatcaaggtttagtcctgagggtacatgtataggacatgggcaggttgagcaaatggatatcattatgttagatatatggcrtttggaaaaggccccaacagcagtggagcctggcacgctagaagacaagggaagttagtgttcaaggaggagaaaaatgcaaaatagggctgtggaggtaggcagaatcctacactgtagtaatttgttgctttctatttcccagcctcactgctattttttctgtaatccataaaataatgcccatcacattataaactttcagtaataaatatttgagaataaataaatatatgatattcatcaatagtgg

SEQ ID NO: 360391 - DNA, 614 bp, Homo sapiens
tggagagaaggaaaagctggaactggcctgggaaggaccttacctaatgctcctaactactgaaacygcagtccgaatagcagaaaaaggatggacccgttacacctgagtcaagaaagcgccaccccctccagagtcatgggccatagtcccaggggaaaaccctaccaaactaaagctaagaaaaatttaacttcctttcatctattctgttactccttcttctttcctcactctattgctgaccacctagttattaatgtaaccaagtcaatttcacctcaaactattaaatttgatgcttgccttgttacatcctatggagactttttaagtcaaagacagctctccacttcagaaaagtacctctgtccttcccggctcttctcagactggacattattgaattgggatcatttagtctgggaagatttcaatgaggaccccggcatcagctgggagtcttgccccccatagagcttttatgctgcagttggtccaacgttctgtggaccactaaagagcaaggatggactgcctcaaccagtagttgtaatttcctaaagccatacattcattttactaaaggaacagcttcacctagctgtcagcta

SEQ ID NO: 360392 - DNA, 614 bp, Homo sapiens
tggagagaaggaaaagctggaactggcctgggaaggaccttacctaatgctcctaactactgaaactrcagtccgaatagcagaaaaaggatggacccgttacacctgagtcaagaaagcgccaccccctccagagtcatgggccatagtcccaggggaaaaccctaccaaactaaagctaagaaaaatttaacttcctttcatctattctgttactccttcttctttcctcactctattgctgaccacctagttattaatgtaaccaagtcaatttcacctcaaactattaaatttgatgcttgccttgttacatcctatggagactttttaagtcaaagacagctctccacttcagaaaagtacctctgtccttcccggctcttctcagactggacattattgaattgggatcatttagtctgggaagatttcaatgaggaccccggcatcagctgggagtcttgccccccatagagcttttatgctgcagttggtccaacgttctgtggaccactaaagagcaaggatggactgcctcaaccagtagttgtaatttcctaaagccatacattcattttactaaaggaacagcttcacctagctgtcagcta

SEQ ID NO: 360393 - DNA, 597 bp, Homo sapiens
aaaccctaccaaactaaagctaagaaaaatttaacttcctttcatctattctgttactccttcttctttcctcactctattgctgaccacctagttattaatgtaaccaagtcaatttcacctcaaactattaaatttgatgcttgccttgttacatcctatggagactttttaagtcaaagacagctctccacttcagaaaagtacctctgtccttccyggctcttctcagactggacattattgaattgggatcatttagtctgggaagatttcaatgaggaccccggcatcagctgggagtcttgccccccatagagcttttatgctgcagttggtccaacgttctgtggaccactaaagagcaaggatggactgcctcaaccagtagttgtaatttcctaaagccatacattcattttactaaaggaacagcttcacctagctgtcagctaaaccagtgcaatccaatacaggttattaccccaaaccctcaaagatcttccccttctctaagctggttcccttctttaagctggtttttatggtatgggggatgaggtttcaggaacagaccctatcagatactttgaaata

SEQ ID NO: 360394 - DNA, 597 bp, Homo sapiens
aaaccctaccaaactaaagctaagaaaaatttaacttcctttcatctattctgttactccttcttctttcctcactctattgctgaccacctagttattaatgtaaccaagtcaatttcacctcaaactattaaatttgatgcttgccttgttacatcctatggagactttttaagtcaaagacagctctccacttcagaaaagtacctctgtccttcccggctcttctcagactggacattattgaattgggatcatttagtctgggaagatttcaatgaggacccyggcatcagctgggagtcttgccccccatagagcttttatgctgcagttggtccaacgttctgtggaccactaaagagcaaggatggactgcctcaaccagtagttgtaatttcctaaagccatacattcattttactaaaggaacagcttcacctagctgtcagctaaaccagtgcaatccaatacaggttattaccccaaaccctcaaagatcttccccttctctaagctggttcccttctttaagctggtttttatggtatgggggatgaggtttcaggaacagaccctatcagatactttgaaata

SEQ ID NO: 360395 - DNA, 597 bp, Homo sapiens
aaaccctaccaaactaaagctaagaaaaatttaacttcctttcatctattctgttactccttcttctttcctcactctattgctgaccacctagttattaatgtaaccaagtcaatttcacctcaaactattaaatttgatgcttgccttgttacatcctatggagactttttaagtcaaagacagctctccacttcagaaaagtacctctgtccttcccggctcttctcagactggacattattgaattgggatcatttagtctgggaagatttcaatgaggaccccggcatcagctgggagtcttgccccccatagagcttttatgctgcagttggtccaacgttctgtggaccactaaagagcaaggatggactgcctcaaccagtagttgtaatttcctaaagccatacattcattttactaaaggaacagcttcacctagctgtcagctaaaccagtgcaatccaatacaggttattaccccaaaccctcaaagatcttccccttctctaagctggttcccttctttaagctggtttttatggtatgggrgatgaggtttcaggaacagaccctatcagatactttgaaata

SEQ ID NO: 360396 - DNA, 558 bp, Homo sapiens
atgacgcagcagtaggggtggtgagggataagaaccccttcccctcccttgttcgggtgtgctctcaccgttgctccatccatgagacacacgcttctatagaagtaaaaytgccttgctgagaaaattcatgttcgagtgctatttcttttgcggcaccaaaaatttatttccaacactctcttctagctattttgtaatatacaggctaccatgcatatgtgaatagaataggagataattgatcatatagagcagagattggcaaatttcttctgtaacaggccagatattaaatatttagactttatgaggtgcatatagtctctgttgcatattgttccttactgttgcatttttttcttttttacatcccttcaaaaatataaaaacacttcttagcttgtgggccatacataaacagactatgagtgagatttggcccatggagccataatttgccaaccctggctacagataatcaattatagtaggggacacagaaagcaagtaaacaagcaaacaaacaataagtaagtgctaaactaacaagaaaac

SEQ ID NO: 360397 - DNA, 558 bp, Homo sapiens
atgacgcagcagtaggggtggtgagggataagaaccccttcccctcccttgttcgggtgtgctctcaccgttgctccatccatgagacacacgcttctatagaagtaaaattgccttgctgagaaaattcatgttcgagtgctatttcttttgcggcaccaaaaatttatttccaacactctcttctagctattttgtaatatacwggctaccatgcatatgtgaatagaataggagataattgatcatatagagcagagattggcaaatttcttctgtaacaggccagatattaaatatttagactttatgaggtgcatatagtctctgttgcatattgttccttactgttgcatttttttcttttttacatcccttcaaaaatataaaaacacttcttagcttgtgggccatacataaacagactatgagtgagatttggcccatggagccataatttgccaaccctggctacagataatcaattatagtaggggacacagaaagcaagtaaacaagcaaacaaacaataagtaagtgctaaactaacaagaaaac

SEQ ID NO: 360398 - DNA, 558 bp, Homo sapiens
atgacgcagcagtaggggtggtgagggataagaaccccttcccctcccttgttcgggtgtgctctcaccgttgctccatccatgagacacacgcttctatagaagtaaaattgccttgctgagaaaattcatgttcgagtgctatttcttttgcggcaccaaaaatttatttccaacactctcttctagctattttgtaatatacaggctaccaygcatatgtgaatagaataggagataattgatcatatagagcagagattggcaaatttcttctgtaacaggccagatattaaatatttagactttatgaggtgcatatagtctctgttgcatattgttccttactgttgcatttttttcttttttacatcccttcaaaaatataaaaacacttcttagcttgtgggccatacataaacagactatgagtgagatttggcccatggagccataatttgccaaccctggctacagataatcaattatagtaggggacacagaaagcaagtaaacaagcaaacaaacaataagtaagtgctaaactaacaagaaaac

SEQ ID NO: 360399 - DNA, 558 bp, Homo sapiens
atgacgcagcagtaggggtggtgagggataagaaccccttcccctcccttgttcgggtgtgctctcaccgttgctccatccatgagacacacgcttctatagaagtaaaattgccttgctgagaaaattcatgttcgagtgctatttcttttgcggcaccaaaaatttatttccaacactctcttctagctattttgtaatatacaggctaccatgyatatgtgaatagaataggagataattgatcatatagagcagagattggcaaatttcttctgtaacaggccagatattaaatatttagactttatgaggtgcatatagtctctgttgcatattgttccttactgttgcatttttttcttttttacatcccttcaaaaatataaaaacacttcttagcttgtgggccatacataaacagactatgagtgagatttggcccatggagccataatttgccaaccctggctacagataatcaattatagtaggggacacagaaagcaagtaaacaagcaaacaaacaataagtaagtgctaaactaacaagaaaac

SEQ ID NO: 360400 - DNA, 577 bp, Homo sapiens
taaatatttagactttatgaggtgcatatagtctctgttgcatattgttccttactgttgcatttttttcttttttacatcccttcaaaaatataaaaacacttcttagcttgtgggccatacataaacagactatgagtgagatttggcccatggagccataatttgccaaccctggctacagataatcaattatagtaggggacacagaaagcaagtaaacaagcaaacaaacaataagtaagtgctaaactaacaagaaaacatcactacctataacatayaaatcactcccaagggatcccttgtaatactatggagatcctgtccactctcctccccccagagaaccactggcctactttttgtctctttagattagtttgaattttgtagagttttagaaaattgaagtcatacactaagaactaattttttaatctgtttttcactctgtctaatcattttttcaattcatacatggtcattacaggaaaggtgtctggatccagactccaagagagggttcttggatctcatgcaagagagaattcagagtgagtacacagagtaaaga

SEQ ID NO: 360401 - DNA, 577 bp, Homo sapiens
taaatatttagactttatgaggtgcatatagtctctgttgcatattgttccttactgttgcatttttttcttttttacatcccttcaaaaatataaaaacacttcttagcttgtgggccatacataaacagactatgagtgagatttggcccatggagccataatttgccaaccctggctacagataatcaattatagtaggggacacagaaagcaagtaaacaagcaaacaaacaataagtaagtgctaaactaacaagaaaacatcactacctataacatataaatcactcccaagggatcccttgtaatactatggagatcctgtccactctcctccccccagagaaccactggcctactttttgtcwctttagattagtttgaattttgtagagttttagaaaattgaagtcatacactaagaactaattttttaatctgtttttcactctgtctaatcattttttcaattcatacatggtcattacaggaaaggtgtctggatccagactccaagagagggttcttggatctcatgcaagagagaattcagagtgagtacacagagtaaaga

SEQ ID NO: 360402 - DNA, 577 bp, Homo sapiens
taaatatttagactttatgaggtgcatatagtctctgttgcatattgttccttactgttgcatttttttcttttttacatcccttcaaaaatataaaaacacttcttagcttgtgggccatacataaacagactatgagtgagatttggcccatggagccataatttgccaaccctggctacagataatcaattatagtaggggacacagaaagcaagtaaacaagcaaacaaacaataagtaagtgctaaactaacaagaaaacatcactacctataacatataaatcactcccaagggatcccttgtaatactatggagatcctgtccactctcctccccccagagaaccactggcctactttttgtctctttagattagtttgaattttgtagagttttagaaaattgaartcatacactaagaactaattttttaatctgtttttcactctgtctaatcattttttcaattcatacatggtcattacaggaaaggtgtctggatccagactccaagagagggttcttggatctcatgcaagagagaattcagagtgagtacacagagtaaaga

SEQ ID NO: 360403 - DNA, 567 bp, Homo sapiens
gaaattacatgccagctcttctcagaaagatcaaagttaccagtgaatgaacaagttttgaatggaaaatatagagaagtgaggacctgttggagtaaccacgcgaagaagttgaagcccagaagaagaatgcagcaagactctggctgatatcaacctctgagcaacacagagctcagccaaaatggtaggtagaagttgcttctttctacacccctctgaccacctgccgagtgctaaacggttggggagcscctttgcccttgctagccagggcaacacaatcagtgatgattagagaatttcctgagaacacagaaccagtggccagctcgcacagccatacccactctccccttggacctgaactgagatggtgggcaccatactggttgtgcaccagtgtgtcactttccttcccaaggatcctctgcccttaagtcattgcaccaccagaccacctgcaaatatactccacaacctgctctgactttggcaagcacaggggaccagtgggtgcctggggtattgtaggttctctggagatcttactctcagcatggagcc

SEQ ID NO: 360404 - DNA, 595 bp, Homo sapiens
agcaccctgacaacagaggatagactacaaagttgtstgtcctgtactggaggaagaggttctaccctgaccctcgttatagtggtagccatcagagaggcagatccatggcccacaaaggcactgtgctgggaactaaaggatgaagattttacaaacaaggtcatgagacctgtgacagggatatgatagggaagcagactgcatttcttctagttcaggatgaagagctggtgcacccctccatctctttcctggaggcttcagggcactccatcatgatctcttcccaccatgctcatcagtgcaaattcatccaatgggcagcagcttacctgccatatcatactcctaagtgctatatactggactacagcctgaaatgcaccatcaaataaaaaatacatggctataccaaacaatatctgataaagccaccacacaaaacgtatccacatatccacaaccaacatgtagagccttgtcgcccaccaaaagcattcagaaactaagccaaaatacataacatccaccacagttacaccctcaagggaaaaaaaataaagagccccatccaaacaatacaaattcaaaa

SEQ ID NO: 360405 - DNA, 565 bp, Homo sapiens
ctggtgcacccctccatctctttcctggaggcttcagggcactccatcatgatctcttcccaccatgctcatcagtgcaaattcatccaatgggcagcagcttacctgccatatcatactcctaagtgctatatactggactacmgcctgaaatgcaccatcaaataaaaaatacatggctataccaaacaatatctgataaagccaccacacaaaacgtatccacatatccacaaccaacatgtagagccttgtcgcccaccaaaagcattcagaaactaagccaaaatacataacatccaccacagttacaccctcaagggaaaaaaaataaagagccccatccaaacaatacaaattcaaaaataagaaacaacactttccttagatgagaaaaatcagcataagaactccagcagtacaaaaaatcacagtgtttcaacatctccaaaggattgcactagctctttagcactgaaacctagccagattgaaatgtctgaaatgacaaattaaaaatttctaagtatgggttgtaaggaaactcaatattcaagaggatgtt

SEQ ID NO: 360406 - DNA, 565 bp, Homo sapiens
ctggtgcacccctccatctctttcctggaggcttcagggcactccatcatgatctcttcccaccatgctcatcagtgcaaattcatccaatgggcagcagcttacctgccatatcatactcctaagtgctatatactggactacagcctgaaaygcaccatcaaataaaaaatacatggctataccaaacaatatctgataaagccaccacacaaaacgtatccacatatccacaaccaacatgtagagccttgtcgcccaccaaaagcattcagaaactaagccaaaatacataacatccaccacagttacaccctcaagggaaaaaaaataaagagccccatccaaacaatacaaattcaaaaataagaaacaacactttccttagatgagaaaaatcagcataagaactccagcagtacaaaaaatcacagtgtttcaacatctccaaaggattgcactagctctttagcactgaaacctagccagattgaaatgtctgaaatgacaaattaaaaatttctaagtatgggttgtaaggaaactcaatattcaagaggatgtt

SEQ ID NO: 360407 - DNA, 565 bp, Homo sapiens
ctggtgcacccctccatctctttcctggaggcttcagggcactccatcatgatctcttcccaccatgctcatcagtgcaaattcatccaatgggcagcagcttacctgccatatcatactcctaagtgctatatactggactacagcctgaaatgcaccatcaaataaaaaatacatggctataccaaacaatatctgataaagccaccacacaaaacgtatccacatatccacaaccaacatgtagagccttgtcgcccaccaaaagcattcagaaactaagccaaaatacataacatccaccacagttacaccctcaagggaaaaaaaataaagagccccatcyaaacaatacaaattcaaaaataagaaacaacactttccttagatgagaaaaatcagcataagaactccagcagtacaaaaaatcacagtgtttcaacatctccaaaggattgcactagctctttagcactgaaacctagccagattgaaatgtctgaaatgacaaattaaaaatttctaagtatgggttgtaaggaaactcaatattcaagaggatgtt

SEQ ID NO: 360408 - DNA, 564 bp, Homo sapiens
tggtgcacccctccatctctttcctggaggcttcagggcactccatcatgatctcttcccaccatgctcatcagtgcaaattcatccaatgggcagcagcttacctgccatatcatactcctaagtgctatatactggactacagcctgaaatgcaccatcaaataaaaaatacatggctataccaaacaatatctgataaagccaccacacaaaacgtatccacatatccacaaccaacatgtagagccttgtcgcccaccaaaagcattcagaaactaagccaaaatacataacatccaccacagttacaccctcaagggaaaaaaaataaagagccccatccaaacaatacaaattcaaaaataagaaacaacactttccttagatgagraaaatcagcataagaactccagcagtacaaaaaatcacagtgtttcaacatctccaaaggattgcactagctctttagcactgaaacctagccagattgaaatgtctgaaatgacaaattaaaaatttctaagtatgggttgtaaggaaactcaatattcaagaggatgtt

SEQ ID NO: 360409 - DNA, 532 bp, Homo sapiens
ggcttgtatcatatgccccttctatgccaattttgctgaagattttaaccataaagggattctgaattttgccaaatgctttttctgtgtctattgagatgatcrtataatttttgtttttaattatgtttacgtgatgtatcacatttatgacttgtatatgttaacccttccctgcatacctggtataaaccccacttgaaatctttagattaggaatttggctgttcatttttagctatgtaaaattttactttatataatttgaagttatattattaagagcatatgcatttcaaattgttttgtcttttaaatgaatcaattattttatcattataaaatgtttctctttcacttgacaaatgggatctaatcaaattaaagagcttctgcacagcaaaaagaaaaaaataaacgaacatgagaactaacagacacctacagaatgggataaaattttggcaaaatatgcatctgacaaaagtctaacatccagcatctacaaggaacttaatcaaatttacaagaa

SEQ ID NO: 360410 - DNA, 680 bp, Homo sapiens
aaagacaagatccaactatatactgcctacaagaaactaactcagttcacctataaagacatatagactgaaaatgaagggatggtaaaagatatcccatacaaatggaaacaaaaaagcaagagtagctatacttatattagataaaatacaaagataattatataatgagaaagaaatcaatacagcagtatcacaattataagtgcaaatgcaaccaacactgaagcacctaaacacagaagcaaatattaacagaccttaaagracagatggactgcaatacaataatagagtacctcaacactcaactataatcaacaccccactatcatcaatgaacagatcacccaaacgacaaaaaatcatcagttaaactgtaatctctactgaatggacctaacatttacacagctttccactctgcaactgcacaatgcacattctactgagtagcacatggattattctccaggacagactatgtgttaggccaaataacaagtcacagcccatttttaaacattgaattcatatcaagcatcttttctgatcacagtggaatagtatgagaaatcagtaacaggaggaactttaaaaactgtacaaacatatggaaattaaaatacatgttcatgaacaatgaataaagaaataaaaaaattaaaaatttattgaaa

SEQ ID NO: 360411 - DNA, 680 bp, Homo sapiens
aaagacaagatccaactatatactgcctacaagaaactaactcagttcacctataaagacatatagactgaaaatgaagggatggtaaaagatatcccatacaaatggaaacaaaaaagcaagagtagctatacttatattagataaaatacaaagataattatataatgagaaagaaatcaatacagcagtatcacaattataagtgcaaatgcaaccaacactgaagcacctaaacacagaagcaaatattaacagaccttaaaggacagatggactgcaatacaataatagagtacctcaacactcaactataatcaacaccccactatcatcaatgaacagatcacccaaacgacaaaaaatcrtcagttaaactgtaatctctactgaatggacctaacatttacacagctttccactctgcaactgcacaatgcacattctactgagtagcacatggattattctccaggacagactatgtgttaggccaaataacaagtcacagcccatttttaaacattgaattcatatcaagcatcttttctgatcacagtggaatagtatgagaaatcagtaacaggaggaactttaaaaactgtacaaacatatggaaattaaaatacatgttcatgaacaatgaataaagaaataaaaaaattaaaaatttattgaaa

SEQ ID NO: 360412 - DNA, 680 bp, Homo sapiens
aaagacaagatccaactatatactgcctacaagaaactaactcagttcacctataaagacatatagactgaaaatgaagggatggtaaaagatatcccatacaaatggaaacaaaaaagcaagagtagctatacttatattagataaaatacaaagataattatataatgagaaagaaatcaatacagcagtatcacaattataagtgcaaatgcaaccaacactgaagcacctaaacacagaagcaaatattaacagaccttaaaggacagatggactgcaatacaataatagagtacctcaacactcaactataatcaacaccccactatcatcaatgaacagatcacccaaacgacaaaaaatcatcagttaaactgtaatctctactgaatggacctaacatttacacagctttccactctgcaactgcacaatgcacattctactgagtagcacatggattattctccaggacagactatgtgttaggccaaataacaagtcacagcccatttttaaacaytgaattcatatcaagcatcttttctgatcacagtggaatagtatgagaaatcagtaacaggaggaactttaaaaactgtacaaacatatggaaattaaaatacatgttcatgaacaatgaataaagaaataaaaaaattaaaaatttattgaaa

SEQ ID NO: 360413 - DNA, 578 bp, Homo sapiens
agataaggctaggcatggtggctcacacctggcaycctagtactttgggaggccgaggctgtttggatcactcgaggtcaggagtttgaaacgagcctggccaacatggtgaactctctctactaaaaacacaaaaaattacctgggtgtagtgggaggtacctgtaatccagctactgaggaggctgagggaagagaatggcttgaacccgggaggtgggaggttgcagtgagtcaagatcatgccaccgcactccaacctggatgacagagggagactctctttgacatgcttgaactttatgacttgtcctatctttccctatttcctaattagtcattctactttaggacaagaatttgccataccagctcctctctcatgtaacatttcttcataacatttctaaccataaactcatcttcatatccacaattttctttgtatctctcctccctactaatttcttatgcccacccaaatcaaacaagatcaggtaatgcaaggcaaaacaatagagccttagattttgagagggacctgtctgcctacagttcttgggattccatgaggaaaa

SEQ ID NO: 360414 - DNA, 578 bp, Homo sapiens
agataaggctaggcatggtggctcacacctggcaccctagyactttgggaggccgaggctgtttggatcactcgaggtcaggagtttgaaacgagcctggccaacatggtgaactctctctactaaaaacacaaaaaattacctgggtgtagtgggaggtacctgtaatccagctactgaggaggctgagggaagagaatggcttgaacccgggaggtgggaggttgcagtgagtcaagatcatgccaccgcactccaacctggatgacagagggagactctctttgacatgcttgaactttatgacttgtcctatctttccctatttcctaattagtcattctactttaggacaagaatttgccataccagctcctctctcatgtaacatttcttcataacatttctaaccataaactcatcttcatatccacaattttctttgtatctctcctccctactaatttcttatgcccacccaaatcaaacaagatcaggtaatgcaaggcaaaacaatagagccttagattttgagagggacctgtctgcctacagttcttgggattccatgaggaaaa

SEQ ID NO: 360415 - DNA, 578 bp, Homo sapiens
agataaggctaggcatggtggctcacacctggcaccctagtactttgggaggccgaggctgtttggatcactcgaggtcaggagtttgaaacgagcctggccaacatggtgaactctctctactaaaaacacaaaaaattacctgggtgtagtgggaggtacctgtaatccagctactgaggaggctgagggaagagaatggcttgaacccgggaggtgggaggttgcagtgagtcaagatcatgccaccgcactccaacctggatgacagagggagactctctttgacatgcttgaactttatgacttgtcctatctttccctatttcctaattagtcattctactttaggacaagaatttgccataccagctcctctctcatgtaacatttcttcataacatttctaaccataaacwcatcttcatatccacaattttctttgtatctctcctccctactaatttcttatgcccacccaaatcaaacaagatcaggtaatgcaaggcaaaacaatagagccttagattttgagagggacctgtctgcctacagttcttgggattccatgaggaaaa

SEQ ID NO: 360416 - DNA, 545 bp, Homo sapiens
aaaataaatataaaatttggttattcatattgttaccatttgaggttatcatagccctattttttaaaagtggggctaacaatattttaatagcaaattaatcagtgaattaatataaaatccagataataggtagatatactcaatcaagaaatccaaatttttgcctgttataattaaaaaataaataaatatgttcagaaatcatgactaccactattattcttgtcatttgaatgtcattgactagagttaattttgagtgtcattttgctactcctattatttcatactaataaacacaattgactgggtggttttgctatccctattagtgctcatttaggtagctgagaaaaagcataagtggttagaatgatacaaaaagtataggtaccttatcaaaactgatattttatatatttttatatagcaatcagragccaaattcaagttatgattagctgcatgtaatctctaccaaagttctatatacgttacactaagcatttctaggaacatagagtgtttgaagtaagagcacg

SEQ ID NO: 360417 - DNA, 592 bp, Homo sapiens
tattaatcttttaatggtaatgtgggatttgtacaaatccttacaaatctttgagccacagtttcctcatcaaacttttaaggtttatatttctgtaaacccttaggtaatgaatatatattaaacattactggatttataaaaggtaattcagaacttcctcttgaaaacggtaaagtgggcacgctatccttcctttttcagaaatcaaccaaaagtagcaaggagatagmaaaccagattcccaaactccattttttataagcaaggagacttcggaaatccaaagcacaaacaaagagaaggaagctggcagaatgatacttgctaattaaggcctgggcaaattattgatacaagatcaacaaacagatgcaccattggcagaggtgggtggtctctaaaactgacttgcgaaagaaaattaaagtgaaaaagaaaaaaagaaaacgaaaaaaccaaactggcttagaaaagaaaatgaagcaaacgtcagtttgctgaggctgatggaagaatgatacagacaaatataaacactactgtttttttgtaatgtggtagaagacagtcccagcactttgaatagccc

SEQ ID NO: 360418 - DNA, 590 bp, Homo sapiens
ttcttttcttctgctagttttgtggttagtttgttcttatttttctagtttccccaggtgcgatgttacataattaaattgagattattttaaccttttcaggcccacagttagcatataaactttcytcttaacactgcttttgcagcataacagagactttagtatattgtgtctctgtcttcatttatttcaaataattttttgatttatcccttactttcattgtttacccaaaaggcattctggggcaagttgtttaatttccatataattgtatggttccaagagatcttcttggtattgatatctatttttattccactgtggtccaagactataggtggtatgattttgacctttttgaatttgttgagatgtgctttatggctgagcatgtggttgatcttggagtaggttccatgtgcagatgagaaaaatgtatattctctggttgatgggaagagtgttctacagatatctgctagttccaattggtcaagtgtcaaatttagttacagaatttcttttttactttacttttctccttcaatcttgctaatgctttcagtgggatgttgaaatcttca

SEQ ID NO: 360419 - DNA, 615 bp, Homo sapiens
tagttccaaaagagcaataacaatcactgttgttcagctctcaggagctcctactcttaggggaagggagacagcatcacatcaagagaatacccagtggaacaaaagaatatggatgggaagcctccaatctcatatttttctgctggtgggaagtttcttacagcagagacacaattgcagtgctgggcacagcagggcaagtctgcacttctactccaacaagcaggcagcctttgtgctcgtgaaggattttggagaatggatgcttgttctccactagtccaccactgcagacacagctgaggcttctcccatgggtacttagtgtggatgcactttatagggagcctttctggaaaagttcggggtgattgcatccccaaagtttcaggcttgcatgagaagcagaatcacaattcctctytacttggaacatcaacttttctacagacaaaaagagaagtctattttatctcaatagctggaacactgggacagcattgagactgggaggtggatagctttcctgcctgtctggcaggggagatgaggtaactcccatccttcacccgataaaacctcagtatatcgaattgagagctcccccagcca

SEQ ID NO: 360420 - DNA, 519 bp, Homo sapiens
ttaaataaaaaccaaaatgagattttattacacatatatgagaatggtttttaaaaactgcagtatcaagtggtgatgatgaagatgaggaaccgctctcgtacattgctgctaggaatgcaaaatggtacaaccgtttggagagcagtttaatactttgcttataatatatgaaatgtatatacgtacataatgtaatatgaacccagaaattgttcttccagacatctacccaagagaatggatatgtttatagcagtaactggaaacaaggtaaatatccaaatatccattaactatttaatgaataaatatrccttggcccatctgtacaatgcaatactgttcagcaataaagggaacaaaatattgataatatttaataaggcaaaatctcaaatttattatgttaaattaaggaacagacatataagactatagactttatgattccatttatattatattctggagaaggcaaaaacataggaacagaattcaggttagtaatttctaggc

SEQ ID NO: 360421 - DNA, 548 bp, Homo sapiens
tcagtatcctgtggcccaagtgagagagaagcttgtgaagtagtctaaacttattgcaagccttctctttttctgagtcctaataaaaagaataaaagtctaatgaaaaacagagtttaagggtacttggtaaataggttggagtaataaacctagataaagtatatactgcatccaaaattgaaagagacaagcttcttcygtaatgataggaggagcctaatgcagcaaatcgcccttcaccttcacagggatatctagacatgtgcagaccattgaaaccttagaaatgtcatgaggtaccaggcctctgattttttatgagattctttttctaccctgtatgtatatgtcttgtaaaatttctagagtatttcattcttcatgttcaccagatccaatcagcatggtgtcatccctgtaatggaacagcatgatgtcttataaaacagacagccaatcaacatacctttagactagattatgtcatggggctggatgtttgatttaacactgaggcaagtcagttgacagtgtattgttaactc

SEQ ID NO: 360422 - DNA, 548 bp, Homo sapiens
tcagtatcctgtggcccaagtgagagagaagcttgtgaagtagtctaaacttattgcaagccttctctttttctgagtcctaataaaaagaataaaagtctaatgaaaaacagagtttaagggtacttggtaaataggttggagtaataaacctagataaagtatatactgcatccaaaattgaaagagacaagcttcttctgtaatgataggaggagcctaatgcagcaaatcgcccttcaccttcacagggatatctagacatgtgcagaccattgaaaccttagaaatrtcatgaggtaccaggcctctgattttttatgagattctttttctaccctgtatgtatatgtcttgtaaaatttctagagtatttcattcttcatgttcaccagatccaatcagcatggtgtcatccctgtaatggaacagcatgatgtcttataaaacagacagccaatcaacatacctttagactagattatgtcatggggctggatgtttgatttaacactgaggcaagtcagttgacagtgtattgttaactc

SEQ ID NO: 360423 - DNA, 570 bp, Homo sapiens
tctgtcatttgctaagttagcctgatcctctttgcctactgctcacccctttgtagtcctctccagcatgcacttattttgaagtatagcccaggtgacttcccagctcctttttaaattgtcgtcttcgtaactggtgcccttgttcctcagccctgtctccgttactaagaggaatcagaatttctagcaggaagattctacccagtttcaatttccagcaggaagattctatctagtttcagaagtatattctaggactgtgtgatatatcacttttgcgattggaaaatatttaaattaagttctgcagatgcgaactgggatctaagtagtttttattagttgttccttgtccctyactttcaaagtttctatattagtcatctcttaatattggattatataagggtataccagttcctacaattaaattcatgtccaaattatacctggaatttttagtggtagctacttttgtacttactaatcttatactgtagcctcctgttagatacccataatatcatcttgaatttcctggagcttttaccaattttgacttggctt

SEQ ID NO: 360424 - DNA, 575 bp, Homo sapiens
cttttatataggaagatcattgtaaaagtctgtgatagccattcttgtcaaagtgtttctagaataccaatacatccttgaatcttgtttctctttactttaatgaccatatttttatttaatatattcatgcaaattgaaaacataaaccccaaacgaaaaatatacaattcatgaaaatgccaacattcccatatgctcaaacaggcttcttttctctaggcattggttacttagaaactaaacattacaatactccactaaagaagaaatataacattttagcaatgtaytactttatgaaatctgatatttgcatattgttaaaaatgcacctattacacgtgtatattaaaagttttctgtttgcaaaaatcagcttattgtatagtaatttgtttgagtagaactaatactaaaaagatttgttgaaactttctcttcccttggtttccacgtcattgttttgtcactttcttgccaaccttgatgtttcatttactatctcagcttcatctttcaggtccttaaatacatgtgttccctaaggtctgctattcatttctttgttcttc

SEQ ID NO: 360425 - DNA, 594 bp, Homo sapiens
gtaattgtacatgttgatctgaattcattcagaattaactataaaaaattactcacatgcgaattctattttggaggtatacacgagagatctctgtggcagttattatttttaatatttcttacttaccatattaattggatcaactggtccaatgctgtttacataaacatcagtttcaattacygtgggcctcactgcaaaatatcaacaaaaagaaaggtcaaagatatgattagacattgttttaaataaatcttagttttaaagaaatcttaataactacttatatattaacacttcaatcataaaacatcttttattatgaaatgcagaaatgtagcctttataaaaaacaatctttttggtttgcaaatcagtcacagataattatatagagataaagcacatgagataatgcagaaaaatgaccttgtagactgaaagtttctgttattgtggcatgtttttagtcatacatgctcagttatccttttcaaacttcatctgtttttcctatatgaccgagtacttatcactcataatcgcaatgctatgattgaccaggcaagatgtatttattcttttaataca

SEQ ID NO: 360426 - DNA, 607 bp, Homo sapiens
tgaattctattatttgaaaaattccttgctggagatgagggcraaggtaagaaatataaccaggtcaaagagaaaactcgttgtcaacatgggattaaataatggcaatgctcgatacacgatttcatttaattccagtactactgaaggtcttaatactagagttgtgtgtttcaggtcatattgctggtaaatggtagagtgagatttgaatttagatgaggctggtggcaaaaccaatatccatggtctttgctccaaatcacatattatttaattttatattaacctcaaattaaatagtgtgtatgtatgcacatgtgtgagttattgcatgtgtgtaaacatccttcttttatgctatgatatggagaacaataagagaaatgtgtggttacttccataaaaacaaaacaaaacaaaaacaacaagaagcaatttacagaaacattaggaactgtggctgtgtatttgagatgtaataaaaataatggaagagttttctaagtgaaatcgttttagaataatattttatttccaaattagtgaaataccataaacatcctattatctcaaaatacattaacaaagtaatatattgaagcca

SEQ ID NO: 360427 - DNA, 573 bp, Homo sapiens
tataagtgggaacgtaaaactctgtacacatggatgtagtgtgtggaatgagagacaatggagattcaggagggtggagtggcagagtggtgaggaagataataaattccttaacgggtaaatgtacattattgtgatgatggctaccctaaaagcctgacttcaccacagcacaacctatccatgtgacaaaattatacttgtaccccatacaatcctataaattaaaaaatctacagatgagaaaaattgtctaggactcttcaatctgaatcatggaggctaccatttttctaaacagtagctctttatactaaaatctatatgaaaatatgtgtgtttgtgcgtgtatgcatatgtacatttaaggaaattttggtttttaacattcaactaacatatgtatctctacacagttttagaatgtaatctcttaacatgacaaaatatgaactacctaaatttatcttaggtcatgttyatatatatatatatatatatatatatatatatatatatatatgctaaattactttttcttagatatgtatggttggatgtgtgtttttatta

SEQ ID NO: 360428 - DNA, 290 bp, Homo sapiens
ttgtgttacaattacctgtgacattcagtttaataatattctttacaggtttgtatcctagaagcattgggctatatgatacagccacagtatgtagtagactataccatgtaggtttgtgtaaatacattctgtgatgtttccacaatggtgaaattgactaaagatacatttcttataatgtgtctctgtcmttaagtgatacataactgtatttgggcaccatagcctggctaagttgacatgtaaaattaaccatcacagagctattaacagtaggaatagacacc

SEQ ID NO: 360429 - DNA, 516 bp, Homo sapiens
atattctgacttttaattttccttcagtaactgttccttcaagtggaatagagtttttcataacatgggatagttggaatggtctagatattcatcctgaccaatatatattgctctcactggcacacctactgaagaatacctggccgttcaaacagggtaaaatcacaaatagttagaataatccagacattcatagagcagtgaaaatcatgcataagcttcaattatctttacctaagcttttcaagttaaactccttttcaaaagtctcagtcaagaagaaactttttaaggctcttaattgaaaaactaatgtgaaattacaaggatcagaagtgaacttyaatactgaagctatgatcacatactctgaaacagtgaagggatatagctgtatgaaaactatcaagaaagacacaatttaagagaatgtgactctttatttataacaagttactggtattttttttgttctaaggatcatgagagtaaagaacactgaaaaattgagac

SEQ ID NO: 360430 - DNA, 642 bp, Homo sapiens
ttacaaaaattaatttaagtgagcctaattttgtccatggaattcgaagataaataaaatattaccctgtcattgtaaatccaaaatcacattttcccctctcagaatttctagatcctkgtcacatatttagaggataggtctatataaacaaacatttttacaaatgatcttattccttgtgctccaggtatccttcccaattctttatatctaattttggggtctatgttagcattaaaaacattgaaagcatccaggaaaatcaagttccaataaattcaataaattattatataactccccagagaaagaggaagattttttaaaaaaattatttctcaaggtggtgaaacttatacttggaatagaggaacaggaaatgaactgaatcagctttgaaaaaaagctgtatttgatttcttgagaaagaagtctaaatgtagttttacctttttattcttatttttagaaataataagatttgtacgccattctttctgatcacacatttaaataaaactgatcaaaataccacttgctttgaaaacaaagtgcttgcttgatggtatatacaaggaaaggcatctttcatatatttacaaattttatttccacttgtaaatattgtcaacatttaaa

SEQ ID NO: 360431 - DNA, 642 bp, Homo sapiens
ttacaaaaattaatttaagtgagcctaattttgtccatggaattcgaagataaataaaatattaccctgtcattgtaaatccaaaatcacattttcccctctcagaatttctagatccttgtcacatatttagaggataggtctatataaacaaacatttttacaaatgatcttattccttgtgctccaggtatccttcccaattctttatatctaattttggggtctatgttagcattaaaaacattgaaagcatccaggaaaatcaagttccaataaattcaataaattattatataactccccagagaaagaggaagattttttaaaaaaattatttctcaaggtggtgaaacttatacttggaakagaggaacaggaaatgaactgaatcagctttgaaaaaaagctgtatttgatttcttgagaaagaagtctaaatgtagttttacctttttattcttatttttagaaataataagatttgtacgccattctttctgatcacacatttaaataaaactgatcaaaataccacttgctttgaaaacaaagtgcttgcttgatggtatatacaaggaaaggcatctttcatatatttacaaattttatttccacttgtaaatattgtcaacatttaaa

SEQ ID NO: 360432 - DNA, 642 bp, Homo sapiens
ttacaaaaattaatttaagtgagcctaattttgtccatggaattcgaagataaataaaatattaccctgtcattgtaaatccaaaatcacattttcccctctcagaatttctagatccttgtcacatatttagaggataggtctatataaacaaacatttttacaaatgatcttattccttgtgctccaggtatccttcccaattctttatatctaattttggggtctatgttagcattaaaaacattgaaagcatccaggaaaatcaagttccaataaattcaataaattattatataactccccagagaaagaggaagattttttaaaaaaattatttctcaaggtggtgaaacttatacttggaatagaggaacaggaaatgaactgaatcagctttgaaaaaaagctgtatttgatttcttgagaaagaagtctaaatgtagttttacctttttattcttatttttagaaataataagatttgtacrccattctttctgatcacacatttaaataaaactgatcaaaataccacttgctttgaaaacaaagtgcttgcttgatggtatatacaaggaaaggcatctttcatatatttacaaattttatttccacttgtaaatattgtcaacatttaaa

SEQ ID NO: 360433 - DNA, 642 bp, Homo sapiens
ttacaaaaattaatttaagtgagcctaattttgtccatggaattcgaagataaataaaatattaccctgtcattgtaaatccaaaatcacattttcccctctcagaatttctagatccttgtcacatatttagaggataggtctatataaacaaacatttttacaaatgatcttattccttgtgctccaggtatccttcccaattctttatatctaattttggggtctatgttagcattaaaaacattgaaagcatccaggaaaatcaagttccaataaattcaataaattattatataactccccagagaaagaggaagattttttaaaaaaattatttctcaaggtggtgaaacttatacttggaatagaggaacaggaaatgaactgaatcagctttgaaaaaaagctgtatttgatttcttgagaaagaagtctaaatgtagttttacctttttattcttatttttagaaataataagatttgtacgccattctttctgatcacacrtttaaataaaactgatcaaaataccacttgctttgaaaacaaagtgcttgcttgatggtatatacaaggaaaggcatctttcatatatttacaaattttatttccacttgtaaatattgtcaacatttaaa

SEQ ID NO: 360434 - DNA, 544 bp, Homo sapiens
acaactttaactatattcatgtccattttagttctaaaaagaaacatagattccaagtcaccaaatattaaaaatccagtagatgcaaaaggaagcaaatattcacatttagtgatatttttaaaagattaaagcatcatgcaggtcacaatattcatattagagacaaatgtgcaccttgasgataaggagaaatgccccaaacacaagtaagttcatgattaaacttgcttagctatatcacaaaaagcagaggcagtatcttattaaatgttaatgacagatcttttgaggatggaactggggatagttgattacattcctaaattttaatggagcactaaaatcatgtaaaaaaaaagagagagacgaattggtacctatttccttgtcacttgatacttgaatagcatatgctcttatgctaatcagaatgaaaattaattttaaaaaattgttaggaggcaattttaagattatgtggtagaaaacacattccatatatgaaacggcattatcataaatggaaatatggtgtgttttt

SEQ ID NO: 360435 - DNA, 640 bp, Homo sapiens
tgcactcctttgaactatggttcacctactgtgcatgtagagagtaaagatgacgacggttggcattcactcatctctaaactctataacttctaaaaaatgagaagaaactttcactatcctaggagaaaggttagggctcttgatgttggaactggaatgtcctagtattgtgccatcatcctatcatttagaatgtatatgtgtatatttggaaggaatcagatgtcatgccacacaaacacacgtatgaaagtaaaatmcgatggttgcaaacttgacagttacatacgaaacttaccgggcctatttggggaacaatcatgaagaagttttgaggtaagtgaacaatacaaaggagaaaagtgaaaatgaacagctggaattactgattctaatattttaggaaatatgagaaaataaatctagttagtccactcagaaatacttgaggaagtaatacatccacttaaggaaaaatgaacaaagaacagttagaaaataagacctctctgaaattcataaagttattgtaaatttttaataagctaaaagtgttaaaatgaaatcttgaaaaaactgctcatagtatggaaaaatggcttaaaatatgataaaaggaaaatctggaatatatgct

SEQ ID NO: 360436 - DNA, 445 bp, Homo sapiens
gtttctatttttaaccacaaagaagtttatatgtgatttctatgatagcttataaatgattccatctaataagtacagtaaaatgcaggtcacataaaagtgacaacaacaatgcatgaggcacatgggtctatacttgaarttctcttggccatctaaacagggatattgacatagctagtggacaaaatccattcgtatctcaattttgtttcctttcattgtttaaaattattttataagttgtataaattatttgagtttctttgtatgctactataacttaaccatagtatttttgtttctatttccatatttttctgggaatgtaaattagtataaccactatgcataactgtttggaagtttctaaaagaatttgaatggattatttataccactgggtttgtataaagttctatgctagagtgtcatgaagagaaaa

SEQ ID NO: 360437 - DNA, 445 bp, Homo sapiens
gtttctatttttaaccacaaagaagtttatatgtgatttctatgatagcttataaatgattccatctaataagtacagtaaaatgcaggtcacataaaagtgacaacaacaatgcatgaggcacatgggtctatacttgaagttctcttggccatctaaacagggatattgacatagctagtggacaaaatccattcgtatctcaattttgtttcctttcattgtttaaaattattttataagttgtataaattatttgagkttctttgtatgctactataacttaaccatagtatttttgtttctatttccatatttttctgggaatgtaaattagtataaccactatgcataactgtttggaagtttctaaaagaatttgaatggattatttataccactgggtttgtataaagttctatgctagagtgtcatgaagagaaaa

SEQ ID NO: 360438 - DNA, 350 bp, Homo sapiens
ctattgaaaatatcccaccatrcaccgactctttacaattgtttaagtaaccttcttactggaaagaaggaaggaaggaaggaaggagaagggaagggaagcgaagggaaggaaagggaggaaaggaaggaaagaaagaaggaaggaaggaaggaaagggaagggagaaaggaaaagcaaggaaggaaaaatagaaagcgagcaaaaaagacaaatgaaagaaagagaatgaaagaaagagtgagagagagcaagcaagctggcccatttcatgtggagagtaagttaaaacgggtgtttatcaatttatatttttaggtggttctttgaagctaaaaatctattttgtt

SEQ ID NO: 360439 - DNA, 547 bp, Homo sapiens
tttctatgaatattttcttttattgtgaaagcaagtttttgttttgttttgtttttagaaagcaaaggaataaaagaatggctactccataggcagagcagcctctatgattttctgaaagtttattcagggagtcaactgtttttacctgcaaataattgtttctcataaatgtaccaactgttttattcaaccgatacattcatgagagatatgagcgtataatttttttttcttgtaatatccctgkctggtttagttatcaggattttgctggtttagtgaaatgagttgagtatcctttctctattttttttaaagaatttgtgtaagacttatagtagttctttcttctatatgtggtgaaattcactagtaaagcaacaaaaatgtaatattatttctgaactgaatcatccttctgtgaatacgttattgagacaattgggaagtggggccaagtattcactggtagtaatatatcaatattatcttcctggttttcattattgtgtcatgcttatataaggttgaaataatataagta

SEQ ID NO: 360440 - DNA, 568 bp, Homo sapiens
gtcttaggcaaaataaaagctttaccaaggaaattacgctagttctgaccaaatgacagtgattttctttactcaacctgactatcgaaacaaaattaagtcctctctggaataaaataatrtcatgtagaatctccattatttttcacataccctactcgcattcaacacaaaattaagacacattccatgaaatacaaccacataaccttaaacagagagaaacaatggaaaagaaaattttaaaaagttactcaagttatcaagacatcgtaatgatcaaagattttaaaataacttctgttaataaatataagaaaatagaagaaaagattgcaaatattatagtatacctgaaattgatttaaaaatcaggtgtaaatactaccagtgagaaacattgaacgggaaattaggtcggtaataaagagcagattgaaacacaaatagggagaaaattatagaagagcgtatgagatgtaatgacatagcagaggtcaaacatacccgcaagtggagttgcagagaaattgagacagaagaaaaatgtctgatgaaatacaggccg

SEQ ID NO: 360441 - DNA, 568 bp, Homo sapiens
gtcttaggcaaaataaaagctttaccaaggaaattacgctagttctgaccaaatgacagtgattttctttactcaacctgactatcgaaacaaaattaagtcctctctggaataaaataatgtcatgtagaatctccattatttttcacataccctactcgcattcaacacaaaattaagacacattccatgaaatacaaccacataaccttaaacagagagaaacaatggaaaagaaaattttaaaaagttactcaagttatcaagacatcgtaatgatcaaagattttaaaataacttctgttaataaatataagaaaatagaagaaaagattgcaaatattatagtatacctgaaattgatttaaaaatcaggtgtaaatactaccagtgagaaacattgaacgggaaattaggtcggtaataaagagcagattgraacacaaatagggagaaaattatagaagagcgtatgagatgtaatgacatagcagaggtcaaacatacccgcaagtggagttgcagagaaattgagacagaagaaaaatgtctgatgaaatacaggccg

SEQ ID NO: 360442 - DNA, 568 bp, Homo sapiens
gtcttaggcaaaataaaagctttaccaaggaaattacgctagttctgaccaaatgacagtgattttctttactcaacctgactatcgaaacaaaattaagtcctctctggaataaaataatgtcatgtagaatctccattatttttcacataccctactcgcattcaacacaaaattaagacacattccatgaaatacaaccacataaccttaaacagagagaaacaatggaaaagaaaattttaaaaagttactcaagttatcaagacatcgtaatgatcaaagattttaaaataacttctgttaataaatataagaaaatagaagaaaagattgcaaatattatagtatacctgaaattgatttaaaaatcaggtgtaaatactaccagtgagaaacattgaacgggaaattaggtcggtaataaagagcagattgaaacacaaatagggagaaaattatagaagagcgtatgagatgtaawgacatagcagaggtcaaacatacccgcaagtggagttgcagagaaattgagacagaagaaaaatgtctgatgaaatacaggccg

SEQ ID NO: 360443 - DNA, 524 bp, Homo sapiens
ttggttgaactttaaaaaatagaagaaaaagacaaaattatgatggtcaccaatgaatcaactaaaaacagtttaataataggcaggaaaataatgaagagaatacaactgagatgaagagaagtcagaaagtcagagagaatattgtgcaaatacaaggcaggcaaagtgtgactaacatacctatagtgggaattcgtgaagaagaaaaccacawcaatgtaacagaacaaatattcaactttatgttcctaaataaataaatacagaagtaaatgcattttcccaaggttgaaaagaaaacctgaaattacattttgaaaaaaatgtatcaatgtctagaaaaacggctacccaaattgaacagctctgaaacatatactaagaaaagacttcagttgaaacctttcttaaaaaatcctaaaggcttccaggaggaaaaaaaaagactaagtaaattacaaggactgaataatagactggcattagacttttcaaaaataacacacaaagcaagttaccag

SEQ ID NO: 360444 - DNA, 608 bp, Homo sapiens
aatttactttttctctcctgagatcagtttctttgtgtttacaattgagagagcaatcccaattgtcccagattcttgtaagtattaaatgagataatatatgtaattattaaatgagataatgtaaaaacttcctgccatacaaccaccatttttccaatgttagtttccrttgcatttcttgggcctggagtgaagccttcctcttactccccataatctcctacagtccacataaatccctcactccaatcaagatgcagctgtactcttctgtctcatgttatacaatttttaaaattattagcttgcaataattgtctgtcctaggaaattccaaagttctatgtataaattaactattttcaggcttttccccatcccgacaggaaaaaaaaaaatctaatagattaattttatatgtaaaattatttattgttatgcacaatttgtaatttctgtctagttggtgtcataattctacctctttatccccaatttaagaaggcatactgacatgcaagtgaatgagaatgtctttattatccttatttgttctaaagggaaattatttgcaaaacttgcatcttcaatattagcaacacatt

SEQ ID NO: 360445 - DNA, 591 bp, Homo sapiens
atctccacaatgggactgtcctaccattagaacccaacaagtcctagatcaaggcatttctcctccaggcagcraacagatgactctactaccagtgctctctccttctatgctctagggctaagtcactcacctccttcctagttttttttttttcagtgctttcttacattctgtcaaattatagaccagttttgctggcccagaagcaggttctctcattataatatgtcctgttctttatccattgtgaattttctttttaaaagcagtcctatatgtaagatgttaggcactggcaaagtggatggggtcagtggctggatggggaatagagctgggacacaggctagagctgctcagcctgctatagcagctgtcacaaaggtgttgaacttcctatatatcaacaacgatgtggaggcaggaattggccacggcattttaagaaatagcaagtagagcactgtggtctcagaatgtaggtctgcgttgagaaagagtatcatgtaaagttcaaggtagcgtaggcttataaaaagcctgaaaatggaaataaaatacttcaatctaagccagtgattcacacat

SEQ ID NO: 360446 - DNA, 611 bp, Homo sapiens
aagggtgattttaaaattttataccattatcattatttattgactttggaatctaactcctaagtaagacaagactccattataccagaaatgttctcatacggaagttgcctatttgggatactacagaacatgtttttattctgagtaggagcttaaataagataatatctatatttctgtcaactgagattccatagttttatgcttaatttaacgtatactcagacaaaagattcatggcttgatgtttaatgcatattttgaaatggcgaaaatactaccaacaggagaaccctgcccatcagcataaaaaccaccaagaaaggaaacaataatatgctttttctttttcaataaagcccaaattccatattcttctgaaattaggctacaattatggtctgacagcatttcccagaagttaaatatctctgtatcatgtatatgtcatctttacatgttatagaaataatctaagggaaaaaattatatgcaaaatgatgctstcagcattattcaaaatagtttttaaaaatcagaatactttaagacatccagcaaaaaggaaatggttaaatatgatatatttaccaagtgaaatactatgc

SEQ ID NO: 360447 - DNA, 591 bp, Homo sapiens
atctccacaatgggactgtcctaccattagaacccaacaagtcctagatcaaggcatttctcctccaggcagcgaacagatgactctactaccagtgctctctccttctatgctctagggctaagtcactcacctccttcctagttttttttttttcagtgctttcttacattctgtcaaattatagaccagttttgctggcccagaagcaggttctctcattataatatgtcctgttctttatccattgtgaattttctttttaaaagcagtcctatatgtaagatgttaggcactggcaaagtggatggggtcagtggctggatggggaatagagctgggacacaggstagagctgctcagcctgctatagcagctgtcacaaaggtgttgaacttcctatatatcaacaacgatgtggaggcaggaattggccacggcattttaagaaatagcaagtagagcactgtggtctcagaatgtaggtctgcgttgagaaagagtatcatgtaaagttcaaggtagcgtaggcttataaaaagcctgaaaatggaaataaaatacttcaatctaagccagtgattcacacat

SEQ ID NO: 360448 - DNA, 570 bp, Homo sapiens
gttttttctgttcacaccagaccctgagaaggcactgagaaatttgataagaacaaagccaataggagtgttgccactattgttttatgttcagtaaacatcagaattttaaatacatacagtaaatttatactgcaccaagggcacctgaaacagacatgccaaaaccacacactgtaacatctgttctaaactacagaaatgctaaatatcctatttcaaatactctaatttgtaaattaatacctgtgatgtcacaatgacastttttcataacaatcaaggaaagtaccattttcttgccaattttatggactaatttccttaactaaccctacaattatataacatttacctgtctttttttttttcttttaccatgctatacacaattacgagatacagaactaggcttaatcacactataataagaaaactcacttttgaattgtgatgtttctgttaacggaaggacaatacgttactataatacttttagtgtaataacttttgtttgaattatgaaaaaatttgaatcatttccctctagaccatttcatttcaaactta

SEQ ID NO: 360449 - DNA, 566 bp, Homo sapiens
ttgatcattcacatttatggcacagttcatacacaaatattttgcatcttggagtagcaacctggtcatctgttctcctgccccctcccctgcaaactatctcctttctctcataacagctctactggttacatatttcacatgctgtctttgataaaaattcattcatttacttcctaaacatctgatatgtccaaggcacaattgaatttattgaaagaaatgtaaaaaataacattacatgatattatgttttctaatttaaaaaatgtttaatagatagggtcttgctctgttgcccaggctggagtgcagtggttctatcctagctcactgcagtcttggactcctgagctcaagtgatcctcccactttagcctcccaaagtgctggattacaggtgtragccactgtgcccagccttaaagaaactattttttacaatgtatggtaggtgggaagtagtcagggaggaggtaggattcatttgagatgaacctagatgggcaggatattgccagaaaattgagacggaagggattctgtatacagagatgtgatgtagg

SEQ ID NO: 360450 - DNA, 478 bp, Homo sapiens
aatattgggagctctgacatcgcaatagcaaacctagcctggcccggttaataaaagaatagtaatactctattgaggggttgccacgtgttargcagtgcattctttcatttaatcctcacaatatacctatgaggtagactgagacttagagaagtcaagtgggttgcccaaggtcacatggttagtaaatggcaaaccaagtttgttggactccatgtctaacttctatagccattcattccctgttgtctagccattcattgactgacatctaatccatcatttactaatctgtttagccagatatgcactcagacagtaaatagaattaacagttattctgttccttaaacattgagacagatctagttgtagtttagagaacaaaagaatcttagaatcatagaatgtttgcactggcagctggtctagagggaagagcaaagctttagaaccaggtggactagcttggaat

SEQ ID NO: 360451 - DNA, 618 bp, Homo sapiens
ctgcccctttggttacacacaaactggaaacttcctgataatcatcaagcctgttggtccctaaagtcttctcaagatttggtttaggcttagcaagcctacttcttattctcaaattactggtcactttagaaattgtattcctaaaaacagaagatagagaaattcatgaatcatgttagatcttgctctctcacattaatacagtctgtctagcactgatagagtgaatgacctgcttaggtgccacactgtctacaagtgttcatttcttaatactaaaatacaaagtagtaactttactagaggtcttaagaagagaatttagtctgtatttgtaaaacagagacatttacataaatctatttcattaaagcttcaaagatacacaacatttactactataatttaaacatgcaaacccctaacctaaaatcaaaatcagtctatctttaaagggtaagaaattagcattgcctactttacatttaaagcattactcaaagctattaactaatttgatggtggttttagtaatatttattaattgaatactaaaataaacctggttggtgtagcattytcctttactttttccattaaacttatttttttttt

SEQ ID NO: 360452 - DNA, 618 bp, Homo sapiens
ctgcccctttggttacacacaaactggaaacttcctgataatcatcaagcctgttggtccctaaagtcttctcaagatttggtttaggcttagcaagcctacttcttattctcaaattactggtcactttagaaattgtattcctaaaaacagaagatagagaaattcatgaatcatgttagatcttgctctctcacattaatacagtctgtctagcactgatagagtgaatgacctgcttaggtgccacactgtctacaagtgttcatttcttaatactaaaatacaaagtagtaactttactagaggtcttaagaagagaatttagtctgtatttgtaaaacagagacatttacataaatctatttcattaaagcttcaaagatacacaacatttactactataatttaaacatgcaaacccctaacctaaaatcaaaatcagtctatctttaaagggtaagaaattagcattgcctactttacatttaaagcattactcaaagctattaactaatttgatggtggttttagtaatatttattaattgaatactaaaataaacctggttggtgtagcattttcctttactttytccattaaacttatttttttttt

SEQ ID NO: 360453 - DNA, 643 bp, Homo sapiens
aaaaacataaccaagcaattaactctatggcagtggttctcaaccctagctacacactagactcacctgggacactttaaaaataccaytgccatgcctccacccccagaggttcttatttagtatgtatataatgtgacttttccatcagcacttaaattatttttagctccccatatgattttaatgggaagccaaggttagactcattgctccaagaattttgctgtccattaaatactggaatatatgccatccaacctctgctctctgtcactttgcaaatttcatgagttacttaacctccttaggtcaaatatttttctttataaaatgctataggcagtgacacagggtgagttcttctggaagctgaaactaaggcaaggattccagtgaaaaacatattacacactttcaggagcaaattccccagcagcctgatactgctagaagctctagagagtgaatgacacctcaaagttggtcacaaacatgaaggcaaagaagtagagcttttgtactcctgcaccagttattggctatgaaagggtgggagtggggaggcaggggaaatgacctaagaatttccagtgcttccagccaccactgcctacaggtgaggggctctgttggtcaaggg

SEQ ID NO: 360454 - DNA, 643 bp, Homo sapiens
aaaaacataaccaagcaattaactctatggcagtggttctcaaccctagctacacactagactcacctgggacactttaaaaataccactgccatgcctccacccccagaggttcttatttagtatgtatataatgtgamttttccatcagcacttaaattatttttagctccccatatgattttaatgggaagccaaggttagactcattgctccaagaattttgctgtccattaaatactggaatatatgccatccaacctctgctctctgtcactttgcaaatttcatgagttacttaacctccttaggtcaaatatttttctttataaaatgctataggcagtgacacagggtgagttcttctggaagctgaaactaaggcaaggattccagtgaaaaacatattacacactttcaggagcaaattccccagcagcctgatactgctagaagctctagagagtgaatgacacctcaaagttggtcacaaacatgaaggcaaagaagtagagcttttgtactcctgcaccagttattggctatgaaagggtgggagtggggaggcaggggaaatgacctaagaatttccagtgcttccagccaccactgcctacaggtgaggggctctgttggtcaaggg

SEQ ID NO: 360455 - DNA, 643 bp, Homo sapiens
aaaaacataaccaagcaattaactctatggcagtggttctcaaccctagctacacactagactcacctgggacactttaaaaataccactgccatgcctccacccccagaggttcttatttagtatgtatataatgtgacttttccatcagcacttaaattatttttagctccccataygattttaatgggaagccaaggttagactcattgctccaagaattttgctgtccattaaatactggaatatatgccatccaacctctgctctctgtcactttgcaaatttcatgagttacttaacctccttaggtcaaatatttttctttataaaatgctataggcagtgacacagggtgagttcttctggaagctgaaactaaggcaaggattccagtgaaaaacatattacacactttcaggagcaaattccccagcagcctgatactgctagaagctctagagagtgaatgacacctcaaagttggtcacaaacatgaaggcaaagaagtagagcttttgtactcctgcaccagttattggctatgaaagggtgggagtggggaggcaggggaaatgacctaagaatttccagtgcttccagccaccactgcctacaggtgaggggctctgttggtcaaggg

SEQ ID NO: 360456 - DNA, 587 bp, Homo sapiens
cactccaggctacctctttatgtgccattctagctctagttcttgagatgagatttttttttaataaataaaataattcaagtaatgaaaaattctgtggacagcaaattgtcaaattagaaattagtcttgttcatcttgttttatgcaaatgaatgatgttatcttccaaaaattatattgaaagtattttttctaacatccttgagaaatagctggccaagcacaatctgacagttcctttctctccctattctgctcagagtcagcccaacttgcattttgagtgaaccctatttagtccttgaagatcacagggctccgaaacatgtctgaagcttccatgccagagaaaatggggcagtcaacgccagcagatggcagcatcattggacgcagcccctacttgctgcgtcccacaagagggctcatgactcagaagtctgggaggaggtcgaccytcctagcagcaactgagcaaacatttttaatttcacagctactagagtatccctgaacagaatgctggacggactctcttagcacactcagatgaaccaccccaacctgctcacaaggtataccct

SEQ ID NO: 360457 - DNA, 590 bp, Homo sapiens
gtgtgtcactgacctaggcctcacacacagtcagctggaggtccatgataatggaatggggaaaggttagaaaatagaagagaaaatgacttagtgagcactaccaagggaccagcagcattacacaatgaagtcttggagtgcaagggatcacatgagagttgtgcttgtataggtttacaagtggcccctagggcactgctatagtgcccatggccttcagcttcaccccaaagyagtcattgatggcaaagtcgaaattactatagtacagtaagtgcattaaattttgtcttaaatttcagagaacatcaggttcttaatgtccttcaacactaacagaacatcaatccagagaaggtgagcagtcctctaattatgtggtgccctggggattatggccacaccctgtattttatattccttcttatctgggagtgtctggttcttacccagttgcaggccattgtctagacgcttgagttttacataattctgtggaaatattgaaacagaacagactcttataaggtataagattttccttgtaattaagtaagatatccacccaccatagtgcctaagatgaa

SEQ ID NO: 360458 - DNA, 602 bp, Homo sapiens
attgggaatacagtatgtgtttcttgtctattaggcagacagtgactyttctggctcaactgaggctaattcttgcttagaccttcacttcatatgcctgtcctgtaaaagtggagagagacagacttctcccagctgcactgaagaagagtgtattccagcagtcaatgtctaataataagtggttagaaacatccttattatttttacataattgcacatatagggcaggacgaagtcctttagagaccctaatcactgaaaacataacaatgtgcctcctgtcttcccccaaaataataataactaggcaagggaggatgaagaggtatggcacagaggatgtttagggcagtgtaactactctgtttgatactatcatggtgtatgtgtgtccttatacatttgtcctaatccattgttctagtccatttgggctgctatcacaaaatacctaaaattgggtggcttataaacaacagaaatttatatctgttgtagtggctgggaagtccaagatcaaaacacaagcagatctggtaccaggtgagagatggcttcctgcttcacgcttcatagatggtgccttctcactgcattct

SEQ ID NO: 360459 - DNA, 602 bp, Homo sapiens
attgggaatacagtatgtgtttcttgtctattaggcagacagtgactcttctggctcaactgaggctaattcttgcttagaccttcacttcatatgcctgtcctgtaaaagtggagagagacagacttctcccagctgcactgaagaagagtgtattccagcagtcaatgtctaataataagtggttagaaacatccttattatttttacataattgcacatatagggcaggacgaagtcctttagagaccctaatcactgaaracataacaatgtgcctcctgtcttcccccaaaataataataactaggcaagggaggatgaagaggtatggcacagaggatgtttagggcagtgtaactactctgtttgatactatcatggtgtatgtgtgtccttatacatttgtcctaatccattgttctagtccatttgggctgctatcacaaaatacctaaaattgggtggcttataaacaacagaaatttatatctgttgtagtggctgggaagtccaagatcaaaacacaagcagatctggtaccaggtgagagatggcttcctgcttcacgcttcatagatggtgccttctcactgcattct

SEQ ID NO: 360460 - DNA, 590 bp, Homo sapiens
tctgattatataaaatatgatcrtatacaacaaatatttcaggaaatgtaatataaagtagcatattaataacacaaaattctaacttaactttctccgcctttaaataaacaggtaaaattttttgaaagggcaaacaggaagtatacataacaaaaatgtagatcaaaaacatatattaatctatacactctgaaaaccatgaacacacttttaagtgcttacatactttgaagtttgactttatattattccaaaaattatcaatatattataaaaagataaaatcatgagacaaaattatcttattacaatttataaaaatacaaaagaataacaaaaaggaaatgccaaaacattagttatttgaaaattatttttaattttggttcagaaagaaaatggaaatagccaatcacctaaaaaacaaagtatttttgtaaataataaagaaagaaaaatctatgacttcatatgctgattttgtagaaaataaagccactgtgttaattaattatccaacacaaaaaactagagtcaaacaaaacaaacctaaagaaataaaaaataaagataaaaacagaaaataa

SEQ ID NO: 360461 - DNA, 590 bp, Homo sapiens
tctgattatataaaatatgatcgtatacaacaaatatttcaggaaatgtaatataaagtagcrtattaataacacaaaattctaacttaactttctccgcctttaaataaacaggtaaaattttttgaaagggcaaacaggaagtatacataacaaaaatgtagatcaaaaacatatattaatctatacactctgaaaaccatgaacacacttttaagtgcttacatactttgaagtttgactttatattattccaaaaattatcaatatattataaaaagataaaatcatgagacaaaattatcttattacaatttataaaaatacaaaagaataacaaaaaggaaatgccaaaacattagttatttgaaaattatttttaattttggttcagaaagaaaatggaaatagccaatcacctaaaaaacaaagtatttttgtaaataataaagaaagaaaaatctatgacttcatatgctgattttgtagaaaataaagccactgtgttaattaattatccaacacaaaaaactagagtcaaacaaaacaaacctaaagaaataaaaaataaagataaaaacagaaaataa

SEQ ID NO: 360462 - DNA, 589 bp, Homo sapiens
gctattctgttttgactaccactatttaataaatgaattttaaatgtattatttaattaagaagtattctctgtgcagacccacttactaaaaaataaagtaatacctttatttttaaaacattattgatatggtttaataagaaagagtttaaaaatagattatacattaaagtatgtctttatattcatttcttctttgcatttttcgaccaattccctrtaaattacggccacttcatggtaaagaaaccttaattaaaataccaagtgcaaaggaaggacaggatttggatgacatatgtgaatgcaaatgaaaagtactctatagggaaagtgagacttcattgaaggtgacatgcttatggaaaaaaagatgtgctgagcaagcaccttagctgaacaagcaacttggggcagtgccataagctgcaggcattttagtaaaaaatacattaaaaacgtaattgggaaaggcttggttaatcagaccccaaacagcatcaatctttagaactacaaagctagaggaaaacaaaatgacaatcaataagaaatggtgataatgcaaaatcaacaataaatataca

SEQ ID NO: 360463 - DNA, 431 bp, Homo sapiens
caaaccacagactcccccataattggtttcctgtaaggaccatttattaaaacttctggatcttgttctaagtctggattgtatattcaccagaaatgactgtatcattgtgctgattatctgatgtggtcagagaaatagattaaatcagaaacagacaaaaattctaaaaaatgcaaaataaaacttttgcttgaagactttcctcggggaaatatacagcttatattgggtttycttcattggaattctaaaggtagtcacttctggctttttgtcttttctttttctaatcctgaaactcttaaatttgacttattcatagcacccatttcatcaagatttctgagcaactgatagtctaaagctcaggtttatatgaggaaggaaaagaattcctgacattacaagggagaaggcatgagcctagg

SEQ ID NO: 360464 - DNA, 476 bp, Homo sapiens
tctactctcttaaagaatagctagcctatcttacagatctaaaagcacttgcagggaaattgcttatcccaagtcataggaatgcaatcagtgtccatggcagaacgagccccagagcagaattgagcaccaggaattcccagaagattggagaacatgtcagagcatcagtgaagggcttaggggcaatacccctaaaaattgagcaccaggattcagcaccagaattgagcaccaggaattcccagaagattggagaacatgtcagagcatcagtgatgggcttaggggcaatacccctgaaacttacaccaatatctaggactawcttaaagagtaggcccatggacttggacttcttaaaggtgatgtgaataaagcaaaggggagataactaacatttttggatgcctactctctgacaagcatctgttaagatctttgcatgtatcatgttacttactttcttaaacagc

SEQ ID NO: 360465 - DNA, 524 bp, Homo sapiens
gttgtgtgtgagaaatataatatgttttatgaatattcagattgcagcattatttataaaaggaaaatagtgaaaactgcttaaatgaccactaaaaggagattttaatactattaaatactactagatttgtgtattactgtgcagccaataaaaataatgatgcatattcccctttactgaaatgacaagatatctgyaacatatggttaagtaaaaataatttatgtataacatatttatcacattttattttgtgtagaaagacaaaagcatgtgtgtatatataaacagttgaaattttggtgacatgtttcaaattagaaggcaaggttatctccaggatataggattgtaagtaattgtcacattctgccttatagttttctatatctcctaaatctttttatttatttatttatttatttatttatttattcatttatttatttatttatttttaagacagagtcttgctctgtcgcaggctggagtgcagtggtgcaatctcagctcactgcaag

SEQ ID NO: 360466 - DNA, 580 bp, Homo sapiens
gtcttccttaaacaagaaggcagggctgcctgaaaaatctagagtgtttaggaaagttaggcaagagaattggagaagataagagatgacttggaacttaagttatagggaacagactaatctatcmtctagaaatgaataataagatagtcaagtagctttgagaactcacttgaaaataggcagcatgaatttctgataggccagtcagcatggttctatgattagcaaagtcaaatgagaaaaatgttcttaactatccttagcagacattgtggaaaatttaactatttgagcaaaaagtctattttgaactataataggtcattcatcttcactgtaactgctgaggtcattaaacttttacagagagcctgactgcaatatttaaaaaactgtatgtttcaatttgtttctgcttttagagtgttgaaatgtaaaataatagaggactcagactttgtctcatgcttgaggtgctgttggttttctatatattacataacaagagagggtaatgtcctgcatggttgtattttactcagaatacaatatatgttccaagtggttacacatgatt

SEQ ID NO: 360467 - DNA, 580 bp, Homo sapiens
gtcttccttaaacaagaaggcagggctgcctgaaaaatctagagtgtttaggaaagttaggcaagagaattggagaagataagagatgacttggaacttaagttatagggaacagactaatctatcctctagaaatgaataataagatagtcaagtagctttgagaactcacttgaaaayaggcagcatgaatttctgataggccagtcagcatggttctatgattagcaaagtcaaatgagaaaaatgttcttaactatccttagcagacattgtggaaaatttaactatttgagcaaaaagtctattttgaactataataggtcattcatcttcactgtaactgctgaggtcattaaacttttacagagagcctgactgcaatatttaaaaaactgtatgtttcaatttgtttctgcttttagagtgttgaaatgtaaaataatagaggactcagactttgtctcatgcttgaggtgctgttggttttctatatattacataacaagagagggtaatgtcctgcatggttgtattttactcagaatacaatatatgttccaagtggttacacatgatt

SEQ ID NO: 360468 - DNA, 580 bp, Homo sapiens
gtcttccttaaacaagaaggcagggctgcctgaaaaatctagagtgtttaggaaagttaggcaagagaattggagaagataagagatgacttggaacttaagttatagggaacagactaatctatcctctagaaatgaataataagatagtcaagtagctttgagaactcacttgaaaataggcagcatgaatttctgataggccagtcagcatggttctatgattagcaaagtcaaatgagaaaaatgttcttaactatccttagcagacattgtggaaaatttaactatttgagcaaaaagtctattttgaactataataggtcattcatcttcactgtaactgctgaggtcattaaacttttacagagagcctgactkcaatatttaaaaaactgtatgtttcaatttgtttctgcttttagagtgttgaaatgtaaaataatagaggactcagactttgtctcatgcttgaggtgctgttggttttctatatattacataacaagagagggtaatgtcctgcatggttgtattttactcagaatacaatatatgttccaagtggttacacatgatt

SEQ ID NO: 360469 - DNA, 568 bp, Homo sapiens
tctgtccccaaaacaaacaaataaacaaacaaacaaaacaaagcaaccactgacaatggcaggctttcagtctccacctgtgatgctatgttttgattaaaaggttactgtacattgamttttatttttttagatgaaaagaaacatcagaaaccattgaagaacaagatatggtcctctaagaataaggagatcttctgatagatggcttttaaaaatgtttccttcatagttatgagcctcattaacaatggtttttgtgttcaaagtctctctgattttatgaactgacatgatttcttgttccactgtatatacacactgctctagtgcttccattaacccatcacacatttcatcctgtggtctataggcactttttttttgtactgtttacatcattttcattgtcactattatcatgatcactttgactcagaaccactttggctatttcaccttagtcaagaaataaactggagcctcattaggggtgttaaaaaacaccttcaatatttacttctttcagcttactgaaagactctaaacgtatatattttgcatatat

SEQ ID NO: 360470 - DNA, 568 bp, Homo sapiens
tctgtccccaaaacaaacaaataaacaaacaaacaaaacaaagcaaccactgacaatggcaggctttcagtctccacctgtgatgctatgttttgattaaaaggttactgtacattgaattttatttttttagatgaaaagaaacatcagaaaccattgaagaacaagatatggtcctctaagaataaggagatcttctgatagatggcttttaaaaatgtttccttcatagttatgagcctcattaacaatggtttttgtsttcaaagtctctctgattttatgaactgacatgatttcttgttccactgtatatacacactgctctagtgcttccattaacccatcacacatttcatcctgtggtctataggcactttttttttgtactgtttacatcattttcattgtcactattatcatgatcactttgactcagaaccactttggctatttcaccttagtcaagaaataaactggagcctcattaggggtgttaaaaaacaccttcaatatttacttctttcagcttactgaaagactctaaacgtatatattttgcatatat

SEQ ID NO: 360471 - DNA, 568 bp, Homo sapiens
tctgtccccaaaacaaacaaataaacaaacaaacaaaacaaagcaaccactgacaatggcaggctttcagtctccacctgtgatgctatgttttgattaaaaggttactgtacattgaattttatttttttagatgaaaagaaacatcagaaaccattgaagaacaagatatggtcctctaagaataaggagatcttctgatagatggcttttaaaaatgtttccttcatagttatgagcctcattaacaatggtttttgtgttcaaagtctctctgattttatgaactgacatgatttcttgttccactgtatatacacactgctctagtgcttccattaacccatcacacatttcatcctgtggtctataggcactttttttttgyactgtttacatcattttcattgtcactattatcatgatcactttgactcagaaccactttggctatttcaccttagtcaagaaataaactggagcctcattaggggtgttaaaaaacaccttcaatatttacttctttcagcttactgaaagactctaaacgtatatattttgcatatat

SEQ ID NO: 360472 - DNA, 544 bp, Homo sapiens
actatggctactgagaatactgttggttaatgttcactgcttacaagacaggaggcaaacttaactataaacaatagtctatttttgctgtcagcccattatgaggaattatcactaaggtacattttcaaacgaattagattctttcttaagatagtttcatcaagaagaaaatagaatgagtttargataatagattatcagcttatattgaaatcctggctcctgctccaagatggccaaatagatgcaaccagagggaacatctcccattgaggggctgggacatcatgaagacttgccactcctagcagatcttcagaggaaaggcactgagagcaaggagggaagacagatgctaagctgaagggggaggaagctgggtaccctgcccagggctactgtgcaccaccactcattcctggcttccagggactcctgcagatggtgtgagttgagtgagcaaggagcaagctgctgtcctcactggcctctggaatctcagcaggaagagaccctttgaccaccatggaaacttgacttg

SEQ ID NO: 360473 - DNA, 544 bp, Homo sapiens
actatggctactgagaatactgttggttaatgttcactgcttacaagacaggaggcaaacttaactataaacaatagtctatttttgctgtcagcccattatgaggaattatcactaaggtacattttcaaacgaattagattctttcttaagatagtttcatcaagaagaaaatagaatgagtttaagataatagattatcagcttatattgaaatcctggctcctgctccaagatggccaaatagatgcaaccagagggaacatctcccattgaggggctgggacatcatgaagacttgccactcctagcaratcttcagaggaaaggcactgagagcaaggagggaagacagatgctaagctgaagggggaggaagctgggtaccctgcccagggctactgtgcaccaccactcattcctggcttccagggactcctgcagatggtgtgagttgagtgagcaaggagcaagctgctgtcctcactggcctctggaatctcagcaggaagagaccctttgaccaccatggaaacttgacttg

SEQ ID NO: 360474 - DNA, 478 bp, Homo sapiens
gaagacagatgctaagctgaagggggaggaagctgggtaccctgcccagggctactgtgcaccaccactcattcctggcttccagggactcctgcagatggtgtgagttgagtgagcaaggagcaagctgctgtcctcactggcctctggaatctcagmaggaagagaccctttgaccaccatggaaacttgacttggtagggagtgctgcttagataagtggtatgggcacaacttcagccagtgtggaacccagtggtggagcatggccagggatgcccatccccctagcctcgacttgctgtcattggagactttagccctagaggaactgtagggcctgaactctgcaagtcagtcttgcccatgagaggaggccagtccaacttgagcacccccagtcggctggcctctctcagggcccaagcctgactgcacctagtacagagaccaggaacctccttggggccccaagctc

SEQ ID NO: 360475 - DNA, 592 bp, Homo sapiens
tcaaagagatgaacaggaatatgaataggtgtaaatgccttgtacatttgctaatgtttgataccttcatccaaaataaaatgaagcaaaataaatagaagaggtatcactgcagactgagctgcctctatgttacaaaatatartcagaatataaggatctgcctatcttttaagatacttttgaagatatatgtattttacaattaacaaagtgctgggctcctgttaaattttttacaaacagaacttgaaatcactgtaaatgccaggagaggagatgtagagctctcttgcatagcacaaccccctatccagaaagtgtttaattactgactaaaatttagggtcaggcacggtggctcatgcttgtaatcccagcactttggtaggccaaggcaggaggatcacctgaagtcaggagttgagaccagcctggccaacatggtgaaaccccgtctctactataaatacaaaaattagccaggcatggtggcaggcacctgtaatcccagctactcaggaggctgagccaggagaatcgcttgaacccaggagacagaggttgcagtgagccactttcataccactgc

SEQ ID NO: 360476 - DNA, 591 bp, Homo sapiens
ccttagctataaattcccacttgcccacgctgtactcaaagttgggtccagtacctctccctggctacaaaaccccattgcgatagtccctatacctatcatgatggtcctgaataaaatcttccttatcatgctatagcaagtactactgaatattttttatttaaaaatacaaagaaagatttctggaaagtaaagtatgatatgcatgagcaaataatagactgaagctttacagcctcatttttattaaacagtagagattcctatctggtttagaatagctcaatttggataatgtctgttaagaagtggatgaggtaaagatattaactggatgccttctagaagaacttttcaaggttatggcagggtttatgaattcattaaataaatgaacaaagtaataaggtgaacaaagtaataaggtaaacrtatcaattcttttcattttttatacttgagagttttcaagggttaaaacaagggttatagaaatctggcttcttcctaagtactttcaacagagaagaatagtgaccaatagtttgtagagaaaaaagccaaagagaagagttttatgtaatgtaa

SEQ ID NO: 360477 - DNA, 534 bp, Homo sapiens
gggttatagaaatctggcttcttcctaagtactttcaacagagaagaatagtgaccaatagtttgtagagaaaaaagccaaagagaagagttttatgtaatgtaactaccatgaattgatgctattatggtgtcactttctaaaaataagtcttcattaatatttttaaatagtttgctgtgagtaaagtatggtaggcccattaatgccccccccccaccaaatgtggctacatgcttatccctggaacctatgaacatgttatcttacatggmaagatggaattttgcagataaaattaaggttgctaatagctgacattaaaatcaggagactatcctaaattatctgatagatccactgtaatcacatggacccttaaaagcagatgataaaggcagaaggctcaatgagataaatgtgatgagggaacaagaggcagaagaaatttgaaatttgaaagggacttgactcatagttgttggctttgacgatggacaaagggggccataagccaaggaattcaaacagcca

SEQ ID NO: 360478 - DNA, 539 bp, Homo sapiens
gtgatgagggaacaagaggcagaagaaatttgaaatttgaaagggacttgactcatagttgttggctttgacgatggacaaagggggccataagccaaggaattcaaacagccaccagtgaaatggggtatggctatcctataattgcaagaaattatatcttgccaacaatctgwttgagcaaagaaatggattctaccctagagcttccaattgggaatgccatttggatgataccatgatgagaccctattggactatgactaacagaactgtaagataacaaatgtgggttgtttaagctgcttaatttgtggcattttgttttgtcaagagcagaaaactaatatagcatgcaatttcttatataacaatatttaactacttataatcaatgacatacaaaacactcatgaagagttttatgcatttagtattctaatttaagaaaaatggttcaaaataataagtaaaggtatgaattttctttttatgcccaggaaaagtaggctctggaaaaccacagggtcatggaaatg

SEQ ID NO: 360479 - DNA, 584 bp, Homo sapiens
gctccatgggatagctgaggaactgtgagtctacttgctttctcagttgggatgcttgtagtctggggtaagttctcaaccctgcgtatcaacagcctggaaataaattctgtgctgatggcaggggacagtgggagtgagatgggccttttgggctggagggctgcaggggagctagatgaagcctgtggcttctgcctttcccccacttccctggtaacctgtgtgatgcagcaaaggcaaccatatacccctgggaacagaacttcattggcctgcaaaccacaccttcatccctccacagctgctgcagcaggccctccccaaggagagtttaagcttagacatgcctaaccctgtctccacctaatggtctttctatactggccctggtggcagaagacagaggacataatcttttgggagctctatggccctgcccactgctttaccctagggcaagcttgtatcctccctgtgataatgcagctggtgtgctcttgaaagtgccacctcctggctggaggcaaaccaacaataagccaatgcactaaacaaaaatkcaaccaaggaccctcacaggg

SEQ ID NO: 360480 - DNA, 637 bp, Homo sapiens
cacatgattgtaagcttcctaaggcctccctaaagcaatgccagtgctatgcttcctttacagcctgcaaaactgtgagccaattaaacctatttttctataagttacctagtctcagatatttatgtatggcaatgcaagaataacccaatagagcatcttttcatatacctgttgataatttgtatgtattctatgaagaaatatrtcctttgcctattttctaatcaagttatttgttttctgctattgaattgtaggagttccctatatgtttttgatattaatgtcttatcagatgtatggtttggaaatattttcttcattcagtaggctttctttttactctggtgatcatttattttgctgtgcagaagctagttaatttgatgaaatctcacttgtctatctttgccattgttgcctctgcttctgaggttataaccaaaaaaccattacccaggcaaatgtcaaaagaagctgtttcccctatgttttattctagaagttttataggttcaggtcttaagtctttaatccatttttagatgattttggtatattgtttgagataaggatccaaattcattcttctgcaagtggatatccagttttcccaatagcatttattgaagag

SEQ ID NO: 360481 - DNA, 597 bp, Homo sapiens
gccagtgctatgcttcctttacagcctgcaaaactgtgagccaattaaacctatttttctataagttacctagtctcagatatttatgtatggcaatgcaagaataacccaatagagcatcttttcatatacctgttgataatttgtatgtattctatgaagaaatatgtcctttgcctattttctaatcaagttatttgttttctgctattgaattgtaggagttccctatatgtttttgatattaatgtcttatcagatgtatggtttggaaatattttcttcattcagtaggctttctttttactctggtgatcatttattttgctgtgcagaagctagttaatttgatgaaatctcacttgtctatytttgccattgttgcctctgcttctgaggttataaccaaaaaaccattacccaggcaaatgtcaaaagaagctgtttcccctatgttttattctagaagttttataggttcaggtcttaagtctttaatccatttttagatgattttggtatattgtttgagataaggatccaaattcattcttctgcaagtggatatccagttttcccaatagcatttattgaaga

SEQ ID NO: 360482 - DNA, 571 bp, Homo sapiens
caaaaccatataattacctcaactgatgcaggaaaagcattatataaaatccagcatcccttcctgataaaaaatatcaacaaactaggcatcaaaagaataagcctcaaaataataaaaccaatatatgacaaacccacagccaacattatactgagtagggaaaagctgaaagcattttccctaagaactggaacaaggtaagaatgcccactctcaccactcctattaaacactgcactaaaattcctatatagatcaagcaagagaaagaaataaaaggcattcaaatttgaaaagagaaagccaaattatctctgttcactgayggcataattgtataccaagaaagccccaaagaatcctccaaaaggctcttagatttaataagtgacttcagtaaagtttcagcatacaaaattaacatacataaatcaatagcatttctaaataccaataacattcaaactaagaactaaatcaagaactcaattcaatttacacagacacaaaaataaataagtaaaatacgacagaatgcatttaacagaggaggtgaaagatctctaca

SEQ ID NO: 360483 - DNA, 575 bp, Homo sapiens
cagtcaattgatcttcaacaaagttgacaaaaatacacaatggggaaaggacaccctactcaatcaatggtgctggaaaaaatgcatagccatgtgcagagaaataaactggactcttatctctcactacatacaaatattgaatcaatatacattaaagatgaaactataaaaatcctagaagcaaacctaggaaaaactcttctaggcattggcctaagcaaagaatttatgactaatatttcacaagcaaatgcaacaaaaatgaaaatagaccaatgagacttaattaaacaagagagcttcttagcacaatgaagtaaataatcaacatagtaaagaggcaaatacagaatgggagaaaatatctgcaaactatgcatctgccaaatgacgaatacccagaatctayaaggaactcaaataaatcaacaagaaaaaaaataactctataaaaaagtgggcaaaggacatgaacaaaattcttcaaaagaagctatacaagcagctaacaaacatgaataatgttcaacatcactaattatcagagaaatgtaaattaaaacttcaatgac

SEQ ID NO: 360484 - DNA, 572 bp, Homo sapiens
tatctaggatacaataaaaatttctaggatacaataaaaatttcttgtcataccaataaaccaggaaaacaacaatttgattgagaagaacaatcaactgatatccatactgagatgaatcagatgttgaaattatctgacaaagattataaagagcagctgtcatacaaatgtttcagttatcaattacaaatgccatggacacaaatgagaaaacagaaatcctcccccctccccgccaaaaaatcaaagttttaaaaagggccacatagaagttataaaatttagtaatcaagttaaatcttactagatggattcagtagtggaatggggatgacagaggatagaattggtaagcataaacatagatcaataaaatttactcaakctgaataacagagataaaaggcaaaaaaagggatcctcaggattctgtgggataataacaaaacatatattaggttggtgcaaaagtaattgtggttttttccattaaaattaggatcccagaggagatgagaaaaggtgtgagactgagactgaaaaggtatccaaacaaataattgtggaaa

SEQ ID NO: 360485 - DNA, 572 bp, Homo sapiens
tatctaggatacaataaaaatttctaggatacaataaaaatttcttgtcataccaataaaccaggaaaacaacaatttgattgagaagaacaatcaactgatatccatactgagatgaatcagatgttgaaattatctgacaaagattataaagagcagctgtcatacaaatgtttcagttatcaattacaaatgccatggacacaaatgagaaaacagaaatcctcccccctccccgccaaaaaatcaaagttttaaaaagggccacatagaagttataaaatttagtaatcaagttaaatcttactagatggattcagtagtggaatggggatgacagaggatagaattggtaagcataaacatagatcaataaaatttactcaatctgaataacagagataaaaggcmaaaaaagggatcctcaggattctgtgggataataacaaaacatatattaggttggtgcaaaagtaattgtggttttttccattaaaattaggatcccagaggagatgagaaaaggtgtgagactgagactgaaaaggtatccaaacaaataattgtggaaa

SEQ ID NO: 360486 - DNA, 623 bp, Homo sapiens
gtgtgagactgagactgaaaaggtatccaaacaaataattgtggaaacttccaaatttggtgaaaaacataaacttgcaaatgaaactatataaatcttgctttatgaacttcaaaagcttmaattaggataaactgcagaaatcaacagcaagatacagcataattaaacttctgaaaactaaatacaaagaaaaaaaatcttaaaatagccagagagaaatgatacattatccatataatagatttctaatctgaaaccattgggcagagaggaaatgaaagatttttcaagcactgaaagaaaagaactattaatcttgaattcaatgtctggcaaaacaaaccttcaggggagaagaaaaaatacagacattctccaatgaaagaaaactaagaaaattgttgttaatagacctactcttcaagaacagataaaggagggagataggtaggaatatggtaggctggaggcaagactaccttgcagctcccacttggatggacagagtagcatgtggagacccactcaaatggacagtgtggcttgtggagacccacatccttaacttttgctccatgaattaccaggaacataccaggaaagctgagaggatccataga

SEQ ID NO: 360487 - DNA, 623 bp, Homo sapiens
cagtatcactctaatacctaaaccaggraagaacataacaaaaaaagaaaactacataccaatatccctgatgatatagatgcaaaagtcctcaataaaatactagctaatcaaatccaacagaatatcaaaaagataatctaccatcatgaaatgggttccataccagggaggcagggatggtttaacatcttcaagtcaataaatgtgatacaccacataaacagaaataaaaacaaaaatcacatgatcatctaaatagatgcagaagaaaacatttgacaaaatccagcatccctttatgaaaaccctcagcaaaattggcataaaagagacatacatttaggcaataaaagccaactttgacaaagctgcagctaacattatactgaatgtggaaaagttgaaaaaattttccctgagaactggaaccaagacaagaatgcccactttcagcactattcaacatggtactggaagtcctagccagagcaatcaggcaagaaacagaaataaaatgcatccaaattggtaaagacgaagtcaaactgttgctgttgacatgactgtatacctagaaaactctaaagactcatccaaaaagctcctagaactggtatata

SEQ ID NO: 360488 - DNA, 623 bp, Homo sapiens
cagtatcactctaatacctaaaccagggaagaacataacaaaaaaagaaaactacataccaatatccctgatgatatagatgcaaaagtcctcaataaaatactagctaatcaaatccaacagaatatcaaaaagataatctaccatcatgaaatgggttccataccagggaggcagggatggtttaacatcttcaagtcaataaatgtgatacaccacataaacagaaataaaaacaaaaatcacatgatcatctaaatagatgcagaagaaaacatttgacaaaatccagcatccctttatgaaaaccctcagcaaaattggcataaaagagacatacatttaggcaataaaagccaactttgacaaagctgcagctaacattatactgaatgtggaaaagttgaaaaaattttccctgagaactgraaccaagacaagaatgcccactttcagcactattcaacatggtactggaagtcctagccagagcaatcaggcaagaaacagaaataaaatgcatccaaattggtaaagacgaagtcaaactgttgctgttgacatgactgtatacctagaaaactctaaagactcatccaaaaagctcctagaactggtatata

SEQ ID NO: 360489 - DNA, 596 bp, Homo sapiens
gtgtaatgtttgtgtattggtagcaagagaaggtctccctaatctggggagtggttgctacaaataatcaccygtgaaaagatgttgaagtagaagtctttatgactgagtttcaactgatgggccaatatgatagataccagataccaaagtgactgtgtatgaactttaccaaatacagctttactaaccagttccacagttactggaccccttaatgagatcaagcatatcaaaatggggcagtgtgtggactagaaagaagaatttgtgaagagagtactttagaaaaagctgatgccatggtggaaatccctattatcaccaaaaagggtatgggtatgagatggggctacagccttgacctccagcctacagggcttcagtgaacctcctggagagcttgacatctccttctatagttggagtccatgtgacttactcatttccaaaaaagattggcagggtaaaggagtgagtggagagcgctgcattgggaagcagtcgagtagctttgaagagcaggacaaagaaagcaggtatatggactagaggtgggtcatctgtccagtagggccagttaaggaggcaacagg

SEQ ID NO: 360490 - DNA, 558 bp, Homo sapiens
tatgggtatgagatggggctacagccttgacctccagcctacagggcttcagtgaacctcctggagagcttgacatctccttctatagttggagtccatgtgacttactcatttccaaaaaagattggcagggtaaaggagtgagtggagagcgctgcattgggaagcagtcgagtagctttgaagagcaggacaaagaaagcaggtatatggactagaggtgggtcatctgtccagtagggccagttaaggaggcaacagggtttccacagaaaggaagctgggagccraccaccagattcccgtgggttgcacaggcggtaagagacaaggaggctctaaagataggaatcttcaaggaacccatgaaaacaccaagtaaggaaggggtcccctttaaagagctgccacccagggacctccaacagcagatggcaatgatactttctataccagactgtgctctgcctaccttatctcctctctttctagagtcaaccttggaagagcaataccttgctagtaagtaaagggaaccatgagcatggaaagagggaa

SEQ ID NO: 360491 - DNA, 554 bp, Homo sapiens
gggctacagccttgacctccagcctacagggcttcagtgaacctcctggagagcttgacatctccttctatagttggagtccatgtgacttactcatttccaaaaaagattggcagggtaaaggagtgagtggagagcgctgcattgggaagcagtcgagtagctttgaagagcaggacaaagaaagcaggtatatggactagaggtgggtcatctgtccagtagggccagttaaggaggcaacagggtttccacagaaaggaagctgggagccaaccaccagattcccgtgggttgcacaggyggtaagagacaaggaggctctaaagataggaatcttcaaggaacccatgaaaacaccaagtaaggaaggggtcccctttaaagagctgccacccagggacctccaacagcagatggcaatgatactttctataccagactgtgctctgcctaccttatctcctctctttctagagtcaaccttggaagagcaataccttgctagtaagtaaagggaaccatgagcatggaaagagggaagctggcctcag

SEQ ID NO: 360492 - DNA, 563 bp, Homo sapiens
atccattcaattattgcataaatatttattgatcacctggtatatgctgttccctcttctaagtgttgaggatagaacaatgaaaacaacaaaatcccacagcaatgaacttgtttttgtcttgttgtgtttgtaaaggaataagaagacattgaatagtgaaggtgaaaatgattagcataacgcctggcatgcagtaggcactcaagacactgggtacattaaagctatattaatattgatgcaaygcacacattttaatggacatgtaggagaaaataagtacaaattggtgttttggaatgcataaatcaattacatacagagaactgattatttgctcatttacacaatatataattactttgaagtcaaaccgtacatcaggcacaatcctaagcgtcgcagataaaaagacatgtcaggtatgggctcttcagagaggatattgacaggcttcatgaaataataagagcttaagcattaaaacagtgacagtggaaagggaaaagatgggttaaagaaaaatgaaggaagaaccatcaggctgtaggagatgacta

SEQ ID NO: 360493 - DNA, 511 bp, Homo sapiens
aaattgatgtcctaatgttctaaagaaaaaaaaagaaaggaaaacatataacctcatactgggaaatgagagtaaagagggaccaacatgcaccagatgcccattacgaggtaaatattgggctgggcactgtgcagcctgtccaaaaaaaaaaaaaaaaaaaagacatggagagatggtcaagctgaaggagacaggaatcagtagaaaggctctgataggaccagccagtacaagaaaatgatttgagtgcmcagtaaagtgaagaaaaatagaaatctgaggaataggaatggcttagaaagtgactattaaagtaataatagagaaaaacatccaactgcagaatttttaacttatcaaaatgtgaagagcataatggcatttatgttttcacaattatttcccattaggttaaaaaatatgggaaaaagacatcaagtattttacctaaatactatatttaggaagatttaattttgatataacttaattactaattctaatttct

SEQ ID NO: 360494 - DNA, 600 bp, Homo sapiens
aaacaggctgagcatggtggctcacacctgtaatcccagcactgtgggaggccaaggtgggtggatcacgaggtcaggagttcgagacaagcctgatcaccatgatgaaaccctgtctctacaaaaacaaaaaacaaacagaaacaagtagtatctgttgatattgtaaagagcaaatcaaactactgttatagcacatgtggttttctaatgagaaaatgcttataaagtatgtctagaggggaaaatcctgctcacttaaataggataaattatatcttccagaggtcctartaagagtgagtgaagaacaatgagtcagggaccccaagaagatactgagttataattaccatgtccatattaacaacataaaagaaaacttataatttagatgactaataaggcctttcattctttcctaccactttcaggtttctcttactgtttccggggtgttagtgttgaaaataatgattcttaggcacttttacagaatagcaatatttagtaaccacgatttggtataaaaggatatcaggttaatttatatacaattttgcaagaaaagtgtggtaacttactgatctttttttgaaa

SEQ ID NO: 360495 - DNA, 634 bp, Homo sapiens
atgacaaaacagccatgcgagtagattaaatatttgggtacgactttacttgacacaagaaaaagcacagcccaaggaggtgacttaagacttagaaggaagccagggagaggacctaagtcaagtatctaattacccaaccaggactacccccaagaggaccttcatcttagcagcacaaggatcatccctcacagttagtgtgtgagttgtcaagcagcacaaggataagatggagcccagtgtgtcagcatctggacctctttttatggttacctagcagggcgtttgcctccagtccctggggagcccagctgaaatttagccagagaagagaggggcgcctcattcctaaacaccaactcccctcccagacacgacacaaagtatcaagcccagtatgactttcctaggtctcacctgcccttctataaggagcacttttaacagaaaatggtaataaagacagggccaggatcagactgttttattactactctcaaattagggkgactgcttcatctctcaaccatgcttctgtcaggatttgagtggctgtgagttgctaagctcaaacctaaaaagggttagactgggctgttattaaggacccaaaattaatgtgactgcttta

SEQ ID NO: 360496 - DNA, 538 bp, Homo sapiens
gagatcatgtggttcagcctcctcgttgttgaagctaaatgtactaagtggtttgtccagtttgcccagtcagttaaagcccagatttctgcctctgagtctgtaactctttcrtactctactacatccttcagtgatatggttctaggatgcatttacccctaagaaataaccaaatcttccatagataaatattttcttccttttaaagttactaattgcagtgatactggtggccatctagtgtttcctataacgaaaagctaccttcatgttcaaaacccacaggaaatcaccagtcaccaaagtttaaccccattgttagtttaaaagggttgcagctttcttcaagtgtttgcaaaaaaaaaaaaagttactatattccataatatagtaatctcacaggtaccatttagcaagcaaaccccttgaagaacatgttttcatatgcacatagccaaaaagtagataatttggagcagatgccagccctttgatgttggctctctccacacaggtgaacaacaggattttgtaa

SEQ ID NO: 360497 - DNA, 587 bp, Homo sapiens
gtggttggctatacactgttgaattacagggggtatgacattttatggctgctcggcatgagttagtctagagtccccacagcaagtcacttcaacaagtatattatttaggtcaagagggagtgggatgtgacaggtgttacattttaaatgcctctctgggctggataatttaaagggacttgcatttctcagataaaaaggtttttttttctttctcatatagataatacacaaattatttccaaatcaacatatytacattaagttgttcctttatctggcactcctcatctcagaaacatgtcattctactgaggctacagaatgtattaaatggatcaactatgtctaaagagcagaccgcatttggcatttcacacgtgaggtcatcataatcagagacaactgggagaaaagaaatgagacaaacaataacagttgattgccactggtttttatcccagaaatctgagaaaatgtatcaaaatcattttaaggttagatattcataagattatgtacattacacaatctctttacaaagccaagtgatgcaacactctttttagatttctaaaaccacc

SEQ ID NO: 360498 - DNA, 587 bp, Homo sapiens
gtggttggctatacactgttgaattacagggggtatgacattttatggctgctcggcatgagttagtctagagtccccacagcaagtcacttcaacaagtatattatttaggtcaagagggagtgggatgtgacaggtgttacattttaaatgcctctctgggctggataatttaaagggacttgcatttctcagataaaaaggtttttttttctttctcatatagataatacacaaattatttccaaatcaacatatttacattaagttgttcctttatctggcactcctcatctcagaaacatgtcattctactgaggctacagaatgtattaaatggatcaactatgtctaaagagcagaccgcatttggcatttcacacgtgaggtcatcataatcagagacaactgggagaaaagaaatgagayaaacaataacagttgattgccactggtttttatcccagaaatctgagaaaatgtatcaaaatcattttaaggttagatattcataagattatgtacattacacaatctctttacaaagccaagtgatgcaacactctttttagatttctaaaaccacc

SEQ ID NO: 360499 - DNA, 588 bp, Homo sapiens
gggttttggggaagaggtggtgtttggttacataaataagttctttagaggtgatttttgagattttggtgcacctgtcgcccgaacagtgtacattgtacctaatgtctagtcttttatccctcacctacctcccagcctttttcctgagtccccaaagtccattgtatcctcaaagtcctcatggtttagctcccacttataagtgagaacaaaatgatgtttagttttccattcctgagtttacttcacttagaataatggtctgcaattccatccaggttgctgcaaatgccattattttgttcctttttatgctagccactgtcagatttaataagaccactacaaccagttggaaagatttaagggcttctttaaaaattcctatgcctctgctccagggcacagactattctccagctcatgctggatgccagcatgactcagaaaatgtgaagaccaaccactagatttttaaatagctccctaagttatatttctctcttcagatgaggtgcttctgagcmcatagtccagggccaaagtcttccatcctacatttcatgtgtggatagctggtcttat

SEQ ID NO: 360500 - DNA, 565 bp, Homo sapiens
ggttcagaatgtactgttaaatgaagaaaaacaagtggaaaacagtgtgtaaagatgtaaaggagattacattgtgatatatatagatagatatgcatatatattccatatatatatatatgcattattccctattccatatatacatatatatatatataggggaaggtctaaaatgtatacagcaagatgttaagataggtttataatggcaatgatggataatamattgtttttattaatatttccttttgcttttttttacattttcttgtgtaaatgctttacaatgaccattttattattattagaaggtggcaatttccatttaagaaaaaaagaatgcttgaatacatcacaaccaacttcgttcaataatattgattaatatgactaaccacattattctagcttatacatacatcagaaatgtccccattataataatgtaatgggttcaaaaatccaaacgagagaatcagggcgatttatctcaggcaggaaggaatcagcaattggatttgttgctaacttgtttcctcatgagtccttcttgtttggttct

SEQ ID NO: 360501 - DNA, 565 bp, Homo sapiens
ggttcagaatgtactgttaaatgaagaaaaacaagtggaaaacagtgtgtaaagatgtaaaggagattacattgtgatatatatagatagatatgcatatatattccatatatatatatatgcattattccctattccatatatacatatatatatatataggggaaggtctaaaatgtatacagcaagatgttaagataggtttataatggcaatgatggataataaattgtttttrttaatatttccttttgcttttttttacattttcttgtgtaaatgctttacaatgaccattttattattattagaaggtggcaatttccatttaagaaaaaaagaatgcttgaatacatcacaaccaacttcgttcaataatattgattaatatgactaaccacattattctagcttatacatacatcagaaatgtccccattataataatgtaatgggttcaaaaatccaaacgagagaatcagggcgatttatctcaggcaggaaggaatcagcaattggatttgttgctaacttgtttcctcatgagtccttcttgtttggttct

SEQ ID NO: 360502 - DNA, 565 bp, Homo sapiens
ggttcagaatgtactgttaaatgaagaaaaacaagtggaaaacagtgtgtaaagatgtaaaggagattacattgtgatatatatagatagatatgcatatatattccatatatatatatatgcattattccctattccatatatacatatatatatatataggggaaggtctaaaatgtatacagcaagatgttaagataggtttataatggcaatgatggataataaattgtttttattaatatttccttttgcttttytttacattttcttgtgtaaatgctttacaatgaccattttattattattagaaggtggcaatttccatttaagaaaaaaagaatgcttgaatacatcacaaccaacttcgttcaataatattgattaatatgactaaccacattattctagcttatacatacatcagaaatgtccccattataataatgtaatgggttcaaaaatccaaacgagagaatcagggcgatttatctcaggcaggaaggaatcagcaattggatttgttgctaacttgtttcctcatgagtccttcttgtttggttct

SEQ ID NO: 360503 - DNA, 565 bp, Homo sapiens
ggttcagaatgtactgttaaatgaagaaaaacaagtggaaaacagtgtgtaaagatgtaaaggagattacattgtgatatatatagatagatatgcatatatattccatatatatatatatgcattattccctattccatatatacatatatatatatataggggaaggtctaaaatgtatacagcaagatgttaagataggtttataatggcaatgatggataataaattgtttttattaatatttccttttgcttttttttacattttcttgtgtaaatgctttacaatgaccattttattattattagaaggtggcaatttccatttaagaaaaaargaatgcttgaatacatcacaaccaacttcgttcaataatattgattaatatgactaaccacattattctagcttatacatacatcagaaatgtccccattataataatgtaatgggttcaaaaatccaaacgagagaatcagggcgatttatctcaggcaggaaggaatcagcaattggatttgttgctaacttgtttcctcatgagtccttcttgtttggttct

SEQ ID NO: 360504 - DNA, 608 bp, Homo sapiens
gtgagggcatccctcagatgacagataatgggcaaaatacattcttggtgtggagcagtgctgcagaattaacttcgctgtgtacatcccagaatcgttttggatctgttaaggtttttattagaatgattaaataggcttttgcagcattaactttacagtagttaccagaaaagactatgctacaagaaccaaaattgaagtaagaagaaaaagactgaaatgatatgattctaaatgaaaaaaatgaagaagtggaatagtttctccacaggcataagaggcaaagcattgtttcagaagtggactggcacctcacctgagatactcaagactggcaacatgggtctacattctttgttaccacagattcccttgtgtccggagagattccctagctctaatgacagmttttttggggggtaatgaggctatgagaagattgaggatctaggtacttgcctttaactctacagcatacaaggtgtgtggctcttatctctaggacaccaatatttaatgttgcatatcatgtatctccagtacaagaagaaagtttatcagaatttagttaatgttggaaactttgtaatataaacaatgtaaac

SEQ ID NO: 360505 - DNA, 523 bp, Homo sapiens
ttttgtatgttgatttgtattttgcaactgtactgaatgtatttattggttttaaaagccaaaacagttctgagaaagaagagcagagctggaagcatcacatttcctgatttcaaaatatttacaaagcaacagtagtcaaaatagtaagatactggcataaaaactgtgtttatctaagcaggtcttcctgagtagattttctatctcctttcatttgggcactrtagttaatttaccttattcagcttaaagtttcatacgatgtgttttgggtttttgccgttgacgtccactgttggcttacatgtatctttctggatgtgctcgctgcgtttgacattgtcaccactcattcttctcaagattctttactctcttgattttcctgtttcaaactcctctctctccctctcgccaacgattttttgcttgtttgtttttgcttgtttgcttatttttctgtctgtttgtttttggtctctttttggggctcctgtcactcggtctttctccccaaggg

SEQ ID NO: 360506 - DNA, 459 bp, Homo sapiens
catgcagacattccaagtgaccatccttgatgacctgggacagcctaccttggaaggcccagagaagtttgaattacttcttcagatgcctatgggtgcagtgcttggagaaccaaataaaactaccattttcatcgaggacaccatcacggactgtaagcagagtgcttgtagttcctttgrttgaaagactttaagagggaaaaaaacagccaagatatgtctcctaacaacagaatgaaactctactgtttatagatcttagcaattctgggatatcagtgatattgtactgtcattggtgttatattctggtgatatgtggaaatgtaatttatatgactgcatggagatagaaatatatatacctagaaaacattgagcccacaaataattagactgtgttcatgttctttttctattttgttttactttgtttctgaggcaagtaagaaatcc

SEQ ID NO: 360507 - DNA, 635 bp, Homo sapiens
acatatggctttatcagttcattctccaataatgcatagtgttcaacaaatttgtgtaataggtttagaattaattaactactgagatgaatactygtttgagagccacaaatacactttactatcaatctagctcccaaaactactagcagaagacctaaaaataggtagctattcaataaatatttagtgaatgaatgaactcatgaatttagttaaacagtcacactcaggaatattgcaaggcacatctgttttcagctcttctaagaaaagtaggctcaaaggcctattatatcatgaaaagttattaaattcattgtaggaattgttacaagttcacgactgcgctctgaatgataatctggtaaaattagaatgataatcccatagaaaaataaaacatctcttaactcattcatttattggtgtactcaacaaacatttatgagcactcactatataccccttacccctaccgtcaatattaagcaatgggaatataacaatgtaaaagactggcatggctcctgctgttatgaaatttgcagtctaatggaggagacaaataaatagctaatttcaagagtatacagtccacgctagagaaatacatagcctaacccagtggtctt

SEQ ID NO: 360508 - DNA, 585 bp, Homo sapiens
actatggggtttggggttagaagaattttcctggaggtatacatatctaagctataataagaaaggggtaaayaatttggccaggaaaagataatgcattttgagcattctaggcaagggaaatagccatgcaaagacctcagttattccaatcaaagagggaaggccttagacgttctcactcacatattatgttaattttggtaaattgaaaaatagccacaggttcttcccgtttttttgcatccaggttcttacaatgtgatgtcacaaatcctcccataaagaggtggggtatatttttctacctgttgagtctggggtggccatgtgacttgttttggtcaaaaggacataagcaaatgtggaaactgcttgtgcattggagcctggcctctttctgagctaaaggcctgagaccactatgtttttatgagcatgagcaagcctgcaggggaaaagagagatcacatggaggaaaattgaggcatctgggctgacaatctgccaactgccaggtaggtaagagaagctgtctgtgcgaggcaaaattagcttcactaccccgcaaagatgtccatatcc

SEQ ID NO: 360509 - DNA, 585 bp, Homo sapiens
actatggggtttggggttagaagaattttcctggaggtatacatatctaagctataataagaaaggggtaaacaatttggccaggaaaagataatgcattttgascattctaggcaagggaaatagccatgcaaagacctcagttattccaatcaaagagggaaggccttagacgttctcactcacatattatgttaattttggtaaattgaaaaatagccacaggttcttcccgtttttttgcatccaggttcttacaatgtgatgtcacaaatcctcccataaagaggtggggtatatttttctacctgttgagtctggggtggccatgtgacttgttttggtcaaaaggacataagcaaatgtggaaactgcttgtgcattggagcctggcctctttctgagctaaaggcctgagaccactatgtttttatgagcatgagcaagcctgcaggggaaaagagagatcacatggaggaaaattgaggcatctgggctgacaatctgccaactgccaggtaggtaagagaagctgtctgtgcgaggcaaaattagcttcactaccccgcaaagatgtccatatcc

SEQ ID NO: 360510 - DNA, 591 bp, Homo sapiens
ctttgagtagattattttgcctcggctttcatagacaaaatagaggccatcagatattaacagtttcccttccctacattataaaacttcccacagtagtatccatccttcttttctgtataagggaaaatgagtcaatatttatcagctgcatgctttttatatctccagcctaacctgaactcttgaaccacactcatacttcttattacctatgaaacatctctactgggtatccaataagcttttcaaacttcactgatcttccttaccaaaatctgttgtcccatcatcttccccatgccaggtaatggcaactcacatccctccagctctttaggctacacactttggagttatccatgccagccaagtcattatcatttcttgtttggattatttcaataacctcctaatttatcctctttctcccwccaacattgtgcacctgcaatctattctcaacacagtatctggagttattctgctaaaaatgtaaatcagattacattttctgtcccaaactatctattgtgttctcatttcatgccaagcaaaagccaaagtatttgcaatggcctataaaactcc

SEQ ID NO: 360511 - DNA, 668 bp, Homo sapiens
tttgaaatgaatgaatctttttttccttgctaaagaactttgtttacatgctgaatccaactttactgccctctttaggaactgattcatcagttattctcagaatttcctgtgtttttcctctctttcatctgaatatagtctttaggctataactgtaattaacaatcactaatctctttaaaaatatcttctctgtggtttccagtttaggctatttttctatgaaaattacagtaaagaaacacaagatggaatgaatgcctaggaaagataggaggctggaagacaaaatgagattttaaaaaatatctggaarttagaaagaggatgagagcaagatgaaggatgaggcagaggagtagaggcagctatagctcagaatatatggaagggagctttgaggtgtgtgtgtgtatgtgtgtggttggggcactgtcagcttatcttcctggtggtgcctagagaatatgtggacccccagttgacaaggagaaacagcagtaatgagaagtaaagctaaaaggagaagagttatttttttttgatatatgtgtatgcattgcatcagtctgttcacccatttcctctccccattgttatacacagaactgttcactggtgagctggagagtacgttgagattacaatgacttccttatacaccc

SEQ ID NO: 360512 - DNA, 515 bp, Homo sapiens
gcgctggaggccctgaccaaagaacagggcagagggtggcagtgacacacttgcctttacttgacatcttcttggatcttcacaataagctactaatgacagggaccacattttgtactcttttttatctcccatacttcctagttcacaggatgtacttgtatttatattaagtaaaaaagtttatgtaacaaggaattagcccmaaaccacatggctttggatgtgtcttaattcatcttttgtacatatatcattatatgtgaaacatctactctttagagattgtttaaataataaataattattgttgtataaaaattaaataattatcattatataagaaaaaagcaaagcacagcacagtgcataaagatgattcatttactctgttgtgcttttttaaagaagtataacaatagatacatctattttggttatgtgcaaatatcctttttctgaagatgaattacacaaattgggattgatgattagctttgggataggtgggaagc

SEQ ID NO: 360513 - DNA, 624 bp, Homo sapiens
gttgggagtcttttcaagaagaaggagaagaccagggttgaagctgagcaatggtttggggcctctgaaagaggaaaaggcaatgggaagaatttttcaaaaataaaaattgcattctaattattatgcctgaatcaatacctttattccttcttgccatcctgaaaaatctttgtcctttttaccaagtgtttttttttttatattccacctaattttaaggaatggccaagccctactccctccaggatgcctttgataaagttcctggtgcatgcagaactctctygtatatattgtttttcatcacatttagttccatcgtatactgtatggtctaattacaggaaccacagaaattagttgtaatttatcgtatgatagcattatgtagaaatacatcagtaatgtactaattactataggttttcagtatgtttattagattggtagtcatttttttatgaaagaacatcgattttcctttgacctaacatatcttgtaaaatcttgtactttctttttccttatattcataagtaaatctttagaagtggaaagctacatttcataatagcagtttccatttccacagatgagttactcctgaacccattataaatg

SEQ ID NO: 360514 - DNA, 535 bp, Homo sapiens
tagagagctaccccattcattttgcatattcactttatggacatatcattatttaatcagtcccytttaagttgtttcaaaagttttgctattacaaacattgctgcaatacatacctttctatatttacctttttattacatcaaatatattcatagaataaattactagaaatataattgatgaataataggtatatgcattttacgttttgatagatactgtcaaattgccttccaaagacattggaatttacccttccaccaatagcagatgaaacagttcacttttcttaatacttaatccaccctcacaactgttacagataattgtgttttttaaaaaataaacaaggcagtacagattagaattgtagcttatcttacccctcttcgatctcatacccctttttacttccattgagattatagccatattaaatttattattcccacaatttttaatactgttacttctaatacatggattttatggatgcattttacatatgttatgaatgctttatacatttact

SEQ ID NO: 360515 - DNA, 522 bp, Homo sapiens
attactcacaggataaaaaatcaaccagccatctcctcagtatgttcataaatttaataagtgatttttcaaagagctttttataattatccctcttttagaaatataacctcaaagctgatttctagttatggcttaatacatttatcaaaacataagttaatatataaaggcacatttatattatctgcaacatttaccttttccagctagagaaactatgttgtttatcagttattgtattaataatagtcattggttaatgttattagggaagttataccattttcatgacatgtcataacaaaataagccacaacagcaacaatagcaccagctctaactctggtactactactactattggtaattctgtgtctactggccctgtgmgataagcctgacagctacacttattcccattttaaggataaggaacctgaagctgagcacacttcagtgacttattttaaggtcaaagcacacacccaaggtagaagcaaggaaagaaaccagtttttc

SEQ ID NO: 360516 - DNA, 522 bp, Homo sapiens
attactcacaggataaaaaatcaaccagccatctcctcagtatgttcataaatttaataagtgatttttcaaagagctttttataattatccctcttttagaaatataacctcaaagctgatttctagttatggcttaatacatttatcaaaacataagttaatatataaaggcacatttatattatctgcaacatttaccttttccagctagagaaactatgttgtttatcagttattgtattaataatagtcattggttaatgttattagggaagttataccattttcatgacatgtcataacaaaataagccacaacagcaacaatagcaccagctctaactctggtactactactactattggtaattctgtgtctactggccctgtgagataagcctgacagctacacttattcccattttaaggataaggaacctgaagctgagcacayttcagtgacttattttaaggtcaaagcacacacccaaggtagaagcaaggaaagaaaccagtttttc

SEQ ID NO: 360517 - DNA, 422 bp, Homo sapiens
gtgtttgctcaattgaagtgagttagaatatggagaaaactaatccataagatgttaataggtgttatctaaaatgaatttccataattaaatatgtttgagcaatgctgggtgaaacaatgtttacacaagtcactttactgtggaatgttcagaggctttatgcatctgtgtaggtatctattttgattctcagagtgagacctggattttcaaagttttcaaacttgttttgccatgaagccttttcatttcccttggagcagtttaggattttgaaaaygctgctgaaaaggatcatgagttaacagataccagtagtaattagcgaacagagagctaggatcagagtcctgtgaggtgtggcacaggctggaaacctgagcagaggagaggtcatgaaaggagaagcagggagactt

SEQ ID NO: 360518 - DNA, 581 bp, Homo sapiens
ggtggtggaaaaatggcaccaacagacttacttgacacaaggkttaccacaaaccttcaatttgtgaaaaatgtagtatctgtgaagcactataaagcaaagtgcaatgaaacgaggtatgcctgtaaatcaccctttctggtattcacgaacttgtacagctcctgttctttgaatctaggttaacttagttaactcacttttgaccatagaacgggacagaagtgatgctgcatgtctttgaaggttaggtcattagaagcctagtagcttccagctgggtgtctcatatactttatatgtgggtcaacgattatgggtgaagcatgactaccctgagatgatcatgctgtgagaaaccccatgttagccactgttgggaaaaagctgagtgttgggaagaaagctgaggcagggcttgcatgtctgacataatgtcctctggaatgtgtctagacttgctggctgtttgcttctagtcttcctaggctcctagatggattgtagttccattatgtcaagtagcagaacatgtaccttataaatgctaaaccatcacagctgtagatcatgcacctgcc

SEQ ID NO: 360519 - DNA, 587 bp, Homo sapiens
tcacagcctccacgattgcgatggcccccggtcccacttctctctctcaaattgtctttttctcaatcctttgactccgccggacttcgttgcccccatgacctggtgttgggtctgatcaccccaaaaaccacaaggagaagctacctgaagagagaggctcccagtccccaagctagccaagtcaccctagctaaagcaccagatatggaaaagaaaaagccctcttggacttccagaccagtcaaaacttcagccttattcatcttctgacataaaatcacatgagsaatcctatgagaaaatcactcacccaagcccagtcaacccacaagaactacaacagatagcaattgctgttttgaactacttagttttggagtgatttattacactgcaataaatgattaaaacaactcttccctctttgcttataaaatggcctgatgagagtaacgataaagtaacccacacaccccaagggtctgaactgtcctaccactttttcctaacagtaaagccaagggagacatatggtctgcctcctaaaatacagcacacgacagttttacctaattctacagaag

SEQ ID NO: 360520 - DNA, 513 bp, Homo sapiens
ctatgcttaaaatgtacctaaagtaagccatcagaataacccaatgccagagaaaagtagaggggacaaaaagaaagtactgtgggaaatacagaaaatctgcagacctagaagaagaattcagctgagatcagaacagatattattgtctttgtcatttctctggccagttctgctgtgaggaatagtggaacactgttatcacaaccctactggatagtatttagcctattgttaatactttgatttaagtttgggtatggcaaatatagttctcatgtttatgaatgggttcaaacattttaaaaatttcctattatttttataacgtcccaagttaaacattttgttagatatgaatgcctagactaggtaaattcagcttgaattttacagctaaatactgawgcctggagttgacaaaactaggtaagaaccaatccttagagactattgtttccacaagcaagtatgttatcagaaatttttacattgtgctataattgtgttttt

SEQ ID NO: 360521 - DNA, 573 bp, Homo sapiens
taccttcttgatttctttttcagttactttattattcgtgtatggaaacactactgatttttgtatgttaattctgtatcctgcaactttactgaatttgtttatttacccattctaataagttttggtagaatatttaagtttttctatatgtaagatcagtcatctgcaaacaggaataatttgactttctcttttctaatttggatgccctttatttctttctcttgactaactattctggctaggacttcctcaacaccatttttaatgaagtcaagctaaaaataagtaagttcttccttaatttaataaaagaaaaaggaaaaacttagcaaatagcaaacataatacttaataggggaacattagtgtattttaattaaagtcttsatcaaaataagggtgcctaattctatcatgacaactggaatgggagtcctaacaaatgcaatgaggcaaaaagaaaaataagttagaaatatagaccaagaaactaacacttttactatttgcatacaatagaattgtctgagagaaggaatggaacaatatttagtaaaacaggttgat

SEQ ID NO: 360522 - DNA, 559 bp, Homo sapiens
ttgcttcccttctggctggtggtgctccaaagagaaaggatgtgatctctttggtttcttcccacaaggaaaaggtagttgttgggaacctgccccrtatgatgaaagtcatctgcagtcagacgagcagcacctaaaccgggagcttgtgaaagaaaactgccagtgggtttctgaagggttcaacatgtgcctgaagtgcccagaacatgtgatcaaaacaaggaactgaaagcaacagtgagtatatggtcatttgtgttcagcattcccatagagttgaaatctaaaacaaagatctgaagttcgcaatgacttcagcagatctgaactgataagtattataaactggaaatgttcattggcaatttgaaggattcaagctccctgcaatcttgatgagtgaaagaatgaagtctactgagagtgatgcaataatgaaacatgcaaaatagtttcttaggaagcataataaacaggcaaccaagggatagggaaataatctagttgggaagtaaagtctattgtaaaaatctcaaggttaggaggaaatatagac

SEQ ID NO: 360523 - DNA, 554 bp, Homo sapiens
ttagcaaaatgtgacccacaagagtgaaccatcattgtcagcatcattgcccagtacttgttagggtgataatgcatgagacaccccaggccccatccaagaacctggtaaactgtagtctcctttctaaaagtgttgatctctaagaaggagaattattattctatatttgtatgagacataraagtttatagcacagttttatactttcatttaatcttgagaaaaattttattgcataaatatcatcaagcctataggtgaggaaattgagatacagagagcttatatagttattaagtggtagggtaagtattcaaattcagatatttatgtttttatatccaaatggcaaaataagtattagaaaataaaatactgctttccaggaatagaaactagaaacagcaactaggagttttgagtaataatttttaaaagtccaagaataagcagagtaagaagttcagttactgaaagttggaaggcatgaaaatgtcctgcagacggttctgaatcttctgtgaattccacatgcaaatgcaggtgttgct

SEQ ID NO: 360524 - DNA, 554 bp, Homo sapiens
ttagcaaaatgtgacccacaagagtgaaccatcattgtcagcatcattgcccagtacttgttagggtgataatgcatgagacaccccaggccccatccaagaacctggtaaactgtagtctcctttctaaaagtgttgatctctaagaaggagaattattattctatatttgtatgagacatagaagtttatagcacagttttatactttcatttaatcttgagaaaaattttattgcataaatatcatcaagcctataggtgaggaaattgagatacagagagcttatatagttattaagtggtagggtaagtattcaaattcagatatttatgtttttatatccaaatggcaaaataagtattagaaaataaaatactgctttccaggawtagaaactagaaacagcaactaggagttttgagtaataatttttaaaagtccaagaataagcagagtaagaagttcagttactgaaagttggaaggcatgaaaatgtcctgcagacggttctgaatcttctgtgaattccacatgcaaatgcaggtgttgct

SEQ ID NO: 360525 - DNA, 608 bp, Homo sapiens
tttaccactcaacaaatcagtacaatcaatgtgcaaattccattttctttctccrttattacttgggtttttagagagaacaaggttgcaaaactactatagtttacaactagagtgaggaatctttcagattgacctccctcctcccacacttccagatggtcccttgaataaagcaagctatagacaaagggctctgtcatatggtatccagctcctgtgggcatctatgccatctgggaaatgatctatagtgatgtgggagatagtatgacatagaaacatgggatttagaacaatacagaaggaatccaaattcttgcttcaccatagttgagctgtgtgctttaagtaagtcacctgtaaagtagggataatgctaatcatgaccgcctatggttgttgtaaagaaaaaaatgagataacaaattaaaattcctagcacagtgcctgttatacagtaagcactcaatagagtttaaccattactcttatttctgcttctgtactcaagaaagtacattgagaagacttctcatactcaaaggggaggaaccttttgcaatgtggtcactaaaggaatacttcaagagggttaagaaaaaata

SEQ ID NO: 360526 - DNA, 609 bp, Homo sapiens
gtgacaggcttcaagctgtagatgatacaggacatgtgaatgaattttttcaggaagattaagtataggggaaaggaaaaaggatggacagtaactagagtgtatgataggacagaaaaaatgctatctttaagaaagaagaggtaacaacactgtggtgcatacttaaaaatttgctaagtggatagctcttgttttcttatcacagataacaataacaaaaataattaataatttgtactctattttcttgaatttttccatgtttaccaatgacaatgcatatatttatcattagaaaatgcaatgatgttataaattttaaaagatgatgagaaatttatagaaaattagtttatttaaataaacctctaactaccatttcaaggaccatgattaaataaaaattacytaagaaagaaagaaataagtgaaagtcacatgaagtagaaaatgaacaaatttgggagttaggattcattcactcattcaatgaacatttattgctcattgttagattaacatgttaatatgttagattagtcattttggacttcatggaaaaggcctaggtttgcctcttggctgtgtcattttcttactatgtgg

SEQ ID NO: 360527 - DNA, 526 bp, Homo sapiens
tactatgttctctctctctggaagatttagctggctccccagtgagcatgcttgtggaattgtcagcatcaatactgatttccaaatgctctctaatggatcttagccatgttccttgccttgtttcagtggtgaccacccttgtgtaaagatttggggcaactaaacctcttttgcttgccatgtcatgaggcataaattttctaatatatgcatttttaagcaaycaagcattatttggatagggcaaatgtttggtattttattttatttggtttcaacaggaaaattactttgcagaaatcttgaagaaaagtatctttctctaaaggaagtgaatacaagccaaagagagaaaagcaatttaccacgtagaagatgacaaaagttaccggcaaactgaggctactcactgacatttcccatgggcatcaagagaagaggaagagcatgggcacagaacacaaagcagtcacctggagtgtttttatggccatatgacttaacattctggtgggagaattgc

SEQ ID NO: 360528 - DNA, 577 bp, Homo sapiens
accaaggggctgatgctgaccctgtccatcagttatgtgggggaggggagtcatgtggtacaaatctggggtgccacagtggatttctctagaatgagtaccttggaaccgccacgaagtctttgkgtattttttttttttttttttggtaaaagcatggcactcttcacctgacttaatcttccagagactggagttgtgagtagtagtgcagacacctgtgagtcctcatccccccagcatgaattgtccccagggaacaggtccttatgcctgaggctttaaatacacaaacacagcagcaccccctctgcttccccagaaacctaccctctgtttcattttctctgagatgttttagctgagactaaggcagcatctcaggactggaaacttcctggagcttactcacatagaatgaaaatacagcagcgttagaaacagggccatagactcagactagacctgagttcaaatcccagccccttcacttccaagctctaggactctgggctgttacttaatctctctgagcccccttttctcatctctaaaacggaattagcaaaatagcaaa

SEQ ID NO: 360529 - DNA, 519 bp, Homo sapiens
cattttggctactgtgaataatcctgctatgaacatgcatgtacaaatatctcttcaagaccttgccttccattcttttgggtatatattcaggaatgggaatgctagatcatatggtaattctatttttaattttttttagcaagaaccctacagttttctatagtggttgcactattttactttcccatcaacagttcatagtgttctaatttctccatccttgtcaacacttattattattattattattttttgagacacagtttcattccgtcaccyaggctggagtgcagtggtccaatctctgctcactgcaaactctgcctcctaggttcaagtgattctgctgcctcagcctcctgagtagctgggattacaggtgtgtgccaccaggcccagctaatttttgtattattagtaaagactgggtttcaccatgttggccaggtgaactcctgacctcaagggatcagcccaacttggcctcccaaagtgctgggattacaagccagccac

SEQ ID NO: 360530 - DNA, 611 bp, Homo sapiens
gttatggtttaacttaccactagccaatcagtaagtttgcctcagaccacatcacaattcttttgcaagcctggagcttggtgaaaattcttttggaaaataattaatgtccctaagggagatgctgaaagattaacttcataacataattctctcaccagacttggttcctgaatgtctatttaaactttaactctgcaaataaaataaagttggtaatgaaggtgattaagatggtatttktccagggaacgagtctcctcacaacataactaagaaagagatatatgtacagaaaacgaagcacaataaaatatcacttcattactatcggagattttccccaaacacagagaaagctctacagagctgagcttaagccagaactctgttatttacttggtctaatgccaaaacaggccagagactcctttcagctacttctctttaatcccaaacctatgtctcgctttgatctaagaaagagccaaattcccaggaggcgccagggtagagaaaagcagccagccggagagtggcctccatgccaggggagtgtgtctgagctttgttttatttttcttatttgtctgtagttgtgtgattggtag

SEQ ID NO: 360531 - DNA, 611 bp, Homo sapiens
gttatggtttaacttaccactagccaatcagtaagtttgcctcagaccacatcacaattcttttgcaagcctggagcttggtgaaaattcttttggaaaataattaatgtccctaagggagatgctgaaagattaacttcataacataattctctcaccagacttggttcctgaatgtctatttaaactttaactctgcaaataaaataaagttggtaatgaaggtgattaagatggtatttgtccagrgaacgagtctcctcacaacataactaagaaagagatatatgtacagaaaacgaagcacaataaaatatcacttcattactatcggagattttccccaaacacagagaaagctctacagagctgagcttaagccagaactctgttatttacttggtctaatgccaaaacaggccagagactcctttcagctacttctctttaatcccaaacctatgtctcgctttgatctaagaaagagccaaattcccaggaggcgccagggtagagaaaagcagccagccggagagtggcctccatgccaggggagtgtgtctgagctttgttttatttttcttatttgtctgtagttgtgtgattggtag

SEQ ID NO: 360532 - DNA, 611 bp, Homo sapiens
gttatggtttaacttaccactagccaatcagtaagtttgcctcagaccacatcacaattcttttgcaagcctggagcttggtgaaaattcttttggaaaataattaatgtccctaagggagatgctgaaagattaacttcataacataattctctcaccagacttggttcctgaatgtctatttaaactttaactctgcaaataaaataaagttggtaatgaaggtgattaagatggtatttgtccagggaacgagtctcctcacaacataactaagaaagagatatatgtacagaaaacgaagcacartaaaatatcacttcattactatcggagattttccccaaacacagagaaagctctacagagctgagcttaagccagaactctgttatttacttggtctaatgccaaaacaggccagagactcctttcagctacttctctttaatcccaaacctatgtctcgctttgatctaagaaagagccaaattcccaggaggcgccagggtagagaaaagcagccagccggagagtggcctccatgccaggggagtgtgtctgagctttgttttatttttcttatttgtctgtagttgtgtgattggtag

SEQ ID NO: 360533 - DNA, 492 bp, Homo sapiens
gaggctcagtttgctgatctataaaagacgtgattgttacaaggcttccataacrtacatgtgtaaaaatcatggcacaatgcttgtaatttaaaagacagggttgtcaggagacttctatcaggtaagtacgtaaaaacctggacacaatgcctataattttgtaagtgttcaatatatggagaatgaggattatttttctttcatttaatttttagagcaactttataaaattggtgatactcatatatttgagataatcaagccaaggatcagaaagactgaataaatcagcatagtcacaaagcagttcacaatacatttactggataatttctagttaaaagtagcaatgatgattacattgaaaatcttgtattatctggtggttttctcttacataagcttcttggaatttagtaagataagttgcagctcaaaaagcagatccgtagaatattttgttccagagattgtagtgggggcccaagt

SEQ ID NO: 360534 - DNA, 555 bp, Homo sapiens
ttacagatagctgccacattacaattctgtcctcccactggtggtggaatcttatgtacttttcaccatctccattttgcattcagactgaacatagctatgttattcctttcacctgggtgatttgaaaccatctctctatttctatttgtagagatcttatctatcaagcccttctcaaatgccacttcaaaatactttttctaatctccaattgtcttagtcaatttatgctcttataacaaaataacacagactaggcaatttatgaaaaccagacgtttatctgtcacagtactggagactaggaagtccaagatcaaggcgttggcaggtctgatgtctggtaagggctgttctctccgttcaagatggtgtcttgatgctgcatcttccagagacaaggaacactgtttcctcayatggtggaaggcgggagagcaagaggaatgaactccctccatggagctctttcatgagggctcctaaacccattcctgtggtaggagtcctgatggtctcatcacttcctgtaggctccacctcaacactgtc

SEQ ID NO: 360535 - DNA, 543 bp, Homo sapiens
tgctgcatcttccagagacaaggaacactgtttcctcatatggtggaaggcgggagagcaagaggaatraactccctccatggagctctttcatgagggctcctaaacccattcctgtggtaggagtcctgatggtctcatcacttcctgtaggctccacctcaacactgtcacattgtcaacgctgaatcttggaggaggcacagtgaaaccacagcaccaatcaagtatgatctttctcccctcatgtgtttagacctcccatgcacttttatacgttgtgtttcatggtttcttcctgtacaaataaggtgctataaatggatagctatagttttgggtttcatttcaacaaaacacccttcctagttgtttgaaccccaagagaaatatgaggacaggccccaccttccattacaaaagctgaaagggattgcatgatcctttttccagtttcttggccattcacgtgtgggcacatatctaggcccagccaactgatggctctttattagaacttggaacccgatgaaatgatgcaaa

SEQ ID NO: 360536 - DNA, 555 bp, Homo sapiens
ttacagatagctgccacattacaattctgtcctcccactggtggtggaatcttatgtacttttcaccatctccattttgcattcagactgaacatagctatgttattcctttcacctgggtgatttgaaaccatctctctatttctatttgtagagatcttatctatcaagcccttctcaaatgccacttcaaaatactttttctaatctccaattgtcttagtcaatttatgctcttataacaaaataacacagactaggcaatttatgaaaaccagacgtttatctgtcacagtactggagactaggaagtccaagatcaaggcgttggcaggtctgatgtctggtaagggctgttctctccgttcaagatggtgtcttgatgctgcatcttccagagacaaggaacactgtttcctcatatggtggaaggcgggagagcaagaggaatgaamtccctccatggagctctttcatgagggctcctaaacccattcctgtggtaggagtcctgatggtctcatcacttcctgtaggctccacctcaacactgtc

SEQ ID NO: 360537 - DNA, 555 bp, Homo sapiens
ttacagatagctgccacattacaattctgtcctcccactggtggtggaatcttatgtacttttcaccatctccattttgcattcagactgaacatagctatgttattcctttcacctgggtgatttgaaaccatctctctatttctatttgtagagatcttatctatcaagcccttctcaaatgccacttcaaaatactttttctaatctccaattgtcttagtcaatttatgctcttataacaaaataacacagactaggcaatttatgaaaaccagacgtttatctgtcacagtactggagactaggaagtccaagatcaaggcgttggcaggtctgatgtctggtaagggctgttctctccgttcaagatggtgtcttgatgctgcatcttccagagacaaggaacactgtttcctcatatggtggaaggcgggagagcaagaggaatgaactccctccatggagctctttcatgagggctcctaaacccattcctgwggtaggagtcctgatggtctcatcacttcctgtaggctccacctcaacactgtc

SEQ ID NO: 360538 - DNA, 474 bp, Homo sapiens
aaaacacactcctcttaggcatctcctctgatctcactggagaaaastctggacattatttgtaatttgactcagaatcataggattagtttggtactagtaacaatggagataagtaactaactttttgtgaaacttcttcctggggtgaaacaaaatctattggggaaactctttccaattatctctggaaatttattaagtgacctagtatataatgataatttaccatgatatttgataaaatagttttgtgtgttcagaataatttcttttttctttacctttgaaaataatgcattgataggtaattttctcctaaattggctgtttttatttccataaaaggtatttattgaatgtctccttacttttaatataactaggcattgtgtgatcaaagtaaaataaatatgttcttgtttctggaattactaaagctttgaaaatggacttatcgacctcaaaccaatg

SEQ ID NO: 360539 - DNA, 474 bp, Homo sapiens
aaaacacactcctcttaggcatctcctctgatctcactggagaaaactctggacwttatttgtaatttgactcagaatcataggattagtttggtactagtaacaatggagataagtaactaactttttgtgaaacttcttcctggggtgaaacaaaatctattggggaaactctttccaattatctctggaaatttattaagtgacctagtatataatgataatttaccatgatatttgataaaatagttttgtgtgttcagaataatttcttttttctttacctttgaaaataatgcattgataggtaattttctcctaaattggctgtttttatttccataaaaggtatttattgaatgtctccttacttttaatataactaggcattgtgtgatcaaagtaaaataaatatgttcttgtttctggaattactaaagctttgaaaatggacttatcgacctcaaaccaatg

SEQ ID NO: 360540 - DNA, 474 bp, Homo sapiens
aaaacacactcctcttaggcatctcctctgatctcactggagaaaactctggacattatttgtaatttgactcagaatcataggattagtttggtactagtaacaatggagataagtaactaactttttgtgaaacttcttcctggggtgaaacaaaatctattggggaaactctttccaattatctctggaaatttattaagtgacctagtatataatgataatttaccatgatatttgataaaatagttttgtgtgttcagaataatttcttttttctttacctttgaaaataatgcattgataggtaattttctcctaaattggctgtttttatttccataaaaggtatttattgaatgtctccttacttttaatataactaggcattgtgtgatcaaagtaaaataaatatgttcttgtttctggaattactaaagctttgaaaatkgacttatcgacctcaaaccaatg

SEQ ID NO: 360541 - DNA, 584 bp, Homo sapiens
tggcctgctcccctgttagggttcccagggtaagtggtgattcctttcctgtctttttaaagattttagaaatgcagtttcttctgtggrccactaggcggagtacttcaaagcagggtttgtgggagtacaaagctaacttctgctgcttttgcttgatgcttctgcagcttccttgactactggggatgataagtagttattttcttcctcttctttatttttccccctcactctttggagttaacttgaaacatttaggaagtttgttgatcaacatataccgtgttgatgaaaatctgggtaagataatatggtaggactcctttggttataaataatagaattcaaactcaaactggtctaagccaaaaaaaaaatatagggtgagggacatggggaaatgattgatcaagtatttaagaaatgacctgggtggaagctacatcaaagggtatgagatttagcacatcagtcctcaaatttttggttttaggaacactttacatttttaaaagttattgagaaccccaaagagcttttatttatttggattatgtctatctatatttatcataataaac

SEQ ID NO: 360542 - DNA, 584 bp, Homo sapiens
tggcctgctcccctgttagggttcccagggtaagtggtgattcctttcctgtctttttaaagattttagaaatgcagtttcttctgtggaccactargcggagtacttcaaagcagggtttgtgggagtacaaagctaacttctgctgcttttgcttgatgcttctgcagcttccttgactactggggatgataagtagttattttcttcctcttctttatttttccccctcactctttggagttaacttgaaacatttaggaagtttgttgatcaacatataccgtgttgatgaaaatctgggtaagataatatggtaggactcctttggttataaataatagaattcaaactcaaactggtctaagccaaaaaaaaaatatagggtgagggacatggggaaatgattgatcaagtatttaagaaatgacctgggtggaagctacatcaaagggtatgagatttagcacatcagtcctcaaatttttggttttaggaacactttacatttttaaaagttattgagaaccccaaagagcttttatttatttggattatgtctatctatatttatcataataaac

SEQ ID NO: 360543 - DNA, 457 bp, Homo sapiens
ggtctaagccaaaaaaaaaatatagggtgagggacatgggraaatgattgatcaagtatttaagaaatgacctgggtggaagctacatcaaagggtatgagatttagcacatcagtcctcaaatttttggttttaggaacactttacatttttaaaagttattgagaaccccaaagagcttttatttatttggattatgtctatctatatttatcataataaacattaaaactgagaaattaaaaaaatatgcttataagtttacgtaaatcacatttttatttaaaattatcatttttaagcagtaaagttggtgagaacagtgacattgttttatatttttaggtatgtctttaatgtctggtttaatagaagaaaatttgttctcctttctgcttctacatttaatttcttttgacatcacatgtcaggtagcctctgggaaactccaattata

SEQ ID NO: 360544 - DNA, 612 bp, Homo sapiens
acccatttaacatacatgttgcaacatcagagatgctagtcttcgttaaaaatactagttctaaattccttctaaaatatatttttaaaaatcagtacacttggtaccttggaaatgctgaaatgttatcatgaatgctggttatttgttatgagtmaactgactattatcttcaatataaactataatttactggtctgaacactcttcctatcttacctgtatatactcaaagggagtaacttctcatgtttagcaaattgttctttaggtaatttgttctttagcttttttgtacaaaagtacaaaatagttatcacagcaaactttccagtatttattattttgaaggtatatattttggagtgaacttttttttttgccatgtcaggcttgagcaggatagcaaatatataaattgagctctctaattataatctcaatatatgaattcttgctaattaaaatactttgcacaagcaaaaacaattgccacgtatgtgtttaggaggtagttaagtaactccatataaaaataagtgcactttcccctcctttcttcagtgactagaaaacttccatacttttaaaataatcaaataataatttaga

SEQ ID NO: 360545 - DNA, 612 bp, Homo sapiens
acccatttaacatacatgttgcaacatcagagatgctagtcttcgttaaaaatactagttctaaattccttctaaaatatatttttaaaaatcagtacacttggtaccttggaaatgctgaaatgttatcatgaatgctggttatttgttatgagtcaactgwctattatcttcaatataaactataatttactggtctgaacactcttcctatcttacctgtatatactcaaagggagtaacttctcatgtttagcaaattgttctttaggtaatttgttctttagcttttttgtacaaaagtacaaaatagttatcacagcaaactttccagtatttattattttgaaggtatatattttggagtgaacttttttttttgccatgtcaggcttgagcaggatagcaaatatataaattgagctctctaattataatctcaatatatgaattcttgctaattaaaatactttgcacaagcaaaaacaattgccacgtatgtgtttaggaggtagttaagtaactccatataaaaataagtgcactttcccctcctttcttcagtgactagaaaacttccatacttttaaaataatcaaataataatttaga

SEQ ID NO: 360546 - DNA, 612 bp, Homo sapiens
acccatttaacatacatgttgcaacatcagagatgctagtcttcgttaaaaatactagttctaaattccttctaaaatatatttttaaaaatcagtacacttggtaccttggaaatgctgaaatgttatcatgaatgctggttatttgttatgagtcaactgactattatcttcaatataaactataatttactggtctgaacactcttcctatcttacctgtatatactcaaagggagyaacttctcatgtttagcaaattgttctttaggtaatttgttctttagcttttttgtacaaaagtacaaaatagttatcacagcaaactttccagtatttattattttgaaggtatatattttggagtgaacttttttttttgccatgtcaggcttgagcaggatagcaaatatataaattgagctctctaattataatctcaatatatgaattcttgctaattaaaatactttgcacaagcaaaaacaattgccacgtatgtgtttaggaggtagttaagtaactccatataaaaataagtgcactttcccctcctttcttcagtgactagaaaacttccatacttttaaaataatcaaataataatttaga

SEQ ID NO: 360547 - DNA, 612 bp, Homo sapiens
acccatttaacatacatgttgcaacatcagagatgctagtcttcgttaaaaatactagttctaaattccttctaaaatatatttttaaaaatcagtacacttggtaccttggaaatgctgaaatgttatcatgaatgctggttatttgttatgagtcaactgactattatcttcaatataaactataatttactggtctgaacactcttcctatcttacctgtatatactcaaagggagtaayttctcatgtttagcaaattgttctttaggtaatttgttctttagcttttttgtacaaaagtacaaaatagttatcacagcaaactttccagtatttattattttgaaggtatatattttggagtgaacttttttttttgccatgtcaggcttgagcaggatagcaaatatataaattgagctctctaattataatctcaatatatgaattcttgctaattaaaatactttgcacaagcaaaaacaattgccacgtatgtgtttaggaggtagttaagtaactccatataaaaataagtgcactttcccctcctttcttcagtgactagaaaacttccatacttttaaaataatcaaataataatttaga

SEQ ID NO: 360548 - DNA, 543 bp, Homo sapiens
ttaggctgatttttaagaaataaaatgtaagatatcagaaaagcaaatgtttggcacctacatatccaatatctggcaccgtgcagagtagaagagtgaaagaaataatgaagaacaaagtggttactttgcttcargagttcatgatctatagttagaaaccaatataaacattttgagtatatttcaaagaaagagaaaagcaggccggctgtggtggcttgcacctctagtaataacactttgggaggctgaggtgggaagattgcttgagctcatgagtttgataccagcctgagaaacatagtaaaacctcatatctataaaaaaattaatttaaaaaaaggcagagcaaaaacaaatatgaaagaaaacattagaaatcagagctcgggcaaagagttcaacgtaagcaaagcagctctgccctgggggacctctggagcatcccggcttcctgtagaggccccaccacatggccctttcccatcactgggaaccgtcttctgtatcatgccaggattttcccccaaacttctcaac

SEQ ID NO: 360549 - DNA, 543 bp, Homo sapiens
ttaggctgatttttaagaaataaaatgtaagatatcagaaaagcaaatgtttggcacctacatatccaatatctggcaccgtgcagagtagaagagtgaaagaaataatgaagaacaaagtggttactttgcttcaggagttcatgatctatagttagaaaccaatataaacattttgagtatatttcaaagaaagagaaaagcaggccggctgtggtggcttgcacctctagtaataacactttgggaggctgaggtgggaagattgcttgagctcatgagtttgataccagcctgagaaacatagtaaaacctcatatctataaaraaattaatttaaaaaaaggcagagcaaaaacaaatatgaaagaaaacattagaaatcagagctcgggcaaagagttcaacgtaagcaaagcagctctgccctgggggacctctggagcatcccggcttcctgtagaggccccaccacatggccctttcccatcactgggaaccgtcttctgtatcatgccaggattttcccccaaacttctcaac

SEQ ID NO: 360550 - DNA, 543 bp, Homo sapiens
ttaggctgatttttaagaaataaaatgtaagatatcagaaaagcaaatgtttggcacctacatatccaatatctggcaccgtgcagagtagaagagtgaaagaaataatgaagaacaaagtggttactttgcttcaggagttcatgatctatagttagaaaccaatataaacattttgagtatatttcaaagaaagagaaaagcaggccggctgtggtggcttgcacctctagtaataacactttgggaggctgaggtgggaagattgcttgagctcatgagtttgataccagcctgagaaacatagtaaaacctcatatctataaaaaaattaatttaaaaaaaggcagagcaaaaacaaatatgaaagaaaacattagaaatcagagctcgggcaaagagttcaacgtaagcaaagcagctctgccctgggggacctctggagcatcccggcttcctgtagaggccccaccacatggccctttcccatcactgggaaccgtcttctgkatcatgccaggattttcccccaaacttctcaac

SEQ ID NO: 360551 - DNA, 535 bp, Homo sapiens
ccaccacatggccctttcccatcactgggaaccgtcttctgtatcatgccaggattttcccccaaacttctcaacctaatttattcagccaaaacatatatatttmttgaatccttactaaaagcaaggcactgttcaacttaatgaaaatatgtcaacgatataaaacaaaaatgtttaccctatgcaaattatattccagtgagaaaagacagatcattaataaaataaatatgtaaaatatataatatgccagaaggtaataagtggcacagagaaaaattaagtttggaagggagctcaggaatgctgggagcaggtagatgtgaaggtagttagaatgctcaaggagggagtaataggcagaagaatggcctttttacatgtccatatccctatatggcaaaaaggacttatggatgtgatgaagttatggatcatgagatgaggagattattctggattacccatgttggcccaatgtcatcacaagaggacttaaaagcaaaagatggaggcaggagagtctgaggca

SEQ ID NO: 360552 - DNA, 535 bp, Homo sapiens
ccaccacatggccctttcccatcactgggaaccgtcttctgtatcatgccaggattttcccccaaacttctcaacctaatttattcagccaaaacatatatatttcttgaatccttactaaaagcaaggcactgttcaacttaatgaaaatatgtcaacgatataaaacaaaaatgtttaccctatgcaaattatattccagtgagaaaagacagatcattaataaaataaatatgtaaaatatataatatgccagaaggtaataagtggcacagagaaaaattaagtttggaagrgagctcaggaatgctgggagcaggtagatgtgaaggtagttagaatgctcaaggagggagtaataggcagaagaatggcctttttacatgtccatatccctatatggcaaaaaggacttatggatgtgatgaagttatggatcatgagatgaggagattattctggattacccatgttggcccaatgtcatcacaagaggacttaaaagcaaaagatggaggcaggagagtctgaggca

SEQ ID NO: 360553 - DNA, 451 bp, Homo sapiens
tatatatttcttgaatccttactaaaagcaaggcactgttcaacttaatgaaaatatgtcaacgatataaaacaaaaatgtttaccctatgcaaattatattccagtgagaaaagacagatcattaataaaataaatatgtaaaatatataatatgccagaaggtaataagtggcacagagaaaaattaagtttggaagggagctcaggaatgctgggagcaggtagatgtgaaggtagttagaatgctcaaggagggagtaataggcagaagaatggcctttytacatgtccatatccctatatggcaaaaaggacttatggatgtgatgaagttatggatcatgagatgaggagattattctggattacccatgttggcccaatgtcatcacaagaggacttaaaagcaaaagatggaggcaggagagtctgaggcaagaagcgtgaca

SEQ ID NO: 360554 - DNA, 635 bp, Homo sapiens
acatgtccatatccctatatggcaaaaaggacttatggatgtgatgaagttatggatcatgagatgaggagattattctggattacccatgttrgcccaatgtcatcacaagaggacttaaaagcaaaagatggaggcaggagagtctgaggcaagaagcgtgacagctagggtcagaatgatgtggttgctgcctggaagggggccaggggccaagggatgcaggcatcctttaaaagctggagaaggtaagaaagtgttctctctcccctagagagagtgtgtgttcttttaggctactagaggtgtgctaatttattccagcaatcatagaaaacttatatagataaggtctcactgagaagataacatttgaacaaagattccaaggaggtgagggcaccagctatgcagatatctggggaagagcactcgaggaagaaaaggcaggcaaacagcagggtgcctagcctatgtgcatgaagtagagaacactgggagtcagaaggctaacaggagacaggtcagagagagggactgggttgggtcaactcacactcagcctcactggctattgtaagaacttcaagttattctgagacactcagtataggagagtctatgaatatttatag

SEQ ID NO: 360555 - DNA, 635 bp, Homo sapiens
acatgtccatatccctatatggcaaaaaggacttatggatgtgatgaagttatggatcatgagatgaggagattattctggattacccatgttggcccaatgtcatcacaagaggacttaaaagcaaaagatggaggyaggagagtctgaggcaagaagcgtgacagctagggtcagaatgatgtggttgctgcctggaagggggccaggggccaagggatgcaggcatcctttaaaagctggagaaggtaagaaagtgttctctctcccctagagagagtgtgtgttcttttaggctactagaggtgtgctaatttattccagcaatcatagaaaacttatatagataaggtctcactgagaagataacatttgaacaaagattccaaggaggtgagggcaccagctatgcagatatctggggaagagcactcgaggaagaaaaggcaggcaaacagcagggtgcctagcctatgtgcatgaagtagagaacactgggagtcagaaggctaacaggagacaggtcagagagagggactgggttgggtcaactcacactcagcctcactggctattgtaagaacttcaagttattctgagacactcagtataggagagtctatgaatatttatag

SEQ ID NO: 360556 - DNA, 635 bp, Homo sapiens
acatgtccatatccctatatggcaaaaaggacttatggatgtgatgaagttatggatcatgagatgaggagattattctggattacccatgttggcccaatgtcatcacaagaggacttaaaagcaaaagatggaggcaggagagtctgaggcaagaagcgtgacagctagggtcagaatgatgtggttgctgcctggaagggggccaggggccaagggatgcaggcatcctttaaaakctggagaaggtaagaaagtgttctctctcccctagagagagtgtgtgttcttttaggctactagaggtgtgctaatttattccagcaatcatagaaaacttatatagataaggtctcactgagaagataacatttgaacaaagattccaaggaggtgagggcaccagctatgcagatatctggggaagagcactcgaggaagaaaaggcaggcaaacagcagggtgcctagcctatgtgcatgaagtagagaacactgggagtcagaaggctaacaggagacaggtcagagagagggactgggttgggtcaactcacactcagcctcactggctattgtaagaacttcaagttattctgagacactcagtataggagagtctatgaatatttatag

SEQ ID NO: 360557 - DNA, 558 bp, Homo sapiens
ttctctctcccctagagagagtgtgtgttcttttaggctactagaggtgtgctaatttattccagcaatcatagaaaacttatatagataaggtctcactgagaagataacatttgaacaaagattccaaggaggtgagggcaccagctatgcagatatctggggaagagcactcgaggaagaaaaggcaggcaaacagcagggtgcctagcctatgtgcatgaagtagagaacactgggagtcagaaggctaacaggagacaggtcagagagagggactgggktgggtcaactcacactcagcctcactggctattgtaagaacttcaagttattctgagacactcagtataggagagtctatgaatatttatagaaattctgaacgtttacaagatgaataaaagttgtatgctagcaaacctattggttgggtggggggaagcccagatttgtaacatttgctgatttccactgtgtaaatatttctactgacggtttgacaaacacttcataaaatttctgggtacttaattatcagctccaggagagcgctgc

SEQ ID NO: 360558 - DNA, 576 bp, Homo sapiens
gtgtctgtggcttttccaggcaatacagtgtaagctgtcagtgtatctaccattctggagtctggaggatggtggccctcttctctcagctccactaggcagtgccccagtggggactctgtgggggctctracaccacatttcccttctgcactcactgccctagcagaggttccccatgagggctccgtccccatcacaaatttgtgcctgaacacccaggcgtttccatgcatcctctgaaatttaggtgtagatacccaaacctcaattcttgacttctgtgcacccacaggcccaacgcctcatgtaagctgtcaaggcttgggccttgtaccctctgaagccatggcctgagctggacattggccctttagccatgattgggacacagggcgccaagtcctgagactgcacagagcagcaagtccctgcaccgagcccattaaaccattttttttcctcctaggcctcctggtctgtgatggtttgagttgctgtgaaggtctctgacattccctgaagacattttcccattgtcttggtgattaatatttagctcctcgttacttatgc

SEQ ID NO: 360559 - DNA, 576 bp, Homo sapiens
gtgtctgtggcttttccaggcaatacagtgtaagctgtcagtgtatctaccattctggagtctggaggatggtggccctcttctctcagctccactaggcagtgccccagtggggactctgtgggggctctaacaccacatttcccttctgcactcactgccctagcagaggttccccatgagggctccgtccccatcacaaatttgtgcctgaacacccaggcgtttccatgcatcctctgaaatttaggtgtagatacccaaacctcaattcttgacttctgtgcacccacaggcccaacgcctcatgtaagctgycaaggcttgggccttgtaccctctgaagccatggcctgagctggacattggccctttagccatgattgggacacagggcgccaagtcctgagactgcacagagcagcaagtccctgcaccgagcccattaaaccattttttttcctcctaggcctcctggtctgtgatggtttgagttgctgtgaaggtctctgacattccctgaagacattttcccattgtcttggtgattaatatttagctcctcgttacttatgc

SEQ ID NO: 360560 - DNA, 576 bp, Homo sapiens
gtgtctgtggcttttccaggcaatacagtgtaagctgtcagtgtatctaccattctggagtctggaggatggtggccctcttctctcagctccactaggcagtgccccagtggggactctgtgggggctctaacaccacatttcccttctgcactcactgccctagcagaggttccccatgagggctccgtccccatcacaaatttgtgcctgaacacccaggcgtttccatgcatcctctgaaatttaggtgtagatacccaaacctcaattcttgacttctgtgcacccacaggcccaacgcctcatgtaagctgtcaaggcttggrccttgtaccctctgaagccatggcctgagctggacattggccctttagccatgattgggacacagggcgccaagtcctgagactgcacagagcagcaagtccctgcaccgagcccattaaaccattttttttcctcctaggcctcctggtctgtgatggtttgagttgctgtgaaggtctctgacattccctgaagacattttcccattgtcttggtgattaatatttagctcctcgttacttatgc

SEQ ID NO: 360561 - DNA, 579 bp, Homo sapiens
atcgtgttaggtacaactgttgctttgttttctttttatttggaaattatatatggtttaaggaggtccatatgggtgccaaatctgcaaggggtggacttgcaggcttaatttcaggtgtcaacttgactggattaaggaatccctggaaagctgggaaagcattattttgggtatgtctgtgatggttttctcagaagagatcagtgtgtgggtctgagcggactaggtgaggaagatctgctgtcactgttttgaatgtcttgaatatcacagaagaagttaaaatgaaagtaaaaaatgcacaaaatcttgtctgccaaattatgtaatcatgtaccaagcacctctacaggtagyaccatgcttgccttcacaaaatgccttttgtgagataataaaaatagttcaaaaaattcagtggccttctgagccagacacctcctggcacagagcttcctccagtgctacaagacatattaaatcatgaactattcttgattagggatttgactgtcaaaaaaggtaaacatgtttatttaccactaagtttaacataacaaaactggtgcatgtttc

SEQ ID NO: 360562 - DNA, 571 bp, Homo sapiens
tgagtggattggccagactatctggcaaggatgaaaattttagtttaaaaatgtgtcatttgtctgtattggcattcctcccacctgataaaattccaggagcttttgataaattaaaaccataattgcctgaagaagacagaaatattacatactggtttgaaaataatgatgtgcaaggtagtataagaagtcatttaggcaacggtgttgctgttcaatcaagagtattgtttctgccaaatgagtggtctgtatatgatggcctgcaaaatggatttccacatactcaaaacaatagacaagaatggcatagaagattggaaaatgtaataggaaatactyatgtcagtgtgtatcaaattatagaagaatttcaaaaagagcagtgtcacgtagaaaatgaatgtgaatgtattttatgaggagagtcaaatcctaaaaacaaaaaaggcaactattcatcgtgatgcatgacttcaaaatatagctaatgatcatgaaagtcagccagctatgatgaactctgcaattgcccataatctatccatgtaatatactttttatgtgt

SEQ ID NO: 360563 - DNA, 554 bp, Homo sapiens
acaagtacaactcgtctgctcattaccattatacccgtgagactatcgttagcatacctgagwtttatgcttgcaaatatatgtatgttattattgcctattgattgtgtaaagtggcctaggaagcgttctgttgtgtttttatacgtttctcaaataaattccatcttaaaaatacaaataaatgcttttttgttgttgtttttagacagagtctcactctgtcgcccaggctggagtgcagtggtgcaatcgcggctcactgtaacctccacctcctgggttcaagcgattctcctgcctcagcctcccgagtaactgggactacaggcacccgtcacgatgcctggctaattttttgtatttttagtaaagatggggtttcaccgtgttagccaggatggtctccatctcttgaatttgtgatccacccgcctcagcctccaaaagtgctgggattaaaggcatgagccaccatgcgctgcccaataagtgctttttaaagaatgtgttaataatttttttccagaattgtatgttcgaattttgttttt

SEQ ID NO: 360564 - DNA, 554 bp, Homo sapiens
acaagtacaactcgtctgctcattaccattatacccgtgagactatcgttagcatacctgagttttatgcttgcaaatatatgtatgttattattgcctattgattgtgtaaagtggcctaggaagcgttctgttgtgtttttatacgtttctcaaataaattccatcttaaaaatacaaataaatgcttttttgttgttgtttttagacagagtctcactctgtcgcccaggctggagtgcagtggtgcaatcgcggctcactgtaacctccacctcctgggttcaagcgattctcctgcctcagcctcccgagtaactgggactacagrcacccgtcacgatgcctggctaattttttgtatttttagtaaagatggggtttcaccgtgttagccaggatggtctccatctcttgaatttgtgatccacccgcctcagcctccaaaagtgctgggattaaaggcatgagccaccatgcgctgcccaataagtgctttttaaagaatgtgttaataatttttttccagaattgtatgttcgaattttgttttt

SEQ ID NO: 360565 - DNA, 554 bp, Homo sapiens
acaagtacaactcgtctgctcattaccattatacccgtgagactatcgttagcatacctgagttttatgcttgcaaatatatgtatgttattattgcctattgattgtgtaaagtggcctaggaagcgttctgttgtgtttttatacgtttctcaaataaattccatcttaaaaatacaaataaatgcttttttgttgttgtttttagacagagtctcactctgtcgcccaggctggagtgcagtggtgcaatcgcggctcactgtaacctccacctcctgggttcaagcgattctcctgcctcagcctcccgagtaactgggactacaggcacccgtcacgatgcctggctaattttttgtatttttagtaaagatggggtttcaccgtgttagccaggatggtctccatctcttgaatttgtgawccacccgcctcagcctccaaaagtgctgggattaaaggcatgagccaccatgcgctgcccaataagtgctttttaaagaatgtgttaataatttttttccagaattgtatgttcgaattttgttttt

SEQ ID NO: 360566 - DNA, 554 bp, Homo sapiens
acaagtacaactcgtctgctcattaccattatacccgtgagactatcgttagcatacctgagttttatgcttgcaaatatatgtatgttattattgcctattgattgtgtaaagtggcctaggaagcgttctgttgtgtttttatacgtttctcaaataaattccatcttaaaaatacaaataaatgcttttttgttgttgtttttagacagagtctcactctgtcgcccaggctggagtgcagtggtgcaatcgcggctcactgtaacctccacctcctgggttcaagcgattctcctgcctcagcctcccgagtaactgggactacaggcacccgtcacgatgcctggctaattttttgtatttttagtaaagatggggtttcaccgtgttagccaggatggtctccatctcttgaatttgtgatycacccgcctcagcctccaaaagtgctgggattaaaggcatgagccaccatgcgctgcccaataagtgctttttaaagaatgtgttaataatttttttccagaattgtatgttcgaattttgttttt

SEQ ID NO: 360567 - DNA, 656 bp, Homo sapiens
tcactctgtcgcccaggctggagtgcagtggtgcaatcgcggctcactgtaacctccacctcctgggttcaagcgattctcctgcctcagcctcccgagtaactgggactacaggcacccgtcacgatgcctggctaattttttgtatttttagtaaagatggggtttcaccgtgttagccaggatggtctccatctcttgaatttgtgatccacccgcctmagcctccaaaagtgctgggattaaaggcatgagccaccatgcgctgcccaataagtgctttttaaagaatgtgttaataatttttttccagaattgtatgttcgaattttgtttttttaggattgtaattttcaggattttagactgtacagatttagatcttttgggacttcaacatttgggattacgatgtttaggattgtgttttcctgggctgtggcccaaactcatgtggtccaacactatttcacatgagaggaatcaaaccacgtgcatagatgcaatgaaggcttaaatagttgtcatgtatagattatatcccaggaaaacatgattaagatgatacatagtgactttttttttcccagtgaaaaagatccacattctttttcttgtgtggaattaaacacaatttctgaatcaatgtaagtgaa

SEQ ID NO: 360568 - DNA, 656 bp, Homo sapiens
tcactctgtcgcccaggctggagtgcagtggtgcaatcgcggctcactgtaacctccacctcctgggttcaagcgattctcctgcctcagcctcccgagtaactgggactacaggcacccgtcacgatgcctggctaattttttgtatttttagtaaagatggggtttcaccgtgttagccaggatggtctccatctcttgaatttgtgatccacccgcctcagcctccaaaagtgctgggattaaaggcatgagccaccatgcgctgcccaataagtgctttttaaagaatgtgttaataatttttttccagaattgtatgttcgaattttgtttttttaggattgtaattttcaggattttagactgtacagatttaratcttttgggacttcaacatttgggattacgatgtttaggattgtgttttcctgggctgtggcccaaactcatgtggtccaacactatttcacatgagaggaatcaaaccacgtgcatagatgcaatgaaggcttaaatagttgtcatgtatagattatatcccaggaaaacatgattaagatgatacatagtgactttttttttcccagtgaaaaagatccacattctttttcttgtgtggaattaaacacaatttctgaatcaatgtaagtgaa

SEQ ID NO: 360569 - DNA, 656 bp, Homo sapiens
tcactctgtcgcccaggctggagtgcagtggtgcaatcgcggctcactgtaacctccacctcctgggttcaagcgattctcctgcctcagcctcccgagtaactgggactacaggcacccgtcacgatgcctggctaattttttgtatttttagtaaagatggggtttcaccgtgttagccaggatggtctccatctcttgaatttgtgatccacccgcctcagcctccaaaagtgctgggattaaaggcatgagccaccatgcgctgcccaataagtgctttttaaagaatgtgttaataatttttttccagaattgtatgttcgaattttgtttttttaggattgtaattttcaggattttagactgtacagatttagatcttttgggacttcaacatttgggattacgatgtttaggattgtgttttcctgggctgtggcccaaactcatgtggtccaacactatttcacatgagargaatcaaaccacgtgcatagatgcaatgaaggcttaaatagttgtcatgtatagattatatcccaggaaaacatgattaagatgatacatagtgactttttttttcccagtgaaaaagatccacattctttttcttgtgtggaattaaacacaatttctgaatcaatgtaagtgaa

SEQ ID NO: 360570 - DNA, 638 bp, Homo sapiens
attgtgttttcctgggctgtggcccaaactcatgtggtccaacactatttcacatgagaggaatcaaaccacgtgcatagatgcaatgaaggcttaaatagktgtcatgtatagattatatcccaggaaaacatgattaagatgatacatagtgactttttttttcccagtgaaaaagatccacattctttttcttgtgtggaattaaacacaatttctgaatcaatgtaagtgaatgcaaatcaccacgttcacttagctgatgctcctttattaacagggatagaaaggaggtcattcgaagagatgatggcacgggacccaggacctgaggaagctgcagtgggtgaaggggagaaacagaggagcaggggctggagaaagagtggggagtcatcaaccaccctcctttctcctggcgtctggtgttcggagcccagaggtattctctagggcctcggagaagcttccaagtctgctcatttctctttccccatccctgcttgtatcacaaataaagaaattattgacaactgagttcctgacaaggtggcaggattttagggacccttcacctcgtctgaaactcatgaaggtagtgggaatcccatgggttggttagcaatagtccctgagat

SEQ ID NO: 360571 - DNA, 638 bp, Homo sapiens
attgtgttttcctgggctgtggcccaaactcatgtggtccaacactatttcacatgagaggaatcaaaccacgtgcatagatgcaatgaaggcttaaatagttgtcatgtatagattatatcccaggaaaacatgattaagatgatacatagtgactttttttttcccagtgaaaaagatccacattctttttcttgtgtggaattaaacacaatttctgaatcaatgtaagtgaatgcaaatcaccacgttcayttagctgatgctcctttattaacagggatagaaaggaggtcattcgaagagatgatggcacgggacccaggacctgaggaagctgcagtgggtgaaggggagaaacagaggagcaggggctggagaaagagtggggagtcatcaaccaccctcctttctcctggcgtctggtgttcggagcccagaggtattctctagggcctcggagaagcttccaagtctgctcatttctctttccccatccctgcttgtatcacaaataaagaaattattgacaactgagttcctgacaaggtggcaggattttagggacccttcacctcgtctgaaactcatgaaggtagtgggaatcccatgggttggttagcaatagtccctgagat

SEQ ID NO: 360572 - DNA, 574 bp, Homo sapiens
catgagaggaatcaaaccacgtgcatagatgcaatgaaggcttaaatagttgtcatgtatagattatatcccaggaaaacatgattaagatgatacatagtgactttttttttcccagtgaaaaagatccacattctttttcttgtgtggaattaaacacaatttctgaatcaatgtaagtgaatgcaaatcaccacgttcacttagctgatgctcctttattaacagggatagaaaggaggtcattcgaagagatgatggcacgggacccaggacctgaggaagctgcagtgggtgaaggggagaaacagaggagcaggggctggagaaagagtggggagtcatcaaccaccctcctttctcctggcgtctggtgttcggagcccagaggtmttctctagggcctcggagaagcttccaagtctgctcatttctctttccccatccctgcttgtatcacaaataaagaaattattgacaactgagttcctgacaaggtggcaggattttagggacccttcacctcgtctgaaactcatgaaggtagtgggaatcccatgggttggttagcaat

SEQ ID NO: 360573 - DNA, 574 bp, Homo sapiens
catgagaggaatcaaaccacgtgcatagatgcaatgaaggcttaaatagttgtcatgtatagattatatcccaggaaaacatgattaagatgatacatagtgactttttttttcccagtgaaaaagatccacattctttttcttgtgtggaattaaacacaatttctgaatcaatgtaagtgaatgcaaatcaccacgttcacttagctgatgctcctttattaacagggatagaaaggaggtcattcgaagagatgatggcacgggacccaggacctgaggaagctgcagtgggtgaaggggagaaacagaggagcaggggctggagaaagagtggggagtcatcaaccaccctcctttctcctggcgtctggtgttcggagcccagaggtattctctagggcctcggagaagcttccaagtctgctcatttctctttccccatccctgcttgtatcacaaataaasaaattattgacaactgagttcctgacaaggtggcaggattttagggacccttcacctcgtctgaaactcatgaaggtagtgggaatcccatgggttggttagcaat

SEQ ID NO: 360574 - DNA, 545 bp, Homo sapiens
tttctttttaaattttttactgtaaatgatgctgctataaaatttggtttgaaagtatcagtgcagaagtgaataaaattttaaaacctgaacacatttctgcatgcagttcttagattgaataatggagtccaggcatggtggytcacacttgtaatcccaaaactttgggaggctgaggcaggcagatcacttaagctcaggagttcgagaccagccatggaaacatggcaaaaccccatctctactaaaaattcaaaaattagctgggcattgtggtgcttgcttgtagtcccagctatttgggagactgaggcacaaggatcacttaattttcatttctctaactatcattgattctgagctttttctcatacacttgttggcctcatgtatgtcttctttcgaaaactgtccgttcatgtctttgcccactttttaatggggttgtttttcttttgtaaatttaagttccttatagatgctagatattagacctttgttagatggatagtttacaaatattttttttccactccataggt

SEQ ID NO: 360575 - DNA, 415 bp, Homo sapiens
gttaatagttttttttttctgctatgcaaaatctctttactttaattaaatcctacttgttaatttttgcttttcttgctgttgcttttggtctttctatcatgaaatctttgcccattcctatatccaggatggtattgcctggawtgtctttcatggtttttatacataaagattttatatttaagtcttcaatcagtcttgagttgatttttttttgtatatgatgtaaataaggggtccagcttcaatcttccacatgttgccagccaattattccagcaccacttattgaataaataatctttttctcattgcttgtttttgtcagccttgtcaattatcacatggcatagatgtgcagccttgtttctgggctctctattctgctccatttgtctatgtgtctgttttt

SEQ ID NO: 360576 - DNA, 415 bp, Homo sapiens
gttaatagttttttttttctgctatgcaaaatctctttactttaattaaatcctacttgttaatttttgcttttcttgctgttgcttttggtctttctatcatgaaatctttgcccattcctatatccaggatggtattgcctggaatgtctttcatggtttttatacataaagattttatatttaagtcttyaatcagtcttgagttgatttttttttgtatatgatgtaaataaggggtccagcttcaatcttccacatgttgccagccaattattccagcaccacttattgaataaataatctttttctcattgcttgtttttgtcagccttgtcaattatcacatggcatagatgtgcagccttgtttctgggctctctattctgctccatttgtctatgtgtctgttttt

SEQ ID NO: 360577 - DNA, 415 bp, Homo sapiens
gttaatagttttttttttctgctatgcaaaatctctttactttaattaaatcctacttgttaatttttgcttttcttgctgttgcttttggtctttctatcatgaaatctttgcccattcctatatccaggatggtattgcctggaatgtctttcatggtttttatacataaagattttatatttaagtcttcaatcagtcttgagttgatttttttttgtatatgatrtaaataaggggtccagcttcaatcttccacatgttgccagccaattattccagcaccacttattgaataaataatctttttctcattgcttgtttttgtcagccttgtcaattatcacatggcatagatgtgcagccttgtttctgggctctctattctgctccatttgtctatgtgtctgttttt

SEQ ID NO: 360578 - DNA, 415 bp, Homo sapiens
gttaatagttttttttttctgctatgcaaaatctctttactttaattaaatcctacttgttaatttttgcttttcttgctgttgcttttggtctttctatcatgaaatctttgcccattcctatatccaggatggtattgcctggaatgtctttcatggtttttatacataaagattttatatttaagtcttcaatcagtcttgagttgatttttttttgtatatgatgtaaataaggggtccagcttcaatcttccacatgttgccagccaattattccagcaccacttattgaataaataatctttttctcaytgcttgtttttgtcagccttgtcaattatcacatggcatagatgtgcagccttgtttctgggctctctattctgctccatttgtctatgtgtctgttttt

SEQ ID NO: 360579 - DNA, 520 bp, Homo sapiens
atcaataatttatgcaagggtttttttgattatatattttatttatttgatctctacaattgttcttatgccactagcaaactgttataattatagtagctttgtatgttttcaaatttaaaattgtgagccatctaattttgttcttcctttcaagattattctgtacattcagaggattttcaaattccatawgaagttttaaatgaattattttgtttttgcaaaagaaaagttggaaaaattaaaaattgggattacagtacatctgtacactactttgggtagtagtattgtcatctgaacttcattaagtcttccggttcaggaacatggaatttgttgccagttatttaactcctttttagtttttttcataaatattctgatcctgtattttttattgtacaaaatatgtaccttcttattaaatttatttctaagaattatattattttaatgttgttgcaaacaattgttttattaatttactgtcaaattgttcatttttggtatatgg

SEQ ID NO: 360580 - DNA, 589 bp, Homo sapiens
atttttggtatatggaaatgcactttatgtttctgtgttgtaaaaataattatttcatctctcaaatctagattagcaattaattcagaataaatatgccatataaactggtagtcatttaactttttccaataagctaaccaattacaatatgtctaaatatgtaaaaaggttgaattgtgttagattttcacttactgycacctgtcatttatcagtcagaattacattactgcacacatagaactttcattcctggggccgggcatggtggctcatgcctatattcctagcactttgtgaggccaaggcaggcggaccacctgagatcaggagttcgagaccaccctgactaacatggtaaaaccccgcctctactaaaaatagaaaaataagctgagtgtggtagtgggagcctgtactccagctactttggaggctgacacaggagaatcacttgaacaatcccacaacacaaaacaacaaaagttagtcttcatgtcaaaaatcttcaatggattttttttcatcacaggattgtttagtgcaacattttatggaaaagatgcatgctactgagatgtagttc

SEQ ID NO: 360581 - DNA, 623 bp, Homo sapiens
cacatagaactttcattcctggggccgggcatggtggctcatgcctatattcctagcactttgtgaggccaaggcaggcggaccacctgagatcaggagttcgagaccaccctgactaacatggtaaaaccccgcctctacyaaaaatagaaaaataagctgagtgtggtagtgggagcctgtactccagctactttggaggctgacacaggagaatcacttgaacaatcccacaacacaaaacaacaaaagttagtcttcatgtcaaaaatcttcaatggattttttttcatcacaggattgtttagtgcaacattttatggaaaagatgcatgctactgagatgtagttctataaaagtctcttagagtttgtcattttgttgtgtcttacatcacatacctgtcctgttccaggctatttttcaaagatttttgtacacaaataacctggaaaaagggtagtagtttttctcttcaggtgaatggcagataaattactcaatcaatataataaagacaatttttctctgtgaggcaaaggttggacaggtttgcatgtaacctactttaagaagattgaggtttcttagtcttgagtctgctcagctgtgacacaaatct

SEQ ID NO: 360582 - DNA, 452 bp, Homo sapiens
acacaaaacaacaaaagttagtcttcatgtcaaaaatcttcaatggattttttttcatcacaggattgtttagtgcaacattttatggaaaagatgcatgctactgagatgtagttctataaaagtctcttagagtttgtcattttkttgtgtcttacatcacatacctgtcctgttccaggctatttttcaaagatttttgtacacaaataacctggaaaaagggtagtagtttttctcttcaggtgaatggcagataaattactcaatcaatataataaagacaatttttctctgtgaggcaaaggttggacaggtttgcatgtaacctactttaagaagattgaggtttcttagtcttgagtctgctcagctgtgacacaaatcttccccatgtgcaatgtccatctgagccttttgaaatccctctaaaaaatgtagtatggacaagg

SEQ ID NO: 360583 - DNA, 556 bp, Homo sapiens
acacaaaacaacaaaagttagtcttcatgtcaaaaatcttcaatggattttttttcatcacaggattgtttagtgcaacattttatggaaaagatgcatgctactgagatgtagttctataaaagtctcttagagtttgtcattttgttgtgtcttacatcacatacctgtcctgttccaggctatttttcaaagatttttgtacacaaataacctggaaaaagggtagtagtttttctcttcaggtgaatggcagataaattactcaatyaatataataaagacaatttttctctgtgaggcaaaggttggacaggtttgcatgtaacctactttaagaagattgaggtttcttagtcttgagtctgctcagctgtgacacaaatcttccccatgtgcaatgtccatctgagccttttgaaatccctctaaaaaatgtagtatggacaaggagaactaatacaaaaatgaggcttttgcctccaggtagacagtaaatagtaggtttttttttcatacttcagtgtctcatgccttctaccagcatccatgaaaa

SEQ ID NO: 360584 - DNA, 419 bp, Homo sapiens
ttgtcattttgttgtgtcttacatcacatacctgtcctgttccaggctatttttcaaagatttttgtacacaaataacctggaaaaagggtagtagtttttctcttcaggtgaatggcagataaattactcaatcaatataataaagacaatttttctctgtgaggcaaaggttggacaggtttgcatgtaacctactttaagaagattgaggtttcttagtcttgagtctgctcagctgtgacacaaatcttccccatgtgcaatgtccatctgagccttttgaaatccctctaaaaaatgtagtatggacaaggagaactaatacaaawatgaggcttttgcctccaggtagacagtaaatagtaggtttttttttcatacttcagtgtctcatgccttctaccagcatccatgaaa

SEQ ID NO: 360585 - DNA, 556 bp, Homo sapiens
acacaaaacaacaaaagttagtcttcatgtcaaaaatcttcaatggattttttttcatcacaggattgtttagtgcaacattttatggaaaagatgcatgctactgagatgtagttctataaaagtctcttagagtttgtcattttgttgtgtcttacatcacatacctgtcctgttccaggctatttttcaaagatttttgtacacaaataacctggaaaaagggtagtagtttttctcttcaggtgaatggcagataaattactcaatcaatataataaagacaatttttctctgtgaggcaaaggttggacaggtttgcatgtaacctactttaagaagattgaggtttcttagtcttgagtctgctcagctgtgacacaaatcttccccatgtgcaatgtccatctgagccttttgaaatccctctaaaaaatgtagtatggacaaggagaactaatacaaaaatgaggcttttgcctccaggtagacagtaaatagtagktttttttttcatacttcagtgtctcatgccttctaccagcatccatgaaaa

SEQ ID NO: 360586 - DNA, 419 bp, Homo sapiens
ttgtcattttgttgtgtcttacatcacatacctgtcctgttccaggctatttttcaaagatttttgtacacaaataacctggaaaaagggtagtagtttttctcttcaggtgaatggcagataaattactcaatcaatataataaagacaatttttctctgtgaggcaaaggttggacaggtttgcatgtaacctactttaagaagattgaggtttcttagtcttgagtctgctcagctgtgacacaaatcttccccatgtgcaatgtccatctgagccttttgaaatccctctaaaaaatgtagtatggacaaggagaactaatacaaaaatgaggcttttgcctccaggtagacagtaaatagtaggtwtttttttcatacttcagtgtctcatgccttctaccagcatccatgaaa

SEQ ID NO: 360587 - DNA, 588 bp, Homo sapiens
ttggagccttacggcacctcaatgcattcatggggtgtgctctaccctctaccttcgtgatttatttaaagaccaaatcataatgaataacatttcttaggcttaaacccatagcaggggtaggaaatagttcaaaccttctgacttacatgaacaaatacaatcttcaaaaactrctgttttctaatctgcatgaatgtactgaactcattgccgccttcatgtaaatgtgatgtatcaaaagtgctttgtaaactgttaaattccaatgttgatattgttatagatatactttattaaatactggataatgattttataagctacagggtgtttaactgtgaaattattctaaaatatgtagaaaaaatttggaataatcttcccattttgaacacaatgattggttttaaagttcccttgatttatatgtttgtatactgaggattctcaattgagtgaactagtgtctttgcaatatagtaagattttggtacagtttttaatctatcaaggaaaaggctagataagtaggatctcatttgtttcatggaccattatttgaaggatgatttaagaccataggaa

SEQ ID NO: 360588 - DNA, 588 bp, Homo sapiens
ttggagccttacggcacctcaatgcattcatggggtgtgctctaccctctaccttcgtgatttatttaaagaccaaatcataatgaataacatttcttaggcttaaacccatagcaggggtaggaaatagttcaaaccttctgacttacatgaacaaatacaatcttcaaaaactactgttttctaatctgcatgaatgtactgaactcrttgccgccttcatgtaaatgtgatgtatcaaaagtgctttgtaaactgttaaattccaatgttgatattgttatagatatactttattaaatactggataatgattttataagctacagggtgtttaactgtgaaattattctaaaatatgtagaaaaaatttggaataatcttcccattttgaacacaatgattggttttaaagttcccttgatttatatgtttgtatactgaggattctcaattgagtgaactagtgtctttgcaatatagtaagattttggtacagtttttaatctatcaaggaaaaggctagataagtaggatctcatttgtttcatggaccattatttgaaggatgatttaagaccataggaa

SEQ ID NO: 360589 - DNA, 588 bp, Homo sapiens
ttggagccttacggcacctcaatgcattcatggggtgtgctctaccctctaccttcgtgatttatttaaagaccaaatcataatgaataacatttcttaggcttaaacccatagcaggggtaggaaatagttcaaaccttctgacttacatgaacaaatacaatcttcaaaaactactgttttctaatctgcatgaatgtactgaactcattgccgccttcwtgtaaatgtgatgtatcaaaagtgctttgtaaactgttaaattccaatgttgatattgttatagatatactttattaaatactggataatgattttataagctacagggtgtttaactgtgaaattattctaaaatatgtagaaaaaatttggaataatcttcccattttgaacacaatgattggttttaaagttcccttgatttatatgtttgtatactgaggattctcaattgagtgaactagtgtctttgcaatatagtaagattttggtacagtttttaatctatcaaggaaaaggctagataagtaggatctcatttgtttcatggaccattatttgaaggatgatttaagaccataggaa

SEQ ID NO: 360590 - DNA, 537 bp, Homo sapiens
atttaatgccaatggctaaacatatgctatgtccactacagtaataattgtaccatgttttcattaaatatataattattgtatgaatctctaagattwtaagccacttctgaaatagctacttccatatatccttttttaaatagacttactttaaaatttttttttatatagattcggagaactttaattagatcagtgtggatactcatgctgattcatttttagttgactgttaatgaatgtgcattaagacgtgtctacttatttccactaaacgatcttatcaacagatgcttacctctgtaaattatctgtcaatatagaagttgatgatgtaacagagaaaatgaagtcataaaattaagtgtttgaaagcatccaatccaactacatattggaattcttgcctccattagtatacattctacctcagggtacccacagtagcccctttatataataattcaggctaatttcctgataatgggttaaaacctggcatggcttaaatgccattatgagacattattccca

SEQ ID NO: 360591 - DNA, 565 bp, Homo sapiens
tgtgtacacaccaaaacaaggctattatttaaaattttgagatcctttgtactcctcttcagagttagtttagaattcccaaggatcctttttgctctaatccattgtgtaaaaacacaagacctatgcagaccctctgtagtgattctctaaactgtagccacactaggggcttataagattactaataattagaagatgcaaaatttaatccagattcaggcttttttcttgttgttgttgacactcaactttcagtatattaatttctgaaggttattgttcacaaaaggtatcagttaaaattgttatagagtagtaaaaaatagtaaaaaaggctgggcaagggcaaaccgtgaatttaaagttaaactaacaaattgtaacrtcacattttattccttagagtaaaatattttcattattttagttaattctcattttgtatttcttgactattctttaattacatatcattatttaatttatatttacctaaaaataatggatacattaacaaaaggacagatcttttaaaatactttgggaatttttgggctgaaga

SEQ ID NO: 360592 - DNA, 510 bp, Homo sapiens
tgctctttaataggatctatgtttgaccttgtcttatatatgttattgacatctttcagaaatgaaatatgcatgacagcttctaattaagcattgtgatttcttcactagtttagtaacaatgacaacaacaacagcaacaataaaaatacacttcacctgatcaatctagaagaatgtgccttcttcttatcgacgacattcaacattgtgccagttaatttctgttctgattaagtaaatggacactggtcttagactgcaagaattccagctaatctgaaccctaaraagtttttcctatgagctttgttcatactgagtccttcatgtggcttatcattatctccacctgtgaactcagggtcagctaagggcatttttcatacttactattgcaactcagcagagcattacaacctgaaacatctcatagccaaaatttcagcatgtctctactaccaaaattgattgagttctcattgtatttgtaaacttatttaataagca

SEQ ID NO: 360593 - DNA, 583 bp, Homo sapiens
tgtttcttctaaacatatggaattgccccaagctagcaagttgtttaatggcatattggatccatatgttaaagagctggaaattgcttagaagagtgcaaagctataattattttctctgttaccagccagcacattgcaaatcagcttctcaargatgcagattctccacacagtatagctcaaactttagcttctctttttattttgataaaaatgaatctgaatatggtgttccaataaattttcccctggatcacttatgacatcatcatcttggatgcttttttaaaatgcatattcctgggccaccatcccagactcacagaatcaaatatcttaaatttttgaactcaatagatgggacttcagaatacttcaacttaagctgactcgattgctctctaaggacccactacatttgggaaccactgttgcaaggcacagggcagctggtcacctgcagaaaatgcttggacagagtttggttaaattactgcttaatgcacaggccatattaaatttaaaaagtaacatactattaaactgattgtggatttgttatcaaagaaaataactgcca

SEQ ID NO: 360594 - DNA, 664 bp, Homo sapiens
tggtgttttattttaaatcttacctcaccttatcctccatagtaaaaataatgatcaaaaacttctcgtcttaaaaatgaaaaacatgtatataactcacccataacagtttttagttgatagccaaagmaatactgtagtttgtagtattatttaaaataatttattggacattttaatgacagtttaagaaaatttatatacattttatggttttttttttctttagcagggcagattttgggatacattgtgttttcagtttcatttatcatttcatttagaattagaggttctgggaatatttacatctcacacaaaatgctaaatattagcactgatgtttgaaataaggcaaattttaatatagtcacaaataattaaatataacactcaccagattttcaaacgtaaaataatgcatcaaggaataattgtaatgatgattcagtttcaatttttttctttgacaatattctgtatttttgacaatattaggcaaaagagaataagctacatcattttcttaacaatatttgtgtattatacaaagcaatcaaagaatttttgtcatataaaaataaaattataacaaattttagagcaagttttcaacacattctatcacaagaaagaatagaaaatatacattatactcaaatta

SEQ ID NO: 360595 - DNA, 604 bp, Homo sapiens
actcctgtccgcaagtgatcctccctccttggcctcccaaagtgctgggattacaggtgtgagccactgcgcctggccgctggcaggtgcttataatcccagctaccgggaggctgaggaaggataatcgattgaacctgggaggcggaggttgcagtgagctgagatcgtgccatttcactccagtstgggtgacagagtgagactctggttcaaaaaaaaaagttcactcataaaagacaaaccagaccagttctttgaacagaaaaaaatttccatatgagaaattgctaatctaatataaagttgttaaccagttaagagacagtaaataaataaatcattaagttatcataggaagaaaaaatattgaagaagacagctactactcttaggctttgcagaacaaatgaaagaggatattcctgttaaaatttaatgtttgacaaagggccccacagagctgaaactcaaggctctgaggaggaggtgttgcttggctgttggtgtctgtctgtgatgttgacattttcttgggctgggatctagacctccattgagcaagctgctgtctctgagtgtgatggggttggtgagcagcagg

SEQ ID NO: 360596 - DNA, 563 bp, Homo sapiens
aaccccctacactcttacttcccacccccaccatgtctcatccaggaattccaccaagaacagatcaaaaaccttttttaaggtcaggtgcagtggcttacacctgtaatcttagcactttgggaggccgaggtgagaggatcctgacttgagatcaggagtttgaaaccagcctggccaacmtggtgaaaccccatctctattaaaaatacaaaaaaaaaatattagctaggtgtggtgttggacacctgtaatcccagctactcaggtggctgatgtaggagaatcacttgaacctgggagggggaggttgcagtgagccaagattgtgccactgcactccagccttggtgatagagtgagactccatctcaaaaaacaaacaaaaaaccaaacaaccttatttaaagcaacttcatttgtcatatagccatccacatgtacctcttaataggtaaaatagttgtcagacttcctaataatcctgaaattgaagcccagtgctcttgagttctagttcaacatattcctgctaaacggtgcaactctttacattttaagtt

SEQ ID NO: 360597 - DNA, 604 bp, Homo sapiens
tacttcaaccttgctgcttgttattggtccgttcagagtttctatttcttcctggtttaatctaggggggttgtatattttcaggaatgtatccatctcctctaggttttctagtttatgtgtgtaaagttgttcatagtagccttgaatgatcttttatatttctgaggtatgagttgtataaatcatatcacccattttatttctaattgaccttatttggatcctctctcttcttttattggttaatcttgctaatggtctatcaattttatttatatttttaaataaccagctttttgttctatttatcctttgyttttcttttgtttgtttctattttatttagttctactctaatcttcattaaatttattttcttctgctgtgtttgggtttggaatgttcttgtttctctagttcctttaggtgtgaccttagatgatccctttgtgctctttcagaatttttgatgtaggcatttaaggctatagcttttcttttagcactgcttttgctgtatcccagaggttttaatagtttgtgttacttatcactcagttaaaataatgttttaattcccatcttgattttgttgttgatc

SEQ ID NO: 360598 - DNA, 604 bp, Homo sapiens
tacttcaaccttgctgcttgttattggtccgttcagagtttctatttcttcctggtttaatctaggggggttgtatattttcaggaatgtatccatctcctctaggttttctagtttatgtgtgtaaagttgttcatagtagccttgaatgatcttttatatttctgaggtatgagttgtataaatcatatcacccattttatttctaattgaccttatttggatcctctctcttcttttattggttaatcttgctaatggtctatcaattttatttatatttttaaataaccagctttttgttctatttatcctttgcttttcttttgtttgtttctattttatttagttctactctaatcttcattaaatttattttcttctgctgtgtttgggtttggwatgttcttgtttctctagttcctttaggtgtgaccttagatgatccctttgtgctctttcagaatttttgatgtaggcatttaaggctatagcttttcttttagcactgcttttgctgtatcccagaggttttaatagtttgtgttacttatcactcagttaaaataatgttttaattcccatcttgattttgttgttgatc

SEQ ID NO: 360599 - DNA, 413 bp, Homo sapiens
gtttgtgttacttatcactcagttaaaataatgttttaattcccatcttgattttgttgttgatccaacaatcattcaggagcaggttatttaattttcatgtatttgcctggttttgatggtttcttttggagttgatttccaatatatttcattgtggtctgagagaatacctgatataatttctgtttccttaaatttgttgagacttgttttgtggtctatcatatggtctatcttggaaaatgttccatgtgctaataaatagaatgtatagaatgttctgtaaatatctgttaagtccagtcttttctagtgtatagtttaagtccattgtttctttgttgactttctctcttgatgacytgtccaatttgatcagtggagtattgaagacccctactattattgtg

SEQ ID NO: 360600 - DNA, 558 bp, Homo sapiens
attattagtcatgtatttataaatcttattatcttatttcaggtcatgtgatgtcactcgttggagccccaaattattttaaaaattaagtaactaaatacatacttcctataagagagatttcagagaaataacttcattcatttttttgaaaatatttagtttgtaattacactcatggcattttggtacatttttggtgtgtccttatgttttctgaattgatgaacagatattagaggatggagcataaccactgtgcattaggattaaatagaaaaatgatgttatacctgagagtttaagtctatgtaggatttgaagcagtcatctttctctaaaacattgcctgtggtctgctgtaggaaaagcagaatcacgttgtattcattgtttaactgtgaaaaattaatgaattttgtaaatgtatratacactgcctgaaaggaggcaataaagtatcagtcagtgaatcatgcttggtgatatgtctgaatccttggaagatgaaaacttggagtcaggcctagatgtaaatcaaagttttgtaatatgtaa

SEQ ID NO: 360601 - DNA, 558 bp, Homo sapiens
attattagtcatgtatttataaatcttattatcttatttcaggtcatgtgatgtcactcgttggagccccaaattattttaaaaattaagtaactaaatacatacttcctataagagagatttcagagaaataacttcattcatttttttgaaaatatttagtttgtaattacactcatggcattttggtacatttttggtgtgtccttatgttttctgaattgatgaacagatattagaggatggagcataaccactgtgcattaggattaaatagaaaaatgatgttatacctgagagtttaagtctatgtaggatttgaagcagtcatctttctctaaaacattgcctgtggtctgctgtaggaaaagcagaatcacgttgtattcattgtttaactgtgaaaaattaatgaattttgtaaatgtatgatacactgcctgaaaggaggcaataaagtatcagtcwgtgaatcatgcttggtgatatgtctgaatccttggaagatgaaaacttggagtcaggcctagatgtaaatcaaagttttgtaatatgtaa

SEQ ID NO: 360602 - DNA, 617 bp, Homo sapiens
aaatataagatggtattttgaagctgttgttgaatccagaaaaaaaaagagaattcccctcactttgtgatgctatttttctaaatgtttctaattaaaaaaaaattctgacaagcatggaaataagcttaaatttggcatgctatcacactttgtgcatgcccctaggtccctgtattttatgagatgcaaaccttaaatttcaaagaaacagccttttttgaaaatgttttaatgatagaaaaaatgtttatgagctaatgttaaaaataaagagtagtataaaatggatgctctcaactgtgtaaaagtattcatacataaacaaattccagaagacaatttgctaacatgttgattatagttaactgtggtaactgattttgtttgttttttttcttatttgcttctattttttttcttttcttttttgaaggagcccttttttctagtagcattagtctggaaggttatgaattaactctgaaatgaactctggaaataaaaattaacaaaaactaggttcagtcagaggaacattttgacatatattggtttgttggataaatcataacytaaatgaggatgaaaatgctctatgcatgttcatagtaaaa

SEQ ID NO: 360603 - DNA, 575 bp, Homo sapiens
tattgtgcttccctttattgcacttcataggtactgtgtttttataaaacgaagatttgtgggaacattgtgttgagcaagtctattggcaccatttttcaaacagcatgtgctcacttcatgtctctgtgttatattttggtaatccttgcaatatttcaatcattttcatcattattatatttrttgtattgatctgtgatgactgatcatcgatgttactactgtaatggttttggggcaccattaaccaggtccatataagatggcaaacgatcagtaaacattgtatgtcttctaactgctccatcaactggtcattccttcatctctccccctattctctgagatgcaacaatattgaaatcaagacaattaataagcctgcaatggcttccaagagttcagtgaatggaagtcacatttctctcactttaaatcaaaggctagaaatgattaagcttagtcatgaggacatgttggaagctgaaataggctgaaatctaggcccattgcaccaaacagtcaaccaatttgtgaatgcaaaggaaaagttcctgaagaaaattaaaagt

SEQ ID NO: 360604 - DNA, 575 bp, Homo sapiens
tattgtgcttccctttattgcacttcataggtactgtgtttttataaaacgaagatttgtgggaacattgtgttgagcaagtctattggcaccatttttcaaacagcatgtgctcacttcatgtctctgtgttatattttggtaatccttgcaatatttcaatcattttcatcattattatatttgttgtattgatctgtgatgactgatcatcgatgttactactgtaatggttttggggcaccattaaccaggtccatataagatggcaaacgatcartaaacattgtatgtcttctaactgctccatcaactggtcattccttcatctctccccctattctctgagatgcaacaatattgaaatcaagacaattaataagcctgcaatggcttccaagagttcagtgaatggaagtcacatttctctcactttaaatcaaaggctagaaatgattaagcttagtcatgaggacatgttggaagctgaaataggctgaaatctaggcccattgcaccaaacagtcaaccaatttgtgaatgcaaaggaaaagttcctgaagaaaattaaaagt

SEQ ID NO: 360605 - DNA, 575 bp, Homo sapiens
tattgtgcttccctttattgcacttcataggtactgtgtttttataaaacgaagatttgtgggaacattgtgttgagcaagtctattggcaccatttttcaaacagcatgtgctcacttcatgtctctgtgttatattttggtaatccttgcaatatttcaatcattttcatcattattatatttgttgtattgatctgtgatgactgatcatcgatgttactactgtaatggttttggggcaccattaaccaggtccatataagatggcaaacgatcagtaaacattgtatgtcttctaactgctccatcaactggtcattccttcatctctccccctattctctgagatgcaacaatattgaaatcaagacaattaataagcctgcaatggcttccaagagttcagtgaawggaagtcacatttctctcactttaaatcaaaggctagaaatgattaagcttagtcatgaggacatgttggaagctgaaataggctgaaatctaggcccattgcaccaaacagtcaaccaatttgtgaatgcaaaggaaaagttcctgaagaaaattaaaagt

SEQ ID NO: 360606 - DNA, 565 bp, Homo sapiens
gtattatcttttaagagaaacattttgtaatgttatagatagtgatatttctgatggttctgggcaaagtaaattraaaactttctggaaaggatttactcttctatatgctattacccttctaagatgccattagattcatgggaggtcaaattagcaacaataagaggaatctgaaatatgttgattacaaacctcgtggatgactttaaggggttcaaggtctcagtaaaggaagtaacagcaagaaacaatctcatgaagagttaattgaagaatgcacttaaaacactgtgccacagatacgaaatttgtttacgtgttcacctaaatattattacatggcatatgcttagaaagtttatgcatatgccatgcaatactatttaaattgttttttgcagtggtatatttactgacatttactgttgtcaacactgtggttatatctttacttattcttttaagacaggatctcactctgttgtccaggctaagtgtagtggtgcaaacatggctcactgcagccttccagactcaagcaatcctcctacctcagcctcct

SEQ ID NO: 360607 - DNA, 565 bp, Homo sapiens
gtattatcttttaagagaaacattttgtaatgttatagatagtgatatttctgatggttctgggcaaagtaaattgaaaactttctggaaaggatttactyttctatatgctattacccttctaagatgccattagattcatgggaggtcaaattagcaacaataagaggaatctgaaatatgttgattacaaacctcgtggatgactttaaggggttcaaggtctcagtaaaggaagtaacagcaagaaacaatctcatgaagagttaattgaagaatgcacttaaaacactgtgccacagatacgaaatttgtttacgtgttcacctaaatattattacatggcatatgcttagaaagtttatgcatatgccatgcaatactatttaaattgttttttgcagtggtatatttactgacatttactgttgtcaacactgtggttatatctttacttattcttttaagacaggatctcactctgttgtccaggctaagtgtagtggtgcaaacatggctcactgcagccttccagactcaagcaatcctcctacctcagcctcct

SEQ ID NO: 360608 - DNA, 565 bp, Homo sapiens
gtattatcttttaagagaaacattttgtaatgttatagatagtgatatttctgatggttctgggcaaagtaaattgaaaactttctggaaaggatttactcttctatatgctattacycttctaagatgccattagattcatgggaggtcaaattagcaacaataagaggaatctgaaatatgttgattacaaacctcgtggatgactttaaggggttcaaggtctcagtaaaggaagtaacagcaagaaacaatctcatgaagagttaattgaagaatgcacttaaaacactgtgccacagatacgaaatttgtttacgtgttcacctaaatattattacatggcatatgcttagaaagtttatgcatatgccatgcaatactatttaaattgttttttgcagtggtatatttactgacatttactgttgtcaacactgtggttatatctttacttattcttttaagacaggatctcactctgttgtccaggctaagtgtagtggtgcaaacatggctcactgcagccttccagactcaagcaatcctcctacctcagcctcct

SEQ ID NO: 360609 - DNA, 249 bp, Homo sapiens
gccagactcttcagcaggttttataaggcyaatttcagaacatgagtatgcacagatttgggtttacacgggagttgggatgatgtgcgggagagtcctgaaagcaatcccctggcatataacaagggacaacagtatatctaatttttattttccccactaatttatgagtactttgaagggagtctcatcttctttcttcattaagtaatggaatgtactaatgagaatacattttcacaagttcaa

SEQ ID NO: 360610 - DNA, 588 bp, Homo sapiens
agagattggtgtacacacatactggctaagctctgtacccagaggtgttggcttccccagggcctgagttgagaggctrgatgagctagatgagataacccaaaagcacaggagagttggtatgctgttggatgaacagtcctgtgggagatggaagtaagagggaggcaaagatgaatagcttgtgcatcttccacatgtattccaactgaatattctaagatgcaatggtttcaaagtctgtctaaatattatcgggggaatgagcaatcagtaacattatttcatagttgtgacaagtgtagtaagaaatctcctttattgccctttcttcactttttcttcacttcctattttccctcacttcttcactaggaatctctcttcttctacctcaataaaaaaaatagtatgaaagtttctttgtctcaaattattttttctaggaaacatggcaaagataaaatttaatcatgatgtatttttacaatttcacattctctccaccacttttatgatatgttgataaataaaaaataaataaggtaatgaacattattggtggaaaaacaaccttataagcaaagt

SEQ ID NO: 360611 - DNA, 588 bp, Homo sapiens
agagattggtgtacacacatactggctaagctctgtacccagaggtgttggcttccccagggcctgagttgagaggctagatgagctagatgagataacccaaaagcacaggagagttggtatgctgttggatgaacagtcctgtgggagatggaagtaagagggaggcaaagatgaatagcttgtgcatcytccacatgtattccaactgaatattctaagatgcaatggtttcaaagtctgtctaaatattatcgggggaatgagcaatcagtaacattatttcatagttgtgacaagtgtagtaagaaatctcctttattgccctttcttcactttttcttcacttcctattttccctcacttcttcactaggaatctctcttcttctacctcaataaaaaaaatagtatgaaagtttctttgtctcaaattattttttctaggaaacatggcaaagataaaatttaatcatgatgtatttttacaatttcacattctctccaccacttttatgatatgttgataaataaaaaataaataaggtaatgaacattattggtggaaaaacaaccttataagcaaagt

SEQ ID NO: 360612 - DNA, 585 bp, Homo sapiens
taaccattgcttatttcaaagtacagcatgtcctctgacacacataaaataggatgttaaaaacaataataatgaaatgacttyagtaagctggccctctagttgcaccatgtgacagaaatcccattaacttaaaagggaagattttcatctttcacacctgaactctggaagtaataaagtaggcgtgcaatttctggcacaacacctcttttttatacactgttatagaaacattttggaagtgaggagaaatagctaatcgctaaagaatttaacattttgcatcaaaagtccaggaaggaaaattagaagttttagaaattagacttcagaattcgtatgtttatgatgtgtgtagagatttggtaacatgagaaaggtggcattaaaaatattctgtcttcatgtttgtgctctgtgtaacatgcctctgcaatctaaagtgcttacatcttgaaagtttagatttagaaaaaaaaaagcacaaattacttagcataataagcaaagacatatattgattgtttattgtgttaagcactttatatgaaatatctcactgaatatatccagagatctata

SEQ ID NO: 360613 - DNA, 585 bp, Homo sapiens
taaccattgcttatttcaaagtacagcatgtcctctgacacacataaaataggatgttaaaaacaataataatgaaatgacttcagtaagctggccctctagttgcaccatgtgacagaaatcccattaayttaaaagggaagattttcatctttcacacctgaactctggaagtaataaagtaggcgtgcaatttctggcacaacacctcttttttatacactgttatagaaacattttggaagtgaggagaaatagctaatcgctaaagaatttaacattttgcatcaaaagtccaggaaggaaaattagaagttttagaaattagacttcagaattcgtatgtttatgatgtgtgtagagatttggtaacatgagaaaggtggcattaaaaatattctgtcttcatgtttgtgctctgtgtaacatgcctctgcaatctaaagtgcttacatcttgaaagtttagatttagaaaaaaaaaagcacaaattacttagcataataagcaaagacatatattgattgtttattgtgttaagcactttatatgaaatatctcactgaatatatccagagatctata

SEQ ID NO: 360614 - DNA, 604 bp, Homo sapiens
cacatggtgttattcatcagttgaccctctgcatcatgtctctccacttccccagtatgatccaatcacctacacctcttttgagctctagccttcactgcattgtgcagattttgtgctctgtcatcagcatatccccaaatacttaaacatctctttagtcatgccatccttttcttgttcaaaatgaaacctgtttttttcattattagtcttctcttatgccacaggtaccacagggcctggaggcggaatgggtgatctttctgttcttcatcgccctttcagacatttgtctcccgcttcactcccaagttctttgatggtaacagctttttcatgctattattatcactaactgcctaatcttaaaacttttttactggatgccacccctcatttctgaaataatgatccatgttccatcagtacaatcaatggtgtctatacatgttyaacaccgtttccttattctctcacttttcaactttcttggcaaagccacaactcttgttaatccaattttctatattattttatcttctgaaagaaggagcacacaccatgtttgatgacttcatttcacagctgcctctacaaacag

SEQ ID NO: 360615 - DNA, 550 bp, Homo sapiens
gtaagttatttttaaacaatggctgtgtttaataaccaactcacaaaattcctataaattaaacaattggctctcctgagttggtgtgagccagagccagcataccactgtgtgtataattaatttaaattcaaattaacaaattcaatgcatttatgtattcaagaaacaaatattcatttagtatctacaaygcagaatggttgctgccctcttggaacagggtcccagcagaaaacagaaagcattctgtatgctttctgtttccttaagaaacagaaggaaaattcaatgaagggactatttacaaaggtgtaaacaagtttaaggaaatacaaagagatgctgacacgtctgtgaatatatgagaagatattcagatattaaattgtatactttaagtgggtaagttgtatgacatgtgaattatatctccatcaagctgttttaataagagagaaagagagggtgattcccccagggatgaactagcaatggcagggagtcattaacattcatatggcttatggggcaagaaaaggaacagtgt

SEQ ID NO: 360616 - DNA, 548 bp, Homo sapiens
aattcaagaactggaactgaaatgattgaaataaaccaccagatggcacttcaggtcaaatacttaacccctgtggcttttgaatgtctttcattatgctttccatgtagcattgctattgagtcctttatagtgaataacccaatatgactgagaaatcatcaattatgtgcaagattctttcccttaaaggactatttgatttaagccacagtaggtcattcaggcacaatctaaaagccagtctgtttttatgggcagaatcaggtgacctgttgttggtatttacaaaatgtacactaatagcactttttaaaaagttattcttagagtcgaaagaaaattaagatatcttaaggaataaaatagagcacatctgttgccctatactttttttttgttctaatcagctattctatgttctaaattttggaataagcaacaaaagattcataatacagaatttgtaacrggcagacacctaccatttgactttgaaaccattcaattagcatttctactgttgaatctgggaactggcagctcaa

SEQ ID NO: 360617 - DNA, 572 bp, Homo sapiens
ttttaaaaaagaaagcagtgaatgataaggcaggattatatctatgcagtttcaratgcaggctgtagtgacagcagacctgaattttaacgttggccctaactcttcaaagcttgtatgaccttgtgaaaatgtctgaagctctgtgtcttggttttctcatctgtaaaatggggatgattgttactgccacttagtattgtaaggatcctatgaactaatgtatgctgagggcttatgaatacacctggaaaaaaggctagtcagagaggtaatactgaagagtagagtgtagagaatagagggaaaatgtttaacagcatccctttgcaatgagggaaagagaattaggtccagttacaaggggaataaagttacaaactacccatacatagttcacttcttgtgacaaaagagtgcaaacgtttctcagactgaagagaagcttctggaatattttagaaaaacttaaattcaaaaatttttggaaataattatgtatctgttaataataacagatatataattatggttccattcatgtttaatgatggccaacttgagaggccctg

SEQ ID NO: 360618 - DNA, 539 bp, Homo sapiens
tggataatattgccaaaaaatagtaaatacacataaaagtgaatacttcaggggaggtaatactaacttatcatttgaaaaaatacagattaaagtattttttttctaaaaaccctttctgaagaatcaaaaatgttatgatctagaaataaaattatgaaccaaagataatagcatgatgctgctataaataaatgtatagattgatatcttaagtgttctggtgctgagttactcaragagaaacagatctctaagtttctggtgatgagtcaccacgtgagagaaattaaaaggaccactaagcttgtatgtagcaagaagggcataaacttggatgattttctaccctgttagtcatactgcaatataatttaatatagcctgaactaggcagaacttcagattcaccttggggtagagaaaatgcaatcacttattatgttcttgtttaaaattccccagccaccgccaaatctccaccccccaatctatccttcttttctggcttgttctgtgcctggaaaaactggcttctg

SEQ ID NO: 360619 - DNA, 539 bp, Homo sapiens
tggataatattgccaaaaaatagtaaatacacataaaagtgaatacttcaggggaggtaatactaacttatcatttgaaaaaatacagattaaagtattttttttctaaaaaccctttctgaagaatcaaaaatgttatgatctagaaataaaattatgaaccaaagataatagcatgatgctgctataaataaatgtatagattgatatcttaagtgttctggtgctgagttactcaaagagaaacagatctctaagtttctggtgatgagtcacyacgtgagagaaattaaaaggaccactaagcttgtatgtagcaagaagggcataaacttggatgattttctaccctgttagtcatactgcaatataatttaatatagcctgaactaggcagaacttcagattcaccttggggtagagaaaatgcaatcacttattatgttcttgtttaaaattccccagccaccgccaaatctccaccccccaatctatccttcttttctggcttgttctgtgcctggaaaaactggcttctg

SEQ ID NO: 360620 - DNA, 593 bp, Homo sapiens
taacttatcatttgaaaaaatacagattaaagtattttttttctaaaaaccctttctgaagaatcaaaaatgttatgatctagaaataaaattatgaaccaaagataatagcatgatgctgctataaataaatgtatagattgatatcttaagtgttctggtgctgagttactcaaagagaaacagatctctaagtttctggtgatgagtcaccacgtgagagaaattaaaaggaccactaagcttgtatgtagcaagaagggcataaacttggatgattttctaccctrttagtcatactgcaatataatttaatatagcctgaactaggcagaacttcagattcaccttggggtagagaaaatgcaatcacttattatgttcttgtttaaaattccccagccaccgccaaatctccaccccccaatctatccttcttttctggcttgttctgtgcctggaaaaactggcttctgtgcactatctgacctgggcttctctgcatgatgatttttgggattttcaaagaacaagataaggatgtatgtgagaaagtaatatagaaaggcttcttggaataaagtgagaatatc

SEQ ID NO: 360621 - DNA, 630 bp, Homo sapiens
tccttttctctctctcatttctttatctacttctctaattctctctttctctttctttctcctctttctcatctttcttttttctctttcctccccctcacctttatttcccctttcctttctcctctccctcctcctttttcttctgttacccagaaatctcctactttgcagtagatttccctatagacccaggcatacttattcaacagcattctattttcattgctagttagtgatgatcagaggttaatttttttatgattacttttattttcttaatcactacctgctctaatagaataattattgttagtttttaaataactgttgaggcttaaygttgaaacagcaaatttaatcttaaatttaaaacaaaaaatatatctcttgaactgcatgtgaatggaatctcagaatacacttttgtttatctgtcagaatattacatgttgctgcatataactgcagagtttgtttttttttttttttaacttgaatatcactccactgaatgaatatacttttgttttcagtaggtattttactcttggtgggttttggattgttcccagtttagtacatttaaaattaaacctgctgtacacatttgtaaatatgccttttggt

SEQ ID NO: 360622 - DNA, 606 bp, Homo sapiens
gtgcaggtgatgatggcttctgaggagactttaaaagttcctttaaatttgtgataaaaatgtatttattggcaatctttgtcattgtcatgtttttaattaaattttttaattaaaaaatgtcctaattgaaacaaaaataaggacgagttaaaggtatgtgacgtgaatgttattcttaaggacayattttagtttgatgaccatttactttatttttggatattaagtgtctgtctattaaactttggacactaagatggtaattcatggatttcaaaagtttcatagagattttaaaattcagcattaagaatataaaccaggctgagtagtattcaatgggacatatgtctccaaagagtagacaaagataatgttgtgtatatatgttgtgggcagttgggctggttccacatttttgcaattgcgaattgtgctgctataaacattcatgtgtgatatatttttcgtttaaggacttctttttcctctggggagatactcagtagtgggatttttggatcaaatggtagatatacttttagttcttcaaggaacctccacactgtttttcatagtggttgtactagtttacattgcctc

SEQ ID NO: 360623 - DNA, 606 bp, Homo sapiens
gtgcaggtgatgatggcttctgaggagactttaaaagttcctttaaatttgtgataaaaatgtatttattggcaatctttgtcattgtcatgtttttaattaaattttttaattaaaaaatgtcctaattgaaacaaaaataaggacgagttaaaggtatgtgacgtgaatgttattcttaaggacacattttagtttgatgaccatttactttatttttggatattaagtgtctgtctattaaactttggacactaagatggtaattcatggatttcaaaagtttcatagagattttaaaattcagcattaagaatataaaccaggctgagtagtattcaatgggacatatgtctccaaagagtagacaaagataatgttgtgtatatatgttgtgggcakttgggctggttccacatttttgcaattgcgaattgtgctgctataaacattcatgtgtgatatatttttcgtttaaggacttctttttcctctggggagatactcagtagtgggatttttggatcaaatggtagatatacttttagttcttcaaggaacctccacactgtttttcatagtggttgtactagtttacattgcctc

SEQ ID NO: 360624 - DNA, 606 bp, Homo sapiens
gtgcaggtgatgatggcttctgaggagactttaaaagttcctttaaatttgtgataaaaatgtatttattggcaatctttgtcattgtcatgtttttaattaaattttttaattaaaaaatgtcctaattgaaacaaaaataaggacgagttaaaggtatgtgacgtgaatgttattcttaaggacacattttagtttgatgaccatttactttatttttggatattaagtgtctgtctattaaactttggacactaagatggtaattcatggatttcaaaagtttcatagagattttaaaattcagcattaagaatataaaccaggctgagtagtattcaatgggacatatgtctccaaagagtagacaaagataatgttgtgtatatatgttgtgggcagttgggctggttccacatttttgcaattgcgaattgtgctgctataaacattcatgtgtgatatatttttcgtttaaggacttctttttcctctggggagatactcagtagtgggatttytggatcaaatggtagatatacttttagttcttcaaggaacctccacactgtttttcatagtggttgtactagtttacattgcctc

SEQ ID NO: 360625 - DNA, 619 bp, Homo sapiens
caggaacacccttcaacaaagatctgtagtaattgaaaactcaattatttaattcacttctgagaaatgttttttgtgactattatgacttaagcttgtcctcaagctatataactgtcctctgagacacagaaaaactgtattccccttcttcccctattccctattagtttagttatgtatctcagcagtcatactgtcgtattataaattacacattttaatatttcagtaaaaatttgacackttgcacaatttgaaagcctctgcactagcactattcagtactgatttttaaaagtctgataaatgttactatatattggtgaaattatactgcagagggcttactccctttcatatcaagttgtctatgatcatgactaagaaaattattgtgtgaattttctatactgttatatctacttcaaatctaggataaaatgttactatgtcattggaagaatatttcatctcatttaaaacacaagggacaaaagatactgtattacaactgggaagcagaaagttaaagctccttcagtatcatctgaattaaaacagaaagatagcttcaataatttagcatttttcgctacttttaaagcaaaataaggtc

SEQ ID NO: 360626 - DNA, 619 bp, Homo sapiens
caggaacacccttcaacaaagatctgtagtaattgaaaactcaattatttaattcacttctgagaaatgttttttgtgactattatgacttaagcttgtcctcaagctatataactgtcctctgagacacagaaaaactgtattccccttcttcccctattccctattagtttagttatgtatctcagcagtcatactgtcgtattataaattacacattttaatatttcagtaaaaatttgacactttgcacaatttgaaagcctctgcactagcactattcagtactgatttttaaaagtctgataaatgttactatatattggtgaaattatactgcagagggcttactccctttcatatcaagttgtctatgatcatgactaagaaaattattgtgtgaattttctatactgttatatctacttcaaatctaggataaaatsttactatgtcattggaagaatatttcatctcatttaaaacacaagggacaaaagatactgtattacaactgggaagcagaaagttaaagctccttcagtatcatctgaattaaaacagaaagatagcttcaataatttagcatttttcgctacttttaaagcaaaataaggtc

SEQ ID NO: 360627 - DNA, 591 bp, Homo sapiens
atagttgttcagatttgaacccagtctatctcattccacaacatgcttttgctttaaatcatgcaacctcctataactcttgtagctcaaagctgatattagatctcaatctcatattagccaaagacatgagttgaagaagtaagttttactaaagagagatagcacagatattaacaataaattagcccacagtttgagtcaaagaaaatcaacttgaaygtgtcaagattgaaaaaatcatacattttgtaattaaacagatctacatttaaactctaacgcaaactgcctctatgcctttggttaagttgcttagcttcacataaaatgttgtatgtgtgtgtgtttggtattctttatttgtaaattcatgataataatattgcctacctcagaatttttatgaattaaaaatgcaagtttaaacaggtagagaacttaggaggtatgttcattataatctttttttatctggagaagagacactaagacagttaaagttaaatatagacctaaaggcccatgtacttaaatactagaaatctagtttgaagagagattacagttccttacctgcctaacagaagc

SEQ ID NO: 360628 - DNA, 543 bp, Homo sapiens
aaactctaacgcaaactgcctctatgcctttggttaagttgcttagcttcacataaaatgttgtatgtgtgtgtgtttggtattctttatttgtaaattcatgataataatattgcctacctcagaatttttatgaattaaaaatgcaagtttaaacaggtagagaacttaggaggtatgttcattataayctttttttatctggagaagagacactaagacagttaaagttaaatatagacctaaaggcccatgtacttaaatactagaaatctagtttgaagagagattacagttccttacctgcctaacagaagcactaacataaaaagatcaattcttatttcttccgaaagaatgagaaataaatagaagttgacatatttagtgcactcttattaagtaataaactattattgcagaaacatgtaattttatcttagaaatattgcttttcctgttataactaaggtgtgagggttgccatggcaagatcaccatgttggtgttctttcagcaacgtggaggttgccagtatgagaa

SEQ ID NO: 360629 - DNA, 584 bp, Homo sapiens
cattgctgttgagttgagtttcctattctgttattcatctcttgtcagttgaatactttgcaaatattatctactattttgggttttgtagatgtcctcttctcctgtttgattgtttcctttgctatgcagaagctgtttagtgtggtgtgattccatttgtccattttgatttgttttcccatgcttttgaggtcttactcaagaaatctttctcaaactaatgtcttaaaacaattcctgaatgtttatctctagtatttttgaaggttatacatcttaaatttaagactttaatccactttgatttgatttttgtatatggtaagaaataggagtctggtgatctagagtggtaaaatagggcaattgtggttatcaataatttattataaatttcaaaataagtggaagagtagatatggaatattcccaagacaacaaaataatcattattgtgaatagcccaagtacccaaatctgataattacgtagtgtatgcttgtatgaaaatatcacatgtacctaaaagatatgtgcaaytattatgtatctattaaattaaaaacacaaaagtaaagtat

SEQ ID NO: 360630 - DNA, 575 bp, Homo sapiens
gtcatatgttgcttcacaagaatataataaatgaataaataaatacataaataaaacatgtcttaatatttttatattctgtttaractcctcaatctccctgtagtctgcagatagtatgtaacttgctttataggtctttagaaggccctttatattctgttaattcattcatttccagttttgtaatttcctttattgactttgaaattctcatcattcctgaaatggccctgcttgctttacatatttctccaacagcaggatttttatctttctaaaagcttgaaatatcacttttctgtgaaatattttctaaataacctgattgccttagttaaaatcgtctttctgtctctacaaatttatatataattttaactctcatataaaattgattacactgaatcagacttacctattaatatagttgtcctttacactagtttctgggtttattgacaccttgataggtgtttgcttttaaattgatgatttcaaaaacaagctgagggtagtaagctgaagacgcagagaggaagtgcagaggacaaacctgagggagctctctacag

SEQ ID NO: 360631 - DNA, 575 bp, Homo sapiens
gtcatatgttgcttcacaagaatataataaatgaataaataaatacataaataaaacatgtcttaatatttttatattctgtttagactcctcaatctccctgtagtctgcagatagtatgtaacttgctttataggtctttagaaggccctttatattctgttaattcattcatttccagttttgtaatttcctttattgactttgaaattctcatcattcctgaaatggccctgcttgctttacatatttctccaacagcaggatttttatctttctaaaagcttgaaatatcacttttctgtgaaatattttctaaatarcctgattgccttagttaaaatcgtctttctgtctctacaaatttatatataattttaactctcatataaaattgattacactgaatcagacttacctattaatatagttgtcctttacactagtttctgggtttattgacaccttgataggtgtttgcttttaaattgatgatttcaaaaacaagctgagggtagtaagctgaagacgcagagaggaagtgcagaggacaaacctgagggagctctctacag

SEQ ID NO: 360632 - DNA, 573 bp, Homo sapiens
tatttaatacatataacatacaaaatgtgtgttaattcactgtttattttattagtaagcctttcagacaacaataagatattagtagttgtgttttgggggagataaaagttgtatgcaatttgtgactgggcccctaagtcctgccttgttcaagggtcaattgtcttccgaaaatagagtaataataatattaataatacaatacaaattatacaaattttaaaatataggatagcaactatttacatatttacattgcattatgtattataagcaatatagaatttatttaaagtatatgggagaatgtgtgtaggttatatgcaaatactatgcgattttatattaggaatttgagtgtccacattttgggatctgtaggggttggggaagagatgtacaggaagcaaacccatgtggataccaagggacaactgtatgtaacaaagcaactcgaattagagagtatcaccatatggtaacagggacagtatcaggaaaagtrtccctgagaaggtgacttatgatctgaaacaaaagacatatattatgtttagtagttaactagtt

SEQ ID NO: 360633 - DNA, 632 bp, Homo sapiens
agctcctgtgcttgagattctcccagattttattccacatagctctccatctggctatgtgacggatgtccctatgtgacacagtagtggacctggaaaagaaaatatatgatattttaaaaattaagttaaaaagaaaatattaaaatgtcagtgctattaagaaaagaaggagattggcataaagaattataaatttgtggatccctgcatatgctttcctacatgtatataaacagttactaacttcttagaactgccactgaacaatgtttgtttgaagtgacatcagcaacatggcacatgagaagttgcagccgtcatctccttgaagaaacactaatgaaacaatctcaaaatacctgtatgtgaactccagaatccattgtaaaagttacaacacttcaggcaagcaccaaaccaagaaaaatgactttgaaaatgcatataaagaacagtttaattttatttatgttagtgcctcttttaagctgacatagcttagcacctactgagatccaggcttsggatttctctcttgggagaaagagtgagggcgcatgcctcttatatcccccagcatttcagggcattatccaccagttctacttttgtctcacctcgctcagaac

SEQ ID NO: 360634 - DNA, 588 bp, Homo sapiens
tatattatatattgtgcacttcaaaatttaagaaggtagatctcaagttaagtgttctcaccacagaagataaaacaaacaaacaaacaaaaaggcacaaggaagtttgggaggtgttggatatatcttttacctcaattgtaatgacagtgccattgatatttatatatgtccaaatttagcaaatttcatatattaaatgcacgyagttctttgtaagtcaatcatacctcaattcagtggctacaaataaataatagataaaaaagaaagtggagcatggtttcaatcaaaatattaatactgacagtttcccaaagcaacaactgtattacacatcttactgtttctcttcctttatcatcatctagaaattatttcatatcccaaagctgatttttgattcagctcacaaatcatttcctagaagaccctgaccatactatacgcatattacaggaaaaaaaattaatatatactggtgccttctgccggcatttactatgctaggtattttatatacattttcctgtagaaactttacaaccttctagccatcctatgaagttgtttgtatctattatttgt

SEQ ID NO: 360635 - DNA, 424 bp, Homo sapiens
gaatttttctcctgtatacaatgatatgttaccaaggatgcatttttttttttttttggaactcaaaaggcagacaaaagagtgaatgctgacaacattttgtctagatcccctttagccacccrttgccctcatgtctaacttctttgggttagtctctaacagctcacagctgctctctcttctgaagaattttccttgactgtatggtaggttcctcacccaggaggtgaaattcaccattcaggggaaacctacaaccaatgactgactgatggaggtataaacagaacagccctcttgtccaaaggggtattttttcccccagagtttgccatgaaattttaatggagctgaacgcactcccactgaaataataattttgtttagtttttattctacttcccttactcttttattcctt

SEQ ID NO: 360636 - DNA, 567 bp, Homo sapiens
tattgaaggaaattaaaaatgctactctaatgaacatacaaatgataaaaaagcaaaacagctttattgctgatatgaagaaagtctgagtgatctgaatagaatatcaaaccagctacattttcttaagctaaagcctaatccagaacaaggccttaagtctccttagttctatggaggctgaaagaggtgaggaagctggagaagaaagttttaggcaagcagaggttagttcataaggtttaaggaaagaagccacctccataacatacaattgcaaagtaaagcaccaggtgttgatagagaaactctagcaagttatctggaggctstagctaggaaactggtaaagatagttacattaagcaacagactttgggtgtagaataaacagccttctattggatgaagatgccatctaggattttcatagctagagatgagaagttagtgcctggcttcaaacagtcaaagaacaggctcactcacgctcttgttctgggataaagcagctgctgactttaagttgaagccaatactcactttcctttctgaaaatattgggac

SEQ ID NO: 360637 - DNA, 514 bp, Homo sapiens
atgaatctttatctttggaaataaaggtaaatttgatgctttgaatgaacagacaccttgtttgactagaaatgatcatggtcccaatttcttgtcaaacatgttagtttcttgctgtcagagaatgctgttccatttctgatatttcagcatcagtcttttgctattacaaaaccaatgccattggctgtcaggacttacagtttcaattggtagacttatctgtcttcagcaggattagacrgaaatatttcttattcagaggctgctcctgtggaagacggcagcagctccaggaaatttgagtatattagcttcaaaggacctgtctgccacccttctgacagtgcactctgcaaagaaccttccgatctcctgctccctgggcagttttctctgcatcttaaatatgtattttcggcattacatacaaacttcagcaagttctatgttttaatattaatttacataagcacaaaaacaagctatagatttgcatgtaattggcactagg

SEQ ID NO: 360638 - DNA, 514 bp, Homo sapiens
atgaatctttatctttggaaataaaggtaaatttgatgctttgaatgaacagacaccttgtttgactagaaatgatcatggtcccaatttcttgtcaaacatgttagtttcttgctgtcagagaatgctgttccatttctgatatttcagcatcagtcttttgctattacaaaaccaatgccattggctgtcaggacttacagtttcaattggtagacttatctgtcttcagcaggattagacggaaatatttcttattcagaggctgctcctgtggaagacggcagcagctccaggaaatttgagtatattagcttcaaaggacctgtctgccacccttctgacagtgcactctgcaaagaaccttccgatctcctgctccctgggcrgttttctctgcatcttaaatatgtattttcggcattacatacaaacttcagcaagttctatgttttaatattaatttacataagcacaaaaacaagctatagatttgcatgtaattggcactagg

SEQ ID NO: 360639 - DNA, 535 bp, Homo sapiens
atacaatataagcatgtggcactgtctctttagggctgacttcacaatcactgatttcattgtcattaaataccttgcactcatacacatttgcagttatacccactaaaacacagttgactaattacattaggtttttctcatagaaattttgttttcaattttataattttcttcagtgcatttctctggcaaagtgttccacatctcagtcaagctgcaaaatctaaattaaaaacagcatattgatgccattagcttatggtccaatctgaagttcccatatctccattacatggcactgatccagtcaaatgaccattatgaattaagcatcatgagagcacagaggatttccctgaaggtgtttgaaaagatttcagagaaaatattaatttatcccctctcatactgartattaatttagtatctactatgtgagaagtattgactaagcataaagcttctcctttaggaaaaaaataccagtgaattttaaaaggcatttcatctttatttgagtatcattttcaaa

SEQ ID NO: 360640 - DNA, 535 bp, Homo sapiens
atacaatataagcatgtggcactgtctctttagggctgacttcacaatcactgatttcattgtcattaaataccttgcactcatacacatttgcagttatacccactaaaacacagttgactaattacattaggtttttctcatagaaattttgttttcaattttataattttcttcagtgcatttctctggcaaagtgttccacatctcagtcaagctgcaaaatctaaattaaaaacagcatattgatgccattagcttatggtccaatctgaagttcccatatctccattacatggcactgatccagtcaaatgaccattatgaattaagcatcatgagagcacagaggatttccctgaaggtgtttgaaaagatttcagagaaaatattaatttatcccctctcatactgagtattaatttagwatctactatgtgagaagtattgactaagcataaagcttctcctttaggaaaaaaataccagtgaattttaaaaggcatttcatctttatttgagtatcattttcaaa

SEQ ID NO: 360641 - DNA, 587 bp, Homo sapiens
ttgtattcctcaacgctgggggaggggcctagtgggaagtggtggatcatggggaaggattttccatttgctgttctcatgacagtgagttcttaccagattttgttgtgtaaaagtgtactgcactttctctttcaccttcctcttctcctccttctctggccatataatttgtgcctgcttccccttcaccttctgtcatgattgtaagtttctaaagcctccccagcccttccttacagccaatagaactgtaagtaagttaaacttcctttctttcagtctcagatagttcttcatagcaatgcaagaacagactaatacagtatcttcataagtgaagcatgtttcttgtaggcaacagattattcggtcttgtttcttttcatccattcagtcactgtgtgtcttttgactgaatacttgagtccatttaaatccaaygtaattggataagtagggatttactcctgacattttgttatttgttttctggttgttttatagtctcctcttccttcttttatttcttcttggcttccttttagagaaggtgcttttctctggtggtaagctttaatttgtat

SEQ ID NO: 360642 - DNA, 587 bp, Homo sapiens
ttgtattcctcaacgctgggggaggggcctagtgggaagtggtggatcatggggaaggattttccatttgctgttctcatgacagtgagttcttaccagattttgttgtgtaaaagtgtactgcactttctctttcaccttcctcttctcctccttctctggccatataatttgtgcctgcttccccttcaccttctgtcatgattgtaagtttctaaagcctccccagcccttccttacagccaatagaactgtaagtaagttaaacttcctttctttcagtctcagatagttcttcatagcaatgcaagaacagactaatacagtatcttcataagtgaagcatgtttcttgtaggcaacagattattcggtcttgtttcttttcatccattcagtcactgtgtgtcttttgactgaatacttgagtccatttaaatccaacgtaattggataagtagggatttactcctgacattttgttatttgttttctggttgttttatagtctcctcttccttcttttatttcttcttgkcttccttttagagaaggtgcttttctctggtggtaagctttaatttgtat

SEQ ID NO: 360643 - DNA, 573 bp, Homo sapiens
ctaaaccttttatggcacattatatttcccattaacatccatactactttttatcttgttccacaataaactttcataaaagacatattttcttttatttctgactttttcctgattaataatatcatttaatacatatatgtacatatgtacatatatatcatttatatatatcatttaaactatcacttaataaataaaagctttgctttctttagaaaaacagattatacgattgtgcaatttaaataaaatacgtaggtgggtcaggacacagtgcattggttgctacaatgagatcagtcagatggcttcaaatcatgaacaagaaggtgacaacagctgtcctgtaaattcagaaattatgatatcaataaatataaataatttaatttgagaatatttaagtacatctgaataaacytccaatgtaaagataaagaatggtacctataagatcataagtatattcattgggagtgcaaaataggagtgcactgctctactcaggaatccaagctttggttagaaaaattgattcagataaaaatatatgcgtaacaaaaattaatt

SEQ ID NO: 360644 - DNA, 573 bp, Homo sapiens
ctaaaccttttatggcacattatatttcccattaacatccatactactttttatcttgttccacaataaactttcataaaagacatattttcttttatttctgactttttcctgattaataatatcatttaatacatatatgtacatatgtacatatatatcatttatatatatcatttaaactatcacttaataaataaaagctttgctttctttagaaaaacagattatacgattgtgcaatttaaataaaatacgtaggtgggtcaggacacagtgcattggttgctacaatgagatcagtcagatggcttcaaatcatgaacaagaaggtgacaacagctgtcctgtaaattcagaaattatgatatcaataaatataaataatttaatttgagaatatttaagtacatctgaataaacttccaatgtaaagataaagaatggtacctataagatcataagtatattcattgggagtgcaaaataggagtgcactgctctactyaggaatccaagctttggttagaaaaattgattcagataaaaatatatgcgtaacaaaaattaatt

SEQ ID NO: 360645 - DNA, 573 bp, Homo sapiens
ctaaaccttttatggcacattatatttcccattaacatccatactactttttatcttgttccacaataaactttcataaaagacatattttcttttatttctgactttttcctgattaataatatcatttaatacatatatgtacatatgtacatatatatcatttatatatatcatttaaactatcacttaataaataaaagctttgctttctttagaaaaacagattatacgattgtgcaatttaaataaaatacgtaggtgggtcaggacacagtgcattggttgctacaatgagatcagtcagatggcttcaaatcatgaacaagaaggtgacaacagctgtcctgtaaattcagaaattatgatatcaataaatataaataatttaatttgagaatatttaagtacatctgaataaacttccaatgtaaagataaagaatggtacctataagatcataagtatattcattgggagtgcaaaataggagtgcactgctctactcaggaatccaagctttggtyagaaaaattgattcagataaaaatatatgcgtaacaaaaattaatt

SEQ ID NO: 360646 - DNA, 538 bp, Homo sapiens
tgctgatgagggcaaactttgagattagtccctctaatccccacaaaatggaaggtagtctgtgtgattcagctctgtatcaagcacaaagagaatcacctataattcactgagctactatttttttaaaaaattatagtttgtgaaactgaatggggtctgtgaaccccaatgaatagatgaggaaactgagaatcagagagtggctgactgtcccgatcacccagcatttcagtagtagggcagagagtatgaaactcttctgattttcatttagtgtagtttcccttgttataacagctgtctcactacagaaagaattctagctataaaattccacttgagtaagaacatttggctatgmcctcaaagcacgggcaattttcatgcaccaatttggcattatggagaaagaaatgatctccacataaatccgaatttccaaacacctaaaggtgagctcctttaagcccaaagacttttatcttaactttaacacatttcagtgaaaattattctaaatatacatttgaaggtc

SEQ ID NO: 360647 - DNA, 560 bp, Homo sapiens
tgtaacattctttagatagatgaactgtgttacaatttccttagcttgtcacaacaaacccagggagtaggtgtcaattatcaacacccagtttagagatgagaagtctgaagttgaggaaggtaaaggacatttcaaaaatagctcagttagataaaactagcttattgcttgttttcatttgttcttccatttgagtaataagcttttcaatttaaataatttgactttttactcaattctttcttatcaaaaaatgacaactaactaaggcaagtaaagacttatcacaagtctactgttctcacagtataggattgccacaacacrgaaaatttttttaagtaaataaaacaatggagccaaatagaaaatctaaagatcgtgtgcaagtgagaacttaaaatatgagatatggcattataattcaatacaaatagatggcccattatagaaatggtactggctctccacctggaagaaaaagacttcctaactcatatcctatgtaaaagtaacagattgataaaatatttcagtgtgttaaaaatagaattaaa

SEQ ID NO: 360648 - DNA, 536 bp, Homo sapiens
acaactaactaaggcaagtaaagacttatcacaagtctactgttctcacagtataggattgccacaacacagaaaatttttttaagtaaataaaacaatggagccaaatagaaaatctaaagatcgtgtgcaagtgagaacttaaaatatgagatatggcattataattcaatacaaatagatggcccattatagaaatggtactggctctccacctggaagaaaaagacttcctaactcatatcctatgtaaaagtaacagattgataaaatatttcagtgtgttaaaaatagaattaaaaaattttaaaaatatttgtagaaacattttatgtgagagaccttcttaatctaaacaggaaacctagaagccatgaaggaatagaagtgttttttttaatatggcaaaatatacaatgacaaaatcaaagtgrtagcctagaaaaaaatatgaaatatatgacaaatgaaaacaatatctgtactatgctaggtgctcctacaaattttaacaggcaaactataggactggataa

SEQ ID NO: 360649 - DNA, 428 bp, Homo sapiens
gaattccaaatctgaagactggactactgccccagtgattgattgattgagacagtcttgctctgttgcccaggctggagggcagtggcgtggtctccactcaccacaacctctgcctcctgagttcaagtgattctcctgcctcagcctcccaagtagctgggattatagacacatgtcaccatgtccggctaatttttgtattttagtagagacagggtttcaccacgttagcsaggctggtcttgaactcctgacctcagatgacccgcccaccttggccttccaaagtgctgggattacaggtgtgagccaccgcgcccggcctgatttttttttttaattaaaaaatttgctcctcagtagttactgattctaaatgttctatttggtagggcgatgtgtatctttcacagaatgttagaagg

SEQ ID NO: 360650 - DNA, 401 bp, Homo sapiens
  misc_feature (1)...(401): n = A,T,C or G
ttggagggcacaccacttgtgactgtgcctgggacagaaaagactgcacccactgttaagcaggaacatgaccctttctaggagagataatgtgccaattcctgggaaagtcaaacttctctataatccatagttcccatcacagagctccaatcccagctgtgttccaggacagataggcagaactgcagaaggtatggaaatacatcttgattgaaagcatacatagaattactctttgcatcacaaggaggcccaragaaatacatctgaatctaactactcggttggtataaatgaatagttcttcactatatgctcccttaatgtttcaagtgaaggggtctggcttataaacctaaggagaattcccatggcagagtcatnnnnnnnnnnnnnnn

SEQ ID NO: 360651 - DNA, 552 bp, Homo sapiens
aatgacaagctctttatggtttcaagaaactttgaagaagaacttctctattcctcacagtcagataactttctattgttattgattttatcctaattgtattgaaattttgatgttcccataatcctgcttccagcctttttctcttagtatacatgctaacccctggtaataaggtagaatcatgagagcagaaacaacatttacattttgtttttctactataatgaagccaaaatcttaatcaggactcatcacacagtrgataatacattgaatgaatctccaccattaaggctgaagatattctccataagattataatccccaattcttacatccagtccaaatctctctcttaatcttcaactgtgtgtgtgtgtgagtgtgtatatatacatatatgtattctttatatgctatgggtatctcaaactacacaagtccaaactggatgcattaactctacttccttccaaacctgatcttctagcccactattctatgaaaaatactatcagttacctaaatcagaaatctgagtattatttt

SEQ ID NO: 360652 - DNA, 483 bp, Homo sapiens
caattcccacctatgagtgagaatatgcggtgtttggttttttgttcttgccatagtttactgagaatgatgatttcttttttacctttccttacttcaacttctagatgcctggatatccgcctttgtaatccaatttccttcacttcctcatttgtatcctctttttccaccttccacagtttgccttttgtcatttacatcttgttttcacattcttactagattgaaaaatatgtccctcaattaaaaattctgctaacagaacaagtttcttggtttagtccaatttaagagtagaaggacaagaaagtccacttaattatctctattctagaraaatggaagtttgaaagttttttgcaaaatgtaagttcacttcctaattttgcaatgtggcccagtcaatttctagcatgtaaggtacagaggaataggttaactgaaagaaaagatagtaagctgaacagcacaatattcaca

SEQ ID NO: 360653 - DNA, 473 bp, Homo sapiens
ggtaacttaagctaaataaactcttargctctcaacattttttgttagttttgttggctgttttgcttaagccagtctacagtctagattgcatttgcttacactttcaaccaaaaattaccaaatgtacatacatctttctaaaatattatttcattatttttgttaccattctatgtgtaaaatctatgacgtacagattactatgtatagtttgacaagaatcacttatttacttttgctattcttttcttttatgtgctttatttctgtaacaaatggtcccttagtctgccagaattcagatcagatgttaaatctttatttttgcttcagttaccagtaaggatcactcctctccacttccctattaccttttatttatattaattaattaattatattgtatacacctgatagtaagattaatgtattcatcttttaactttcacaattagtatagtggctagtat

SEQ ID NO: 360654 - DNA, 447 bp, Homo sapiens
ggacccaaagagtgagcagcagcaaaagttattgtgaagagcaaaagaacaaagctttggcagcatagaaggggacccaagcaggttgccactgctggctggggtggccagcttttatkcccttatttgtccccacccacgtcctactgattgttccattttacagagtgctgattgacgcatttacaatcctttagctagacacagagtgctgattggtgcatttttacagagtactgattggtgcatttacagtcctttagctagacatagagcactgattggtgcatttttacagagtgctgattggtgcatttaaaatcctttagctagacacagagtactgactggtgcatctataatcctctagctagacacagagctctgattggtgtgtttttacagagtgctgattggtgcatttacaatcctttagctagacagaaa

SEQ ID NO: 360655 - DNA, 550 bp, Homo sapiens
agtaggataatacatgttaaactgttaacttttagcaaactttacttttgttgaaaatttgtaagtttgggatttcaattattctttgctattaataagacctcgttcagtccatattaacttaaaattggyatagatggctccttcctgattctgtttaaggtttagctgagtgcaaacagctcacacgtttgagaagaccaattattaggcaattttcctaactctgcttctacaagagtttccttatcacttactgaatacccattttgtctttttcctttaatcaccctggaggtaccatctatcgtcctgtactgaagggagttcttcctaggtctggtcggacttttgtatggtagttaattaagatttagatcccctgttacgaaacctgctgggttaaggatttttgataggaaggctatgggttgtcagtgacctcagtgcttttgggctactcccttgttcacactgacaacaaggtggcattggaatgttataaggttgcagagaagaccttcaattatcaattataggttttaaattt

SEQ ID NO: 360656 - DNA, 550 bp, Homo sapiens
agtaggataatacatgttaaactgttaacttttagcaaactttacttttgttgaaaatttgtaagtttgggatttcaattattctttgctattaataagacctcgttcagtccatattaacttaaaattggtatagatggctccttcctgattctgtttaaggtttagctgagtgcaaacagctcacacgtttgagaagaccaattattaggcaattttcctaactctgcttctacaagagtttccttatcacttactgaatacccattttgtctttttcctttaatcaccctggaggtaccatctatcgtcctgtactgaagggagttcttcctaggtctggtcggacttttgtatggtagttaattaagatttagatcccctgttacgaaacctgctggrttaaggatttttgataggaaggctatgggttgtcagtgacctcagtgcttttgggctactcccttgttcacactgacaacaaggtggcattggaatgttataaggttgcagagaagaccttcaattatcaattataggttttaaattt

SEQ ID NO: 360657 - DNA, 627 bp, Homo sapiens
gttttggggttgtcccacgagtctgagtaaggactccaagagctattcctgctctctctgtgatgtataaagagaagttttgtcatgtgggaaggctttaggctggagcttgtaatagggcctgcattagggtttggaaggctgtttctgtctctggttcccattctactaggtgagtatttgccctctgggtctcgttgattagagtatagagtggtctggccatctcactgtatccagtgatccatagtcggcaaaagccagtgattccaaggaaccccctgcaattgttttaatgtcttagggtgaggataagccagtataggctgtattcattccgtactgagggtcctggttcctctggataagattaggcctagatatttgacttcttgtaggcagagctgggccttcgatttagatgccttttactcttgattagctagaaagttcaagaawtctatagtagcctgctggcatgaggcttctgaactggtagccaaaagtaaatcatccacatactgaaggaccagagtgcccagacttgagaagtggcttagatcttgggccagtgcctgaccaaatagatgagggctatccctaaacccttggggcaagactgtccat

SEQ ID NO: 360658 - DNA, 340 bp, Homo sapiens
aggcttctgaactggtagccaaaagtaaatcatccacatactgaaggaccagagtgcccagacttgagaagtggcttagatcttgggccagtgcctgaccaaatagatgagggctatccctaaacccttggggcaagactgtcyatgtaagttgggacacgtgtggtctgtgggatcctgaaagacaaagagaaactggaagtcagagtgcaggggattacagaagaaggcatccttgaggtccagaaccgtaaaccattctgcttactctggtatttaagagagcaaggtataggggttgggtataactggatatagaggaattactgcctcattgatg

SEQ ID NO: 360659 - DNA, 372 bp, Homo sapiens
atgcatccaccattatataacacatggaatagttttactgtcctacaaatactctgtgctctgcctacttacctcttcctcccgcctccccacccaccaactcctgrcaatcacttatctttttactgcctccatagttttgccttttatagactgtcatatgattggaataatacaccacatagctttttcagaatagtttctttcacttaatgacatgcatttaagttttctctgttttctcatggcttgatagttcattctgtgttttctttttttgtttattgtttgtttgtttttgagacagaatctccctctgttgcccaggctggagggcagtggcatgatctgggctcactgcaacctccccct

SEQ ID NO: 360660 - DNA, 544 bp, Homo sapiens
acattcaattttgtcagaaatcaccacactgtcttccaacatggctgtgccattttgcattcccacaagcaatgaataagggttcttgttgytccaaattttctatagcatttggtgttatcagtgttccaaattctgaccattctaatacattcatagtcatatcttatcgttgttttaatttacattcatcaaatgacatatgatgtttaacatctgtttatattcttagttcccatgtatatatttttttcagtgaggtggcttcaagtctttggctcatttttttaaatctagttgttcattttcttattgttgagttttaagcgttttttatctaacagttttttttatcagtcacatgctttgcaaatattttttctcatctgtggcttgttgttttttaattttcttgacagtatcttttaccgagcataaagtactaattttaataaaggtcagcttctcaaatgccttttcatgaattatcattggtgttgtatctgaaaactcattaccaaacctgagatcatccacattttct

SEQ ID NO: 360661 - DNA, 605 bp, Homo sapiens
ctgctgtcctcattctatttattcttcaagatctgcctcaaaggtcttccattaaatcttttctaatamatgacaaagtatgcatttttctcttccaaaattgtatacttctgctgtgatgacatttatagttttctaccatatattatctcttgattgttatctaattgctacaatgcacaaaataatatttgccaaatagttataataacttcagttttcactttgagacagatcacactaatttcagaaaaggttatgtctcataaatgaaacggaatgatattaattcaaaggagctttggagaacagctgtacttgagtttattagtcagaattaggcattgttcacaagattacctcattagacattgtatgtaacagaccttagcttaaagccaaaatagaaaaatgaaaattaaatacaattgtggatttcagcctctatataatgcacttgaagacctatccaactaaaacttcatttccgagtaatatgccattagataaaaatagattcagcaaaatacaaaatattaatgcttgcaacttatgaaatttaagcacatgagactcaaatgataaaagtaaaatccaacctatat

SEQ ID NO: 360662 - DNA, 551 bp, Homo sapiens
cttctttctttggaggcagaaattgggcataagacaatatgaggggtggtctcctcccttatgggattatgagatcaaatgacagatctatttttagttctttaaggaatctccaaactgttttccatagtggttgtactagtttacattcccatcaggaaagtaaaagtgttcccttttcaccacatccatgccaacatctttytttttttcttttttgattatggccattcttgtcagagtgaggtggtatcacattgctgttttgatttgcatttccctgataattaataatgttgagcattttgtcatatgtttgttggcaatttgtacaactccttttgagaattatctattcatgtccttagcccactttttgataggattgtttcttttgttcttgctgatttgtttgagtttctggagattctgaatgttagtcctttgatggatgcagagattgtgatgattttctcccacttggtgggctgtctgtttactctgctgattatttcttttgctgtgcagaagctttttaattaattaattaa

SEQ ID NO: 360663 - DNA, 619 bp, Homo sapiens
ttaattgcttgtgaaacactaaattgtaattcagtggcatttatgaacaatataaatgtataaaattcaaataaatgaaacatcaataaatgtgatctattgctggcaacttgaggagggaataattaatagcatctttttttttctgcccaagttgggaaccaattaagaaacacagggatcagacagatagagatcaaaagagcatcgagaatactgataacacctaaattagagaatgtgtctttcagtctattagccatgttggctagctcagactataacctgaagttgaacttgctcactcagttccaagtattgctgggaatttacaagatgtctcaatggggtcctgytcttttaaggatctaaggaatgtgatgcagagagtatgtgctttttgctagtaggcatattccagtgaggaagaggctgggtcacacttattatcttctctcaatatcacccatgggaaaagttacttctctcatgggcaagagtgaatattaagtcagaaagcaatccctattttaccctattggaagcgttactactattattattatcaatggaaatttaaaaaataataataatagtaacaatcacctcttgagagatt

SEQ ID NO: 360664 - DNA, 495 bp, Homo sapiens
gctgggattacaggtgcatgccaccatgcccggctaatttttttgtatttttagtagagacgcggttgcaccatgctggccaggctggtcttgaactcctgacctcaggcaatccacccgccttgaccttccaaagtgctgggattacaagcatgagccaccttgcctggtcagaaattatcttttatgttgtatgtaaagttcattaaagctgaacaaaagtgacatattcatgttacctgggaagactaccaatgcaatgtaaatgctgtatgggcaataaatatataattattaagataattgagaaatggacaccatattgaagataatcaacattgttgtgccatagactttgagagagcaaaatatcagaaragaacgctacctcttatcggattaaattactgaaatattgatacaggtagttaggcatgagtggggcaggagagggctctcccctcctacccactagaaatgccaggtgatggttcg

SEQ ID NO: 360665 - DNA, 406 bp, Homo sapiens
aagctgaacaaaagtgacatattcatgttacctgggaagactaccaatgcaatgtaaatgctgtatgggcaataaatatataattattaagataattgagaaatggacaccatattgaagataatcaacattgttgtgccatagactttgagagagcaaaatatcagaaaagaacgctacctcttatcggatwaaattactgaaatattgatacaggtagttaggcatgagtggggcaggagagggctctcccctcctacccactagaaatgccaggtgatggttcggcaaatttcacattgcctctctaaaaataattccacagcaccagggagaggccatttcctgatggtcggcacctgttaacatcaaaatgttaattgaaagcagcacccagggagaaaca

SEQ ID NO: 360666 - DNA, 406 bp, Homo sapiens
aagctgaacaaaagtgacatattcatgttacctgggaagactaccaatgcaatgtaaatgctgtatgggcaataaatatataattattaagataattgagaaatggacaccatattgaagataatcaacattgttgtgccatagactttgagagagcaaaatatcagaaaagaacgctacctcttatcggattaaattactgaaatattgatacaggtagttaggcatgagtggggcaggagagggctctcccctcctacccactagaaatgccaggtgatggttcrgcaaatttcacattgcctctctaaaaataattccacagcaccagggagaggccatttcctgatggtcggcacctgttaacatcaaaatgttaattgaaagcagcacccagggagaaaca

SEQ ID NO: 360667 - DNA, 585 bp, Homo sapiens
aaaaataattccacagcaccagggagaggccatttcctgatggtcggcacctgttaacatcaaaatgttaattgaaagcagcacccagggagaaacaacttcctgggaatgcgtgttaagagataaaaatggtgaagtatgatcttccagggcacattctcccagaaaagggaagaaagcctcagatgggcatgaatataattccctaaacacaatgcttgtgctcacttytgaagggtaaggaaagcgctgggcatgcggaaaacccaccctaggagaagaatcatgggagagagacaagcttataaaagttctaggatcacggttaaatgggggcacttgaccttctctctttaaccttcacatgcctgcttgaatctcttccaaatgcaccttcctttcttttctgttctgaggactttctaaataaacttctattcctgctctagaacttgcctaggtctctttttttttttttttttttttttgctttatgcccctcagtccagttctttcttctgagaaagcaaggactcaagttgctatggactcataaggataggccaccagtaatttagggtaaat

SEQ ID NO: 360668 - DNA, 585 bp, Homo sapiens
aaaaataattccacagcaccagggagaggccatttcctgatggtcggcacctgttaacatcaaaatgttaattgaaagcagcacccagggagaaacaacttcctgggaatgcgtgttaagagataaaaatggtgaagtatgatcttccagggcacattctcccagaaaagggaagaaagcctcagatgggcatgaatataattccctaaacacaatgcttgtgctcacttctgaagggtaaggaaagcgctgggcatgcggaaaacccaccctaggagaagaatcatgggagagagacaagcttataaaagttctaggatcacggttaaatgggggcacttgaccttctctctttaaccttcacatgcctgcttgaatctcttccaaatgcaccttcctttcttttctgttctgaggactttctaaataaacttctattcctgctctagaacttgcctaggtctctttttttttttttttttttttttgctttatgcccctcagtccagttcyttcttctgagaaagcaaggactcaagttgctatggactcataaggataggccaccagtaatttagggtaaat

SEQ ID NO: 360669 - DNA, 585 bp, Homo sapiens
aaaaataattccacagcaccagggagaggccatttcctgatggtcggcacctgttaacatcaaaatgttaattgaaagcagcacccagggagaaacaacttcctgggaatgcgtgttaagagataaaaatggtgaagtatgatcttccagggcacattctcccagaaaagggaagaaagcctcagatgggcatgaatataattccctaaacacaatgcttgtgctcacttctgaagggtaaggaaagcgctgggcatgcggaaaacccaccctaggagaagaatcatgggagagagacaagcttataaaagttctaggatcacggttaaatgggggcacttgaccttctctctttaaccttcacatgcctgcttgaatctcttccaaatgcaccttcctttcttttctgttctgaggactttctaaataaacttctattcctgctctagaacttgcctaggtctctttttttttttttttttttttttgctttatgcccctcagtccagttctttcttctgagraagcaaggactcaagttgctatggactcataaggataggccaccagtaatttagggtaaat

SEQ ID NO: 360670 - DNA, 497 bp, Homo sapiens
aggcgtagactcttcgaatgtatcagataaggctcattcttcacaagcaagaattatattatgttattttcaatgtcattaattgcaaaaataatgtaattttaggtatgtgtctccttcctattttcaggtagaaaattcaactttggccatggacagcagcaaaaaaataaaaaataaaaaataagttaacataaatagttccctgtagtttttgatcatcagtgtgtgytgcttccctctaggaaacccacaggttcatttcacatggttctctcagtttcctctgtcctgatgcctctctaccttataaatctttaccagagctggcaaccataaaatgtttccacttcgagtttctgattcttttctggaaaacttcaaagtggattaaatatcaccattgattgtcctaatcacagatctacaccacagtttgcttcctctgttcccccaattctcttgttagcctgaaagaaattatttctgtccatgtc

SEQ ID NO: 360671 - DNA, 497 bp, Homo sapiens
aggcgtagactcttcgaatgtatcagataaggctcattcttcacaagcaagaattatattatgttattttcaatgtcattaattgcaaaaataatgtaattttaggtatgtgtctccttcctattttcaggtagaaaattcaactttggccatggacagcagcaaaaaaataaaaaataaaaaataagttaacataaatagttccctgtagtttttgatcatcagtgtgtgttgcttccctctaggaaacccacaggttcatttcacatggttctctcagtttcctctgtcctgatgcctctctaccttataaatctttaccagagctggcaaccataaaatgtttccacttcgagtttctgattcttttctggaaaacttcaaagtggattaaatatcaccattgattgtcctaatcacagatctayaccacagtttgcttcctctgttcccccaattctcttgttagcctgaaagaaattatttctgtccatgtc

SEQ ID NO: 360672 - DNA, 515 bp, Homo sapiens
agtcaggaggcacgggatcagagacctgcttaaagaagctgtctggctgcccgttggtggagcaggtgcactgtgctgggggaatccctactgtccagactgactggactcttcagagccagtggcaggagagactaagtttgctgagccatggagattgcaaccacccctcccgctagggrctctgtcccagccagatcagacttgtctgtaaacccctggctagagttgctgaaattcccacagggaggccccacccagtgaggagggatgaatctgggacccacctaaagaagcaatctggccataatctgccacagccactgttctgtactgtggggaatttcccccagtccaaaccacccagtctccctggcaccagctggggaaaacagctggctggagcttcagtgatggtggctgccccgaatttgataatttttaatgctatgtggtagtatttgatgcaaataggcttaaaatagttttttatgacaatattgatggagatgttt

SEQ ID NO: 360673 - DNA, 515 bp, Homo sapiens
agtcaggaggcacgggatcagagacctgcttaaagaagctgtctggctgcccgttggtggagcaggtgcactgtgctgggggaatccctactgtccagactgactggactcttcagagccagtggcaggagagactaagtttgctgagccatggagattgcaaccacccctcccgctaggggctctgtcccagccagatcagacttgtctgtaaacccctggctagagttgctgaaattcccacagggaggccccacccagtgaggagggatgaatctgggacccacctaaagaagcaatctggccataatctgccacagccactgttctgtactgtggggaatttcccccagtccaaaccacccagtctccctggcaccagctggggaaaacagctggctggagcttcagtgatggtggctgccccraatttgataatttttaatgctatgtggtagtatttgatgcaaataggcttaaaatagttttttatgacaatattgatggagatgttt

SEQ ID NO: 360674 - DNA, 631 bp, Homo sapiens
gtgcattttttaccagatgctactaaatatccttgaaatcaatttcacttctaccagaagttttttttttttttttttaatgtccatttggggaaacttaactcaccaaagaaatcatcaggtctagaagctcttctactcttaaaagatagaggtaaagaaactgtgtttctctctcagacccttctcttcagtaatatacataccaaagtgttaggagaatcattgtttattctcttaatcacagtcactatcttctactttctcaagccagaattctggkgaatttttctctctgatataaggcttacaattataattattatttattacattactactatattaacacttttctaagcactttacataaatttaattttcaaaccttttatattaagtcgtttctatggcttctaagttagggctgagaaagctcaggctcagaaaatattaataaatgtccaacatcacacaacaagcaggaattagaatgtgagcccagcttctctgaccattactctctgaactctcagaacatgtggtgggcaggataattcccttgcaaagaagtccatgccttaatccccagaacgtataaatatgtttacatggcaaatggagaattaaa

SEQ ID NO: 360675 - DNA, 631 bp, Homo sapiens
gtgcattttttaccagatgctactaaatatccttgaaatcaatttcacttctaccagaagttttttttttttttttttaatgtccatttggggaaacttaactcaccaaagaaatcatcaggtctagaagctcttctactcttaaaagatagaggtaaagaaactgtgtttctctctcagacccttctcttcagtaatatacataccaaagtgttaggagaatcattgtttattctcttaatcacagtcactatcttctactttctcaagccagaattctggtgaatttttctctctgatataaggcttacaattataattattatttattacattactactatattaacacttttctaagcactttacataaatttaattttcaaascttttatattaagtcgtttctatggcttctaagttagggctgagaaagctcaggctcagaaaatattaataaatgtccaacatcacacaacaagcaggaattagaatgtgagcccagcttctctgaccattactctctgaactctcagaacatgtggtgggcaggataattcccttgcaaagaagtccatgccttaatccccagaacgtataaatatgtttacatggcaaatggagaattaaa

SEQ ID NO: 360676 - DNA, 486 bp, Homo sapiens
gatgaaccaggataatctccccttctctaagccagtcaacttaatgacatcgaatataaatttgtaatgtattcacaggtaccagggattagcgagtgggcatttttggtgaggggaatattattatgtctatggcaccatcataaatttaggtcagatttaagatatagtataggtatagtataaatatatattttatttgccatgggtgaactttgaatacattggaatctctagtaaaattaatgtatattttawatcattccccatttttatgtcttaaaaatttcttaagttttttagtataatagttatacaggtctcaggtctatgatagctttcttttttttttttttttttttgctttgtaacatattatggttatttctattacaggaggtatacactgagttccaatcctggttagggttatagccagtattacaatgtgcttctattagattacagtgttcttaataagaaatg

SEQ ID NO: 360677 - DNA, 604 bp, Homo sapiens
caagaggaataaaaatgactccctgggaatcctgggtgccattagacaaaggatatctaaatggcctagggtgagaatataacacatttccttatatgtcagaacagaatcagaatttgatattaacttccaaatggcactaattcagaaacccattttttaatcaacttggctatttccatatgtctatttttaaatttcttgcctgtcaccataatttgaagttactttgacaagagtgctattttaggattctacatctagtccctccctgtgcttttgtgttttctgtctttttaatatcaattataatcsccactagaaataagaataggtatgccagctcatgtctttgcaattagaattcaggaaatgctgacgatatcttataaatgtataattcatatcattctttaattaattgtgacctcattattacaacagtagcttacatgactttagatcaaaaatcagtattttggagagatcatgtattttgctaccgtggcatagacgctttacctattgaaggaatattaatcaatagtgtcagaagtattaatgggagataaaagatgacatgacactggctaaaatgaggcag

SEQ ID NO: 360678 - DNA, 604 bp, Homo sapiens
caagaggaataaaaatgactccctgggaatcctgggtgccattagacaaaggatatctaaatggcctagggtgagaatataacacatttccttatatgtcagaacagaatcagaatttgatattaacttccaaatggcactaattcagaaacccattttttaatcaacttggctatttccatatgtctatttttaaatttcttgcctgtcaccataatttgaagttactttgacaagagtgctattttaggattctacatctagtccctccctgtgcttttgtgttttctgtctttttaatatcaattataatcgccactagaaataagaataggtatgccagctcatgtctttgcaattagaattcaggaaatgctgacgrtatcttataaatgtataattcatatcattctttaattaattgtgacctcattattacaacagtagcttacatgactttagatcaaaaatcagtattttggagagatcatgtattttgctaccgtggcatagacgctttacctattgaaggaatattaatcaatagtgtcagaagtattaatgggagataaaagatgacatgacactggctaaaatgaggcag

SEQ ID NO: 360679 - DNA, 604 bp, Homo sapiens
caagaggaataaaaatgactccctgggaatcctgggtgccattagacaaaggatatctaaatggcctagggtgagaatataacacatttccttatatgtcagaacagaatcagaatttgatattaacttccaaatggcactaattcagaaacccattttttaatcaacttggctatttccatatgtctatttttaaatttcttgcctgtcaccataatttgaagttactttgacaagagtgctattttaggattctacatctagtccctccctgtgcttttgtgttttctgtctttttaatatcaattataatcgccactagaaataagaataggtatgccagctcatgtctttgcaattagaattcaggaaatgctgacgatatcttataaatgtataattcatatcattytttaattaattgtgacctcattattacaacagtagcttacatgactttagatcaaaaatcagtattttggagagatcatgtattttgctaccgtggcatagacgctttacctattgaaggaatattaatcaatagtgtcagaagtattaatgggagataaaagatgacatgacactggctaaaatgaggcag

SEQ ID NO: 360680 - DNA, 570 bp, Homo sapiens
tgtataaacaccccttctccccttcccttacacctcgtatgcagtattgatcagtgcagatacccgaggaaactacctgactctagagcagaaccaccagaaaagtttagcgatttaggaacagattatgcaaagagcctggaataatgcctgttcctactaatcagcctggagaaatttcataattcatagctattgggtagaatactgaaaaaaagaaagtcttgtctctatagtgagaaagagttattcctaggccaaatactgctttgatcctagctaacaaaccttaaaagcaagaattgaaaaatcaaactctttttgtataacttaactgcatctcagaacaaagttcgagaaacaggaaaataagacacataatgaggagaaaaattaatcatttgaaactacatgagaactgtcacagattttacaattagaaaagtaccttaaaaaacwgttattaaaactgcattctatgagtttaaaaagttaagtagaggcatatactacctttcagagatgaaaacacaacgtgtgagatgaaaacatactagatggaaataatgg

SEQ ID NO: 360681 - DNA, 567 bp, Homo sapiens
actatggtaaatcttcaagattaatgccataatcactgcttgcagagtttcatagttgttggtcaagatgtcaagttcaagatgtcaaatccaaaggtaacttcaaatagaatatatgaatcttgtgtcttgctaacattcaagaggagaaagaacccaaccatagtttgctaaactacaggacaagtacaattttccagaagagattaacgtgtcatttggggcttgaaggacaaggataacaggaggataagaaggcctaggataagaggtttctatgtaaatgtcattttttaaatgctgttttaatgtttatattatgggatgtaagaactatcaatcctataaattgtacttattatttagttattacaaaatgttataatgtagtgtttttccaggccttagagagataatttgcttcttgatttctgtaatttacctatggaagccaaagttctcctaaasttctttccaagaaaaaaaaattgcagctctttctttcatgtactcatttccagctaacttactgaatgttcactttgttccaccaggataaagagaaaa

SEQ ID NO: 360682 - DNA, 359 bp, Homo sapiens
tttcagttatataacttgcttcaataaatatccttgtgcaaatacatacctgtgtacaaatctggcagtttmttgggatttgttgttgatgtgtgtgtgtgtgtgtaagtgtgtgtgtgtgtgtgtgtgtgtgttttagcaaagtttacttttaatagataatagcatcttgtttttacggaaggttgttctaatatacacgtccatcagcaatgtataagtgaacctttcatttaaaagcaacaactatgtcaatctttaaaatacttgctgatataatacattaaatacggttttttttttactgtttttattttaatttccctcaccaccagtaatgctgaagagttgtctaatat

SEQ ID NO: 360683 - DNA, 359 bp, Homo sapiens
tttcagttatataacttgcttcaataaatatccttgtgcaaatacatacctgtgtacaaatctggcagtttcttgggatttgttgttgatgtgtgtgtgtgtgtgtaagtgtgtgtgtgtgtgtgtgtgtgtgttttascaaagtttacttttaatagataatagcatcttgtttttacggaaggttgttctaatatacacgtccatcagcaatgtataagtgaacctttcatttaaaagcaacaactatgtcaatctttaaaatacttgctgatataatacattaaatacggttttttttttactgtttttattttaatttccctcaccaccagtaatgctgaagagttgtctaatat

SEQ ID NO: 360684 - DNA, 576 bp, Homo sapiens
tgcagtaagccatgatcgtgccattgcactccagcttgggtgacagaatgagacacggtcttgggaaattttttttaaattaaaatttaaaatgatacatatttctgaaccccttgagtcctataaagaaaaattgaatatcaaatttaataggccagctacattataatcttatgggaccactattatatatgcaatctgctattaatcaaaatgtcattatgcagtgagtgactatatatacatttatgtaaataatacattataaaagaaatgaacaataaacatttattaacatattttaatgagcttttgatgttcctaataaagttagactgctatggttttaatgtaygtttttccccaaatttatatgttggaatttaaacttcaaaataatgataagaagaggtgaggcccttagaaggtgtttagctcatgggtgctccacacgcaaaatggaattagagcctttatagaaagacttgaggaaaatagctagaccctttcttgcccttcttcccttctgacttcctctagtgaggacacagaatttgtcccactcagaggatgcag

SEQ ID NO: 360685 - DNA, 576 bp, Homo sapiens
tattgctaggagacagggaaaaagaaatatttttttaaaagattcaggaaaaaatatttatcaagtttggtggaaaatatatagatttattaattcatttataaacagcataatatccaatgttatgttcttattaattacgagttttggtgagtcattttgaagaatttaagaatgttttatagaagctagctaattttattttgttcctttttaaataaattttaaaatgaaataataagtcacaggagtttttctcacatgtaaatctctaagtcagactattgatgagaacatttaaaacagtcagtgctgaatcatcaacaaagtcatatttagttgaaatgcacattgatcacctgagagatgagaattccctcaaccattacacaattgctgaatatgtcttcagtactaggcattatgatagtaaagaatgaaaagatgaattaaaacatcattaaaattgcagtatatattttagyagagaataaaaaagaaaatcgattactatataaattgttaagttagcctaaaaagagagtatgttgggattaggcaatcttagtttatttg

SEQ ID NO: 360686 - DNA, 457 bp, Homo sapiens
gttttctttattctctaccaagagaccatctcattttattgcaatttcaaagaaaaccttgtaaatgcagctggggaaataaatgtacaaaacaaaacatgtaaccagacattcttttcttattgactaaacatgtaataggttctttgtttcacaaagamaatcactggttttgattttcaaaatttccctataaaggaaaacacaatcaaacaattctttggtttcacatttgtataattggaaatcaccaacataacacatgcaattaacaactttcttcttacactttttttacttgcttattgaacctgagtatgaatttgtgttgtttaaaaattagactttaaagctcaaaaacaattttaaatataatcacatttgtaagtaatttaattccaaaaccatgaaaatgtttttacacattataggaaatggtttatgaaacttaaaaaca

SEQ ID NO: 360687 - DNA, 531 bp, Homo sapiens
caaaactcaccttgtgtgttttaaggaacttagataatatttaatctatctcctgtttactagcagccaaaagtttctgggcattattatgacacccatctcagtccagtagttgattaataaaataataaaaatggaagcattatgattttatctattttttatatattccttagtagtgttgctctccaaggcagaaatgatccctttaaagtsaagaaagggaactttctatatatatagatatatatacacataaatatatatacacacacacatatatactttatgtagtaattttgagacaaactaccctatatagagatgaactgccatataccatatatttatatatacacacacatatatatattttatatatgtataaacacacaaatacacatgtatgtatacccacccatatatacacataaatatatatgcatatatacatgtgtgtacatatatgcacatatatgcatattgacacatacatatttgtaatactattttctctccaatatagtttta

SEQ ID NO: 360688 - DNA, 554 bp, Homo sapiens
attgtataatattaaagttaataaatggagaaattttgagaataataactgatagcaaatatgtggtggacaagaaccctcatatgctgttatctgcaaagtaaattagtacaaacactttgataagcamtttatcaatattcactaatgtagataatttttatatccttagagccagcaattcctctcccagacataaaaataaagtgtaacatttttgtctaaagtttttgtggcagcatgattttcataacaaaagaaagaataatagggatatacaataaataaatacatacagtgtattctctcagtagaatacatgtgatatacatgtgatccattcttacatgagaattctatatatcctgttatatgtattacctgtagttatttgttttaatgtggattatctcaaaaatatatttcataaaaatttctaaagctgctgaaattagaagtacatatgactctattatcatttaaaaatatttcaaaatataaaaacaatactatgcatattgataattacataaatttgtgtcatttttgtaaat

SEQ ID NO: 360689 - DNA, 554 bp, Homo sapiens
attgtataatattaaagttaataaatggagaaattttgagaataataactgatagcaaatatgtggtggacaagaaccctcatatgctgttatctgcaaagtaaattagtacaaacactttgataagcactttatcaatattcactaatgtagataatttttatatccttagagccagcaattcctctyccagacataaaaataaagtgtaacatttttgtctaaagtttttgtggcagcatgattttcataacaaaagaaagaataatagggatatacaataaataaatacatacagtgtattctctcagtagaatacatgtgatatacatgtgatccattcttacatgagaattctatatatcctgttatatgtattacctgtagttatttgttttaatgtggattatctcaaaaatatatttcataaaaatttctaaagctgctgaaattagaagtacatatgactctattatcatttaaaaatatttcaaaatataaaaacaatactatgcatattgataattacataaatttgtgtcatttttgtaaat

SEQ ID NO: 360690 - DNA, 532 bp, Homo sapiens
ataatattaattatttatttaattttaagcatataaagcatacatataattaaaggattakttaagtcttagtgtttttaaaggggttggtgataatgaattatccattatttaatatttcattgaaagatctaataaaagtgatttacaaacttcaattagtttccaccatgacaagcatcatgcagtttctcaagacaacaaagtaacactagataggcaaaaagcaagaaaccatgatgggaaaagtataaagattcattttaaccaatagggagtatattatttgcttgggctgccataacagaatacaacagagagggtggcttatgcaataggaatttatttcttcacaattctgaaggctaaaagttcaagatcaaggtgccagctggggtgctgtattttgaggcctctctgcttgggttgcagatgaccaccttcttgctatgtcctcacatggcctttcctttgtacttctgtggggatagagagattcatgtagtctttccctctacttataagacaccag

SEQ ID NO: 360691 - DNA, 532 bp, Homo sapiens
ataatattaattatttatttaattttaagcatataaagcatacatataattaaaggattagttaagtcttagtgtttttaaaggggttggtgataatgaattatccattatttaatatttcattgaaagatctaataaaartgatttacaaacttcaattagtttccaccatgacaagcatcatgcagtttctcaagacaacaaagtaacactagataggcaaaaagcaagaaaccatgatgggaaaagtataaagattcattttaaccaatagggagtatattatttgcttgggctgccataacagaatacaacagagagggtggcttatgcaataggaatttatttcttcacaattctgaaggctaaaagttcaagatcaaggtgccagctggggtgctgtattttgaggcctctctgcttgggttgcagatgaccaccttcttgctatgtcctcacatggcctttcctttgtacttctgtggggatagagagattcatgtagtctttccctctacttataagacaccag

SEQ ID NO: 360692 - DNA, 601 bp, Homo sapiens
tattttataaacaaaaaaggcttgtgtggcttatattctcctggctgaaagattgttatctgtagtgtccagccattcatgcctcagctgttatgaattcctcccagttgtggctccagtttcttcctgatctttttcagagcctgtttctctggtcatcacagtgataatgtgaaacaccaaatatctattttacaaatcacagcttcawtgagatataaatcatatactatgcaattcatagttatgcaacaattatcacatcaaggttataatatttttatcactccagatagcaacactacacccattagcagtcactccctattttccccaacccttccacccacagccctaggcaagcactaatctactgtctgttactatacatttgccttttctggctatttcgcatacatagaagcgtatcatatgtgatattttgtgattggcatctatcacttagaatatagtattttcaaagtttattcatgttgtaacatatatcaacacttcatcctttttaattgcaaaataatattccattgtacatttatacatttttcctatttattagcaatgaacatttgggttatttcca

SEQ ID NO: 360693 - DNA, 529 bp, Homo sapiens
cctgtttctctggtcatcacagtgataatgtgaaacaccaaatatctattttacaaatcacagcttcattgagatataaatcatatactatgcaattcatagttatgcaacaattatcacatcaaggttataatatttttatcactccagatagcaacactacacccattagcagtcactccctattttccccaacccttccacccacagccctaggcaagcactaatctactgtctgttactatacatttgccttttctggctatttcgcatacatagaagcrtatcatatgtgatattttgtgattggcatctatcacttagaatatagtattttcaaagtttattcatgttgtaacatatatcaacacttcatcctttttaattgcaaaataatattccattgtacatttatacatttttcctatttattagcaatgaacatttgggttatttccactttcgagaggtaatcttggagaccagtctttgaagtttgttctgactccaggagggctgttctcagctg

SEQ ID NO: 360694 - DNA, 582 bp, Homo sapiens
accttgtgttactattcatgccatgtgctctcacagattcaggagatcagcatttatattagcactctgggccacatgaatctattttcccagctaaaaaatcttcctgtaggtatgtgccaaatgagggagagtgtctgtaaacaagtttgtgtgacaactatcactgttaatgctatttttaaaagtcattttcagacaatattgtcatttgcaacaggattcaaaaaaaaagaacaaattggactagaatatgagtatctcctaccttttcacctgacctatgtgatttccagattttatagttatccccttctgtttaagacacttgactcacacctaaagagacagctcagacactagcgcctgccttaagtaggtggttcagagaaatgcttaaaccagcygtcagaacacaatatcaagtacctattgttctaattctgactttgcttctttatctgattgtactgatttttaacttacccacctgagagaattctctaaataacagcatgcatagtatcttttcatttccaggaccttggtcctaccttccttatgccatttcctcctctctct

SEQ ID NO: 360695 - DNA, 605 bp, Homo sapiens
ggtattaaaaaggtttgctgttggccaaccactaaggggcagtgatacataacaatcggcaccttgtggctctgagcagcaagtcatggcagctataagtccattgcagaaaaaagaattgaatcctcttggttttatttctcagtagagaactggagcagaaacaaagcaaaacactttgtctccccccaggatctagttataccttttactaagacaaacacatcacattcaattctccgatctcattgctgatgagagagaaatacattcagagaaccaactggagcatccaaatatccctcacacaaaaataagcagtggctttgtttacagatctctttcctttctttaccaccgtcctatgctcatagaggcaagcaagttaacttgtatgaaaacatgttctctttttgttactgaagtttaaggtttcaaatgggctataatgtctgaatgcttggaccctagcaattagggtactggtagttaatgtccttccagytctgtcagctccagctcctttacataatatcctcaaatattgcttttatgctggacaaggttggatgcatagaaattgctattataaaggttagagggaa

SEQ ID NO: 360696 - DNA, 548 bp, Homo sapiens
agtctggaccacaaactatatttttcaataccmagtctgcactaccaggcacccacagtaatgctaattgcaagggtcctgtcatctttctaaagtgttgcatgaagttttatcaccattatcattacaggataaataaaaaagattattacatgaaactagttaacacttgtccatatgtcagaatggcaggtgtgttcataagtggcccacttacctaaacaacttacttaatctgtttacattcttcaagaatttcagaccattgtatgcagcaggaatatgtagtagtctcactgcaatgcaagagttaaatcctgtctctgctcttaagcagccaggagggtcataagcattgaaacaaatggagcatcatttattaccactgtctcctctgctgtgtttttgagaggaagtattggcacttactttgcaaccgatttgatcttctgttctctgaggaaatgctgtcactggtattatttactctctgagcaacaaatcctcataaattataatggttctccagacagccatttacaaattta

SEQ ID NO: 360697 - DNA, 548 bp, Homo sapiens
agtctggaccacaaactatatttttcaatacccagtctgcactaccaggcacccacagtaatgctaattgcaagggtcctgycatctttctaaagtgttgcatgaagttttatcaccattatcattacaggataaataaaaaagattattacatgaaactagttaacacttgtccatatgtcagaatggcaggtgtgttcataagtggcccacttacctaaacaacttacttaatctgtttacattcttcaagaatttcagaccattgtatgcagcaggaatatgtagtagtctcactgcaatgcaagagttaaatcctgtctctgctcttaagcagccaggagggtcataagcattgaaacaaatggagcatcatttattaccactgtctcctctgctgtgtttttgagaggaagtattggcacttactttgcaaccgatttgatcttctgttctctgaggaaatgctgtcactggtattatttactctctgagcaacaaatcctcataaattataatggttctccagacagccatttacaaattta

SEQ ID NO: 360698 - DNA, 548 bp, Homo sapiens
agtctggaccacaaactatatttttcaatacccagtctgcactaccaggcacccacagtaatgctaattgcaagggtcctgtcatctttctaaagtgttgcatgaagttttatcaccattatcattacaggataaataaaaaagattattacatgaaactagttaacacttgtccatatgtcagaatggcaggtgtgttcataagtggcccacttacctaaacaacttacttwatctgtttacattcttcaagaatttcagaccattgtatgcagcaggaatatgtagtagtctcactgcaatgcaagagttaaatcctgtctctgctcttaagcagccaggagggtcataagcattgaaacaaatggagcatcatttattaccactgtctcctctgctgtgtttttgagaggaagtattggcacttactttgcaaccgatttgatcttctgttctctgaggaaatgctgtcactggtattatttactctctgagcaacaaatcctcataaattataatggttctccagacagccatttacaaattta

SEQ ID NO: 360699 - DNA, 509 bp, Homo sapiens
ttttgtagatgttcttcatcaggttgaggaagttctcttctattcctagtttgttgactgtttttatcatgaaaagagtgttggatttttccatcaattcttaaaacgtgacccttttcccctatggatgagggatgtaaaaaagagctatctctgcatggatgatatagtacaaagcactctcacgtggatgcttcagaaaaagccacccctctttgggtggacatagtctgggatatgtttgacttggtgaccaaggactcctctctcatttgggtgtccttatttaggaccgaatctgtacatggtggccttaatttacaaccactttttttcagtatatggtttcctagtacccagggtgcctctgatttaatttttttccacagagayttcataccagtggccttttgcaaggtgtggatgaggaacagatataaacatcttaacactgattttaagcaatctacctgtcttacccttgcattctgtggcccctgatatctcca

SEQ ID NO: 360700 - DNA, 578 bp, Homo sapiens
agatccattagtgtttgcaactgtaggaagcaacagagtgagtgttaaggggtctatttagtatttggcttgatttccagatctggtgttaatgtaatattgaaatagaataatttcaaagtgcattttgtgaagctggtttagcaatatgattctttcatgtaagagtgaaggtttctagaaattaattaaaactagtatgcatggctgaaaatacatctatatttaatatattacccctaattatttatgaaacaggttttatacttgtatttgtcttcataaatacttggttgaaagaattggcgttcctttttttttttttttaattggcgttctttttaaagtgattttggtatttatcattcaaatagygtaagaactggctgtgatttttttaaaattaaggtaatgaatggctctataaatgaagcataaatccagtggatttaaataagttattgagatgttttaattacttgcagtaaacatttgagtttgctgggtttttttgttttgagacaggtagtgtttggtggtgattgttgttgttgttgttgttgtttgtttttgagaga

SEQ ID NO: 360701 - DNA, 578 bp, Homo sapiens
agatccattagtgtttgcaactgtaggaagcaacagagtgagtgttaaggggtctatttagtatttggcttgatttccagatctggtgttaatgtaatattgaaatagaataatttcaaagtgcattttgtgaagctggtttagcaatatgattctttcatgtaagagtgaaggtttctagaaattaattaaaactagtatgcatggctgaaaatacatctatatttaatatattacccctaattatttatgaaacaggttttatacttgtatttgtcttcataaatacttggttgaaagaattggcgttcctttttttttttttttaattggcgttctttttaaagtgattttggtatttatcattcaaatagcgtaagaactggcygtgatttttttaaaattaaggtaatgaatggctctataaatgaagcataaatccagtggatttaaataagttattgagatgttttaattacttgcagtaaacatttgagtttgctgggtttttttgttttgagacaggtagtgtttggtggtgattgttgttgttgttgttgttgtttgtttttgagaga

SEQ ID NO: 360702 - DNA, 621 bp, Homo sapiens
tgggcccagctcagttgcggcctctgcagggctttgattaacatattggctggggctggtctcatctgaacrcctgagtggggaaacatcgtttcttgcttgctcaggcttttgcaagacttcaggtctgtagggctgttggactgaaagctacagttttggagtgcttcatttcattttgtttcatttgttagccatcagctggaggctgccttccacaactagaggtcaactacagttccccaccatacagggctcagcagtgtgcccagcttcttcacagccagcatggtgggtggattccagccgactgagggccacagccttaggcagcgccaccccataaccacgtgtatggaaccagacacgtctgtcacctttgccagaccctatggatcagaagcagtcacaggccctggctgctctcagggaaggggttcccacagggtgtgcacaccagggtgtggggtcctgggtccgcctacgggtctgtctaccatggtggtgtccatgggtatgctgaacagtggacgcttctgctgtgtaagtttaatttcctcccagaagcagcacattatcatcccccatttaatacacgagggttaaagttttgtcctatat

SEQ ID NO: 360703 - DNA, 495 bp, Homo sapiens
gaacaggtactaattaaccacagtccccggggctggcaggtactaattaaccacaatccctggggctggcaggtaggtaccaattaaccacaatccccggggctgggacccaggcggcagagacagcagaggtctcaggtggcttctgtgtgggaacaggtttggaacagcggttaatctggaacagaggttctcagagggagatcccaggatgagccgcctcacttgggaacttggaaacacagattckagggccccaggccagacccactgaatcagaagctctggggtcagggcctggcagtctgtgttttaacaagcactctgtgtaattgtcacagtgccagagtttgagaagaattgatctagaaagttctaagaagcagagcaaaacatatgccttttcattctatgtttagctataaatctttgtcacatgtgtgctatgaaacacggcaaggtgttagcaaagaaaaatatgaacccccaagagat

SEQ ID NO: 360704 - DNA, 495 bp, Homo sapiens
gaacaggtactaattaaccacagtccccggggctggcaggtactaattaaccacaatccctggggctggcaggtaggtaccaattaaccacaatccccggggctgggacccaggcggcagagacagcagaggtctcaggtggcttctgtgtgggaacaggtttggaacagcggttaatctggaacagaggttctcagagggagatcccaggatgagccgcctcacttgggaacttggaaacacagattctagggccccaggccagacccactgaatcagaagctctggggtcagggcctggcagtctgtgttttaacaagcactctgtgtaattgtcacagtgccagagtttgagaagaattgatctagaaagttctaagaagcagagcaaaacatatgccttttcattctatgttkagctataaatctttgtcacatgtgtgctatgaaacacggcaaggtgttagcaaagaaaaatatgaacccccaagagat

SEQ ID NO: 360705 - DNA, 580 bp, Homo sapiens
gtaacagcagaataaatatgacagatgaaataatgagtttgcttgaagatagaacaaaagaaattattcaatttaaacaacagaaagaaaatagattttaaaaaacaacaaacagagctccagggacctgtggtataatattttagaaatctaatatttacattgtcagaatgtcagaaaatgaagaaaaagcgtgttggtctgaaaaaatgtataagaaartagtggctgaaaatttcccaaatatggtgaaaggcataaccctaagagattcaagaagctgactaaaactcagagtaaacccagataaatctgcactaagacacattgtaagcaaacttctgaaaagtaaagacaagtaaaaaatcttgaaagaagctaaagagaaataacattttacctgttggagaacatcaattcaattgcctgtggattttttatctgaaaccagagaggacagaaaagagtagcacaatatttttcaagtgattgagagaaaagaagtgtcaaccacaaattttatatccagtaaaaatatccttccaaattgaaggggaaatagattctcaggtgaagaaaa

SEQ ID NO: 360706 - DNA, 243 bp, Homo sapiens
aaccatgttctttccatctttccacctcttcactcttggctccatcctcaggttggtcacaatggctgcagcagttccaggacagggagcaagaaggaaacctccttctcttatatcaccttcattcaataagagaatcatgtcccatgtctcrttggccagaagtaggtcacatggccattgctaaaccattgattgggggagtggacctacatggttggcttggactaatgaggatttgtt

SEQ ID NO: 360707 - DNA, 547 bp, Homo sapiens
cctgctggtctgggacctcactttcagaatcaatagattagagtaacaagatcaagaattagtaacaagactttgcgattgaggttaattagagaccagtgattctcatcattaactgtgcattcatatcacccagggaatctacaaaataaactgaactgactcttcaccaacccaccctgagattcaactttagttggtttgttgtggggtcacatatttttaaaaatcttcccaagtaattcaaatatgcaactagagttgaaagccactgctatagaccattgcaaagtattagatttctatttcccttaccccttgctccttctgtttttggtataaattagttataattgttcatggctatgacttcagctcctaagacagagcttggtcgtgggcatttagtaattactggctgaatgactcaatttccrtgatgaacgatacaggagtcctaatatggatttaacaggaattacagaatctaatagggactactaaacataaagtttgaagaaggaataaataaataaatagttgagta

SEQ ID NO: 360708 - DNA, 577 bp, Homo sapiens
taggaacacaggtggggtattcctactaatgggaytgggttttacagggattacccaatttgtaggccacataatttcttggtaatttcaaagcaggttggaattctgaggcctttgctgcctgcttccagctgctccaggaaccaaatcaccaaccaacagctggaacaaacactcataaaaagtcccccagcttctcccctcctggaaaatgttcacagcaggctttctccacccacacagaaaagcacagatttggtcatttcctatcatactgctcagtggcagaggcttgaagttcccaggacttgctaaatcaccctggctgttggcttttcgagtttctgggacccaactaaagtaaaacaaacagaagagccactaagcaacttggtgttctctttttgcttttgtacactcccagacactttaggatgagagaactggtcaaggtatttaagtcaatggacttgccattgagtcaaaacaagtcacacttagaagggcttaagggatggcaccaacaaagaagagtgcattctgatcactcattcattcacttatttactagacgttt

SEQ ID NO: 360709 - DNA, 331 bp, Homo sapiens
agagccctaaattaactaaatttctaaattaaagttcttttaaaatatttactatcacttctaaagtttttactgtgtatgctgggcactgttctaagtgctttgcatgtattagtttatctattccttacgacaattaaaaggtcaattgtgacattggtattaggaggttgggccttagggaagtgatgagatcatgagggtagaaactcataaatgaaattagtgcttttakagaagaggcctcagagagttctcttgcctcttctaccatgtgaggacacagggagaaggtgccatttatgaaccaggaagccatccctcaacagat

SEQ ID NO: 360710 - DNA, 589 bp, Homo sapiens
acaggaatagtgaggagggagggaggaggtgtcaacagcatctttagaagcttctacttccatctggaggtcatgcttgagttggtgcccatgctctttatcatctttgtccttgtcatattgtccaaatagctcttgggtatgttttatctatttttctgagtctttttattctgtcttactttccctttcttctggagtaatatctcttctaaacaacgaatataggccaataactcttttttctcagcctttttttttcattaaagagaaattctgcctgtcctaggattcctgcatctattccaattgtttctaagatgaattgatatagtttgaatatttgtccctgccttactttcatattgaattgtaatccccagtgctggatgtggggtatggtgggaggtatatgggtcatgagggcagatmcctcatggcttgctgctgtctttgtgatagtgaatttctgcaagatctgatcatttaaaaatgtgtggcacctcctgcccactctctctctcttgcttgcacctgcttttgccatgtgatatgcctgttcctcctttgccatccaacataattgtca

SEQ ID NO: 360711 - DNA, 376 bp, Homo sapiens
ttagtgcatcaaagagctttctttggcacattaagcaaatatatgggctagaagtagcagatatgtgagcctaccaagtcatctaaactaagattgctttaaggttccctttctttctaaaattttattttattttattttaaattccgggatacatgtgcaggacatgcagttttgttacataggtagacgtgtgccatggtggtttgctgcacctatcaatccacacctaggtattaagcccggcaggcattagctatttatcctgatgtgctccctccccrcacaccccccacaggccccagtgtggtttgttgccctccctgtgtccatgggttctcatcattcagctgccactcataagtgagaacatgcg

SEQ ID NO: 360712 - DNA, 633 bp, Homo sapiens
ttaaataacatactagaatttataatacattcaggggcaagtgcagaatttattgaaaacctgtaagctgaggggtgacatcatcagagctatacttcagaaaaaaatagttattcaggaagttataatgtgaaaagactggcacctagggaaaccagtttgagaatctaagtgataaatgacaaggaagtagacctgggatgaaaaggaagagcgtgtttcacttagcacccacaaaacatggcatccgaatcccagccacagaggaaatggacacattataaccaccgyggtgttttcaagactggttgataggatttgggatgggaataaaagcctctaagaagaaataaggatcccctggggaagaagaggctggagtaatggggaagaaaatgttctcaattacagatatagtaaactgcaacttgtgcttggattgattgattgattggttagtaaactgaaaatagtaccctgccttcttaggccaaagagttactttgagaatcaaatgggattatccatgaaatttctttttgcaaaggatgatacaaacactattaagatgtcaaagattagaattgcttaaagcagaatccttattgtttggaaaggcacagaaatactaaa

SEQ ID NO: 360713 - DNA, 579 bp, Homo sapiens
tgacagtcattatcatcaatattagtagtagtatcatttatcattttcatcaacatcatcactagtcaatttacatttataattctaatccttcaaatattatggtcttaaactttacctgtctcctagcttgaatcatgaatttattttagtcaaccatttgtcttaaagtgggggtaatatatcttctctgtatatattaaaagttgtttgagaactaaaaatagataagttacttcagtttgcctgatacattcttggatattagatattattaaatattattactattattattaccaaacattttaaagacctctgtctcyccaggccactccattcttaatagaaaccattacaatttcatactcctaaaccttcacttcatggagatccaaacactcttactcatcaacataaattattatttaaaaaagaaaaagaaaaaattggtttttgtggacaactagcagtctctgcctcatcacagacttaggaaagggtagagcagcaagaaagggtcatgggtccctgaggtcactttctttgcatgtcaccgctgtgcaagccaaaaggaga

SEQ ID NO: 360714 - DNA, 603 bp, Homo sapiens
tccatcatatatatgtaccacattttctttatcaaatccaccactgatgggcacctaggctgattacatgtctttgctattgcaaatagtgctgcaataaacatatgaatgtatgtgtctttatggtagaacaacttatattcatttgagtatataaccagtaatgggattgctggattgaattgtagttttaagttctttgagaaatctcctaactacttttcatagtggctgaactaatttacatttctactagcagtctgtaagtctttttccacaacgttgccaacatgtgttgttttctgactttttaataatagcatttttaaaaaatataatattcaggtattcttggaaaaatttatatctgcaaaccatgatgttggaaatgcattacaaaaacacagcacagaagctacacttagtaaaaatgtaatatagtcaaaattgacaagacaggaagckagtgacagcagttgaagttggtcggggagaaatcatggtgaatgagagtgttagaaatagacgaacagtagacagatttcagagcctttttaaaggtagaaagtcacggatttgatttgatgatggaacagcatggag

SEQ ID NO: 360715 - DNA, 534 bp, Homo sapiens
gaaaagcagcctggcctaattgttatgggtggtgatggacagtggtctagacccgggcagatctccccagcaccctgaagtgagctggcagctggagctgccttggatggaatcaccctttgtattcctatgaatgctataatctcaggccctgctgaaaggcctgtcccgctaggagtacaatcattttaatcmttttaaacattctgtttctacctacaggatgtgaaagagccattctggtgtctagccagttgtgattattttttatgcattgtggtctcataagatttactttaactttggtcactgttgataataccgaatatttctttgaataatatattatttataaccaattatttcaacagcaacacaggcctagcttctatctgacttgtttgactttgtttcttagtggaggttggaaagaaatgtgctttctttgttgttagtggcatctttgctcagaatatgctgacattatctttcagatttctaaatagtctgctatattgttggttcactccactg

SEQ ID NO: 360716 - DNA, 537 bp, Homo sapiens
agaccactttaattatttcctaataccacatatacccatctttgcccattgtcctgccttctctcttcttgctatggttacatggcccagaatcccagacacagtcagttcttctcctggtgcatgcaataccaggccacagctgagtcaaggtcatcactttagctactattctcactctctcctgcatgatccatttacccaggttcactggatgtttcctatcagcaaacatttttcactcaatttacaagaaaaaaacataaccttacttgacttctattatctgktactttttagagatactttctttctctttagagttgctttcttactctttaaatttaaacttatcaaaagcattgcatataggtgctaccagtgatgctactcctcccataatccctgaacctatgccactttggcttctgccaacctattccatcaatttgatgcactgcacatttgtaaatctaatgttcaatcttcatttcccttaactccttctgcacctggcttacctgacactaaattctt

SEQ ID NO: 360717 - DNA, 537 bp, Homo sapiens
agaccactttaattatttcctaataccacatatacccatctttgcccattgtcctgccttctctcttcttgctatggttacatggcccagaatcccagacacagtcagttcttctcctggtgcatgcaataccaggccacagctgagtcaaggtcatcactttagctactattctcactctctcctgcatgatccatttacccaggttcactggatgtttcctatcagcaaacatttttcactcaatttacaagaaaaaaacataaccttacttgacttctattatctgttactttttagagatactttctttctctttagagttgctttcttactctttaaatttaaacttatcaaaagcattgcatataggkgctaccagtgatgctactcctcccataatccctgaacctatgccactttggcttctgccaacctattccatcaatttgatgcactgcacatttgtaaatctaatgttcaatcttcatttcccttaactccttctgcacctggcttacctgacactaaattctt

SEQ ID NO: 360718 - DNA, 608 bp, Homo sapiens
gacattataaataaatggagacataaatgtaactaaaaaggaaaacaacatttaattggtagaaaaaaaattccagtggaaacaaggaaatcatcaagaaagccagactggactcttytgtagggtttcatctcactgttcaacagcaaagggccactatgctatcactttctctgaaacgttttcagatttctttttatcaaaaccttcagcaatcgggaagaaacttttcatagctctgcttttgagatgatattttgaacttggaaaggagcagatgagggtcaaaaatatatgtcctgaagttgcaagaaaagagtatggtagaaatcatgaacctaacttccctgcctttgtttctatgaccagggtgactcaggatcaggggctgggttaggaatgtcaagcaacaaccctatcattgctcttttcctaattgttctctcttctaaacccaaaagaaacagtcagaaacccaggagtaaatgagggagccaaaatagcttataattgctactcctaaaacaatgcactttttgaaacaaaaatcccaggagttaattaaaagctgtgaaaacgtctttatgttgctggtatccttgtgtttc

SEQ ID NO: 360719 - DNA, 608 bp, Homo sapiens
gacattataaataaatggagacataaatgtaactaaaaaggaaaacaacatttaattggtagaaaaaaaattccagtggaaacaaggaaatcatcaagaaagccagactggactcttttgtagggtttcatctcactgttcaacagcaaagggccactatgctatcactttctctgaaacgttttcagatttctttttaycaaaaccttcagcaatcgggaagaaacttttcatagctctgcttttgagatgatattttgaacttggaaaggagcagatgagggtcaaaaatatatgtcctgaagttgcaagaaaagagtatggtagaaatcatgaacctaacttccctgcctttgtttctatgaccagggtgactcaggatcaggggctgggttaggaatgtcaagcaacaaccctatcattgctcttttcctaattgttctctcttctaaacccaaaagaaacagtcagaaacccaggagtaaatgagggagccaaaatagcttataattgctactcctaaaacaatgcactttttgaaacaaaaatcccaggagttaattaaaagctgtgaaaacgtctttatgttgctggtatccttgtgtttc

SEQ ID NO: 360720 - DNA, 608 bp, Homo sapiens
gacattataaataaatggagacataaatgtaactaaaaaggaaaacaacatttaattggtagaaaaaaaattccagtggaaacaaggaaatcatcaagaaagccagactggactcttttgtagggtttcatctcactgttcaacagcaaagggccactatgctatcactttctctgaaacgttttcagatttctttttatcaaaaccttcagcaatcgggaagaaacttttcatagctctgcttttgagatgatattttgaacttggaaaggagcagatgagggtcaaaaatatatgtcctgaagttgcaagaaaagagtatggtagaaatcatgamcctaacttccctgcctttgtttctatgaccagggtgactcaggatcaggggctgggttaggaatgtcaagcaacaaccctatcattgctcttttcctaattgttctctcttctaaacccaaaagaaacagtcagaaacccaggagtaaatgagggagccaaaatagcttataattgctactcctaaaacaatgcactttttgaaacaaaaatcccaggagttaattaaaagctgtgaaaacgtctttatgttgctggtatccttgtgtttc

SEQ ID NO: 360721 - DNA, 500 bp, Homo sapiens
tcatactaaggagtaaagactgaattatttttttttctattttatacaaggcaagatgtctatgttcacacttctatacaacattgtactagaggtcttaatcagtgtgatatgaaaagaaaaatccttagagttacaggttacaaaagaagttagctctttattgaccactgttacgtacatatgtgtagaatatcctaccaaacccataaacggctatagtcagctataaacagctataaatgcatatctagcagaatcgtgttataagatcaatatacaaaactcaaatgtatttccgtatactaaaaataatatggaattgaattgaagataatttatcataacttcaaaaattaatacatattagaatgtattgaccaaaatttaattagttgtatataawgaaaatttaaaacattggtatgagaaattaaaagaatttagtacatgcaaaatatattgtatttatgtatggaagattcaaaattgttatgatg

SEQ ID NO: 360722 - DNA, 630 bp, Homo sapiens
caccctgtgacatgcctgctccctcttcaccttctgcaatgagtggaagtttcctgaggtctcaccagaagtagatgatggttccatgtttcttgtactgtctgcagaaccgtaagccaaaacaaacttttatttataaatgacccagccttggatattcccttatagcaacacagaacagactaacacaggctcctattctcccacagcgactgggagacagaggcagtatctttcttgatgattacatttcaaagaggtggctcccagtcccagtcctggagccagaaattcagacaagaggttgggagatttacatctcaaagggatagagraagaatttacagtgacaagttttctaaagcaaatgctctaacaaaagggagaccagaagcctaaagtcaggaagaaacctgtctaaagtttagtcaagctgtggggacatgcaggcatcttggctgagataaaagactgtctgagagcacagagcaggaagtagtttatttacttagatgagtataaatcaggtctttaaagaaagaccaagaaaatgaacaatctgtcccccatagcaaatctctatttaatcattaaatcataatcaaagttttagtgagcagtttcttatga

SEQ ID NO: 360723 - DNA, 598 bp, Homo sapiens
atactcactataatagaatttacataaagagccttataccaacaaatccaatataccaactattactttcctattacttgatttatatttggttttctttatttagcatattataaagaagtcagtttttaagttgcagcaatgtgaagatgataatatacaataacacagtagtgttatatatttatagattaatgaacgatattaaaaattcagaccatttattctaagaaagagctaaaaattaatctcttaggcagttcaccagaatcacattacttctgttctccagtgaatgtaattatttgaacatattttttaaaaggccatacatcttccaagaacttggaactccatgagttggagaaaaaaaagtataagaaaacctgyttcatttgatttgtgctttatactgtacttagcataattagcttactggagaaaaggaattcaattgataaaaagtaataactgcaatggtgagtcttcttgagggccataggttctcagcttgtcagttaacaaaccctgtacaaccttggagcctcttgtgttgacggtatgtgaacttccttgggatattagttaatccacttag

SEQ ID NO: 360724 - DNA, 598 bp, Homo sapiens
atactcactataatagaatttacataaagagccttataccaacaaatccaatataccaactattactttcctattacttgatttatatttggttttctttatttagcatattataaagaagtcagtttttaagttgcagcaatgtgaagatgataatatacaataacacagtagtgttatatatttatagattaatgaacgatattaaaaattcagaccatttattctaagaaagagctaaaaattaatctcttaggcagttcaccagaatcacattacttctgttctccagtgaatgtaattatttgaacatattttttaaaaggccatacatcttccaagaacttggaactccatgagttggagaaaaaaaagtataagaaaacctgtttcatttgatttgtgctttatactgtacttagcataattagcttactggagaaaaggaattyaattgataaaaagtaataactgcaatggtgagtcttcttgagggccataggttctcagcttgtcagttaacaaaccctgtacaaccttggagcctcttgtgttgacggtatgtgaacttccttgggatattagttaatccacttag

SEQ ID NO: 360725 - DNA, 579 bp, Homo sapiens
aggaattaaaatttaaaagcttcatttattatagcatcaaaaacatgaagtacttttgtataaatcaaatatatggaagatccatatgttgaaaactacaaaacattattgatataattcaaagatggcttaactatcgagatataacatgttcatggattgcaaaatttaatattgttaatgaaaattcaccccaattgacctatagaatttatatcaaaattatagtaattgtatataaataaattgactaaatgttatgaaaatgcatatagaaataaataagaactaaaatgatgaaatgattctgaataaaaacagtgaaactggagagctcacactctctgatttcaagatgaacaataaagctaaaataataaagytagatactagagaaagaatatgcatatatgtaaatgaaatataatagatagtatagatacagatccacacatattcagtgaatgaatttcagcaaaattactatagcaattcaattgagaaattatagtcttttgacaaatggtgctggaacatccagaagcaaacatgccttcaatccatatcttgcatcatatg

SEQ ID NO: 360726 - DNA, 579 bp, Homo sapiens
aggaattaaaatttaaaagcttcatttattatagcatcaaaaacatgaagtacttttgtataaatcaaatatatggaagatccatatgttgaaaactacaaaacattattgatataattcaaagatggcttaactatcgagatataacatgttcatggattgcaaaatttaatattgttaatgaaaattcaccccaattgacctatagaatttatatcaaaattatagtaattgtatataaataaattgactaaatgttatgaaaatgcatatagaaataaataagaactaaaatgatgaaatgattctgaataaaaacagtgaaactggagagctcacactctctgatttcaagatgaacaataaagctaaaataataaagctagatactagagaargaatatgcatatatgtaaatgaaatataatagatagtatagatacagatccacacatattcagtgaatgaatttcagcaaaattactatagcaattcaattgagaaattatagtcttttgacaaatggtgctggaacatccagaagcaaacatgccttcaatccatatcttgcatcatatg

SEQ ID NO: 360727 - DNA, 643 bp, Homo sapiens
tgtgatgcataaataattttttatgcttcactttaatcagcattttgtaccaagtcatattatcatctataaaatgcttttcaattggtcctaggcaatccagaccacataatacttacttcaaggaaaaataatgaatattttartcttaaatattacatacaaatggcagtaaataaaagttaataggatttagtttctttcaaattattttgatcatttctaggcaagtaatttctttcataaatcagatcatatctttaattaggaaaagttggtgtgcaatattaaaacaaagagttggacttagaaattgtaaaatataagcttacgttccagctcagcatgtcactgtcaaaagtcacttcatatcttagagtctcaatgacttggtaaaaggggaatagcactaatgtccaccctgcctccattgtgggactactgtaagcatctaatactatagtgaccttatgagtgttttgtgcatttttaaagcaccaactacctgcaaggtgcaactgtgatttattccagtatttcaaaaaatgcatgttcattaatgttttcctacacatactttcagcacatccataggaaactcatagtgcactcctctgcataacagatgaacaattaaatgcct

SEQ ID NO: 360728 - DNA, 643 bp, Homo sapiens
tgtgatgcataaataattttttatgcttcactttaatcagcattttgtaccaagtcatattatcatctataaaatgcttttcaattggtcctaggcaatccagaccacataatacttacttcaaggaaaaataatgaatattttaatcttaaatattacatacaaatggcagtaaataaaagttaataggatttagtttctttcaaattattttgatcatttctaggcaagtaatttctttcataaatcagawcatatctttaattaggaaaagttggtgtgcaatattaaaacaaagagttggacttagaaattgtaaaatataagcttacgttccagctcagcatgtcactgtcaaaagtcacttcatatcttagagtctcaatgacttggtaaaaggggaatagcactaatgtccaccctgcctccattgtgggactactgtaagcatctaatactatagtgaccttatgagtgttttgtgcatttttaaagcaccaactacctgcaaggtgcaactgtgatttattccagtatttcaaaaaatgcatgttcattaatgttttcctacacatactttcagcacatccataggaaactcatagtgcactcctctgcataacagatgaacaattaaatgcct

SEQ ID NO: 360729 - DNA, 643 bp, Homo sapiens
tgtgatgcataaataattttttatgcttcactttaatcagcattttgtaccaagtcatattatcatctataaaatgcttttcaattggtcctaggcaatccagaccacataatacttacttcaaggaaaaataatgaatattttaatcttaaatattacatacaaatggcagtaaataaaagttaataggatttagtttctttcaaattattttgatcatttctaggcaagtaatttctttcataaatcagatcatatctttaattaggaaaagttggtgtgcaatattaaaacaaagagttggacttagaaattgtaaaatataagcttacgttccagctcagcatgtcactgtcaaaagtcacttcatatcttagagtctcaatgacttggtaaaakgggaatagcactaatgtccaccctgcctccattgtgggactactgtaagcatctaatactatagtgaccttatgagtgttttgtgcatttttaaagcaccaactacctgcaaggtgcaactgtgatttattccagtatttcaaaaaatgcatgttcattaatgttttcctacacatactttcagcacatccataggaaactcatagtgcactcctctgcataacagatgaacaattaaatgcct

SEQ ID NO: 360730 - DNA, 605 bp, Homo sapiens
ggaggtaagcctagagggacagctctgaactagagttacagcaaaggaaccaggcaggaggaggaatggaagggctttgtgaaatctctatttctaggacttgtaggtttcagcaattattactatttttgtaaagcagccacatcaatgtttcattttgatttcttaagatttttttatatgtctacagataaaagaatcaagcttaatttattcatggtgtgaattcaagttcccttccatgaatcttctccttctagctccacatttagcatcaactagagaaagaaagacttcatcttccaaaacttccggaatgtgaaaagttgttcttctttattagaccttctaaatctcttgcaccttcagtttgccttagaattccaatagawgaaagcaggcagagatcccaattgtcacaattttccctttgaaaagaaaaactacaaagtttgcaacttttttaaaaattcaagataaaagaagatagccactaatttcatcatctcaggagaaataagttgataacagagccaattaaattactcatgtttgaaatcttctaggaacctctctgatccaaatttattatcacttagacaata

SEQ ID NO: 360731 - DNA, 605 bp, Homo sapiens
ggaggtaagcctagagggacagctctgaactagagttacagcaaaggaaccaggcaggaggaggaatggaagggctttgtgaaatctctatttctaggacttgtaggtttcagcaattattactatttttgtaaagcagccacatcaatgtttcattttgatttcttaagatttttttatatgtctacagataaaagaatcaagcttaatttattcatggtgtgaattcaagttcccttccatgaatcttctccttctagctccacatttagcatcaactagagaaagaaagacttcatcttccaaaacttccggaatgtgaaaagttgttcttctttattagaccttctaaatctcttgcaccttcagtttgccttagaattccaatagatgaaagcaggcagagatcccaattgtcamaattttccctttgaaaagaaaaactacaaagtttgcaacttttttaaaaattcaagataaaagaagatagccactaatttcatcatctcaggagaaataagttgataacagagccaattaaattactcatgtttgaaatcttctaggaacctctctgatccaaatttattatcacttagacaata

SEQ ID NO: 360732 - DNA, 624 bp, Homo sapiens
tgcattatgtataaaaattatgcatggatttcaaaaagtttttgcaccaaaattaactcatgctaacttctcataacatatctgaacaggatctagtttgaggcactaagaaggataagacatcagttttaaattagcttttatccgagcaacatgaattctgctaaaactgaagcaagaacaaacatcaagtttatggtgaagcttgggcagaagaatggtgaaatcatcaatgcttcatgaaaagtttatggggatagtgcccccaaaggaatcagcatcttgcaaatggataacttgtctttagaaagaatgagatgatgttgaagatgaagctcacagaggcagaccacccacawcaatttgtgaggaaaaattaatcttgttcatgccctaatttaagacaactggtgattaacagcagaaacaatagacaacaccacacacattttatttggttcagcttacacaatgctgactgaaatattaaagtcaagcaaactttccacttgatgggtgccaaaaatctctatgcccatatcagctgcagatgaaagcatagctttcaataaaaattttaagtaggtgggatgaagatccagaaggattttttttctaagaatt

SEQ ID NO: 360733 - DNA, 580 bp, Homo sapiens
ttttttctacatttgaatctgggaggatttaagcctgcagctgatatgtcactatgtagggtttggaattaaagctagcacaggatgtgaggagggaggcaacagaaccaagagtacaaagagactgtgatgatgcccttccagcctctggatctagtcatgcctgaagctaccagacttccctgatatatcagctaaggatattttttcttaattgaatcaatttgaggattgggtttcctatctattgtgagggacttttctattttagcattgtaagtcttacatcccaagaaactcctcatttctggaaaaactgggacagctggccactctatccattgtcaatwaaaaggcaacactcaatgcaaaatgtatatatttccttaccgttgaggataaatgatattacagtattgataaaatgttgaaccaagtgcctcatttgacatgagacaggatttgacacaactgatgtgaaaaataagagggtagaacacagtcaaggcatgaaagaaagatgtcctctgcacaggaaccttacccctgagtatggaaaatgatggggtcagggaagaca

SEQ ID NO: 360734 - DNA, 612 bp, Homo sapiens
taaaattataataaggtaatcaaaatttttactggagacagaagaaaaggcttgtctgttcagtataagagttgaatcactagggtgaagaactctcttggaaatactctctgaggatacaagagaaaaatataaagagataaaaggatgaaagaaaaggtggtatatagggagaaggaggagttacagaaattcttaaggagcaagctagaacaattggagctgtgcatgagggtaaaaaataattttgggtgaaggaaaaatgttataggtgagagaagaatggatcaacataatagaaaataatgggtaatagcaataagaaagagttattgggcatttactatgtgggcatttgtctaaatattttattcattaacactcataaccttagaaaattatgatcttcactttacaaataaggaaattgactcatggaaagcttaggtaacttgcctaaggtcaaagaagcaaatagcagagckgggactcattgctaggtagtctggcttcaggccaatgctcttaaccaccaccttagaatcatgaaaaaaggacacatgtagataatatcagcaaacattttagttactcagatgaaaaaaatccaac

SEQ ID NO: 360735 - DNA, 503 bp, Homo sapiens
gatgagaacattggcatttgggaccatttatgctgctttccagttctgagtgattgctggtgttcatgtttattcagcaaagtccttggagacctgtttgaaagggcacatgttctctggatatggaagaaaagtaactctgtgggtaaggaaggagtcatcagtgatctcagctttctgctgcctgggacctgcctgctgggagactattaatgaagaacccacrgagaagataggaaacaagatttgttttcaaaataatcaatggttgtgtgcccttgggcaagttacctgacctcaatgagcctcctgggtaaagtggacatgaagtaaaaagaagcattcctttttaaaatttgttccacatgattacagtgtaaggaaacttacctatattatttttctaaatctaaacaaatctcattgtcagagttgatgagaaatccaatatcagttgttattggagtggaagagaggcatgggctacagacagcagttttgct

SEQ ID NO: 360736 - DNA, 554 bp, Homo sapiens
tgttggtcagattgatctcgaactcctgaccttgtgatccacccgccccagcctcccaaagtgctgggattacagtcgtgagccaccgcgcctgggccatttacttctaatttatttttattatcataatgatgacaataaaacatgcctgtagtcctgtgccttcctgttaacatcagcctatcatgctatttgttaaactatgaaatttaaatcggcagcattaaatcagggcaggaaatgaaattgaaaaccacataagttatctgttgatgtcctacaggcacgggatgagcctctctatatctgttcccagtctgtaattcccagggccctggagacaatcactgagatatactatacaacaaagtgcraatagctaacaatactgcacttaaaatttgcaaaaagagtagaaacttaagtgttcttacccaccctctccccctacacatacaaataataataataaaaggggtgggggggaaactctgggaggcgatggttatgtctatggctttgacggtcatgatggtttcatgggtatatactta

SEQ ID NO: 360737 - DNA, 617 bp, Homo sapiens
actgaaatgttctagagtcttacattgtttatgcttctacccatggaaaggaatcaagyagcaaagtaattattgatcacacagtgtttctcgacttatgcctaaagctgaagaaaactgtcctattgagagaaacttctcagaaaacagtttcatgcatctttgaagatcagtcatagatgttccaaatatgtaattgcatctgtattttaaatgattgaataatcaaatcattacaattttccaggtggcttttcttttctatatggtccagcttgattttctctaaataaattggcaacataaaaataaaacctacatttaactttgctctatagaggcacaacttctgattccttccaggatgttttgcaatgtgacaattactggttggcaggaatcctcttcagaaaggacgattgtacctttgccacttggcatttgagctttgcaaaatgtctattgtgccacatactaatcgcggcctctcttgtctcagcattctacatatttccttcttctttttttttttcatctttcaagtctgagcttcagagccaacttctgtgacctttgtcctcttaatcccatagtttcctttccatcctatgctgtaa

SEQ ID NO: 360738 - DNA, 574 bp, Homo sapiens
tctcaccttatacaaaaatcaactcaagatggattaaggacttaaatctaagacctgaaactataaaaattcttaaagataacatcagaaaaacccttctaggcattggcttaggcaaggatttcatgaccaagaacccaaaagcaaatgcaataaaarcaaatcaacaagaaaaaaaaatcccatccaaaagtgggctaaggcatgaattgacaattctcaaaagaagatatacaaatggctaaaaaacatatgaaaaaacctcaacatcactaatgattggggacatgcaaatcaaaaccacaatgcaataccaccttactcctgcaagaatggccataatcaaagaatcaaaaaatattagatgttggtatggatgcagtgaacagggaacacttctacactgctgatgggaatataaactggtacaaccactatggaaaacagtatggagattccttaaagaactaaaggttgaactatcatttgatccagcaatcctgctactgggtatctacccagaggaaaagatgtcattatatgaaaaagatacatgcacatgcacacccatgtt

SEQ ID NO: 360739 - DNA, 620 bp, Homo sapiens
attgggctaaagtcaaaatatgggcaggcctgtattcctttctggaggctctaagagagactcattttcttgtcctttccagcacctagtggctgctcacatacctcacataccttggcttgtctccccttccatcttcaaagaaggcaatgaccagccaagtcttctcacatcacatcactcggacactgattcattagcttctctcttccacattaatgaccctgtgattacatcaggcctatccagataagccagtaaaatctctgcatttgacaagccttaatttaatcacatatatgaggttccttttgctgtgtaaagtaatatattcacaaattccagggattaggatgtggatgtggccatctttttttttttggaggggaggatggaagaagacattattccacctacaacagtgtagaagcctattaataatgcagaatcctgggctccaccttcgacccttgacctactgaatcagtctctgttgaatggttcccaggaagctccctaggtaattcctatgtrctccattggcttggtgatgaacacaggtggtgataaaaggagattagtgagaatttggtcctacttcaccaagactctggtccctg

SEQ ID NO: 360740 - DNA, 662 bp, Homo sapiens
aaactgccttgtcagatacatttgaaaatattttctacaatcctgtaaggtgacttttcagttttttgatgttggcctttgaggcacaaaatttttaatttcattgaagtccaatttgtttgytttttcttttgccatttgtacttttagtgtcatatcagaaaaactgcctaattcaaagtcacaagactttggtcctatattttattataagatctttatagttttagctcctatatttagttatatctttattttgagttaattttttatatggtatgagataagcatcaaaattcttttctctctcttttttgtttgcatatagatatcagttgtcctagctttatgtgtttaaaaggctatttttccccattaaattgtctgtcaaccttataaaaagtcaaatgaccataaatgtgagggtttacatctagatttgggattatggtccatctgtgtatatatttatccttatgccagtaccatggtcttgattactgtagctttgtaggatattttgtaattaagaagcatgaatcctccagtatttgttcttctttttcaagattagttagactcttctggcccccctgcattttcatataaatgttagagccaacttgtcaacatctaaaaaaaagttgggattttgaaaggga

SEQ ID NO: 360741 - DNA, 531 bp, Homo sapiens
ctttcctttagataaatacctggtagttggattgcaagatcatatggtagttgtatgattagctttttgaggaaacttgatactgttttacataatggttgtrttggtttacagtcccgtcaacagtgtataagaaagagtccccttttctccacatcttctctaacatttgttattttgtgtctttctggtaacaggtattctaactggggcaagatgatatctcatcatggttttaatttgcatttgcctgatgaatagtgttgttgagcattttttcacatacttgttggccatttgtcttcttttaagaaatgtctattcagatcctttgcccattttttaattggattatttgccattttgctcttaaattgtttgggttccttgtttattctgggtattaatattttatcagatgaatggtttccaaatattttctcatgtttttcaaattgtctcttcactctattgaccacatcctttgctgtacagaggctttttagtttgatatgattcctatttgtctat

SEQ ID NO: 360742 - DNA, 531 bp, Homo sapiens
ctttcctttagataaatacctggtagttggattgcaagatcatatggtagttgtatgattagctttttgaggaaacttgatactgttttacataatggttgtattggtttacagtcccgtcaacagtgtataagaaagagtccccttttctccacatcttctctaacatttgttattttgtgtctttctggtaacaggtattctaactggggcaagatgatatctcatcatggttttaatttgcatttgcctgatgamtagtgttgttgagcattttttcacatacttgttggccatttgtcttcttttaagaaatgtctattcagatcctttgcccattttttaattggattatttgccattttgctcttaaattgtttgggttccttgtttattctgggtattaatattttatcagatgaatggtttccaaatattttctcatgtttttcaaattgtctcttcactctattgaccacatcctttgctgtacagaggctttttagtttgatatgattcctatttgtctat

SEQ ID NO: 360743 - DNA, 622 bp, Homo sapiens
tgtgaatttatatctgagctctctgttctgttccactggtctatgtgtctgtacttatgccagtaccatgctgtttagtgacyatagctttgtaatgtattttgaaatcaggtagtgtaacgcctccaactttgttttttttgctcaagagtactttggttatttggggtctttgtggttctgtacaaattttaggattgatttctttatctctgtgaagaatatcattgtcattttgataggaattgcactgaatctgtagctctcttggggagtatggacattttaacaatatttattgccccaattaatgaaaatggtatgaatttccattttgtgtgtattctcttacatttctttcatctgtgttttatagtttttatcacagagatctttcacctcattggttaaatttactcctaggtattttatctttctgtagctattataaattagattaattttttatttgttttcaactagtttgttattggtatatagaaacactatggatttttgcatgttgattttgtgtcatgaaactttactgaattattctatcagttctaagagttttttcctggaggctttagattttatatatataagattatgttgttta

SEQ ID NO: 360744 - DNA, 622 bp, Homo sapiens
tgtgaatttatatctgagctctctgttctgttccactggtctatgtgtctgtacttatgccagtaccatgctgtttagtgaccatagctttgtaatgtattttgaaatcaggtagtgtaacgcctccaactttgttttttttgctcaagagtactttggttatttggggtctttgtggttctgtacaaattttaggattgatttctttatctctgtgaagaatatcattgtcattttgataggaattgcactgaatctgtagctctcttggggagtatggacattttaacaatatttattgccccaattaatgaaaatggtatgaatttccattttgtgtgtattctcttacatttctttcatctgtgttttatagtttttatcacagagatctttcacctcrttggttaaatttactcctaggtattttatctttctgtagctattataaattagattaattttttatttgttttcaactagtttgttattggtatatagaaacactatggatttttgcatgttgattttgtgtcatgaaactttactgaattattctatcagttctaagagttttttcctggaggctttagattttatatatataagattatgttgttta

SEQ ID NO: 360745 - DNA, 600 bp, Homo sapiens
ttttgagtaaatgagtgcataaatgaatttaactgtctatgtatttatttgtatttgtataatttaaggcatacaagtacagtttgttacatggatatattgcacagtggtgaagtctgggcattagtggaatcatcacttgaataacggacattgtagccattaagcaatttctgatctctcttcccactcccactctcctgtcctttcgatgtctattcttccatactctatatccatgggtaaacattatttagctcccacttataagtgaaaacatgtgatattttactttctgaaattcttgtaggtaaaaccaaggtggggtaggcagtacttctcctagtatcaaagggcagttactctatccaggggatccaagagttaattacctttctccaagcatttcttccatgtttctctgcttcttgagagtagaccagaatggagaagatgcttcaggacctggcttgttcttttgtaaaggctcatatctgcagctgatactgccattgaccttcccagtactgaaaaatrtgggtagcaaacttctagaatcacacggaatgatttctttagatgagttagctggcccagaaa

SEQ ID NO: 360746 - DNA, 332 bp, Homo sapiens
aacttacatttcacacccctctgtaggtgaagacttggagtcagttttaagtcaatcaatttcttccacagaatttgaggttgcaaatttatatcaagatacatgttttatttcatcaaacttggtaacatctgaaaagttagtgttatatttgttttaccgttgaagacatggaggctcaggaaaggaagatttgcctccctcttcagagtgagcctatcaatgcagaatatatgggtgttcaaaggaataacaatgataccrcattctctggcaaagttatttaattcctcgcttcacagtgactttcttgtctagtcattcctcacaga

SEQ ID NO: 360747 - DNA, 623 bp, Homo sapiens
tgattaatttataaaacagactaattgaaagttcagtggtctaaagaggtatttcagtgcctcggagcaataacagctttgtgttttcttcttcatcttaatgggcctcaacttcctgtggcctttgttgctaggaaacaagagtgtactcaattgaaagccacctttctgttgttgttgttgactctttggagtctgaaatgaaccaggcatatcttgaatcctccaggattaactatcagttatgtgtcctaggacgaactatggatgatgtgagraacatgaagctcaacattttctgtggagccacggtctataaccccaggagcaactcacttcccttacaacttctcttgggaaaaattcgttagcttgtcctgtgtgaaattaagtcccacagaattagaaaaataaatggagccaaactgttgtcatttgtcctcatttccatattacattaaagtacaggtcaccttaggaactctgacacgtgttcagagagttagaccctcaaagtaacagtgcattcctcggcaaattaattctttcagtatagtcgtttttgtatttacacttcaaactcagagtttagatatatgctagaggcttttaatcttcctcgg

SEQ ID NO: 360748 - DNA, 639 bp, Homo sapiens
atgtgagaaacatgaagctcaacattttctgtggagccacggtctataaccccaggagcaactcacttcccttacaacttctcttgggaaaaattcgttagcttgtcctgtgtgaaattaagtcccacagaattagaaaaataaatggagccaaactgttgtcatttgtcctcatttccatattacattaaagtacaggtcaccttaggaactctgacacgtgttcagagagttagaccytcaaagtaacagtgcattcctcggcaaattaattctttcagtatagtcgtttttgtatttacacttcaaactcagagtttagatatatgctagaggcttttaatcttcctcggtgatattgaaaatggtgaaatctaccaaaatgtatttataagataagcatgtttaaggaagatgtcttggtcagtggaacaagataggaaagcatgcagtttccagccttgttttttcctccataacccaactcagaaatatcgattctttttaacagcatttgattctgatgcagttctgagtgtacattcagaggcaaaggccatgtctacaagatgcaagtcatccaactgcagaagtaatggctcaaggcaggttattaaagcagccttgaaatccaatctg

SEQ ID NO: 360749 - DNA, 561 bp, Homo sapiens
gcagcaactcctaaatagcaacaagcaatgaactatggactcatgtactaagccagccacatccaccaatgataattctttcaaaacaacttttaaaacaacaaccatgtaatcaccatcagcatccctttgaaaatccctactccccttcatctcctcagaatacaatttggctttaagcraaatctatgtctcttcaattgcaattgctaagaccccaacaaatgccttgtgttactgcattgcaatctggtcttttgtctcttcttagttgacactgttaaatttaatttgcataaagtttttgttttgacagatggtgtcagaagtgggattcaaagtagaacttccaacaacttccaggcacatggagttatcaaaagaggtacataccaagcccattatgtccattgctctcttacagcaactagagattgtaggtaagttgtctcacagattcaaaagctctatgaatttgtattttgagctatctgactttgtttgagcaaatattggatctaaactgggtttggaagtcacaacagaaactggactgggtcc

SEQ ID NO: 360750 - DNA, 561 bp, Homo sapiens
gcagcaactcctaaatagcaacaagcaatgaactatggactcatgtactaagccagccacatccaccaatgataattctttcaaaacaacttttaaaacaacaaccatgtaatcaccatcagcatccctttgaaaatccctactccccttcatctcctcagaatacaatttggctttaagcgaaatctatgtctcttcaattgcaattgctaagaccccaayaaatgccttgtgttactgcattgcaatctggtcttttgtctcttcttagttgacactgttaaatttaatttgcataaagtttttgttttgacagatggtgtcagaagtgggattcaaagtagaacttccaacaacttccaggcacatggagttatcaaaagaggtacataccaagcccattatgtccattgctctcttacagcaactagagattgtaggtaagttgtctcacagattcaaaagctctatgaatttgtattttgagctatctgactttgtttgagcaaatattggatctaaactgggtttggaagtcacaacagaaactggactgggtcc

SEQ ID NO: 360751 - DNA, 561 bp, Homo sapiens
gcagcaactcctaaatagcaacaagcaatgaactatggactcatgtactaagccagccacatccaccaatgataattctttcaaaacaacttttaaaacaacaaccatgtaatcaccatcagcatccctttgaaaatccctactccccttcatctcctcagaatacaatttggctttaagcgaaatctatgtctcttcaattgcaattgctaagaccccaacaaatgccttgtgttactgcattgcaatctggtcttttgtctcttcttagttgacactgttaaatttaatttgcataaagtttttgttttgacagatggtgtcagaagtgggattcaaagtagaacttccaacaacttccaggcacatggagttatcaaaagaggtacayaccaagcccattatgtccattgctctcttacagcaactagagattgtaggtaagttgtctcacagattcaaaagctctatgaatttgtattttgagctatctgactttgtttgagcaaatattggatctaaactgggtttggaagtcacaacagaaactggactgggtcc

SEQ ID NO: 360752 - DNA, 561 bp, Homo sapiens
aaatcaatgactattattttacaatgacctgtgaactgattttgattaagtgttataaacctttgacaaatttgacatgctttccaaaatcaaatttcaaattctaaaaataagtctttctgacttcaatctaatttggggatatcccaaagggcctctgaagcatccaaacaagagataatttgatatattaaatcatatgggaagcattattaaataagaaattacatttaaccttctttgagttatatttttatggatatgttataaatatgtggtcaaaaattgtatgcagtttctaaaattttgagatgtcttggtatatgttatcagtcataattatggttattwtgttaaattattatgggctacaggaataaccaaatttacttgccaattgtgtctttaaccatgactattttaagacttgttgtccacagttaattgcttaattctgatgcttttttctgaaagttctttactagcaattataatcttgaagagttgagtcttccaaaaggttcatggaaagtttgggaaggaccatgacaagtactattg

SEQ ID NO: 360753 - DNA, 653 bp, Homo sapiens
atccgtattagttcattttcatgctgctgataaagacatacccgagactgggaaatttacaaaagaaagaggtttaatggacttgtwgttccatatggctgggaaggcctcacaatcatgacagaaggcagggaggagcaagtcacatcttacgtggatggcaacaggcaaaaagagagcttgcacagggaaactcccatttttaaaaccatcagatctcatgacactcattcactatcatgagaacggctcaggaaagacctactcccataattcaatcacctcctaccaagttcctcccacaacaggtgggaattgtaagagttacaattcaagataagatttgggtggacacacagccaaaccatatcagaatcactcatgctaagtgccacatattcaaactgaagctttaaaaaagcagatagattccaaaactgatggaaactaacaccaaatatttgtgaactccaaactgagatggaataagcccatttatgataataatagtgatgttgatgcctaaagtttttgtcaatctttcaaaattgagaatttgaccaaaaggagaaaattgttaagcttgacctagcagtgcctaaatattttaagtttggcctagagatttcttcatacttagtgaatgtaatcta

SEQ ID NO: 360754 - DNA, 612 bp, Homo sapiens
tcatgctaagtgccacatattcaaactgaagctttaaaaaagcagatagattccaaaactgatggaaactaacaccaaatatttgtgaactccaaactgagatggaataagcccatttatgataataatagtgatgttgatgcctaaagtttttgtcaatctttcaaaattgagaatttgaccaaaaggagaaaattgttaagcttgacctagcagtgcctaaatattttaagtttggcctagagatttcttcatacttagtgaatgtaatctaacttcatgtggaaatacactgtaacctactcttgtaacaagtagttaaatcttagccaatctcagccagmgaactgttcaaacctggtttaaataaggcaaatacccacctgtaaccaatccagctgtttctatagctcacctccattttctgtaagaagttggtattgacatcttggacaacttgtttagcttctctgtgcctcagttcactcatccttaaaatgggactggcaaaagatgatattttataggtttcaatgccagtagagtgcttagcacagagcctggagcaaaccaagtgttgggtcaatttagcaccaactattagctatgaac

SEQ ID NO: 360755 - DNA, 562 bp, Homo sapiens
aactgaatttttaattttattcagtttaaatagccacatgtagttagtgactacagctccagtgggtaaaagtggaagaaatgggggatgagcaaaggagaagcctttaatgaaggaaaagaaccagaggagaacgttgtcttagaagccagctatgttgaacgttgctcatagatctagttgaggaagatttaggatggtgtagcatggtgaagacaaaagcctgattggaaagtgttcaaaggagaaaaaaggggagagagaaattgtagacagcaagtctggacaagtctttcaaggagttttgtggttgtctaggagagtgtgggartaaacagacagggaaaatgtagagagggccaggcagtgccgagggcgctcttgaggttagtggtcatgaatttaaatgagaccagttagtgtgatcatacagtcattcccccttatccaccgaggcacattccaccacccccagtggatgcctgataccatggatagtactgaacgcaattgccatcaactgaaacatgtttctgtccatgtcttcaacccataaatttaa

SEQ ID NO: 360756 - DNA, 606 bp, Homo sapiens
ctgtttcccatgaaacctctattctatctttttctttttccttgagagatttttttcagtttcagaatcctctggtttcctctacattcatttaagagaattttgtggcaccaaattacagaagaccttgctctttcaaatgcaagtccttaycttcttgctctttaaccttgcatatctatctgcatttcaagttgttcattgctcagaaaggtaatctatttgatttgggtttgtaaaaagagacaaaattacttgtgcttcttgaataacaatatgtgatttttttctctgagggtcaatatgaattagcctacataaatcattttactaaaccggtgcctaattacatgaacaactgcgaccaagtctacatttattctgttgaaagagtaacattgaacatcaaaatctcttgcagagattcaggcatttcagtacaaatgttacttaggcattaaagcctcacaaatactttccaggtgcattggctcctccctgacaaaggcaactcagcttccaagacttcagaaaattcttactgttgtcatctcgtctctcctcatagccaactcttctttctgcacctccacagcaagtggcccc

SEQ ID NO: 360757 - DNA, 606 bp, Homo sapiens
ctgtttcccatgaaacctctattctatctttttctttttccttgagagatttttttcagtttcagaatcctctggtttcctctacattcatttaagagaattttgtggcaccaaattacagaagaccttgctctttcaaatgcaagtccttatcttcttgctctttaaccttgcatatctatctgcatttcaagttgttcattgctcagaaaggtaatctatttgatttgggtttgtaaaaagagacaaaattacttgtgcttcttgaataacaatatgtgatttttttctctgagggtcaatatgaattagcctacataaatcattttactaaaccggtgcctaattacatgaacaactgcgaccaagtctacatttattctgttgaaagagtaacattgaacatcaaaatctcttgcagagattcaggcatttcagtacaaatgttacttaggcattaaagcctcacaaatastttccaggtgcattggctcctccctgacaaaggcaactcagcttccaagacttcagaaaattcttactgttgtcatctcgtctctcctcatagccaactcttctttctgcacctccacagcaagtggcccc

SEQ ID NO: 360758 - DNA, 550 bp, Homo sapiens
gcaatgtggaaacttgtcagttcacttggagaacaactcaattctcatttgaggggaggagcatcctgtccccaggctgagctgaagtgggtggcgagaaaagagtggggaggagctggctgcaggccatacccacactggtgaatggttccactgagtggtaggtgcctctgcaatcaggatgaggtcttccccaaaaggttgttgtgtcctgagaggagagttggggagtcacctmaggaacactggagaatggatgctgggcaggtggaacaacacaccacagcttccaactaagctgaggaaagcaggtgcttgccaacccacagcctgtcttccagtttctggatgaaactggagaagagagacagaaaggagatagagtcagccccctgcccccaaaaaatccaatgaaatcttctttaatttaaatccatcacacaagctacataagtcaagattccaagaattaaaaaagcaagtggtcttattttactataaaaatgaatctctgccttcatctctgggccacaggtatgcccctaagaga

SEQ ID NO: 360759 - DNA, 550 bp, Homo sapiens
gcaatgtggaaacttgtcagttcacttggagaacaactcaattctcatttgaggggaggagcatcctgtccccaggctgagctgaagtgggtggcgagaaaagagtggggaggagctggctgcaggccatacccacactggtgaatggttccactgagtggtaggtgcctctgcaatcaggatgaggtcttccccaaaaggttgttgtgtcctgagaggagagttggggagtcacctaaggaacactggagaatggatgctgggcaggyggaacaacacaccacagcttccaactaagctgaggaaagcaggtgcttgccaacccacagcctgtcttccagtttctggatgaaactggagaagagagacagaaaggagatagagtcagccccctgcccccaaaaaatccaatgaaatcttctttaatttaaatccatcacacaagctacataagtcaagattccaagaattaaaaaagcaagtggtcttattttactataaaaatgaatctctgccttcatctctgggccacaggtatgcccctaagaga

SEQ ID NO: 360760 - DNA, 492 bp, Homo sapiens
tctactttaaatagtcttcatcatttgattcaggaaaaagtatctgataattcccaagaaaagtatattatgtactcatatatactgggtgtaagtatggatttaatgcatctgcatgtactttctttcttttacttacaaacaaatgtttatgttctagaacacaggtttgtaaattgactagacatcagaaatttctccccttagagaaacaacatttataaccatatcttacttacagtaactgttaccatccccaactgaaaattcttcctgatataaaatacttgtatacagaaacttacttttgtatatagcttttccataaattcaagaaaattttggctaaatttgagtcactygtatttgatataatgagagactaaaggacccaggactggggagtgaaaaggaagaaaagcagatgccagcagtggacgtttttacaaggcagccttggaaaagataaaggaagaatccagcccacagatg

SEQ ID NO: 360761 - DNA, 527 bp, Homo sapiens
aactcttgagtcaggaaacacaaaaaggctgggtccattctggcaaaggggagaggggaaagcacagagaagaaagcacaagacaagagttcaacacaaaacytacacactcactccaaatgtaggcaattgtgatgagacaaatgggtcctacattcaagatgagtctccagaaatgacttgttggatcctttcctccaaggccaaggaagagagatggtaagataaaaggctaagttggaggtcccccaggagaagcctaaattgcttagatttagcatttgaagtgaggacagaggtcaagaagataaaatgaagagggatggacagaagaaaagagagaggatgaattttttttaagttgcataggtgaattgaaataggcacgaatgaaagtttctctctcttaaaagctttaaaccaggggcagatgtttttaaaccaatccttagaatcactccatcaatgaggacttgacaggcaccaatggtccactcaaagaatttggttgagaaaggttttatgaa

SEQ ID NO: 360762 - DNA, 605 bp, Homo sapiens
atgagtagctctattaatataatgttttgcctctttttaattatttcattagattaaattcctagaaattagattgctggatcaaagagtaatcacaataattaccttttaaagatattcctttgacctcttcccttaaagaaaatttaatgatatgaaaattactagttgatataaaagagagagtaaagcaaataaatcatgtatttatttgaccacagcaaaagggagaggagctcccctttccctctctttcccagtgaggctgggatgggttagccatttactaaacaattatttagtaaacacctattttattcataaaactatctagacatcatacaaaaacccagggttccattcagttgattaaatccaacaaagatttcccastctactacatgcttgttccatgctgggagttaatcagagtaggaggaatatggagtggcctttgtccttaaaactcaaaatttatgcaagaaagtaagatgtgaagatagtatgagactctataatcaagcgccaaattccgtttttaaaagatcccaaatctgtgattcagacactggatattaggcatagtaagctaagcaaaaaagagt

SEQ ID NO: 360763 - DNA, 558 bp, Homo sapiens
cctcgttggtatccagtgcccatttatctctattaggaagtcattctgcaagtctaacttaagttattcttgatgaaaggaacctttttccttcttgagagcaagcaggacccagggagcccctgccctcacccaggattcctgcctctcttctctgcmacacccctgatctttacctggtatccccatcattcctattagaaagtaatcaagtctggcttcagtctttcttgccttgaaggaagtgtattcctggcaggggctgggggtggggggataagtcataagacaagggttgggggatcagaagaagccctaatccactcttcagagggacccaggaacccccagcactagagaagtttatatttagcgcttctctgctcctcctcctccccccgcctgccaccgcctcctccctgatgctgggacaagctttgcctagagactggggggtggggggacaggcctctccactatcagctcgtgccgggaggacagagggctgagggggaggaggggacagagggaccgaggagagggagactgaagggcaga

SEQ ID NO: 360764 - DNA, 513 bp, Homo sapiens
acagaggacaggaggtcagcaaacgaaggttttgtaaatctgcatttgactgtgtgtatgcataggtatacatgtagagaggtctccatgtacatgtctttcactaatttctgtcctgcacatttagtgtgatgctctaacctctgagaagtcctgtcattttagtgcgctctgagtgaatggcttgggcttcactgctgtctgagcttgtcctgcttttctgagcgtccggatggggaggctcttctatgacagggatgtttatcttgccattatagaaccatcagaggtttttgcttggggctctgcacttgaactcactgtcagtggatraaggccatccttgtggatttatggagtctctagcacctctaaaatatgttgcagcttctcagtcttatgagaccagtaagcctagagtaaatcaatgtcaaggataggtttattttcttttaaagctttttctcctctgaggccaagactgcattttcacttctccaaataaagcattta

SEQ ID NO: 360765 - DNA, 513 bp, Homo sapiens
acagaggacaggaggtcagcaaacgaaggttttgtaaatctgcatttgactgtgtgtatgcataggtatacatgtagagaggtctccatgtacatgtctttcactaatttctgtcctgcacatttagtgtgatgctctaacctctgagaagtcctgtcattttagtgcgctctgagtgaatggcttgggcttcactgctgtctgagcttgtcctgcttttctgagcgtccggatggggaggctcttctatgacagggatgtttatcttgccattatagaaccatcagaggtttttgcttggggctctgcacttgaactcactgtcagtggataaaggccatccttgtggatttatggartctctagcacctctaaaatatgttgcagcttctcagtcttatgagaccagtaagcctagagtaaatcaatgtcaaggataggtttattttcttttaaagctttttctcctctgaggccaagactgcattttcacttctccaaataaagcattta

SEQ ID NO: 360766 - DNA, 359 bp, Homo sapiens
  misc_feature (1)...(359): n = A,T,C or G
cataatgcatgtgtgttaaaaccttctagacatcctgcagtttagatttgaaaagctrcatatattcctcgagtgtcccaaacgtatttgatcatagaacccttgacaaagaactaatgttctgtagagcacactccagagaacactgattttagccatgtctttttggcttaaaataaatggcacaaagctgcacagccgacattttttgccatgtccatataccttgaactgagccagttccactcaggggatccttagtcatgagctcattactttcattgtctttgaccaccaggagctgtatttttactattttacttgcagagctttgagactttgtatcataattttnttca

SEQ ID NO: 360767 - DNA, 558 bp, Homo sapiens
tttgctgacttgctgtagggctctctgctggatacaggatgttagatacacgttgcaaagttcctatcttttttcatatgtgccaatacaggccactaatttatgggaagggaagttgcatcactgttaagagaagggagttgctatactcttctcccctcccttcacccccgccacatccctcctttcctccctcttctcctgtcactgtttctgcaaagaaagagctcctagcagtgtttgggaaaaggatttgtggttctggattccatgtcctctcctttcaggccttattgcccggctttggtttttattgttgcatttttccatcctgctctcctgagaggcagtatggtgtgggggttaagaacacaggcttgagggctttatttctgagattctaccacccatgagctctacaactctagccatgttacttagcttctttgttcctcacttgtttcatcagtaaaatgagacaaagaatgatattgacctacagwattgttgtaaggattgaatttctgtttggatccatggaaaactcttacaacagtg

SEQ ID NO: 360768 - DNA, 526 bp, Homo sapiens
acttgggccaacattagcatttggaaaaaacttggactgtagttgcactggataaataccctcagatggttctttaaatcttaagataattcttaataattgaaatagactcaagttcagttttgttataagttctagttctatagaagcaatgcatttcttaataaatgaagcataaaaccttcyaaacagtactgtacaatgaatctacttttctgtatctccaacacctaacacaattatgagcacatagtagacattcaataatgcttgttaattcctaactttggcatgatattatttctccaaaggcctccagagtaaggcttgaggtagaaaagaaaggaaggggaagagtcccctcttggtatgtcttcatatgccagcacctggaacattcacaggtaggaaaaaagtaccttattacctgcttagaggtacagaataaaatacaaaatattcctctccctcatataaatatccattgctttttctaaatgttcatctcttttcaccattagcatta

SEQ ID NO: 360769 - DNA, 619 bp, Homo sapiens
aaaaccttctaaacagtactgtacaatgaatctacttttctgtatctccaacacctaacacaattatgagcacatagtagacattcaataatgcttgttaattcctaactttggcatgatattatttctccaaaggcctccagagtaaggcttgaggtagaaaagaaaggaaggggaagagtcccctcttggtatgtcttcatatgccwgcacctggaacattcacaggtaggaaaaaagtaccttattacctgcttagaggtacagaataaaatacaaaatattcctctccctcatataaatatccattgctttttctaaatgttcatctcttttcaccattagcattataatattttagaggaggtgtcatttattaatgtggtatgggctaggtagagtcaatactgtgggtggagtgtatttgtgggcttttctttggattgaaaggaagcatttcaacatatggatggtttgggctgatgaatatgaagtgctatggaaatgtgcacttttttgcttgcagtgtagaagccatggagataattgagtagagtgaatactggtgagttcctccgtgtgatagcattacatctctaggctaggaattttttattct

SEQ ID NO: 360770 - DNA, 619 bp, Homo sapiens
aaaaccttctaaacagtactgtacaatgaatctacttttctgtatctccaacacctaacacaattatgagcacatagtagacattcaataatgcttgttaattcctaactttggcatgatattatttctccaaaggcctccagagtaaggcttgaggtagaaaagaaaggaaggggaagagtcccctcttggtatgtcttcatatgccagcacctggaacattcacaggtaggaaaaaagtaccttattacctgcttagaggtacagaataaaatacaaaatattcctctccctcatataaatatccattgctttttctaaatgttcatctcttttcaccattagcattataatattttagaggaggtgtcatttattaatgtggtatgggctaggtagagtcaatactgtgggtggagtgtatttgtgggcttttctttggattgaaaggaagcatttcaacatatggatggtttgggctgatgaatatgaagtgctatggaaatgtgcacttttttgcttgcagtgtagaagccatggagataattgagtagagtgaatactggtgagttcctccrtgtgatagcattacatctctaggctaggaattttttattct

SEQ ID NO: 360771 - DNA, 579 bp, Homo sapiens
ccaagactgcattttcacttctccaaataaagcatttagcaatctatcttttaatgctttgggttcctctgacttctgggctcaaggccagaacagagttgaggaggtgatgggaggaggagatgctccttctcctttgttgacagagcagcctgtgaattcactgtccttcaactttgggatgatacacatggcagaatgctgggaatgtcctctgatggtgggaccaggttttgttctattgtgagtgtgatatatattataatttacatcattgcatatgtataattatatataggtgtgctataatataaacyataactaaaatgaacttcagaaataatgcaaagatatgtgcaaaacctagagagaggctagagtggtcagaaagactttgtgggattcacacgggcactccacatctcactctccttccagatgtgcagtgcaatatagaactgcatcccacactcccttgaattaggtgtggccttatgactgtttgggccaatgaagtaagcatggaaaagaaacaggtcttttctgggcagaagcattaagagccagtgtgtgctttgc

SEQ ID NO: 360772 - DNA, 532 bp, Homo sapiens
tcactgtcacttcagaataaacagcacatttagatacatggatgtataatatagtcattgtctgtagcagtatcattgctaataagaaaggtagttaagggcaaatgtcatggaatatgttgctctgatcctctttgagctgtaattattgtggctgcatctgcctgaaaacaagtttcaagaatatgacctttgtagtctctggttcagggatatattggaaacagtaataattagmagtacaacccccccttccccacacatacaccttaaaaaagctattttaagctaccaataaaacacaggtttttctcatagcaattccagacagccaaatagtttaaagggggaacagaaataagagtcttgctaatcttgcaaactgtgcatgcaaagggcatttaataatagtactttttcttgcatttttttttgttgttgttgtgagcaaatgctgcaaactaccaagttcagctgtgtaatcactaacttgatttcactcatttctttgttaagtactaaagatattatg

SEQ ID NO: 360773 - DNA, 566 bp, Homo sapiens
tatcatggcattattttattttgttaggtcgtgygttttgcctggagtttttttttttttttttttttgagacagtctcactctgtcaccaggctggagtgcaggggcgcgatctcagcttgctgcaacctctgcctcctgggttcaagtgattctcctgccttagcctcctgactagcttggattacaggtgtgtgtcaccacacctggctaattttttgtatttttagtgacgacatttcaccatgttggccaggctggtctccaaactcctggtctcaaatgacccacccacctcccaaagtgttgggattacaagtgtaagccaccacacccggactgaaaacaatttttgaagaaaaatatacagtattttatagagctccatgtgtgccatttcaatatactgtcttacaaagctcccatagagactgggcctttgttatggaaaagcatgcaaagtatttaacatatatcacattttgcatactgttggtcttcaaatattgataataaattgggtaatgggcaattgcaaagtgttttgagaatatggggttgctgaa

SEQ ID NO: 360774 - DNA, 566 bp, Homo sapiens
tatcatggcattattttattttgttaggtcgtgtrttttgcctggagtttttttttttttttttttttgagacagtctcactctgtcaccaggctggagtgcaggggcgcgatctcagcttgctgcaacctctgcctcctgggttcaagtgattctcctgccttagcctcctgactagcttggattacaggtgtgtgtcaccacacctggctaattttttgtatttttagtgacgacatttcaccatgttggccaggctggtctccaaactcctggtctcaaatgacccacccacctcccaaagtgttgggattacaagtgtaagccaccacacccggactgaaaacaatttttgaagaaaaatatacagtattttatagagctccatgtgtgccatttcaatatactgtcttacaaagctcccatagagactgggcctttgttatggaaaagcatgcaaagtatttaacatatatcacattttgcatactgttggtcttcaaatattgataataaattgggtaatgggcaattgcaaagtgttttgagaatatggggttgctgaa

SEQ ID NO: 360775 - DNA, 566 bp, Homo sapiens
tatcatggcattattttattttgttaggtcgtgtgttttgcctggagtttttttttttttttttttttgagacagtctcactctgtcaccaggctggagtgcaggggcgcgatctcagcttgctgcaacctctgcctcctgggttcaagtgattctcctgccttagcctcctgactagcttggattacaggtgtgtgtcaccacacctggctaattttttgtatttttagtgacgacatttcaccatgttggccaggctggtctccaaactcctggtctcaaatgacccacccamctcccaaagtgttgggattacaagtgtaagccaccacacccggactgaaaacaatttttgaagaaaaatatacagtattttatagagctccatgtgtgccatttcaatatactgtcttacaaagctcccatagagactgggcctttgttatggaaaagcatgcaaagtatttaacatatatcacattttgcatactgttggtcttcaaatattgataataaattgggtaatgggcaattgcaaagtgttttgagaatatggggttgctgaa

SEQ ID NO: 360776 - DNA, 595 bp, Homo sapiens
tttaatatttaattgttacataatctataatattattatttaaagcaccagatgataaaatttccaattcttctataaccactagatgactctgcagccaaactgcctgtataaaatgctgcctccagcacttattagctctgtaatgctgggtgaaattactaaacctctctgagccttcatctcttcattcttaaaatggagataataatagtatccacctcatagagttactatccagtcatgacatcgaacccaaagaccaggaccttatgagagtatctacatcatttctggatgtagcttctctggagagggagacagatctacctaccctctccatggcaaattaccccgcatacatgctacatataatggtggaattactcccatcagaaaggggaaatttagacatttgcagcagctgctggttgtacagtcctgatayctgtgcaggccaatgacccttgattaggtctcacttctgtttccaggagataatttcccaggccactggttcttcctctgagagggcttgctcttactattcttctccttggccacatgtgaagatggcactggagaatatgccctt

SEQ ID NO: 360777 - DNA, 592 bp, Homo sapiens
tgagggtggggaagaggagaaaaaggaggaggcagaaagaagactttctgtgagatctatgggaggacaggaggggaagatttaaaaagttgttacggttttgtgaagggaagaacagggcagaaagagccaattggggaaaatttgttgtgatgtttcatccctttctaatgagagaagctgaggcagtgcccctcttcacgaattacactatgataaaccctatatactgctaactattcaagagcaggaatggcaatactcttatttctgtcttcccagcatactcagaccagaccctggaacggagcaggtttttgatgaatgcctgttgaatgatgaataaacggatgaagggaamcaaggtataacataatcacatgaggatacaaagcaatctctagatgaatgattgctgaatgaataagtgaatgcacaatttttatctgatgattgtgtaatttaggttaatttgaagactgtagggcacacaaataggagggtacaaaatacaaagtgcaaaacactggtgaaacagcacgcagactgttttgaacccctgctgctactgcagctgcaagggttggttagg

SEQ ID NO: 360778 - DNA, 577 bp, Homo sapiens
gctgctgctggcttggctttctcttcaggccctggcctcttccaggtgaactcattcccctttaggccctaacatgacaggtggctacccttgcctggttcctcaggtggtatcacaatcctcctaagagattgggctttccatcacccacttggatggagctgctgccactgtcttttatggcctgcacctgggaaacacaggcctgggtgagaacacagacttaggcacacagcagcagatagctctgctgatggccacggaggctggagaggtcaagtaaggaggcagaatggtatgtgtttctactcctgargttagaagctaaggcaacagtaagtccttattgtgcctcagaaacacctgaggaaatttaataaactggagattcctgagcttacatcttctcgctgagattctgattcatttgttctggcatgtggtttgggcagtggcaaatttgagagctctttggaggattcttacctgcaggcagagttaagaaccagtgaattaagggagtgagtggtttcccatgcctaagtgtattttctgttgcaatggccctggttaagtg

SEQ ID NO: 360779 - DNA, 577 bp, Homo sapiens
gctgctgctggcttggctttctcttcaggccctggcctcttccaggtgaactcattcccctttaggccctaacatgacaggtggctacccttgcctggttcctcaggtggtatcacaatcctcctaagagattgggctttccatcacccacttggatggagctgctgccactgtcttttatggcctgcacctgggaaacacaggcctgggtgagaacacagacttaggcacacagcagcagatagctctgctgatggccacggaggctggagaggtcaagtaaggaggcagaatggtatgtgtttctactcctgaggttagaagctaaggcaacagtaagtccttattgtgcctcagaaacacctgaggaaatttaataaactggagattcctgagcttacatcttctcgctgagattctgattcatttgttctggcatgtggtttgggcagtggcaaatttgagagctctttggaggattcttacctgcaggcagagttaagaaccagtgaattaarggagtgagtggtttcccatgcctaagtgtattttctgttgcaatggccctggttaagtg

SEQ ID NO: 360780 - DNA, 592 bp, Homo sapiens
gcagctgtctcttcagcatactgatttcattcatttcctttggatgtatacccagtagtgggattgctggatcttatggtagttctatttttaatattttgaggaacctccatattgttttctgtaatggctgcactaatttacattcccaccaacagtgtgcargagttcccttttctccacatcctcaccaacacttgttatctttgtctttcttataatagccattctaacaggagtgagataatatctcattgtggtttagatttgcatttccctgatgattagtgatgttgagcagtttttttcagaaacttattgactgtttgtatgtcttcttttgagaaatacctgttgggatcttttgcacatttttaaattgggttgttttcttcttattgagttgagttccttatatatttccatattaatcccttatcagatgtatggtttacaaatactttctttcattctgtaggctgtctcttcactctcttgattgtttcctttgctgtgcagaagctttttagtttgacgtaatcccatttgtctacttttgcttttgttttctgtgcttttggggttatagccc

SEQ ID NO: 360781 - DNA, 519 bp, Homo sapiens
gttcaaaatcttgtgtgtccagaatcatccatcctgggatcctaatcttcatgctgattgtccaatgtaacatgttagtagaatcctggccccttctacatataacctgccattccatgtatctcaacactgttaaacytaacatataatgatttaaaaccctcctcaatacagaaaatcctacagcttctttctctattttttattgcacctccaaatactacaacttcaatatctggcaggtacctggaaaaactgccagttattcaagaagatttgtaagataccctttttatgtcaagaggcaatttggtgctaattcttatagacctggtcatcaggaaagcagtctgaatggaagaaaccttattttccaagcacgaatatagaatctttcctataaaaggatctggggaccactcttttgaactattttaaaacaagcaaacaaaaatgatggcattccatttctaatatcctgtgcttgtaggctcaccctggctttcactgctccccatc

SEQ ID NO: 360782 - DNA, 519 bp, Homo sapiens
gttcaaaatcttgtgtgtccagaatcatccatcctgggatcctaatcttcatgctgattgtccaatgtaacatgttagtagaatcctggccccttctacatataacctgccattccatgtatctcaacactgttaaacctaacatataatgatttaaaaccctcctcaatacagaaaatcctacagcttctttctctattttttattgcacctccaaatactacaacttcaatatctggcaggtacctggaaaaactgccagttattcaagaagatttgtaagataccctttttatgtcaagaggcaatttggtgctaattcttatagacctggtcatcaggaaagcagtctgaatggaagaaacyttattttccaagcacgaatatagaatctttcctataaaaggatctggggaccactcttttgaactattttaaaacaagcaaacaaaaatgatggcattccatttctaatatcctgtgcttgtaggctcaccctggctttcactgctccccatc

SEQ ID NO: 360783 - DNA, 631 bp, Homo sapiens
aaaacaggcagtatgcttcactggtttttccactttagtaaaaccacccaacatcttgggaggctgaggcaggaggatcacttgaacccagcagtttgaaaccagcctgggcaacatagcaagacctcgtctctactaaacataaaaaataaaaaattaggcatggtgtcttgtacctgtagtcccagaaactcaggaggctggggtgaaaggattgcttgagctcaggaggtcagggctgcagtgagctgtgactgtgccactgcactccagcctgggtgacagagtgagacccctgtctctaaaaacaattccaaaaaaaaccccaaaccagtcaaccaaacaaaaaccataataacacattgaattaagcatccaccttttcctctttcacttcagtctgcctacgccagaaattaaaaaaaaaaagacagtagattattacatgttcatttagtccttctatgtgctcagctctgtggaaatcaatatcaaggaaacaaaggaagcataagaaatagatctggagaaaaagggcttgttatttattggaagaataaaatgcmggattgaggataagactataccaggttaatttttaaatacaacctatcagcatgatacatataat

SEQ ID NO: 360784 - DNA, 548 bp, Homo sapiens
ttaatacaaaatgtaaagactgctatggtttgaatgtaaaattcaaaaactcatgtgttagaaacttaatccccaatgcaatggtgttggtagatggaacataatgagaggtgttaggtcacgaggcctctgccctcatgaatggattaatgctgctataaaaaaggctcgtgggagtgggatyccccctttctgttcatctgctcttctgccatgtaagcacatgttgttcctcccctctggaagatctaccattcaaagcaccattttagaagccgacagaccaggccctaatctggcagtgccttggtcttggacttcccagcccccagaagtgtaagaaataaatttctattctttacaaatgaccccatttcaggtatggtattctattatagcagcacaaaacagactacaacaaagactaaatctgagcagttaggtaacaacatttcactgagagagaactttacagagattttaaaactttccatgacaactgtcatccaagatttcaatttgttccagtcatcaatcttgcttttagt

SEQ ID NO: 360785 - DNA, 548 bp, Homo sapiens
ttaatacaaaatgtaaagactgctatggtttgaatgtaaaattcaaaaactcatgtgttagaaacttaatccccaatgcaatggtgttggtagatggaacataatgagaggtgttaggtcacgaggcctctgccctcatgaatggattaatgctgctataaaaaaggctcgtgggagtgggatcccccctttctgttcatctgctcttctgccatgtaagcacaygttgttcctcccctctggaagatctaccattcaaagcaccattttagaagccgacagaccaggccctaatctggcagtgccttggtcttggacttcccagcccccagaagtgtaagaaataaatttctattctttacaaatgaccccatttcaggtatggtattctattatagcagcacaaaacagactacaacaaagactaaatctgagcagttaggtaacaacatttcactgagagagaactttacagagattttaaaactttccatgacaactgtcatccaagatttcaatttgttccagtcatcaatcttgcttttagt

SEQ ID NO: 360786 - DNA, 548 bp, Homo sapiens
ttaatacaaaatgtaaagactgctatggtttgaatgtaaaattcaaaaactcatgtgttagaaacttaatccccaatgcaatggtgttggtagatggaacataatgagaggtgttaggtcacgaggcctctgccctcatgaatggattaatgctgctataaaaaaggctcgtgggagtgggatcccccctttctgttcatctgctcttctgccatgtaagcacatgttgttcctcccctctggaagatctaccattcaargcaccattttagaagccgacagaccaggccctaatctggcagtgccttggtcttggacttcccagcccccagaagtgtaagaaataaatttctattctttacaaatgaccccatttcaggtatggtattctattatagcagcacaaaacagactacaacaaagactaaatctgagcagttaggtaacaacatttcactgagagagaactttacagagattttaaaactttccatgacaactgtcatccaagatttcaatttgttccagtcatcaatcttgcttttagt

SEQ ID NO: 360787 - DNA, 548 bp, Homo sapiens
ttaatacaaaatgtaaagactgctatggtttgaatgtaaaattcaaaaactcatgtgttagaaacttaatccccaatgcaatggtgttggtagatggaacataatgagaggtgttaggtcacgaggcctctgccctcatgaatggattaatgctgctataaaaaaggctcgtgggagtgggatcccccctttctgttcatctgctcttctgccatgtaagcacatgttgttcctcccctctggaagatctaccattcaaagcaccattttagaagccgacagaccaggccctaatctggcagtgccttggtcttggacttcccagcccccagaagtgtaagaaataaatttctattctttacaaatgaccccatttcaggtatggtattctattatagcagcacaaaacagactacaacaaagactaaatctgagcagttaggtaacaacatttcactgagagagaactttacagagattttaaaactttccatgacaactgtcatccwagatttcaatttgttccagtcatcaatcttgcttttagt

SEQ ID NO: 360788 - DNA, 494 bp, Homo sapiens
tgagagagaactttacagagattttaaaactttccatgacaactgtcatccaagatttcaatttgttccagtcatcaatcttgcttttagtgactttgttgcttgtggaactgaaaggtagagcctcctactctcttccctctgtgctggaaggcaaaactctctaaatgtattatatatataaatgtcatatcttaggacatttatgagggattcaagcataaagctttgatgaacagaaaattgatcctatgatatacatgaaaaggctaataaaaggcccagtatatcagcaaataaaagtttactatgttgctgagaatatgttaatgtcacattcttattaaaagaacakttataagtgcaacatgactcatttgaaatttggtagcattgagggagaatttattattcagagaagtaatcacatctgtgttgctttttcttcagctcctagagatttgacattaaaaatgaaagaaaagccagactct

SEQ ID NO: 360789 - DNA, 494 bp, Homo sapiens
tgagagagaactttacagagattttaaaactttccatgacaactgtcatccaagatttcaatttgttccagtcatcaatcttgcttttagtgactttgttgcttgtggaactgaaaggtagagcctcctactctcttccctctgtgctggaaggcaaaactctctaaatgtattatatatataaatgtcatatcttaggacatttatgagggattcaagcataaagctttgatgaacagaaaattgatcctatgatatacatgaaaaggctaataaaaggcccagtatatcagcaaataaaagtttactatgttgctgagaatatgttaatgtcacattcttattaaaagaacagttataagtgcaacatgactcatttgaaatttggtagcattgagggagaatttattattcagagmagtaatcacatctgtgttgctttttcttcagctcctagagatttgacattaaaaatgaaagaaaagccagactct

SEQ ID NO: 360790 - DNA, 575 bp, Homo sapiens
ccttttcttttcttcagaattgcacttattagaagcacatgtgtagtctaagatggacatcaaagaggtggaggrtggtggtgggagtggggtcagaggacgacagaggatacaaactcaactgcactgatgtcgtccctgagttcctgttcaggaaggcaggcagcatgtggaggagatgggtgagtcctggaggtccctgctgaaatctagcttttgcatgttctatcagatttggccacctggagataatggtgaaatccctgccttctgtttatattggagtttttgtctggaaacgaaaagaattgaaggttatttttttaagggtcctgggaaataattgtcatagaggtaacaaaactgtgctctggtttagacatttgctcagtagatattatctcatgtgtcaggcattttactgggtgctgagaatacagtggaagaataaacatggtttcctccttcatgaggttcatagtccaatgaggtgacaaatattatttactcaatcaataagccagtcaataagtatttattgaatgataattatgttctaggcataggggatatta

SEQ ID NO: 360791 - DNA, 575 bp, Homo sapiens
ccttttcttttcttcagaattgcacttattagaagcacatgtgtagtctaagatggacatcaaagaggtggaggatggtggtgggagtggggtcagaggacgacagaggatacaaactcaactgcactgatgtcgtccctgagttcctgttcaggaaggcaggcagcatgtggaggagatgggtgagtcctggaggtccctgctgaaatctagcttttgcatgttctatcagatttggccacctggagataatggtgaaatccctgccttctgtttatattggagtttttgtctggaaacgaaaagaattgaaggttatttttttaagggtcctgggaaataattgtcatagaggtaacaaaactgtgctctggtttagacatttgctcagtagatattatctcatgtgtcaggcattttactgggtgctgagaatacagtggaagaataaacatggtttcctccttcatgaggttcatagtccratgaggtgacaaatattatttactcaatcaataagccagtcaataagtatttattgaatgataattatgttctaggcataggggatatta

SEQ ID NO: 360792 - DNA, 537 bp, Homo sapiens
tagactcctttcataagaataaatcataggctaaaatgtttttagtctgaacaactgaaggaatgagcatagcattactttacttgtggggactcttgtgaagaagttggcagtcaaagaagaacaaataaaatgttgaaccagcagtagaagaataacctccaatttctctctttttgctcaatagtaagaataatagtggagaatgttgaagtctrggggaaggggtgtctgtgtgtgggtgtgtgtgcatatgtgtagggggaagggatacaatgaggagccatcaaagagtgaatgacttaatcatgtgttaaggaaaataggtaaaaatgtgttggttgaacatagcaataaggaagaggatctggatgaaggatgcttttatgatgctattaatatattttatatatatagcattgttttatatatatatatatatatatatatatatatatatatataataatgctattatatagttaagaaaggtaacaaaaatttgaactacctgactttggaatagcagctactagt

SEQ ID NO: 360793 - DNA, 537 bp, Homo sapiens
tagactcctttcataagaataaatcataggctaaaatgtttttagtctgaacaactgaaggaatgagcatagcattactttacttgtggggactcttgtgaagaagttggcagtcaaagaagaacaaataaaatgttgaaccagcagtagaagaataacctccaatttctctctttttgctcaatagtaagaataatagtggagaatgttgaagtctaggggaaggggtgtctgtgtgtgggtgtgtgtgcatatgtgtagggggaagggatacaatgaggagccatcaaagagtgaatgacttaatcatgtgttaaggaaaataggtaaaaatgtgttggttgaacatagcaataaggaagaggatctggatgaaggatgcttttatgatgctattaatatattttatatatatagcattgttttatatatatatatatatatatatatatatatatatatataataatgctattatatagttaaraaaggtaacaaaaatttgaactacctgactttggaatagcagctactagt

SEQ ID NO: 360794 - DNA, 490 bp, Homo sapiens
gggaaatgcaaatgaaaaccacagtgagttattatctgactccagctgaggatggctattatcaaaaaaacaaaaaktaacaagttctggcaaggatggggagacgaggcagctcttacacacggttggtgggaatgtaaactagtacagccattgtgagaaggttcctcaaaaaagccacagatgggctggatttcaggcggacgaggtttccataaaaaggaatcaaagtatcatcagtgagcttatgtcctactaggggatatggactcttgagaggaagtacagacctaatgagatcagagttgcttccatttaaaaagtttaaaatttgataaccatgctgttaattttgatggaaaaatgacagcctaggagaaagacctgggctttttgttgttgttattgacattattgctgaatctgttgggattccactagcttgcccatagcctcaggagaaattggtttttctgttcgttatcttggt

SEQ ID NO: 360795 - DNA, 597 bp, Homo sapiens
gagggagcctcaagagaaccttgtctaaacatgacatggaatttctccccctcccatagggtggagcatctaagggtaagaagagaaggcagagcaaaagtttcctcttaaaatgagagaggtgggccctaggcagaagtgtcagaagaagaatctctgcttgtctctttcagtcatggggacccgactccctgccagggcaacctacttatttttaaacatctccttttgtgataaagttcttccttattttaagttgaagctgcttctttgatattctacctttggtcctagttctgttttcctgacactcatgggataaatctacaaattattttggcagagttgaagtacttgagtatgttgttgtatctttattctctggcctacatttagcagttcttaactttcttacatctgaaatgtacaccttgtattcttacctgccctgtgtccgttcctccattcttgaactcctgagctcragcagtctgcttgcctcggcctcccagagtgctgggattacaggcgtgagccacaatgcccaacccattccccccttctcttttattttaatagcatccaatttttctttag

SEQ ID NO: 360796 - DNA, 575 bp, Homo sapiens
tttaacttgatataattccatttgtctatttgtgctttggttgcctgtgcttatggtgtattactcaagaaatctttgcccagaccaatgtcctrgagagtttccccaatgttttcttgtagttgcttcatagtttgaggtcttagatttaaatctttaatccattttgatttgatttttatatatggcgagagatattgggtctagtttcattctacatatggatatccagttttccctgtatcatttattaaagacactgtcctttttccaatgtatgttcttggcacctttgtccaaaataagtcaactgtaaatgtatggatttatttctgggttctgtattctgtttcattggtctacatgtctgtttttatgccacccagtaccatgctgttttgttactgtagttctgtagtataatttgaagtcaggtaatgtggttcctccagttttgttctttttgctcaggatagttttgattattgtgagtgtttgtggtttcatataaattttaggatcgttcttctatttacttaaaaaatgtcattggtattttgatagcaattgcactg

SEQ ID NO: 360797 - DNA, 598 bp, Homo sapiens
ctcacaccacctttaaaggtaagtaactctgctacctacttccatatcaagcaacattagaaatagaagcggcacagcagacaatgccayaatataaaatcttaagaaatgccaaggaattatatattatgcacaggtcaactctatatgcagctggttttctgtatcaatagatagtgtcaaagaatttgagttgtttggactatgaagccacttctcttccccccaaaaggagaatatctagctaaatctgagattaaagaggtggataaatgtgacccctggcctgcaaaagccaggaattagacacaagactatagcagggagtcttcaaagttgatctatcacagggatgtcttccatcagatgctagtgaagctaatccttttgcaaagcatgacaacttctcaagcttgactgtggtgaatccaaaccagatttttatgctatatgatcagctttcaaaatacaaaattatttttacattatattaggtttacatttattatatttaaatttacaaacaaagatatagaagcctgcaatgcagtttatacagcattctctgaactcccctgatgctcatctgccaggataa

SEQ ID NO: 360798 - DNA, 567 bp, Homo sapiens
gattcacagctcttctcctttccttcccaagcagcagcctctctgacaagaaccctctttgctcctgagcagcctatttgagggcaagcccttgcctgtggcactgtaacaacagcgaggagagccacatcttagagctaggaatccccaaagccyttttcctgctccagccccccaaagggagatttatccacataatgaaaactacctcgaatgttaaggaaagatgttagcaatattttctacattttctctgagattaccaaagtatgaatgtattgacttcaaggggataatgtgagaaaacaaagtggcagaatcaacagaaacccattcttccttcacaataacactttatttttctgaaatgattaggcaaggtagaaatgcactagtattctagaaatatggagtgaccttaaagtgaaatgtttaaaagctgcccttttgaatatctgtgaactgtattctgagctgttgatttttattttccttttttaatccacttgtgcccaatatgaatttgaaaaaaaaaaaaaaagctattttttcagtgctactataaat

SEQ ID NO: 360799 - DNA, 567 bp, Homo sapiens
gattcacagctcttctcctttccttcccaagcagcagcctctctgacaagaaccctctttgctcctgagcagcctatttgagggcaagcccttgcctgtggcactgtaacaacagcgaggagagccacatcttagagctaggaatccccaaagcctttttcctgctccagccccccaaagggagatttatccacataatgaaaactacctcgaatgttaaggaaagatgttagcaatattttctacattttctctgagattaccaaagtatgaatgtattgacttcaaggggataatgtgagaaaacaaagtggcagaatcaacagaaacccattcttccttcacaataacactttatttttytgaaatgattaggcaaggtagaaatgcactagtattctagaaatatggagtgaccttaaagtgaaatgtttaaaagctgcccttttgaatatctgtgaactgtattctgagctgttgatttttattttccttttttaatccacttgtgcccaatatgaatttgaaaaaaaaaaaaaaagctattttttcagtgctactataaat

SEQ ID NO: 360800 - DNA, 619 bp, Homo sapiens
ggaatacattcttgcagcctggatggtggggaattcttatccttacaccaagactgctgacatagcaatgaagagatgagcgctcacagaaaaatatgacagagaaggacaataagacagagaaagacaacctttgccacacataatttgcatgagcagctcctgaggggatggtaggccctggaaaatgtgtggaaagaacaagctgtttgtttgccataaggaacagaggtgcagaagcccagacatgtgccaaggcagtctgttgtaaaagggccctttctgtcccaaacccagcagcttttcccaaaggcactcttcaacccccaacatggtggcacattccaagggcarcagatctcccaggccagctcagccttactaagggcagtgggatctgactaggcccagaaagaactctctctagtaaagaagattgccatagaggcagtgagaaggatgtatgtgtgtaagtaaccaccatcaagaggttatgtgctataggaagataagcttttgcagaacagaaaggagaagtgctttctagagttcttactatttttagtgtcacagaaaaatatttactgtgttcaatcaccacatctattgaaggcaattt

SEQ ID NO: 360801 - DNA, 560 bp, Homo sapiens
tttttttttttttgctagtctggctaaagctttgtcagttttccttcttaggtgccaagcttctctggctgaatatcagcatggggayatccctatgtgttggtaatctctagctaatttaccagtagtccagagactccacattcagtcaaaatggctcatgtctgttcccaaccaacagcgaaccagtcctgagtttctcccttcagggaagtgggttcccctctagcccagggcaggtccagaaatgctgtccaggagctaaggactggaatcagggaccccaggagcccacttggtgctctcttcctctgtggctgagctggttcccaagctgcaaaacaaagtcccttttattcttccttcttcttttctcaaggtgaagggacgtctcccatagccatcacagctgggagtgtgctgggacacacctgaagccagcacagctctgagtcttaccaacaaggcccataaggagtactgtcccatgcctaccaccgctgactatttagaacttaagggctttttagtcagcagataatggattctgccagaactga

SEQ ID NO: 360802 - DNA, 661 bp, Homo sapiens
gaataagtagatctgggtggtctcaaagtcacatcagagcagaaaggatattaggagagataaccccaccttctgtatttgccatgtaaagcactcaaaagatgagctacatcagccatcttatgaaatgagagaagacgaattttaatctaacttgtattttaaggactccaacttgataaagttgagaatattcatgttttatttttcagctttcagactsagcaaggacacagaaagcagtgaatccccttcacttctacttctgagccacagacaatcacagataatccctgacttccctccctctgctgtaactcagaaactaagactgtggatttgcttggccccttccttcaaaccagtttgtttgcatatttttgcctggttgaaaaccatttttgtattttctctggcccagttcttggcaacagagtctcctccgtgactggggttgagaatagtgaagcagagagagccttttgcctggcacgtggacttccagtccacgggactccaggtgaaggcacctgcttcaaaggcagcaagaggagccggggagagagacaagcaaatgcagtgacagggaaagagacagtctaggagtggccttggtcgtggttgcctgattcagcttgcatatgcagaaatgaaaaacagc

SEQ ID NO: 360803 - DNA, 661 bp, Homo sapiens
gaataagtagatctgggtggtctcaaagtcacatcagagcagaaaggatattaggagagataaccccaccttctgtatttgccatgtaaagcactcaaaagatgagctacatcagccatcttatgaaatgagagaagacgaattttaatctaacttgtattttaaggactccaacttgataaagttgagaatattcatgttttatttttcagctttcagactcagcaaggacacagaaagcagtgaatccccttcacttctacttctgagccacagacaatcacagataatccctgacttccctccctctgctgtaactcagaaactaagactgtggatttgcttggccccttccttcaaaccagtttgtttgcatatttttgcctggttgaaaaccatttttgtattttctctggcccagttcttggcaacagagtctcctccgtgactggggttgagaatagtgaarcagagagagccttttgcctggcacgtggacttccagtccacgggactccaggtgaaggcacctgcttcaaaggcagcaagaggagccggggagagagacaagcaaatgcagtgacagggaaagagacagtctaggagtggccttggtcgtggttgcctgattcagcttgcatatgcagaaatgaaaaacagc

SEQ ID NO: 360804 - DNA, 661 bp, Homo sapiens
gaataagtagatctgggtggtctcaaagtcacatcagagcagaaaggatattaggagagataaccccaccttctgtatttgccatgtaaagcactcaaaagatgagctacatcagccatcttatgaaatgagagaagacgaattttaatctaacttgtattttaaggactccaacttgataaagttgagaatattcatgttttatttttcagctttcagactcagcaaggacacagaaagcagtgaatccccttcacttctacttctgagccacagacaatcacagataatccctgacttccctccctctgctgtaactcagaaactaagactgtggatttgcttggccccttccttcaaaccagtttgtttgcatatttttgcctggttgaaaaccatttttgtattttctctggcccagttcttggcaacagagtctcctccgtgactggggttgagaatagtgaagcagagasagccttttgcctggcacgtggacttccagtccacgggactccaggtgaaggcacctgcttcaaaggcagcaagaggagccggggagagagacaagcaaatgcagtgacagggaaagagacagtctaggagtggccttggtcgtggttgcctgattcagcttgcatatgcagaaatgaaaaacagc

SEQ ID NO: 360805 - DNA, 449 bp, Homo sapiens
ccattctgtgtcctcctggaccatgacagatggccgtcaccatacagtccgcagcaccgtgtcctcctgtgcctcctcatctgtggcctcttccccctctctttccttccttttattcccagggctggttcagggtttataatcatcaggctgactataaagcacccaagtattttcttttctcttcaggattcagagagtgtcctcagttctaaagtccctttmataagcaaataatcacctaattttacagactttaggcccagttcttatctttcttaagactagtctttttaaatcctctttaatttgttcctctagtctagtttctggcctgcttcttctgtttccctttccaccttttgtctccagctcttggttattgaaaccatcagcattattttgacaacagtagtgctatttatttgttcccctatttgttaggtgct

SEQ ID NO: 360806 - DNA, 449 bp, Homo sapiens
ccattctgtgtcctcctggaccatgacagatggccgtcaccatacagtccgcagcaccgtgtcctcctgtgcctcctcatctgtggcctcttccccctctctttccttccttttattcccagggctggttcagggtttataatcatcaggctgactataaagcacccaagtattttcttttctcttcaggattcagagagtgtcctcagttctaaagtccctttcrtaagcaaataatcacctaattttacagactttaggcccagttcttatctttcttaagactagtctttttaaatcctctttaatttgttcctctagtctagtttctggcctgcttcttctgtttccctttccaccttttgtctccagctcttggttattgaaaccatcagcattattttgacaacagtagtgctatttatttgttcccctatttgttaggtgct

SEQ ID NO: 360807 - DNA, 578 bp, Homo sapiens
aaaccatcagcattattttgacaacagtagtgctatttatttgttcccctatttgttargtgctgggtattttattgttgttgttctttttaatttttttttttttggtcaattccctctccgtgactcagtttccttatctgtaaaatagggataataataaagagctattgtaaggatgaacaagttaatttttgtaaaacacttagaacagtgcctgtatgtaataagtgccaaacatgtatgtaaaagtaagtaaaaatagcttactgttatttatagtaagctgttggcttggaaatacaagtggggtcagaggtgagtggaagaagtggaaaatgagtagaaagcaggaatattttgaaagtctacctgataaatacagttcatagtaattcttacataattttactgggcaagaagttcaaaattcaagacatatattagtctcttttcacactgctataaataactacctgagactgaataatttatgaagaaaataagtttaactgactcacagttatgcaggcttaagaggaagcatgactgggaggcctcaggatacttacaatcgt

SEQ ID NO: 360808 - DNA, 578 bp, Homo sapiens
aaaccatcagcattattttgacaacagtagtgctatttatttgttcccctatttgttaggtgctgggtattttattgttgttgttctttttaatttttttttttttggtcaattccctctccrtgactcagtttccttatctgtaaaatagggataataataaagagctattgtaaggatgaacaagttaatttttgtaaaacacttagaacagtgcctgtatgtaataagtgccaaacatgtatgtaaaagtaagtaaaaatagcttactgttatttatagtaagctgttggcttggaaatacaagtggggtcagaggtgagtggaagaagtggaaaatgagtagaaagcaggaatattttgaaagtctacctgataaatacagttcatagtaattcttacataattttactgggcaagaagttcaaaattcaagacatatattagtctcttttcacactgctataaataactacctgagactgaataatttatgaagaaaataagtttaactgactcacagttatgcaggcttaagaggaagcatgactgggaggcctcaggatacttacaatcgt

SEQ ID NO: 360809 - DNA, 578 bp, Homo sapiens
aaaccatcagcattattttgacaacagtagtgctatttatttgttcccctatttgttaggtgctgggtattttattgttgttgttctttttaatttttttttttttggtcaattccctctccgtgactcagtttccttatctgtaaaatagggataataataaagagctattgtaaggatgaacaagttaatttttgtaaaacacttagaacagtgcctgtatgtaataagtgccaaacatgtatgtaaaagtaagtaaaaatagcttactgttatttayagtaagctgttggcttggaaatacaagtggggtcagaggtgagtggaagaagtggaaaatgagtagaaagcaggaatattttgaaagtctacctgataaatacagttcatagtaattcttacataattttactgggcaagaagttcaaaattcaagacatatattagtctcttttcacactgctataaataactacctgagactgaataatttatgaagaaaataagtttaactgactcacagttatgcaggcttaagaggaagcatgactgggaggcctcaggatacttacaatcgt

SEQ ID NO: 360810 - DNA, 502 bp, Homo sapiens
aggaagcatgactgggaggcctcaggatacttacaatcgtggtagaaggtggaggggaagcaagcacatcttaccatggtggagcaggagagagagagaaaagagggaagtgccrcacactttcaaacaatcaggtctcccgagaactcactcactatcacaagaacagcaaggggaaaatctgcccccatgatccaatcacctcccaacaggcccctcctccaattcaacatgagatttgggtggagacagaaatccaaaccatatcatatattttggattactttcccaaaaggccattatattatatttgtccaaattttagtagctttcgctcctttcacttaacctggagagacttgccttataactcagacccctaagtttggtgtttcattttctggaggtgctcaatgttatcatcaagttatgcactgaagtaagtttctccatatctttactgctgaatgtgtcttctgacctaccagtgtctgaagggtca

SEQ ID NO: 360811 - DNA, 438 bp, Homo sapiens
gtctccttgagttcaactattttaattctaactcccacaaataagtggtaacctgtgaagtttgtctttctgtaacttgcttatttcacttaacataaggtcttccagttgtaacaaggtacacattttagcctcaatttcttcatctataaataagatctaaatatttactacttcccagaattattgtgaagtttaaatgaaattatattasgaaagcttgcagcaaaatattacgctattttacaagaactcagtaagtgttaatgtttaatattatggtgccacttgacacataaaaccataattttaaggtgcatatctttatatattacactgattaatagttaattcaagacagcgcagcatggcttgctcatgcatttaactaaggaatatgacaaactcaaccaaagtaataatatggttgggtttttc

SEQ ID NO: 360812 - DNA, 438 bp, Homo sapiens
gtctccttgagttcaactattttaattctaactcccacaaataagtggtaacctgtgaagtttgtctttctgtaacttgcttatttcacttaacataaggtcttccagttgtaacaaggtacacattttagcctcaatttcttcatctataaataagatctaaatatttactacttcccagaattattgtgaagtttaaatgaaattatattaggaaagcttgcagcaaaatattacgctattttacaagaactcagtaagtgttaatgtttaatattatggtgccacttgacacataaaaccataattttaaggtgcatatctttatatattacactgattaatagttaattcaagacagygcagcatggcttgctcatgcatttaactaaggaatatgacaaactcaaccaaagtaataatatggttgggtttttc

SEQ ID NO: 360813 - DNA, 613 bp, Homo sapiens
ccaatttcttttgctggaatttatattaaatgtacattgggtcctcataagttaattttgttgtctaaactactatttcatattatttaatttattaatcttttggtgctgcattctggagcaatttctcagtcagacacgggccaggcagtctcagggcagtttgatggcactgtagttgatgggggaggcctgcagcttgggggatgcagggctgttcagagggtggggttgtgcttgggcttgcatgcctctgacctccatgccctcctccatccctgcagctgagggcacccggcgcacagacccacctgcaggcaagcccgccatggtggccaatcgcaagggtggcctgragctgaatgccatctatgccaagctccaggtggtgttggagaagcgagctcaggctggctcccacgccgggagcagcctgccctccaacttacccattctatatttaacaatatgaagtttaagtttaatttgtgagatttaaaatttcaattattttttatagttttccattttctggatttctaattgtttctttttcacatccacttaacattgtttacttctgttttcttttatgatatcttttctttttaaa

SEQ ID NO: 360814 - DNA, 592 bp, Homo sapiens
tgctcacttcagtattttttaccctttgcctatggaactatcttttcaagaacacctacaaacatttgaaaatgtattagtgttttgagataaacagattatgaagcattgaccttgtgagaatcacacagtccaaggcaggtgcttatgacttgctcctctcaccactctgaagttattcaaatttaatgtgggcggtgrggcttggaatgggaagggctgtagctttgatgtgtcagaggatgactagaagaaggccagtggtggaagaaaaggcaagagagctgttcatctatttttgtttttgtaatatttggcaataattgagtaacaattatcctaatggattaatgtttatttggaaagttaccactatctgtttatgtttgcctcttaaaatttcatcaccacattgtctaaagacatttcattacttgtccttatagtcttaacaacttccccaagacttcaaataaggctttcaatctcctaccgaacatgggagaagtaagacactattctgccattttccttcaatctgctgttgtacgccaggatattcacttcttctcttatatgtctgttaacagca

SEQ ID NO: 360815 - DNA, 597 bp, Homo sapiens
tgggaaaacatcatctcagctgrccaaatcataatctaagagttcttattttgatcattgaagttatatttatagagcatactttactcttgttcacatttcctttgcatgtcaaagaaagtcaaatatgagtaatttttatgatatcttatgtcatcactatgtggccaaaggctatgattttatttattcaatatgtgtttgaaaatcagtgttacaaatctacaagctaagtgatcaggacaaatgtaaatcttgttttactcttcttccttgatttcaaggaccattcacaatctgtgctgaaggagtcatactagccatagtttattaataacattgtgtatctcacccagacccaaggccatacatactcaagatagtgacttctggtatgatctgagaagtgccaaagatctctttcacaaaatacctccccccaattactcttgaaattctagaggccagccttttgagttatcagtgttttctttgacaatgattccttatgtcattgattttccaaattttgtgccatagcaatcacctaggggaaatggtttgataggtagcatttctgattgatccagtgggtcc

SEQ ID NO: 360816 - DNA, 601 bp, Homo sapiens
aataaatatgagggtgcaagtatccctttgatatactgatttcctttcctttgaatcaatacccagtggtgggattgcttgatagtatggtggttctattttttagctttttgaaaaatctgcatgctgttttccatagtggctgtactaatttacattcatgccaagagttcattatattttttgggtattagtttcttgccagatgaatagtttgcaaatattttctcccatttaacaggctgtatctttattctgttgattgtttcctttgctgtgtagaagatttttagtttaaaacagtcccatttgtctctttttgttttggttgcctgtgcttttgaagtcttaaccataaaaatctttgcatagacttatgtccttttcccctatgttttcttctagttgttttataattttgggtcttatgtttaagtctttaatccacattgagttgggttttgtgggggtaagkataggggtccagtttcattcttctgcacatggatatccaattttcctagcaccatttattgaagagggtatcctttccccaatgtatgctcttggcatcttcgttgaaaatcagttgcctgtaaat

SEQ ID NO: 360817 - DNA, 490 bp, Homo sapiens
tttccgctccctccaaaaagaggaggaaaactatccatttatcagtagcagtgtgaaaggagaagatttatcattttaaatttttcattgcagatggttttcattttaaaaggcggggaagtgatttttttkaaatcattttttttcttaatgcaattgagccagacgtttctcgtaaatcttgttgctttagtagacaatactcaattctctaaactttatatgcaatatccagcttttttttttttaaagatgctcccgggcatgaaaatgaaagccatctgagaggtggcatcatattcaaaatatgccatcctggctactccccttctccttagctcacacttcatctaagatgttcctctttgcgctcaaacaaaatggggagtctcaatgagtttttaaaagatttctttctcccttttttttggggggggggtaaataaatgagcctgccagtcaatatatctttcaagttggatagcaaact

SEQ ID NO: 360818 - DNA, 490 bp, Homo sapiens
tttccgctccctccaaaaagaggaggaaaactatccatttatcagtagcagtgtgaaaggagaagatttatcattttaaatttttcattgcagatggttttcattttaaaaggcggggaagtgattttttttaaatcattttttttcttaatgcaattgagccagacgtttctcgtaaatcttgttgctttagtagacaatactcaattctctaaactttatatgcaatatccagcttttttttttttaaagatgctcccgggcatgaaaatgaaagccatctgagaggtggcatcatattcaaaatatgccatcctggctactccccttctccttagctcacacttcatctaagatgttcctctttgcgctcaaacaaaatggggagtctcaatgagtttttaaaagatttctttctyccttttttttggggggggggtaaataaatgagcctgccagtcaatatatctttcaagttggatagcaaact

SEQ ID NO: 360819 - DNA, 546 bp, Homo sapiens
cttttttggcaaagactgctagctgcttaccaaatcgatgtgtttttcttctttcagtcacataagcagaatacattttgtatcttcctttgcagttaggtgaaaccatttgtctgggttctagtaagtgaaaagttagttgaaataatctgtgccatttttgggccaaggcttttgagaagcaggcatgtattcttcatgccctccttcccctttctgctggctaaatgcaaataaccagaaagatttagaagattgtggagccgcaaagtggaaggcaccatttttcctgaattatcacgtggtagggagccaygagctaagaagaaatagacctgccttaaactgtctggttattaagaaataatctactattttatatgagccatttgtcttttatttgtttttctccccctaccttcacgtatatccttgagtctttgctgcttggttgatcatgctcttgtgcttcttccagccagagtttttagagatgctgctctaagataactctgtccaatgttccaagcactggggggaaaatac

SEQ ID NO: 360820 - DNA, 569 bp, Homo sapiens
aagtagaaaagtcatcaggagatttgtgctttcctagatattgaaacttataatgctacaataactaaaactcttaggcattgaaatgagcatacacacagagaaatgaaacagaaccaatgttcaggaatggatagaaataaaacagatatttaataaatgtgaaattccatatccatgaggaaaatgtgggttattcaataagaggtattgggacaatgaaattaaacatctttaaaaattatccatgctctacttacctcctttctttcaacaaaatatattttagatagatcaaacatttaaatgaaaaagttgaaggcattaagttactagaagaaaatagagwcttaaaaaatctcagagtggggaatggctttttaaatgtgagataacttagaaatctaaaaaacttgaaaaatttgccataaagtgtacatgagaaaagcatcataaacatacacaaaaaataaataaactctgaaaaaataattggtaaacatatattatagaacaaaggctaatgtccttaatatgtaagaaatttatcaaattaatccaatagtaca

SEQ ID NO: 360821 - DNA, 582 bp, Homo sapiens
aagagatgcaactgaaaattcaataaagatttacagaaagttctttcttttgcagacaacaaggaagttctggcagatgaatggaagctaagctctcctggatggagagtgttagaagagacactggaaactcagtcccaagatgctcagtttagtgttcctattgttacaacctgtgacttcacacagaatgagtgaacaatgaacatctcagcaattgataaaatgatccttcaccagccaggaccttttaaaagaattgtcttataacttcatcttaaagagcatcttctgacatttgtttgctgaaacatacattacacttctgctatctcattccttttccacatatgcttcctaagcctggctttatattaaaatatgaaagttactgggaaaaataattccactttcaagctgtaggccttttcctacagctcaaaattatcacatttatttgaaagamgtttctttaaaacatctggaagatacaccaaagtgataagctggagagaagaaatcctttgctccaggaatacattcttaaatataatgctgaagaacataatacaaacaggaaaa

SEQ ID NO: 360822 - DNA, 513 bp, Homo sapiens
tctggcattctacaagtgaaaataatttataaggtccaacacttcaaagtggtgtgcctgatcattggtgcaacacagatgaggtccaaactaacatgtccaggtacaacaaatacttacattgctatacggtaatttctgatgtgtgtccaccaccccaagtaatagggaagctatatttctgagttaatatatgccataaattaggtggtaatcatttgttccttaaaaagtaatatttttccatctgctgacaaacagcttatgaatacaaacaacagatttcccaaatgcctgtttaaaaatttcagtacagtatttgttgtgtcattttacctcacctataaagattgttctctgaagtttcctgttgcagcaagaaaggcaaaactggaggtrccgtcctatcagcgcgcgtgtgtgtgtatgtgtgtgtatatgctagagagagagcgagagagagagggagacagagaggacaagagacagagagaactagttttcttctttttt

SEQ ID NO: 360823 - DNA, 347 bp, Homo sapiens
gtttggtttctaaaaaatattcttctgctstcatccaacagtacagaacaccatttcttagcctttgtctgccattcagctcccattgaaaatctgagaagagaagccatacttactgtagatgatttaaaacccattcattgctctaggaattctaaaatggtataaatatagtaccatatatgtgtatatatgtacatatataatgtataaataaacaaggataaaagatataaaaatgcacacaaaaattggtgagcatttttggattttcaagcaacattattattacctatttgtgttagttatgtttgccatagaattatcactattcaattagtttttac

SEQ ID NO: 360824 - DNA, 509 bp, Homo sapiens
acgtctttcctgagcgcaacaattgtcagccttccttccccgtcctttcttttttcagttcaggttatcacagaaacaccaaaaatccttatttctttactgtgtaaagtaagctcctagagtattggcctttgtgtcagatagcgctagttttttcttcatctctttcccctggcccttagcacttcagagcttgccggtctgacttccaactaacagcacctccatttacttacctgaggctttatctggccaccaaattttgttttatctacaggagcagcaggtttgaagtgcttagagagtaacacctatccttctccccaatccagcacccctagaccagtaactgagagaatgtgctgtgtaaatacgcgagtggtctcatcttcggttagagtggatgagtctaagtgtrtgttttacaccagtgctcacatttccgcagcaagatcaggctccacttgcctacagtggtaaggtgcttgctaaaaactatctgggccgcc

SEQ ID NO: 360825 - DNA, 509 bp, Homo sapiens
acgtctttcctgagcgcaacaattgtcagccttccttccccgtcctttcttttttcagttcaggttatcacagaaacaccaaaaatccttatttctttactgtgtaaagtaagctcctagagtattggcctttgtgtcagatagcgctagttttttcttcatctctttcccctggcccttagcacttcagagcttgccggtctgacttccaactaacagcacctccatttacttacctgaggctttatctggccaccaaattttgttttatctacaggagcagcaggtttgaagtgcttagagagtaacacctatccttctccccaatccagcacccctagaccagtaactgagagaatgtgctgtgtaaatacgcgagtggtctcatcttcggttagagtggatgagtctaagtgtatgttttacaccagtgctcacatttccscagcaagatcaggctccacttgcctacagtggtaaggtgcttgctaaaaactatctgggccgcc

SEQ ID NO: 360826 - DNA, 227 bp, Homo sapiens
ggttcataatatctcaacattttctgattctgcctcacctcatctaagctactactgatgcccatttgckgtctccttttattctttcctcctttgtttcctccttttaaaacacattctactcccttttaaaatttgacacattaactcatttaagtagtatttgctgtgttcctattatatgtcagacatttgctcggtactgagttgatagtggtaaatgaaac

SEQ ID NO: 360827 - DNA, 669 bp, Homo sapiens
tttaatatgtataaaaattacaatagatacaagtgtaaaatggtgtgagattgatttcatcagtcttgtcacataagaagaataaacctctgggtcactctccgctgcacgatggcataataaataaggaaaacatggtcatgactccttctctatgagagatgcgatagttgattaagtgcaatctattagtagctgccagtaacaagaaaggttaatttaaaccagatagtctcaggtttcaacctcttctatggctgcaaatctggataggtgtcctttgcttactggttcaagctactgacaggcagacctgaaatggttttggcttctgtctgtggccccagagccaggcaatccaataacagtcttttccctttaactctcaaacatagggatgatagtggctttttgctactgtaatgtctgggttgccttattatcatttgtttggcttctcagcacctccctctattaaaattcctcctatctggagtgactattgttgtcctgattgatacgctatccttggttttattctgaactatggraatcatagacattagttgtaacatccaagactcaaccttgacttctcccagtgatcctacctttccaatcattggtgatcataccatcttcagttgtatttcagaggggacttacatg

SEQ ID NO: 360828 - DNA, 622 bp, Homo sapiens
ataaacattttgcttatccattcgtccattgatagacacttaggttgctttcacctttcagctattgtgaataatgctgccatgaacatcagcatttgccatgtgctgtatatatctgagaccttgctttcaatttgrggggatatatacctagaagtgaaatggctgcaaaagagtttgatatctaatagttatagatattttcacactattaaagaaatcactgatgctctattaatattatagtcagttattgaatgttcagacctgacactagacactgggaatgtaaagatcaataggatgtggtccctacttttagaaagctcactcacaagatttcaacttcatgatgtataaacattcattgagtgcatgtgagtcctaagaaagaagagaaaggcttcataggggaggttacttttgagctgattctcaagttataagtagaaatttactaggtagaggatcaaggaaaggcatcctaagggaaagaaataacaggtacaaagacacaagaggtggaatagcacagtagactgagggaatcatgaggtcagtgtggctgtaacgtaggctgcgaggcaggaaccggagaatgaagaactagggtgaggccaga

SEQ ID NO: 360829 - DNA, 568 bp, Homo sapiens
catgcattagcagccctgagttgtacatttcccagctacatcatgagaggaaggcatggcagcccttgaaggtgtgtgtgtttttttttctccctgagaagagacagaacgaaaatagcaattatttttttgaatctagaataaattgctaaaaatttgacttggaaaagtaatcatggaattgtgaatactyttcctttcacgtgtgaggagtcagaagcataatcgttaaaatgatttcgagggaaatttttaactaagcaaaagagttaacatgtcagtcagaaagtaataggttgtttgcattgactgggccatgtgtcaatgtttttggcatatatagtttgagtaggatagtaatccttgatatacagggtaaattgcttagcatttcaaatatcccttcagttttggggaataggtggtgatgaagttcaaagtgtggcatgttgtaccccgtcttcagatacggctgcaagtgtgtacttatctgtctagcattagaatcctgggcggatttcttttactggctctgtctctggtttaggagagctgccacctaggatgc

SEQ ID NO: 360830 - DNA, 568 bp, Homo sapiens
catgcattagcagccctgagttgtacatttcccagctacatcatgagaggaaggcatggcagcccttgaaggtgtgtgtgtttttttttctccctgagaagagacagaacgaaaatagcaattatttttttgaatctagaataaattgctaaaaatttgacttggaaaagtaatcatggaattgtgaatacttttcctttcacgtgtgaggagtcagaagcataatcgttaaaatgatttcgagggaaatttttaactaagcaaaagagttaacatgtcagtcagaaagtaataggttgtttgcattgactgggccatgtgtcaatgtttttggcatatatagtttgagtaggatagtaatccttgatatacagggtaaattgcttagcatttcaaatatcccttcagttttggggaataggtggtgatgaagttcaaagtgtggcatgttgtaccccgtcttcagatacggctgcaagtgtgtacttatctgtctagcattagaatcctgggcggatttcttttactggctctgtctctggtttagkagagctgccacctaggatgc

SEQ ID NO: 360831 - DNA, 563 bp, Homo sapiens
caaaggaaattccattcctactctaaaaattgaaatggcagcttatattttaggtggtcttagcattagttattttccaaggagaaagaaaccagtgttatttttctaaatgaaaagaagctagtgaaaaaaattataaatattgcttggtttccaattcttaagggagtggtgtccagagagaaacaaaatgccttgttttgatgtcatttgaatgtccaaagttgatacctttcacaaatggagtagatacctctgtggcttgcctggagaactttcagaatagcctccaaactaaaactattttattcaccagcttgcctccatacctgaaatccctactagttacattctttttctgtgcctctgcattccttataagaattctactacttccttaggccaggygcagtggcacacacctgtaatcccagcactttgggaggccgaggcaggcggatcacctgaagtcaggagttcgagaccagcctgaccaacagggagaaaccctgtctactaaaaatgcaaaattagctgggtgtggtggcgaatgcctgtaatcc

SEQ ID NO: 360832 - DNA, 622 bp, Homo sapiens
attcatttacaatcagggccatgcgggatgtggggggaaatgttgcaaagctttatttcaagactatttttcactttacaaaatgaagaaactcctataatttcccatagctttggaagaaccacataaatataatctcacctctgaatttactatacctcacccaaccttcccatgttttgtcttctagataggttgcagttaccaagwtttgcctccatcatttctgatttctttgtacaaataaattcatagactcatgacaagccttggatttaaaggtttcattgtgctgttaatggaaaaactagcacacaaccttgcttctgccattgcccaccaaggtgcatctttttaaaaaaatttatggcttaatcaaagccattgcctatatttatattttaatactaaattttcctatcaaagatgatatgtaaaatattgaattatatacaggatacaaaataatctagtttttaatactccaaaaatatctgcccatcaaaaagtccctctgcatccccttctcattaggatgcataaacaatagtacgtatacaatggctacactggccagtttaagagtttttcccagcatgagttataaagctggtcaagttag

SEQ ID NO: 360833 - DNA, 495 bp, Homo sapiens
catcatttctgatttctttgtacaaataaattcatagactcatgacaagccttggatttaaaggtttcattgtgctgttaatggaaaaactagcacacaaccttgcttctgccattgcccaccaaggtgcatctttttaaaaaaatttatggcttaatcaaagccattgcctatatttatattttaatactaaattttcctatcaaagatgatatgtaaaatattgaattatatacaggatacaaaataatctagtttttaatactccaaaaatatctgcccatcaaaaagtccctctgcatccccttctcattaggatgcataaacartagtacgtatacaatggctacactggccagtttaagagtttttcccagcatgagttataaagctggtcaagttagtcatgagaaggctttgttttctagcacacagtttttattctcagaaccacctgctttaagcatgatgtcaacacatccctaagtgtacatt

SEQ ID NO: 360834 - DNA, 584 bp, Homo sapiens
ggtatatgctattttttaaaataataaagcagggtaagagagcttaagtgtgaagactgggaagaaagataaaatgtaagataatgtagctggggtagctatacttgcayggtgacatttgagcaaacacttgcaagagattagttagacatgtgggcatctgggaaaagatacttctagaaagagcaaatagtcagtgcaagttgcgaagtatcttccatgtctgagaagcaacagagtggcccgtatggctagggcagagggaataacaaagagggtagaaaaagatgatgtcagagaggtaataaaggccaaaaaacgtagggccttgtaagccattttaaggactttggcttaattattatgcaatttttcggcaagtggttaaccattttaaggcttactttatttaatatgtaaaaagaggagcaaccaactaaaaaagaggtactgctaataaaccaatatgaagttgaaatgaaataataaatattaattgatccaaaataagataaaaaacaaacacataaaaagagggaaaaaaaggaacataaaagatggagatagctaattaaacccaacca

SEQ ID NO: 360835 - DNA, 546 bp, Homo sapiens
ctttcaagtcttattatttaagaaatatattttgtggccaagggtggtggytcacacctataatctcagcactttgggaaattgaggcagaaggatagcttgaggccaggagttcaagaccagtgtaggcaacatagtgagacccctatctctaaaaaaataaataaataataaaataaaaataaagtaatgcattttgtaaggttatagctgccgtagattgtgattcgtctgatggatctgggtaaagtaaattgaaaacctgcagaaaggactcaccatttatgatgtcattaatgaattcatgattcatggaaagaggtcaaaatgttagcactaacaggaatttggaagaagccaattccaaaccttatgagtgactgattttcatgggttcaagatgtcaatggaggaagtaacttcagatatggtgcaagttagaagaaaactggaattcaaagtggaacctgaagatggaactgaattgctgcaatcttacgataaaacataaggataaggataatgttttttatgaatgaacaaaga

SEQ ID NO: 360836 - DNA, 668 bp, Homo sapiens
tacttgatttttttaacataatactattggacacttaatagatgacaatataatgtaaatacaacttttgtatgcactgggaaatcaaaaaaattatgtgactgactttattgcaatatttgctttattccagttgtctagcaccaagcctgcgatatctctatcgcagaacctgtctatagaacctgcctataaaaagataatgcatcataatcaaatagggtttatcccagcagtacaatgttggttaaacaattgaaaagcaatcaatgtaattcaccctattaacatactaaaacgraaattttaggacaatcttaatagatgcattaataaatgtgacaaaatactaattcttgagaagaatgactatgaaattaagaatagaaaagaacttcctcaatttgcgaaagggcatatttgaaaaacttgcagcttgcatttacttattggtgaaagaccttgtatgatcaagaacaaggaaaggattccctcttccaccacttctattcaacattatactgactgtccttgccaataagaaacaaagtaagaaataaatggcagacaggctagaaataaataaaactttatttgcaagcaacatgatcatctgtgtagaacatcctagtaagtctgtaaaaaagatactacaattaataaatgaa

SEQ ID NO: 360837 - DNA, 668 bp, Homo sapiens
tacttgatttttttaacataatactattggacacttaatagatgacaatataatgtaaatacaacttttgtatgcactgggaaatcaaaaaaattatgtgactgactttattgcaatatttgctttattccagttgtctagcaccaagcctgcgatatctctatcgcagaacctgtctatagaacctgcctataaaaagataatgcatcataatcaaatagggtttatcccagcagtacaatgttggttaaacaattgaaaagcaatcaatgtaattcaccctattaacatactaaaacgaaaattwtaggacaatcttaatagatgcattaataaatgtgacaaaatactaattcttgagaagaatgactatgaaattaagaatagaaaagaacttcctcaatttgcgaaagggcatatttgaaaaacttgcagcttgcatttacttattggtgaaagaccttgtatgatcaagaacaaggaaaggattccctcttccaccacttctattcaacattatactgactgtccttgccaataagaaacaaagtaagaaataaatggcagacaggctagaaataaataaaactttatttgcaagcaacatgatcatctgtgtagaacatcctagtaagtctgtaaaaaagatactacaattaataaatgaa

SEQ ID NO: 360838 - DNA, 515 bp, Homo sapiens
ttccatacactatttcttacgtagtttggatctggtctgagcagactgctatactgagttccatgctaactaaaatccctggagactttgtaaaggcatcactttcagcactcctctggctgactaagaaatgccagtggctccattaggcaaactcccataggaacatctccattctctggggttctcccgacatcagcttggccttaaagattatgagcatctagggaaggagtggggaaatgtcagtgcgtgtgtttgatttgaatctgtgtgtgcagtattgaagacttgagtgtccctaaayggtatttaaataaatgccaatgttcagggctggctttatatataagtgggttaggcctctacctatttgacttaaacacaccaaagcatcctcggctggaaatggaactcctatcaggtagtactccagccctagaagtactttctttaaaaatgttgaatttgacttggttaagatattgcttcatactttcttagatagacagcag

SEQ ID NO: 360839 - DNA, 515 bp, Homo sapiens
ttccatacactatttcttacgtagtttggatctggtctgagcagactgctatactgagttccatgctaactaaaatccctggagactttgtaaaggcatcactttcagcactcctctggctgactaagaaatgccagtggctccattaggcaaactcccataggaacatctccattctctggggttctcccgacatcagcttggccttaaagattatgagcatctagggaaggagtggggaaatgtcagtgcgtgtgtttgatttgaatctgtgtgtgcagtattgaagacttgagtgtccctaaatggtatttaaataaatgcyaatgttcagggctggctttatatataagtgggttaggcctctacctatttgacttaaacacaccaaagcatcctcggctggaaatggaactcctatcaggtagtactccagccctagaagtactttctttaaaaatgttgaatttgacttggttaagatattgcttcatactttcttagatagacagcag

SEQ ID NO: 360840 - DNA, 469 bp, Homo sapiens
ttcttcattcctcctgccaaaagtcaagtttgatcttaaaaaactagacaaggctgagcttttaaaatgggcaatcaggtagtcccactaaaactaaatgagcaagcctgagaaaatctgggctgactcccctacagctgcccccatacctgcatagtttggatcagaaaaagtgaatccrtgtaatccttagccaccaacactagctgactagccagttcaggctcaacacagaatatcttgattagcagcatggactactgattccatgacagaaactgaattgataaatgcttttttaggaaagaaaacgctatttcatttttactctgataaatgatcccactcttccagaataaagttgaagaacaaccagtgacaataacgttaatagttagcattacttgagaaaatgctgcacaactggcacagttctaggctctttacttttatggtccacactaacccc

SEQ ID NO: 360841 - DNA, 633 bp, Homo sapiens
ttagtgagtgtttttaacttctctgctttctcaagcacaggcagtaacatggggtcaggttccgggctcctrtgccccttcacgtcccctttctctacaaggagctgcctttgatatacaagggagcttctggccgaaagaatgcacaaagcccaggaagaaatgaggctgctaggaatgtaattgagatttagttattaaattcaggaaataattggagttgaacagtctttctaagaagaaggtatattttagccccacataaaaatgaacttgaggccacagtcagtagggaaaggttttcacaggactctttgaagctttccacaatattcagaagcccataaagctggacacagctttttttttttcctttaaaaaaaaaaaaaagaaaaagaaaaaaagagttttcttaggttgggtgagaatattgagtcccaggaaggaaataggataacccaatatacattatagtctatttacgtaggtttcaccatggagccaaaccaccacaactacctgactggcctgtaatgttattgttgggctcttcagtattgaaatttccttaggtgggatccaagatagctttcctgatacaaaactatattccacaagtaatattaaaataag

SEQ ID NO: 360842 - DNA, 633 bp, Homo sapiens
ttagtgagtgtttttaacttctctgctttctcaagcacaggcagtaacatggggtcaggttccgggctcctatgccccttcacgtcccctttctctacaaggagctgcctttgatatacaagggagcttctggccgaaagaatgcacaaagcccaggaagaaatgaggctgctaggaatgtaattgagatttagttattaaattcaggaaataattggagttgaacagtctttctaagaagaaggtatattttagccccacataaaaatgaacttgaggcmacagtcagtagggaaaggttttcacaggactctttgaagctttccacaatattcagaagcccataaagctggacacagctttttttttttcctttaaaaaaaaaaaaaagaaaaagaaaaaaagagttttcttaggttgggtgagaatattgagtcccaggaaggaaataggataacccaatatacattatagtctatttacgtaggtttcaccatggagccaaaccaccacaactacctgactggcctgtaatgttattgttgggctcttcagtattgaaatttccttaggtgggatccaagatagctttcctgatacaaaactatattccacaagtaatattaaaataag

SEQ ID NO: 360843 - DNA, 608 bp, Homo sapiens
ttagacaaatgaacaatttcaataaagagttaacacatctgttttagtaagtgataaaacataaaaacttggaagctacatagaaaaatttaatgatatgatcaaaaagaaatgtaattgaaatatatgaaacaaagtggccaccaatttcagaatatacattcttaaggatatattacattttttccaaattgaccatatattgggcaataaaacaatttcataaaatttcaaaataatatataatatgacttcatattatatgattttcagwtctcaatggaaataagatagaaatcagtaaaactataactggtaaatccccatatttttgaaaattaggcaatatacttttaaatgcaaggatcaaagaaaaatttaaatagttttagataacatgtgaaactaaataataatggaaatatgacctattaaaacttgtggaatgctgctaaaattatttgtcaagggggttatagctttaaatgtatgtattcaacaaagaaggaagactaaaactcaaagcttgcatctttaaaaattagaaaaagaatagatatttaagacagaggatagatggaaatacataaagaaatttaagaataagt

SEQ ID NO: 360844 - DNA, 569 bp, Homo sapiens
aagtatccaaatcattttacaggtgaggaaactgaggctcaataaagaaactaacttgtccaaagaatgtatggaaacacagggtggttgagtggccatttatgcatcaaacctgtatcatttgccttccatctttgtacttgagcaacactgttgaatttattgtcctcagatatttcagagatgtgtaatgaagtcattatagtgatatgcaggtttttgttttttttttttgacagagtcttgctctgtcaccaggctggagtgcaatggcgtgatctyggctcactgcaacctctgcctcccaggttcaagcgattctcctgcctcagcctcccaagtagctgagactacaggtgcacaccaccatacccagctaatttttgtatttttagtagaggtggggtttcaccaagttggccaggatggtctccatctactgaccttgtggtctgcccgccttagcctcccaaagtgctgggattacaggcgtgaaccaccatgcctggcagtagtttttaatttcaaagcagtatttactgaggtcaagtaaagtaaaatgaattata

SEQ ID NO: 360845 - DNA, 574 bp, Homo sapiens
ttctgtgaatgttgataacttaacattgacaaatgatcacattatcattaatcagagtgtttgattgagtacctgcatattcatcatgtagacrctggctttaaacttgaagcattcctaaataatcatatatatcaggtttagaggaggggtagaaatgacatggatatatggacagtaaatttgaattactcttctaacttgaaaatcacttcattgatttggaaagaagaccacaaactccatccagttattcatgagctgaaatggaataatgagaatgggaatgaagaagtacccttattcccccaatgccgcatgtctggctgcatggtatcattaatatttatagtttttgaaaagaaaagtacccttattccaaggactttcactacttattgatcatatttaagatctcagctagcccttacgtatgcagctgtgggctacatggaattaccaaatcaaataattaaataatagctcttttcgtgttgcccaaattcattgatggctctggtgtactcagagcatatatagatggtgtggaataatgtcaagagcatggagtaga

SEQ ID NO: 360846 - DNA, 574 bp, Homo sapiens
ttctgtgaatgttgataacttaacattgacaaatgatcacattatcattaatcagagtgtttgattgagtacctgcatattcatcatgtagacactggctttaaacttgaagcattcctaaataatcatatatatcaggtttagaggaggggtagaaatgacatggatatatggacagtaaatttgaattactcttctaacttgaaaatcacttcattgatttggaaagaagaccacaaactccatccagttattcatgagctgaaatggaataatgagaatgggaatgaagaagtacccttattcccccaatgccrcatgtctggctgcatggtatcattaatatttatagtttttgaaaagaaaagtacccttattccaaggactttcactacttattgatcatatttaagatctcagctagcccttacgtatgcagctgtgggctacatggaattaccaaatcaaataattaaataatagctcttttcgtgttgcccaaattcattgatggctctggtgtactcagagcatatatagatggtgtggaataatgtcaagagcatggagtaga

SEQ ID NO: 360847 - DNA, 640 bp, Homo sapiens
aaaaaaaaaattaaataaagcttacttcacatgcaaaaacaaatgaaaaagatactaggtataggctacactgtatgtggttctatataatgaagattaaccatattaatattcatctttaaaattaaaagcagtaaaagttaaagctggtgttaaaagaactatgtccaaagcttagttccaggagttactggtgtagcaaatatctttgctgtctgtctctcattttcttcctttggaacccagggggaaattgccacctatttcccaaggctgttacaagaagtaaattgacctagaatatgctaagcagctacagcagtgcctggctgttggcagacactcaatgagtatagctgaatgagattctttgtagcttataatctaacaatgacacatattaacatgttgcagatatactgatttttaacaactgagcrtaatacaggtgaaaatattagtgcttgtttttttatcattgtgttttaacaatcaggtgataagacctgagggcaaggcaggatccccgcacaataacctagataagagcacagactctgagccacacagccttggtcaaatccacttaccagctttaggccctgaggaaagtcacttagcctctctatgcctgttcctt

SEQ ID NO: 360848 - DNA, 554 bp, Homo sapiens
ccagttcagatgacttagcatttatatcttcaggccagagagagtgtctcaatttataactgtatattagatgacaaacattacatgtctacttagatgtctcaaagacacttctaagaacaaacccaaaagtaaattcagggtcattgtctccacaaaacatgttcctcttcgagtttttctgctcagcatgtagtatattcttgccatctctctatttcacttcttcccctatacgtcaagtcctgtaatgcstatcctccaaatgtatcttaaatccgcctacatcttataatccccactaatgacatggatccctgcactgacctcttatgtggttaccttgtactcactcttgccttcctccaattccttctctacagagtaacaagagtgacctcttaaaaatgactcgaatcccattacacctttccaaaaatgcttcagaaggcttgtgattgcccttataataaagtatctaatattgaaggtaccctacaaggacttacatgaggtccttcccaattgcctctcctgcatcatcatcctgcatc

SEQ ID NO: 360849 - DNA, 554 bp, Homo sapiens
ccagttcagatgacttagcatttatatcttcaggccagagagagtgtctcaatttataactgtatattagatgacaaacattacatgtctacttagatgtctcaaagacacttctaagaacaaacccaaaagtaaattcagggtcattgtctccacaaaacatgttcctcttcgagtttttctgctcagcatgtagtatattcttgccatctctctatttcacttcttcccctatacgtcaagtcctgtaatgcgtatcctccaaatgtatcttaaatccgcctacatcttataatccccactaatgacatggayccctgcactgacctcttatgtggttaccttgtactcactcttgccttcctccaattccttctctacagagtaacaagagtgacctcttaaaaatgactcgaatcccattacacctttccaaaaatgcttcagaaggcttgtgattgcccttataataaagtatctaatattgaaggtaccctacaaggacttacatgaggtccttcccaattgcctctcctgcatcatcatcctgcatc

SEQ ID NO: 360850 - DNA, 446 bp, Homo sapiens
actcactccttctagttcattttccacacatgcccagagtgatccttttaaaatatgtgagatcatgccactctcctccttgttagctccaagagcttttctgtgcactcacaatataatctaggctcctcaccataagttgcaaggtctcacaccatctgtggttggccacctcttcaacctcttctcctgctagcagtatccacctcacttgcctgctagccaacttccctgagctccttgctgttcctcaaactaagttagtgtgatcccatctcagggcctttgtacttgctgacacasttttccagatatcgatgaggtttgctcccccacttcaatgaagtttctattcaaatatcaccttctcaaagatgacatcctcaaaaaaaataccctcctccaacaaccccattctcatttgtctttagtttccctcacagcat

SEQ ID NO: 360851 - DNA, 572 bp, Homo sapiens
atatgtgacagagatgatagatgatagtagatagatgatagatagatagatagatagatagatagatagatagatagatagatakatggtttggctttgtgcttccacataaatctcatctcaaattgtaatccccacatattgaggaagggacctggtgggggctgatttgatcatatgggtggtttccccccatgctgttctcatgatagtgagtgagttctcacaagacctgatggttcaaaagtgtgccacttccccctttgctctctctctctctcctgccaccatgaaagactgccttggttccccttctccttccaatatgattgtaaaagtcctgaggcctccccagccatgtggaactgtgagtcaattgaacctcttgtctttataaattagccattctcaggtagttctttatagtagtgtgaaaatggactaatacatatggatgaatggacaggtaggtaggtatataggtaggtagataacagatagatgagagagagaggatgtaggagagagtgaagcacacttgcaagcaagtgcatgggcatcaggattctttc

SEQ ID NO: 360852 - DNA, 572 bp, Homo sapiens
atatgtgacagagatgatagatgatagtagatagatgatagatagatagatagatagatagatagatagatagatagatagatatatggtttggctttgtkcttccacataaatctcatctcaaattgtaatccccacatattgaggaagggacctggtgggggctgatttgatcatatgggtggtttccccccatgctgttctcatgatagtgagtgagttctcacaagacctgatggttcaaaagtgtgccacttccccctttgctctctctctctctcctgccaccatgaaagactgccttggttccccttctccttccaatatgattgtaaaagtcctgaggcctccccagccatgtggaactgtgagtcaattgaacctcttgtctttataaattagccattctcaggtagttctttatagtagtgtgaaaatggactaatacatatggatgaatggacaggtaggtaggtatataggtaggtagataacagatagatgagagagagaggatgtaggagagagtgaagcacacttgcaagcaagtgcatgggcatcaggattctttc

SEQ ID NO: 360853 - DNA, 572 bp, Homo sapiens
atatgtgacagagatgatagatgatagtagatagatgatagatagatagatagatagatagatagatagatagatagatagatatatggtttggctttgtgcttccacataaatctcatctcaaaytgtaatccccacatattgaggaagggacctggtgggggctgatttgatcatatgggtggtttccccccatgctgttctcatgatagtgagtgagttctcacaagacctgatggttcaaaagtgtgccacttccccctttgctctctctctctctcctgccaccatgaaagactgccttggttccccttctccttccaatatgattgtaaaagtcctgaggcctccccagccatgtggaactgtgagtcaattgaacctcttgtctttataaattagccattctcaggtagttctttatagtagtgtgaaaatggactaatacatatggatgaatggacaggtaggtaggtatataggtaggtagataacagatagatgagagagagaggatgtaggagagagtgaagcacacttgcaagcaagtgcatgggcatcaggattctttc

SEQ ID NO: 360854 - DNA, 572 bp, Homo sapiens
atatgtgacagagatgatagatgatagtagatagatgatagatagatagatagatagatagatagatagatagatagatagatatatggtttggctttgtgcttccacataaatctcatctcaaattgtaatccccacatattgaggaagggacctggtgggggctgatttgatcatatgggtggtttccccccatgctgttctcatgatagtgagtgagttctcacaagacctgatggttcaaaagtgtgccacttccccctttgctctctctctctctcctgccaccatgaaagactgccttggttccccttctccttccaatatgattgtaaaagtcctgaggcctccccagccatgtggaactgtgagtcaattraacctcttgtctttataaattagccattctcaggtagttctttatagtagtgtgaaaatggactaatacatatggatgaatggacaggtaggtaggtatataggtaggtagataacagatagatgagagagagaggatgtaggagagagtgaagcacacttgcaagcaagtgcatgggcatcaggattctttc

SEQ ID NO: 360855 - DNA, 576 bp, Homo sapiens
aaaaatcatcttaagaaaaaaatcaatgatcataagctgcccaaggatacattgcagcttaatctcttaacacttcagtgtgtgaaaccatccaacaccaacaacattctcatttttagataagctgcagaacaaaatacattttatcaaaagtttggttgagatttttctgtaacaaaatatctccaagaaaagtckgtgtttacaaaagaaatacagagggaaaacagaaattgccctctacatccactcacttccaccccttctggtgttttgcgggtctggcctttggaaagatttacgacatcgggaagagcaacattacacaatgaagaattggatattatgtgttcagtaaggatcagaagaatgggattcagaataactgtagtctagggtagacagggggcagagtacggggtggatagaacatgtgtttctgtctcatctgcagtagtgttcaattcatggtgttcagctgagagatatgcaccagggagggagaggtgaaaacaaaagtgaaattaaggttaatgtcccacccaaagcacctttgtcatccacaggcaccaaccc

SEQ ID NO: 360856 - DNA, 576 bp, Homo sapiens
aaaaatcatcttaagaaaaaaatcaatgatcataagctgcccaaggatacattgcagcttaatctcttaacacttcagtgtgtgaaaccatccaacaccaacaacattctcatttttagataagctgcagaacaaaatacattttatcaaaagtttggttgagatttttctgtaacaaaatatctccaagaaaagtcggtgtttacaaaagaaatacagagggaaaacagaaattgccctctacatccactcacttccaccccttctggtgttttgcgggtctggcctttggaaagatttacgacatcgggaagagcaacattacacaatgaagaattggatattatgkgttcagtaaggatcagaagaatgggattcagaataactgtagtctagggtagacagggggcagagtacggggtggatagaacatgtgtttctgtctcatctgcagtagtgttcaattcatggtgttcagctgagagatatgcaccagggagggagaggtgaaaacaaaagtgaaattaaggttaatgtcccacccaaagcacctttgtcatccacaggcaccaaccc

SEQ ID NO: 360857 - DNA, 348 bp, Homo sapiens
ataaatattaatttaaagactaccaacaaggacagtaaacggattcgaacataaaayttcctgtcaggggtgatttatatccaataaaagaagagcaggatggagaaagcctgctttgctaagtttatgatagacagtcaaagagtaccgtcaaaataaaaaggctttcagtctgctgtcggctgtgtgggtgtcttctttttaataagcagcatgctagaattgtattgtttgcttttatcagtcccttgcactgttgaggaaaagttctcctgcactgctaattgaacttgtacgatttataggctcatggcctgagcatgggagagattattaggacttaaaaga

SEQ ID NO: 360858 - DNA, 348 bp, Homo sapiens
ataaatattaatttaaagactaccaacaaggacagtaaacggattcgaacataaaacttcctgtcaggggtgatttatatccaataaaagaagagcaggatggagaaagcctgctttgctaagtttatgatagacagtcaaagagtaccgtcaaaataaaaaggctttcagtctgcygtcggctgtgtgggtgtcttctttttaataagcagcatgctagaattgtattgtttgcttttatcagtcccttgcactgttgaggaaaagttctcctgcactgctaattgaacttgtacgatttataggctcatggcctgagcatgggagagattattaggacttaaaaga

SEQ ID NO: 360859 - DNA, 604 bp, Homo sapiens
ctgtcatttaggcagaaaggtgggaataaaaagaactaaacaatttacagagcatctgataagactagagttgattgagattactcaagaaaaacttcaaaaagataagatatgagcaggactgctgtgagtggggttggatagggagagtttctgcttagtgcagtagagaattgctgctgttaagaaacaaactatgtgttgttggtttggttggctggagtacagagtttaagctgggcagttagggtgaagttgaacagtcaagttgactggtgccagtgggaaaaggccctttaattaatatttatttttctggaagtcaaaatacataaattttactccaggctctataactcactgaaaaataaaaccagtcaggaagagtggctcatatctgtaatccaagtgccttggggggctgaggtgggaggatcacttgaggccaggagttcaagactagcttgggtaacagagcaagaccctcatctctataaaaataaaaattcaaaaatgagctgggcatggtagcaygcacctgtagtcccctcctcaggaggctgaggctggaggattgcttgagcctgggaggttgaagttacag

SEQ ID NO: 360860 - DNA, 605 bp, Homo sapiens
caacatgacagtcaccagtcatgtcaaataccatgaaagcaataaatagagtgaagagattttgtgtgtgtgtgtgtgtgtgtgtgtgtgtgtgtgtgcatgcacgcacatgccaagggcttctttattataatcatggagggcctctttgaggagatgaaaattaaactgaaacctaaaaatgagaagaagcctgtcatgtaaagaacagacataaaataatgttccaggcagagggaatagaaagcttaaaagtagtgaaaatagaatattctggtagggaaaattcaaggtgctaccataaaattttgtaatatcaaagaagagaacttctagcatagacagggattctctgtaagccaagttgttaagcactgaataatcctataaacaaagtctttaaaagaaatcctaaaagatactccagacagctgaaaaacactaaggaataaaattctagcttattaatcacaagcactcaatgaccagaaaaaaaktattggtaagttaatctacagaaaccaatgcaactgactacataagaactcatatataaaactgcgactgcagaaagttaggcttagagaagccaatgatgagcaaag

SEQ ID NO: 360861 - DNA, 567 bp, Homo sapiens
attcaactaacacataccagggactatcttaagcataggggatacaaagttgaccaagatatgcaagatccttgttttcttgggaattatcttccaatatagaggttcccaaattgtaagatgcaaatkaattatgtatatgcccaaaatacttattccttcagccttcagagcaacaaagtttgttcagctttggtgggaacctgtggccaactgcctttggtcagtgtcctatataaatattatcattctctttatgtgctatgacccagagaagattaggaaacacagttccagtaagttacttgaatacctttaacttccttcactgtctatcgaaatcatacccatttttcaagattcagatcaagtgcaaacttctctatgaagccatcctcaacgtccctcattggaaatttctcttctgtatatttatgtttacatccttcgtatatttattctatcaatacgtatttattggccactcactgggaatgctagacataaatttaggttttgggattacagcaatgaagaatttatggcactttcattataccataagca

SEQ ID NO: 360862 - DNA, 598 bp, Homo sapiens
tttggtgttgtgaagccagtatatgaaatgggaaaggagcattgagaagtgcaggctttatttgatggtcataaaatggagaagtgggagagtggcccaccaatcaacttcttggctcctgagaaccaggaagttacagatgtaggatagctttaatgaaggggttgggaattgaaagcaaaggcaggaatacttacgcttttcttaggaagggataaagattttcctggaatcaaggagggttgaagatttccctggaatcaaggagccccttttctgcccttttttggtctcttcttgtcattgtcatggtgattttcaactttcatggtactggctggactgtcatttaatatggaaattggattacaaagaagccagtgtttcttcagagttcaagcaagcttccatcatggattttcccatctttcactggtttagtcctaagaggcaacttctgaccacagatatcctgtttcctaaaaataagcagagttaacaccgagtaagaattcagctatatcacayagatattgattgggcaaaaacaagcagcgtaggagtcagctaagtcacataggcactccaatgggtaaca

SEQ ID NO: 360863 - DNA, 429 bp, Homo sapiens
tttacaaaacacttgcagaaatatcccaacattaaaatgattctgtctttgaggtttccattatctttcagaagttaacttcgttccatattttaaatgtcctagtctttctagaattgccatgytttattttcttgttatttgagtgagagggttaaatttgcaactcattctaagtcaaatctaagttataaccatgcaaaacttacttgtaaatcatccccttaaacagccaaagaattacaaacccatttgtactatgtaagagccatatgaactacacgtattgtaatcaagacaaattttgcataaattagactggtatggttccagtaatatgttttaataaacattaaatgagttatttgtgccatagcttcggagagaattatgattaaataaatggatccttttttttttttcagacgg

SEQ ID NO: 360864 - DNA, 616 bp, Homo sapiens
aacattaaatgagttatttgtgccatagcttcggagagaattatgattaaataaatggatccttttttttttttcagacggagtcttgttctgtcacacaggctggagtgtagtggcgcgatctcagctcactgcaaactccgcctcccgggttcacsccattctcctgcttcagcctccctagtagctgggactacaggcgcccgccaccacgcccggctaattttttttttgtattttttaggagagacggggtttcaccgtgttagccaggatgttctcgatcttctgacatcgtgatcggcccgcctcggcctcccaaagtgctgggattacaggcgtgagacactgcgcccggccagtggatccatttttaatacaaattggctaaactagtttgtcagtgctctggacctctaaatgaaaaaggggcttaaattatttagtggttttgattcattggtgttaacctaaagcttatgaccatgacaaggaagaatagttcacaaaatgatgaataacattttaaaatatttatacatttatttttaagataaatccaagttactgatggatacagttttaaaaattatttttatatctcactattaaaaaa

SEQ ID NO: 360865 - DNA, 616 bp, Homo sapiens
aacattaaatgagttatttgtgccatagcttcggagagaattatgattaaataaatggatccttttttttttttcagacggagtcttgttctgtcacacaggctggagtgtagtggcgcgatctcagctcactgcaaactccgcctcccgggttcacgccrttctcctgcttcagcctccctagtagctgggactacaggcgcccgccaccacgcccggctaattttttttttgtattttttaggagagacggggtttcaccgtgttagccaggatgttctcgatcttctgacatcgtgatcggcccgcctcggcctcccaaagtgctgggattacaggcgtgagacactgcgcccggccagtggatccatttttaatacaaattggctaaactagtttgtcagtgctctggacctctaaatgaaaaaggggcttaaattatttagtggttttgattcattggtgttaacctaaagcttatgaccatgacaaggaagaatagttcacaaaatgatgaataacattttaaaatatttatacatttatttttaagataaatccaagttactgatggatacagttttaaaaattatttttatatctcactattaaaaaa

SEQ ID NO: 360866 - DNA, 616 bp, Homo sapiens
aacattaaatgagttatttgtgccatagcttcggagagaattatgattaaataaatggatccttttttttttttcagacggagtcttgttctgtcacacaggctggagtgtagtggcgcgatctcagctcactgcaaactccgcctcccgggttcacgccattctcctgcttcagcctccctagtagctgggactacaggcrcccgccaccacgcccggctaattttttttttgtattttttaggagagacggggtttcaccgtgttagccaggatgttctcgatcttctgacatcgtgatcggcccgcctcggcctcccaaagtgctgggattacaggcgtgagacactgcgcccggccagtggatccatttttaatacaaattggctaaactagtttgtcagtgctctggacctctaaatgaaaaaggggcttaaattatttagtggttttgattcattggtgttaacctaaagcttatgaccatgacaaggaagaatagttcacaaaatgatgaataacattttaaaatatttatacatttatttttaagataaatccaagttactgatggatacagttttaaaaattatttttatatctcactattaaaaaa

SEQ ID NO: 360867 - DNA, 611 bp, Homo sapiens
tactattcacctttccagagaacatcatgaaaatttaaaataggaaaacacaaagaaagcctaagcatctcatttcagaacaaaagatgttctgtagtaaagaaatttgtatttctaaaacatgatttttttgtcttaagcytcctaatgtttgaagcatgccaagaagtaagtaatgccattacatttattacctaatatatcaatgataaggtgcattttggagttagtgggaaagatatggcagattaacattagaccgtttaaataataactaagcgtattcttagaaggtgttggatatatatgagtgctgaaattcatattattcttgctcaagtgttagcccaagactactgaggttttctgggtgagtatagctaaaagaaaagtgttttaatgatagtcatttccacccctttttcatgcatgttttagcattctgtttggaattggagagttctcttttgatctctgatgtaataatgaactctgacatacatttttctcagagatctgcttcctactgttatttttcagattaaggttcctcctcagtacataaccatctcattttttttttctgaacagaatctcctcattcagtgtcc

SEQ ID NO: 360868 - DNA, 611 bp, Homo sapiens
tactattcacctttccagagaacatcatgaaaatttaaaataggaaaacacaaagaaagcctaagcatctcatttcagaacaaaagatgttctgtagtaaagaaatttgtatttctaaaacatgatttttttgtcttaagcctcctaatgtttgaagcatgccaagaagtaagtaatgccattacatttattacctaatatatcaatgataaggtgcattttggagttagtgggaaagatatggcagattaacattagaccgtttaaataataactaagcgtattcttagaaggtgttggatatatatgagtgctgaaattcatattattcttgctcaagtgttagcccaagactactgaggttttctgggtgastatagctaaaagaaaagtgttttaatgatagtcatttccacccctttttcatgcatgttttagcattctgtttggaattggagagttctcttttgatctctgatgtaataatgaactctgacatacatttttctcagagatctgcttcctactgttatttttcagattaaggttcctcctcagtacataaccatctcattttttttttctgaacagaatctcctcattcagtgtcc

SEQ ID NO: 360869 - DNA, 611 bp, Homo sapiens
tactattcacctttccagagaacatcatgaaaatttaaaataggaaaacacaaagaaagcctaagcatctcatttcagaacaaaagatgttctgtagtaaagaaatttgtatttctaaaacatgatttttttgtcttaagcctcctaatgtttgaagcatgccaagaagtaagtaatgccattacatttattacctaatatatcaatgataaggtgcattttggagttagtgggaaagatatggcagattaacattagaccgtttaaataataactaagcgtattcttagaaggtgttggatatatatgagtgctgaaattcatattattcttgctcaagtgttagcccaagactactgaggttttctgggtgagtatagctaaaagaaaagtgttttaatgatagtcatttccacccctttttcatgcatgttttagcattctgtttggaattggagagttctcttttgatctctgatgtaataatgaactctgacatayatttttctcagagatctgcttcctactgttatttttcagattaaggttcctcctcagtacataaccatctcattttttttttctgaacagaatctcctcattcagtgtcc

SEQ ID NO: 360870 - DNA, 562 bp, Homo sapiens
ctactctctcctaagatgtcacattattgctgtatcactttttgtcttaaataatgctcatacttaatattgtattttcttgtttattgtgaattatattaaatgtataaataggtcagttgtggtggctcatgcctgtaatccaagcactttgggaggcaaaggtgggtggatcatttgaggtcaggagtttgagacaagcccggccaacacrgtgaaacctcgtctttactaaaaatacaaaaattagccggacgtggtggcaagcacctgtaatgccagctacttgggaggctgaggcgggagaatcaccttaacctgggaggcagaggtttttgtgagccaagatcgtgccactgcactccagcctgggagcaagactctgtctttaaaacaaaataaataaaataaaataaaataaaataaaataaaatgaaataaaataaaataaaagtgtacaaagtatgtaaacatacctttacaatctaagtaatagtataacaatgattgtttgcattgagataggcaaattaaccttcattcttaaattgttttatatcac

SEQ ID NO: 360871 - DNA, 564 bp, Homo sapiens
tgcctttgctcctctttctccttggtccatgattgtgaggcctccctagccatgtgaaactgtgaatgcattaaacctattttctttgtaaattacactgtcttaggtatttcttaatagcagtatgaaaattgactaaaacacatactctgtgtagcaatgcaccactatgtaggtgattatggatgaataataaatttcatctaacaaaacttttctatttgtkattacacatttcctctcataaatctgagatctaaaatacatacaaaacatccattttaagtcgagggtacaaattattttcactgtggtcactactggaatcaagtcaatttaaggaaaccaaagaagaggaataaatgaacaatgccttcagaacactgccagtggccgtaaagtgttttttctccctatgttactttgcttaataaataaatccctaaaaagagaatttgaatagagtatcttgatttgtgtgcctgtccttgaaaaagtgaaggtaattggaatagatgaataaaatttgacaatcccagtagaaccacagaaatagtaaaacag

SEQ ID NO: 360872 - DNA, 564 bp, Homo sapiens
tgcctttgctcctctttctccttggtccatgattgtgaggcctccctagccatgtgaaactgtgaatgcattaaacctattttctttgtaaattacactgtcttaggtatttcttaatagcagtatgaaaattgactaaaacacatactctgtgtagcaatgcaccactatgtaggtgattatggatgaataataaatttcatctaacaaaacttttctatttgttattacacatttcctctcataaatctgagatctaaaatacatacaaaacatccattttaagtcgagggtacaaattattttcactgtggtcactactggaatcaagtcaatttaaggaaacyaaagaagaggaataaatgaacaatgccttcagaacactgccagtggccgtaaagtgttttttctccctatgttactttgcttaataaataaatccctaaaaagagaatttgaatagagtatcttgatttgtgtgcctgtccttgaaaaagtgaaggtaattggaatagatgaataaaatttgacaatcccagtagaaccacagaaatagtaaaacag

SEQ ID NO: 360873 - DNA, 608 bp, Homo sapiens
tgttggaattacaggcttgagccactgtgcttggcagtatcaaattctaagagtaatttcaaggatacaagaaatcaagaggctagaagaagcatggaatgtttttggagattgagggctattctgaatatttcttttctgcatggaggcaccctgttgtctcagagtagataaggcctccaagtgaggtactaattttattacctcacatagcaagaagtgttcagtctttttataacagagaagtgatgamattttccggagatccacatcttataatgcataaattctaagtgtattcgtccatccttgcattgttatacaaaaataatggagactgggtaatttatagagaaaagagatttaattggctcccacttccacaagctgtataggaagcatggttgggagacctcaggaaatgtacagtcatggcagaaggggaaggataagcaggcatgtcttacatagcccaagaaggaggaagacagtgaagggggaggtgctacatacttttgaacaaccagatcttgtgagaactcactcactctcaggagatcagcaagggggatgtccgtccccatgattcaattacctcccaccaggcc

SEQ ID NO: 360874 - DNA, 608 bp, Homo sapiens
tgttggaattacaggcttgagccactgtgcttggcagtatcaaattctaagagtaatttcaaggatacaagaaatcaagaggctagaagaagcatggaatgtttttggagattgagggctattctgaatatttcttttctgcatggaggcaccctgttgtctcagagtagataaggcctccaagtgaggtactaattttattacctcacatagcaagaagtgttcagtctttttataacagagaagtgatgacattttccggagatccacatcttataatgcataaattctaagtgtattcgtccatccttgcattgttatacaaaaataatggagactgggtaatttatagagaaaagagatttaattggctcccacttccacaagctgtataggaagcatggttgggagacctcaggaaatgtacagtcatggcagaaggggaaggataagcaggcatgtcttacatrgcccaagaaggaggaagacagtgaagggggaggtgctacatacttttgaacaaccagatcttgtgagaactcactcactctcaggagatcagcaagggggatgtccgtccccatgattcaattacctcccaccaggcc

SEQ ID NO: 360875 - DNA, 546 bp, Homo sapiens
caccatagttattacagttcccagagaccaacactttactcctccaatttagcagaatgttgttagtgctaacccatattttcatctcaggaaacacaatattgaagaagagtatgatctttggagtcagttggatgggcttgcatcccagttctgcacttatgcacactgtgtctccagacctgtcacttaattttcctaagcctcagtttcctcttctacaaaatgggaacaataggggtgtgtgtgtgtgygtaataaaaattatgcatataaaatgctcaggacagtgtctgaaacatattaagcattcacaagatattggctattattttataaactgctgaacctgtcccaggataattattttatctataagttacaaataatctatgtttttattgctaaagtgcaattaggatcgaatgagataatatatatataaaactctgtaaaatatgaaataccatttttaaaaagtattttgtgattataatagtgaagtattaaaagtaaacaaagagacttatccctggtgtaaattac

SEQ ID NO: 360876 - DNA, 577 bp, Homo sapiens
tgacaatatggcataatgaggaggaggcagagcaactggaaccttcatacattgttggcaggactgcaaaatgctaaaccctttgaataatttccaatatagttaacactctargtcctagtattcctactcctaagtgtttacccacgagaaagacattcagttaaagacttgtgaacaagaacgttggtagcccccaaatgtttatcaacagtacaaaagatgagcaaactctgtacatttatacaatggaatactatcggcaataaaagaaaatgagcgactaatgtaatcatacctatccctcacattctacgtaaagctaaagaagctagacagcagaaagtatatactctatgaacacatgtacagaatgttcaagaacataaataactaatctgtggtgatagaaattatagtattggttgcctggctggggggaattgagtcaaaagaggcacaagaaactttctgggatgagaggcaagttcttaaacttgatctggctcacggttacacaggactattcatttgtcaatattcattgagctgtatacttaaagtttgtgtactttat

SEQ ID NO: 360877 - DNA, 577 bp, Homo sapiens
tgacaatatggcataatgaggaggaggcagagcaactggaaccttcatacattgttggcaggactgcaaaatgctaaaccctttgaataatttccaatatagttaacactctaggtcctagtattcctactcctaagtgtttacccacgagaaagacattcagttaaagacttgtgaacaagaacgttggtagcccccaaatgtttatcaacagtacaaaagatgagcaaactctgtacatttatrcaatggaatactatcggcaataaaagaaaatgagcgactaatgtaatcatacctatccctcacattctacgtaaagctaaagaagctagacagcagaaagtatatactctatgaacacatgtacagaatgttcaagaacataaataactaatctgtggtgatagaaattatagtattggttgcctggctggggggaattgagtcaaaagaggcacaagaaactttctgggatgagaggcaagttcttaaacttgatctggctcacggttacacaggactattcatttgtcaatattcattgagctgtatacttaaagtttgtgtactttat

SEQ ID NO: 360878 - DNA, 560 bp, Homo sapiens
acatgagcaaaatagtgcatttatttagttctactaaagaacaccagaattttataatttagaaaactcatcacagaaacccacaagcctgagatgcttaaaaatcagaaagcctctttttaaacaaattaatatagtttatttttgagtagttttgggtttgtagaaaaattgagcagaaaatacagagagttcccatatagtccctcaccccycacctgctttctcctattattaacatcttacaatttgtgtggtatatgtgctgcaactaataagcaaatattgatacatcattactaactaaatccatagtctatattacagttaactccatattgtatatttcataaattttgacaaatgtacggcatgtatgcaccattacaatatcatgcagagtagttttactgccccaacaacctcttgtttctcaccaaatcttttctccccactccattactgctacactgaacacttggataccactaatttttgtattgcctcattagttttgcctcttccagaatgtcatataatttgattcatacagtatgttg

SEQ ID NO: 360879 - DNA, 615 bp, Homo sapiens
ttaataaagtttccataaacatttatatacaggtttttgtatggctataagttttccaactcagttgagtaaatgtcaagaagcataattgctggactatatggtgtattagtctgttttcacactgttgtaaagaactacctgagactaggtatttataagaaaaagaggtttaattgactcacagttctgcatgcttggggaggcctcaggaaacttataatcatggcagaaggcaaaggagaagcaaacaccttcttcataaggctccagaagagaaggtgaggggggaatgctgcacttttaaaccattatatctcatgagaactcactattatgaaaacagcataggagaaatccgcctccatgattcaatcatctcccaccaagtccctcccctgacacgtggggattacaattcgacatgaaatttsggtggggacacagaaccaaatgatatcatatagtaagggtatatttagttttgtaaggaactatgaaactatctttcaaagtggctgtaccattctgcattcctaccagtagtgaataagaattcttgttgcttcacactctccataatatttgttattgtcagtgattttgattttggcc

SEQ ID NO: 360880 - DNA, 576 bp, Homo sapiens
cttcaaagttgatcttgaagtgatctctcctacttagaattatataaggatcagaagactactaaagtgatgagaaaagtcagagaagaataattacttttctgtttctcatagttactactgagatayttattttctaagattgcaatgtattttacagagaaaactttaaaacgttcatgtcagttttgagcatggatattcttgagtaactttaaagccctgatactaccactccacagaaattttgatctgaagttaactctccaaagttctataaaaaatgatgatagtacaccttatttaggaaacctaaccctcaaaaaacatatgctcttttaagtcttggggaatttttttctctttaaggataagtggcctctgcctttatctctttaaaaagttctctttatcttcattctcactcagaaaaaagagaagttaagggaagtaatagctgaggggatgtgatgcaaaaaacaaagaatggactggctattttcggagtctggccctatgtgtgagctcaggtgaagaggcagcatatatgggtaagaattctggtaggtaggtgat

SEQ ID NO: 360881 - DNA, 586 bp, Homo sapiens
atggtatctcattttggttttgatttgtgttcctgtaatgattagtgatgttgaatattttttcatgtgcttgttgtatgcctgtatgtctcctttttggaagtgtctgttcacattatttgcccatttttaatgaggtttgctttttgcttgttgatttaagttccttttagattgtagacattaggcctttgttggatgcatagtttgcaaatattttctccaattctgtaggttgcccatttactctcttaatagggttttgttgtgttgttcttggttgttggtttgggttttttttwattttgtttttgttttgttttattttgcctcccaggagctctgcaatcagtttctatttgtcaatttttatttgtgttgcaatcgcttttggtatcatcatcatgtaatctttgccaggacctaggtccaaaatgtcatttccaatgttatcttctatggttttatagtttaaggtttcatctttaagtcttttattcatcaaatgtcatttccaatgttatcttctatgaattttatagtttaaggttttatctttaagtctttcattcatcttaatttgatt

SEQ ID NO: 360882 - DNA, 604 bp, Homo sapiens
tcaaatggaaaagaattcagttcctgtcaacaatgaaagagtatttatttgaacctaggtcagtttaacacccagtgcagaatcaatcactatggccctcaagataaaatcattctaattgatagacctaggtaaaatgctccactcctgcaatcaggtaatgaaaatcaaatgaaatcttccagagaaaaagtggaaaaagcatggttccacacaggaaatttggagtgctgaaaaaaggacagatacttagcagccaaaaaatcttctaacttccataaggtataaactacaaacgtgcctcagtatccaatatctcttattttatttggtaataggatccttttaatattaaccacaaatattaatttattcccctaggtacaggctrtattttctagtctctcttaaatctataagggattatttatttaagtttgagaaaaggcagtgtgtgaagagaggtgatctgtgtagcttctgggtaatctccttaaaaatgatcactctgtactctgccattctataggtagtgaaagaacagtgacttattgacaccattggaagccaaatatggtaccatatagtccttaaggactacaag

SEQ ID NO: 360883 - DNA, 545 bp, Homo sapiens
cacttgcccaaagcacataatgaagtctacattcaatgttgtttagaattaggcctatttttttttctatgacataaatgacatatgtcaacccttctttggccaagtacaattatctgtaagtcttcctctgaaaaagagtttattagtatttatcaagtgcatcctcaaaattatcacaaaataagccgatataatctcctccttcaggacggattgttttaaacactaagtatgattaattttgacacaaaccatgttatggctctaattatgtgtactggtgggttagtctatgttgaaaagattctctgacccttaacgacaagtataaatgagaggagttactcattcagtcaggacctacgacggctcccatgrcagcccattttcttgtagaaaagcataacattcagagatgcaaaagttaaatggagttgaaacaacattattctcttaatgaagtacagattgtcaatatactcaaattattattgttttataagtcagtaggtcaagtggcttgagctcttaaataatacttc

SEQ ID NO: 360884 - DNA, 553 bp, Homo sapiens
ggtgcatttaagaatggggccaaagtctccagatccccatcagaggccagtgaccctatactcctgtgaagatgaaaaaagaaagaaaggacttttctggggtttttggatacttgagcccacatgacaatgtttctagggcttcttaggagaaaaattaaactgatgacatcaggaggtttttgagacaaatgtgatgattcattgtgcttacttgcttatgatgcttatctgtttgtgggtgggactctgtgggccattttgggtgccaatgaccatggttcccrctgctgaattactttaagcattgttatttcggctgcttgtgacacagaacatcaccaccaccctaggggatgtgttccctcacagctaagaatttgagccttagctattcaataaaagctgtgatgcttactaagtggaggagaggatactacttggttaattcaaaacttgctacaggtaaaaatgttacaacccaccttgtcacagtgtaatacctcagtttggctcatcaaaaaggtattcagaggaatggagactaacaatg

SEQ ID NO: 360885 - DNA, 537 bp, Homo sapiens
agacctatagatttggcaccaactgaatggaaactccagataccagatgtttattatattattgaaaataaatcaatttaatagactgttacatgggctctgaaaacaatgaggctgggtccgaatttcagttctgccactttctagtggtataatcttaaatamataatttgacttttaactttttttgttctaaaatggtaagagaaacaccaaacttttaggtttgttgtgaggattaaatatattatcagtattaacaactatgctaagtgtggtggctcacggctgtaatcccagcactttgggaggctgagctgtgcggatcacgaggtcagaagttcaaggccagcctggccaacgtggtaaaaccccatctctactagaaatacaaaaactatccaggcgtggtggcatgtgcctgtaatctcagctactcaggaggctgaggcaggagaattgcttgaacctgggaggcagaggttgcagtgagttgagattgagccactgcactccagcctgggcaacagcaagagt

SEQ ID NO: 360886 - DNA, 507 bp, Homo sapiens
agtttcatctgagatgttttaaacctctcaaatgttagaatttcacatagactagatcaaacacagcagtaattagtaatgttactaaagcataaatgattcctctgatttgcccttgtgaattatgaaatagtagctctcagaatataacttttctcctagcaacttagtgatattataagaattataaagggaagatttaaaaaatacacaagttctaaattatgcccagattttgttataccatgaggggctgtggagtaggaggcgatgagtggtgatatttgtctgtatttctcttcctcacctccagctggaaattaaagtattataacaataacaaataaaatataacaaaatgatgtgtattcatcatgcaaagtagagatatgagtgtgtgttttaatgatctagtcaacttctgaatttggaacatatggcraagataggaaaaaaatatgatctgactataaatttgctgatcagttggtactatgaatatattgc

SEQ ID NO: 360887 - DNA, 531 bp, Homo sapiens
tactgactatgacctgctgagatttggggttgtataattttttttctgcttctttggctctctctgggtctattatgacttgtttgttctctgtctgtcctctgcctgtcacttaagactgaaacgacacctcttatgctaaactgataacatcagtatgtgcacctttcctgaagtttaaatatagacctcatggctatactgtatttttaatagataaaaattattcattcactgtaattactaagtgaacttttaatacaggccatttcccttcttaccctcacagcaattacccgctgtatatgactgaaaacaatagcatccttttaaaaccaaaatggcgattgatacatattagatgcagaactatattgtttgcaggttagtaactgtgggaagactgtattcttatctgtttaattaatgatgtaggcttttatatttggctttcataagaaatctgttgcctggtaacagatttkcctgtgggctcccagaagaagctgggctttctaagcaaagcaccct

SEQ ID NO: 360888 - DNA, 470 bp, Homo sapiens
aataccaaggtgctaaggtccctctagtagcttctggggcatgtaatccttccatttgggtgaacgagtatgggacatgacctcttcttaacctgaaggttgaaagttattggtcaaacaacgtaaggcaatggatgccttatacaggcggtagtcttgagactgaaacaggactgggtcactacaccaactcagcccaatccccatgtgatagatggggaacatctgggaccccaggagggaagtgggktgaggtactaactgtcagtctgcttttttcacaaggatgtgacagcagagacctggaagaaaaatgccttgatttggctgtgtaagctgcagccactgcaggtaacctgaagaaatgctgaatctgctgtcctggacgtcattctgtcccagatcacagacacctttacatcctgccagtggtgaactacaccagcattcccaatactacagtgcgcgtc

SEQ ID NO: 360889 - DNA, 533 bp, Homo sapiens
gattttccaaagtagtttcgccaatttatactctsaccacctatatataaaagttccacttataccatcctcttgttatttcttgctattattaatctcgttttaaaaaaaattttaacttttattttaggtttaagagtacatgtgcaggtttcttatttaggtaaatttgtgacttagggatttggtgtacaaattattttgtcatccaggtactaagtatagtacccaatagtttttacttcttgtttgtttttttcctgaaccactatctcctcccactctccaccctctggtaggcctcagtgtctgttgttctgttcacctttgtgccatgtgttgtcattgtttagcttccatttatgagtgacatcatagggtatttggttttctcttcctgcattagtttgctaagaataatggcctccagttccatccatgttcctgcaaaggacataatctcattcatttttatggctacatagtattccatgttgtagacataccacattttgtttatctattctaccact

SEQ ID NO: 360890 - DNA, 598 bp, Homo sapiens
ttctgtcccagatcacagacacctttacatcctgccagtggtgaactacaccagcattcccaatactacagtgcgcgtctatagaagctgagccctggattatcaagtgaagacctgatacttgccacatgggagggagccagagggaccctgttttaatttagctggtctaaggtggcacaatgtcacaaccacaactaacaaaaccttggcgggatggtattttgacacagccagtcttcttttgtcccttgctacctatcwgtaggcaataaaaccacttcatgtaatgttgtgtgtacaggtatactgcctcaccagattcagacaggtcagtaaccagtgcacagtgaacctgcttcacacagccctaggacaatgggtactatgatcagcattaccactttatagatgaggaactgaggcacagagaagtaaatcatatagctagtaagtggcagaatcagaatgtgatcccaggcaatctggcctgtagagtctgtaatattaacgactatgctatggagtctttgatggattagggaaaaaaattaccgttgctcttcccaaaaaccttataattaaatgactctaatga

SEQ ID NO: 360891 - DNA, 640 bp, Homo sapiens
attttagcctagtattctgtgaaaaatggatttatcatcactgggcttcgagcctctagaccttaactacaagatcatctgaacttactaaggagattcccttggatcaagatcaaccacagcctatcatgttcaagtattatgagtctcattattagttttaaaatggaaagctgtattctacagcactctataataacaaataatgatttctctgaatctcctaaacatggtcatgtcaagaaatgaacatggaaaactgatcttatgagaaaagcaaaatatagctccaataaaaattgcactggtgaaggggtattgsgggtatctcaaactcaaaatgtaagcctcacagataaggaatgctgctatgtactaagcatctttatcctcattcagcaataacagagatcagcaaaacattgttagaaatcatttcagttagcatggatgctattgtcaagattagataaattaaactgataaatcccaagtttagatcgaaaatctctaacaacatgaaataagtcaaaatatgtgtcaggcagtgctgccaagaaggttttcaaagttcccacaagcatagtatgattggaaaatctacaatttttaaggaaaacaatagaccaattgccaggta

SEQ ID NO: 360892 - DNA, 603 bp, Homo sapiens
aataatgacatctatttaagtgtttatcagaacccagaacatatttccaatatttagctattttattctacgcttataacttatatgctgccagggaaatatcatgtatctttttattttaaaaataataagcagtagtagtgaataggcatgagaattctaaaattgaactctacatgggcagaaattttatagatattttctctaagatcagtagttcttttctgtcaaaaatttcattgaaaaactgcatcttaaagcatagctgggataaataatttttaaatgatttcttttaaagaaatcacctattttttaaaaattaagacaaaacatgatacatgatcactatttgctcagtagtggtgaataggcatgaaaattctaaaaccaaactttatatgggtatgaaaaaatattaaggtaaagaatatttaagatctgtggaggaatatgatsactcatggaattagtaatgtgttgctaatagcacctaatacagcatcgaattacatttttatagcctttatagtcctagttaaaccattcaacaccctgagaaacggatcaatgcatttatctctagcttctgcaggaaaaagg

SEQ ID NO: 360893 - DNA, 636 bp, Homo sapiens
acattttcatagttattttactacaaaaatatttttagttattttactccctacctcgtaacttttttgacttaaaaaatgaaaggaactgtaagtttccatgctatggttttctccctccaggtcctcaaaatcytctgtcttccactagcattgaaaaagaatgggagtgatacactatgggccatgcctggaactggttcacatgtacttgtccatacctcagttctatggctatatttaactatagggaggtgggaaaatggagctaatttgtgagtccaggaagaggagagcacagccattggtgaccactgagatgatgaaatggaatatggcctagtcgttgtgatacagtgcctttccagagagccagaattccctcctcctagattcccaaatcctactttgttatgactgggatggaaattagagaaaatgtcaaactatataaggacatctactcattttaccttcaacagacttatctgccataaagtttttttaatgtttgggagtcatttgctgtgcctagtgttccattattggaacactaagcatgtgggtgttatttatatcctactcctcaaggtcatcaccacggtctgaatgcaaaaattcaaaatattgcaacct

SEQ ID NO: 360894 - DNA, 577 bp, Homo sapiens
  misc_feature (1)...(577): n = A,T,C or G
attcacttatttgtgtattcattcaatattcactatatatatattttttgagacagggtctcactstgttgtccaggctggagtgcagtggcatgatcatggcgtgctgcagcctcaacactctgggctcaccaatcctccttcctcagcctcctgagtngctgggactacaggcgcataccaccacaccctgctaatttttagaaaaaattttagtagagatgaggtcttgctatgctgcccaagctggtcctgaaatcctggcctcaagtgatccttgtgcctcggcctcccaaagtactgggattacgggtgtgaaccacggtgtctggcctaagcttccgttgatgtcaggttgcagaaagagttcagtgcgaagtcctgcccacaaggagttcataatctaatgggggacagagggaggccaatcacagcatgttagcattttgtgattagtgctgtgaagtctctgggaggacttgggtggcacctaacccagtccaagtggagtgggatggggtgagatcagggaaggcttcctagaagaagtgacactgaggatgctttcaacaactga

SEQ ID NO: 360895 - DNA, 577 bp, Homo sapiens
  misc_feature (1)...(577): n = A,T,C or G
attcacttatttgtgtattcattcaatattcactatatatatattttttgagacagggtctcactctgttgtccaggctggagtgcagtggcatgatcatggcgtgctgcagcctcaacactctgggctcaccaatcctccttcctcagcctcctgagtngctgggactacaggcgcataccaccacaccctgctaatttttagaaaaaattttagtagagatgaggtcttgctatgctgcccaagctggtcctgaaatcctggcctcaagtgatccttgtgcctcggcctcccaaagtactgggattaygggtgtgaaccacggtgtctggcctaagcttccgttgatgtcaggttgcagaaagagttcagtgcgaagtcctgcccacaaggagttcataatctaatgggggacagagggaggccaatcacagcatgttagcattttgtgattagtgctgtgaagtctctgggaggacttgggtggcacctaacccagtccaagtggagtgggatggggtgagatcagggaaggcttcctagaagaagtgacactgaggatgctttcaacaactga

SEQ ID NO: 360896 - DNA, 577 bp, Homo sapiens
  misc_feature (1)...(577): n = A,T,C or G
attcacttatttgtgtattcattcaatattcactatatatatattttttgagacagggtctcactctgttgtccaggctggagtgcagtggcatgatcatggcgtgctgcagcctcaacactctgggctcaccaatcctccttcctcagcctcctgagtngctgggactacaggcgcataccaccacaccctgctaatttttagaaaaaattttagtagagatgaggtcttgctatgctgcccaagctggtcctgaaatcctggcctcaagtgatccttgtgcctcggcctcccaaagtactgggattacgggtgtgaaccacggtgtctggcctaagcttccgttgatgtcaggttgcagaaagagttcagtgcgaagtcctgcccacaaggagttcataatctaatgggggacagagggaggccaatcacagcatgttagcattttgtgattagtgctgtgaagtctctgggaggacttgggtggcacctaacccagtccaagtggagtgggayggggtgagatcagggaaggcttcctagaagaagtgacactgaggatgctttcaacaactga

SEQ ID NO: 360897 - DNA, 548 bp, Homo sapiens
attttgggggatggtgtgacttaaaatacaggttttacatgaaattcactcgtgcatgtatgtgtgtgggagggtggtgggcaggtggtttctgtgtggcacctgggacagatggcaggcatcttgcagagcaagtggagctgaggraagacttattgcagggttcacaaaataggtgatgctttaaagcaagagccttggatcagaactccgaagtgtagatgttcctaagaacaggtatagatttgtattcaagattcttcacacaaaggcaattctatgtagcatgctttaaggcaggttactagttattcagttgtcgttggttgataattctcccaaacgacacaagaaataagttttaagagtccagaaaaatcagtatttcctcttctggcaatattcaagatactaaaagcagggtcttcataactcagcaccaacaacatgtcaccagcctgaaatttcgcccttgttgtatatcttctgtttgctctttcggatctacatccacccttctccccactctccctggggccccatggggc

SEQ ID NO: 360898 - DNA, 589 bp, Homo sapiens
ttcatggtaagcaaagtttaaaaaaaatcagctctagttaatctgtcttgagagatatgactgaagtttaaattgggtagaactgctggttctacaattaaaaacaaaactgatttccaagtgagtgcaattattttaatgggtaaagttttaatcatcagtcctagaatgctcgttggactcctttaactgtgcaagtacagttaaagctrttgtcagtgacaggcaacgatttgggggtgggattgatttgttcgtggtaattaagccttagggtgtgtgcatgactgtttgaaccaaataattagaccgccctgtaatctaattatttagagccacgccaaccagcacacttaaggaaatgaaatatttaactagttaatctggaaatatggcctaagttattttcaccagcattactgtaagggaagtctcagaattgacaaccttattggaaatagttaagtacatgcccctgctctggggaccacaaatttgaaatcatctccattaagaaaaagagctcaaataccctcatttaatttcctgtcttctatttaatcctagttttgctctttggttcaaaaag

SEQ ID NO: 360899 - DNA, 634 bp, Homo sapiens
gaatttttacaatagcattaaaagtgaaccaaaatataaggccagttaacaacatccatccttttctgtattacaaaaactgtaacagcgaaattttgcttgtaaaatccaatgtacattttatcattttgtataaaatatctacggcctcagtagtgattaaattgcagctataaaggaaattgacccgaaataaatggtttccctatgagaaggcttcactgctacacttcacctcaggacaataaatcaaattaactgcaccttgtcctctgtccaatgacatcatcagtttgaccacatcttgggaatcgggtgcaaaaacatatgctatttaaggcatgaaattatattgctgctttttgtccatctgacctcatacttcaggtctctgaagcagtcattcacctgaaggttctcttaaaagctacagatttttttttttcctgctgcattcagggcctgcctactgtgagtgaaagaagaaaaatggtgagaactggttatytgaaattagcttgcgtttaatccatcaaacctagaattttgttacaaattaaactgaagaccaaagtcccacaaaatacatagctagccactcaccaaaatgtcttaacataatttcaaaggttta

SEQ ID NO: 360900 - DNA, 581 bp, Homo sapiens
aagcctagaattcacgcatgttccctagtctcaggacttggtagcacagcctccactgacttgcccaataggaagcaagtttcccttcttgccatctgaattccacatttggtgtgcctgaagtaaaccctaagagcccatactggttcagttctagaactttactgtcatccagtgcataacccatgctcagtaaatattagttaaatttaacagaggacaaaaaaatgtataatccccaaagtaaaatagtctgaaaatttcaggtgaaaaagttgaggggaaaggtatttaaaaataaatgcagctggacgggcacggtgactcacgtctgtaattctggcactttgggaggccgacgtgggcggatcacctgaagtcaggagttcgagaccagcctggccaacatggggaaaccctgtctctactaaaaatacaaaaattagccaggggtggtggtgggtgcctgtaatcccagctacttgagaggctgaggcaggagaattgcttgaacccagagggcggaggttgcagtgagccgakatcacaccacttcactccagcctgggtgaaagagcaaa

SEQ ID NO: 360901 - DNA, 579 bp, Homo sapiens
aagtccatcaaccaagcattcattatttgttaaatgtctaggcctactctgtccctaccagtatgttcctgcactcaaggctcttaggacaagatttacttacataatcaattagagaagaaaataggactgtgtataatgaagtgctgaattgggtaactgaacacaaattaagtgctaatttcagagaaagtatgacaggagctcagatttgacagatggctatttgtggagataaagaaatggacagacaggtcccttaagataaataaggacaaragttttcaagtcatgaccagcagaagtcctaaggaccctgtgaaagtgcctcaaaagctactgtggaaaggaggaggaaaatgcttttcttgctccaatatccaattttaatcagaacagctccacttttgcctttaaaaaagaacaccaaaggcttttaaaagtttgaaatcccttattttacaaatgcaattaaaaaaaaaatccatggtgaagtaacttgtcctaaagttactaagctaattagtgacagagaagccaggtctctgaaccccccagtaccttttttcactctaccat

SEQ ID NO: 360902 - DNA, 566 bp, Homo sapiens
tctgcgagtcattatgactttttcaaagacaggagctgtgacatggaatcatgcttcttctctagctgagaagccaagctaggtccaggctgggtcataaacttgagcccaacaaggaaatcacccttcacattgacctcacagagctttgactgttctctgttctttgcccaacacccaagacacacaccagctctggccaacaaaccttaacatattatctatatcaaccagagctayatttattcccaaatctccttctaaaatacaaacctgtactttctactctcaacttctaaatttacaaaggcctcatatgcatctcagagtcacagatgctaaaactcaacacaccggtgagttccctgtcagcaatatgtaccaccctctacctcaaaacccaatgatcagactcaagcacagcatctcccaaagagtagtgcactgccctgggtgtttcaatgatcactaaaacctgtttctagccctgcctagcacacttatcctcaccaccatctatcctatttgccaagccagatctttctttggataaactctctcatttt

SEQ ID NO: 360903 - DNA, 540 bp, Homo sapiens
gcagcgccggcctcgttctgcttttggctctaaatgcagtcgggggacgcgactggayctcaccagagactggtgggctgttacccttaccagcgactggagggccaagctcccaaagaggcctacttcatgatcgccttaaatcaggaaatttcatgaaatcccacccctctaccgccccattcccatattgtatctcctcccctgcccactctgagaggattcgccccctttctgtctcgtctggaccctttggagtcccacatagacaagacaaaaggggcattgccttttcctacaggagcgggaagagccgtcacagcggaggaaacagagactcacagcgcgcatcctcacatacttgcgccctgccgagttccagcaaacccaacaaagcactctgaagcttctctggaaaaggaaggagtgtgaggtttctgatacggcaagaggagccaaagagaggggacccaggccttcccctagctcgagagaacaaacccagaagaagggcagatccaaaggaaaagcgcaaaggcg

SEQ ID NO: 360904 - DNA, 540 bp, Homo sapiens
gcagcgccggcctcgttctgcttttggctctaaatgcagtcgggggacgcgactggacctcaccagagactggtgggctgttacccttaccagcgactggagggccaasctcccaaagaggcctacttcatgatcgccttaaatcaggaaatttcatgaaatcccacccctctaccgccccattcccatattgtatctcctcccctgcccactctgagaggattcgccccctttctgtctcgtctggaccctttggagtcccacatagacaagacaaaaggggcattgccttttcctacaggagcgggaagagccgtcacagcggaggaaacagagactcacagcgcgcatcctcacatacttgcgccctgccgagttccagcaaacccaacaaagcactctgaagcttctctggaaaaggaaggagtgtgaggtttctgatacggcaagaggagccaaagagaggggacccaggccttcccctagctcgagagaacaaacccagaagaagggcagatccaaaggaaaagcgcaaaggcg

SEQ ID NO: 360905 - DNA, 540 bp, Homo sapiens
gcagcgccggcctcgttctgcttttggctctaaatgcagtcgggggacgcgactggacctcaccagagactggtgggctgttacccttaccagcgactggagggccaagctcccaaagaggcctacttcatgatcgccttaaatcaggaaatttcatgaaatcccacccctctaccgccccattcccatattgtatctcctcccctgcccactctgagaggattcgccccctttctgtctcgtctggaccctttggagtcccacatagacaagacaaaaggggcattgccttttcctacaggagcgggaagagccgtcacagcggaggaaacagagactcacagcgcgcatccycacatacttgcgccctgccgagttccagcaaacccaacaaagcactctgaagcttctctggaaaaggaaggagtgtgaggtttctgatacggcaagaggagccaaagagaggggacccaggccttcccctagctcgagagaacaaacccagaagaagggcagatccaaaggaaaagcgcaaaggcg

SEQ ID NO: 360906 - DNA, 602 bp, Homo sapiens
accacccaggctgaaagtgagcctgtgctgcttgggctttcaggaaggacggacccaactctccctccctatacagagctgcagtgccctggcaatggaggacagaccatggagttgcctgccctggactcggggaagaggctytgccctaaaccccattttagtggtagctgtcagagtggcatatccacagacttcagctgcaccacagccaggaaccaaaggacaaagtctttataaaatgaaggttgtgagctctgtgacagggcatgatagggaagcggatcacattcttgcctactcaggaggaggagctagtgcacctctgccccttcccctgagacctcagcacaccccgacatgatctctttcccaccatcctgtcagggcaggtttttccactggacaccagcctacgtaacagccctgactcttaagcaccatctactgaactgcatcctaaactggaccactgaattcaaaaaccctgctaccaaagggcttagtgctagtccatgagataagtttcctgagaattccgtaccctcagcccccaacaagggttagtgtgttagcttttacttccaacacatcaccacaac

SEQ ID NO: 360907 - DNA, 602 bp, Homo sapiens
accacccaggctgaaagtgagcctgtgctgcttgggctttcaggaaggacggacccaactctccctccctatacagagctgcagtgccctggcaatggaggacagaccatggagttgcctgccctggactcggggaagaggctctgccctaaaccccattttagtggtagctgtcagagtgscatatccacagacttcagctgcaccacagccaggaaccaaaggacaaagtctttataaaatgaaggttgtgagctctgtgacagggcatgatagggaagcggatcacattcttgcctactcaggaggaggagctagtgcacctctgccccttcccctgagacctcagcacaccccgacatgatctctttcccaccatcctgtcagggcaggtttttccactggacaccagcctacgtaacagccctgactcttaagcaccatctactgaactgcatcctaaactggaccactgaattcaaaaaccctgctaccaaagggcttagtgctagtccatgagataagtttcctgagaattccgtaccctcagcccccaacaagggttagtgtgttagcttttacttccaacacatcaccacaac

SEQ ID NO: 360908 - DNA, 602 bp, Homo sapiens
accacccaggctgaaagtgagcctgtgctgcttgggctttcaggaaggacggacccaactctccctccctatacagagctgcagtgccctggcaatggaggacagaccatggagttgcctgccctggactcggggaagaggctctgccctaaaccccattttagtggtagctgtcagagtggcatatccacagacttcagctgcaccacagccaggaaccaaaggacaaagtctttataaaatgaaggttgtgagctctgtgacagggcatgatagggaagcggatcacattcttgcctactcaggaggaggagctagtgcacctctgccccttcccctgagacctcagcacaccccgacatgatctctttcccaccatcctgtcagggcaggtttttccactggacaccagcctacgtaacagccctgactcttaagcaccatctactgractgcatcctaaactggaccactgaattcaaaaaccctgctaccaaagggcttagtgctagtccatgagataagtttcctgagaattccgtaccctcagcccccaacaagggttagtgtgttagcttttacttccaacacatcaccacaac

SEQ ID NO: 360909 - DNA, 406 bp, Homo sapiens
ttttcaggtagcttttctccgttcccagtctcacatgccatcagtcactagatctcctctggcacatacatggtsttggtcttggggggcatgggttgggaaggggagaaagggggcaaatagttcctcttcactgcacacaattatgtcatctttcaaactagggacatgagtgttgctaacattgtgcacctaatcctggaatccctggggtaaacagcaacagttcctattttttgttcatcactaaatcatctttatcatttatgcatttacagatcccatccatcatcctaataagtttgctgtaacaccctctaaaccatcagtgaatggggccatgctgtgaggttcaagctgagtctatcaccaaccagcgtgtccctcctgagaatttccctgagag

SEQ ID NO: 360910 - DNA, 580 bp, Homo sapiens
gtagacagcctttcccattactaggccagttctgcctagaggcctttagcagtttctcaccctgtgtccatctcccttagatgtacttggtggtctctgtctgggaggaggcctgtggtgtttccttacagggggccaccctgtgattgaaagcccaggacttttaagtaaagttgcctggtgcttcctgaatgcccaggagagaggaagaagctgacagaaggatagagataggtagggatcttgcagagagwtgccaggcaggccccacagctgcccagggatgatcaggcttccctacctcctacctctcctatgtcttggtggtttgcagtaggggccgacctgctggaaaagaatcttgctgagatgcagaacctgcgccagcgcctggaggagtccatcagtctcaatgaccgcctgagggagaggctggagcatgtgcttagcaatggtgaccaaggaaaaggtagaaaggcagaaattttatgtttctgtccacgtctagggagtctcaaaagggcacatagcttcttggggcagagttttaccggtttaaagcacattggtgtgcatgatt

SEQ ID NO: 360911 - DNA, 580 bp, Homo sapiens
gtagacagcctttcccattactaggccagttctgcctagaggcctttagcagtttctcaccctgtgtccatctcccttagatgtacttggtggtctctgtctgggaggaggcctgtggtgtttccttacagggggccaccctgtgattgaaagcccaggacttttaagtaaagttgcctggtgcttcctgaatgcccaggagagaggaagaagctgacagaaggatagagataggtagggatcttgcagagagttgccasgcaggccccacagctgcccagggatgatcaggcttccctacctcctacctctcctatgtcttggtggtttgcagtaggggccgacctgctggaaaagaatcttgctgagatgcagaacctgcgccagcgcctggaggagtccatcagtctcaatgaccgcctgagggagaggctggagcatgtgcttagcaatggtgaccaaggaaaaggtagaaaggcagaaattttatgtttctgtccacgtctagggagtctcaaaagggcacatagcttcttggggcagagttttaccggtttaaagcacattggtgtgcatgatt

SEQ ID NO: 360912 - DNA, 581 bp, Homo sapiens
atggtgaccaaggaaaaggtagaaaggcagaaattttatgtttctgtccacgtctagggagtctcaaaagggcacatagcttcttggggcagagttttaccggtttaaagcacattggtgtgcatgatttcacttgttccttacaattagcccagatagggaagcagaagggtactattgctcccactgagtggtttgccccaagcagggataggtctaattctcaggactatctgaagtgatgtcattcttatatgtccttatactgcctggtgctgttcttgggcttgtggcctgactggcgagtggtagcaccaaggtttccatggtgcccacttcagcagaatgagagcaacgttccacctttatgccattactacatgcctttgatatcacctggctcttctcttgtgctaatgacccttatttccacactcttcaccctggatgctctcacttggagaccagttcttccccatcccttcttctctcrtattaaagccagaagaatgatgacctacaacatcataactgaagccaattagtgggaaagaccctgatccatacctgaagccactgca

SEQ ID NO: 360913 - DNA, 584 bp, Homo sapiens
tcattgcagccctgtctctccctccctaggtactgsacagtccactgtagcccctcattcatatactcagagtcactcttctggctgtggcgaggacatcctgtgacatgatgcctagagagtctggaagaatgttctccagaacttttccagccctatccaacagaattcttgggtgggaacttggaggcattggatattatctttaaatgaagagatcaaattaataaattatttttaaaattagtgtttatatttatttattgaacacctataaagagtaaaatttgtgtagaaaagaataaaaccagaatggtctgaaatgtgtggaaaaggttaaaggagaaatgagttttctttattagctatctctgtttcagaagactagaatgggaatttcactgctgtgggaaggtaagaaatattaatagatagtgaggatgtagaattccttgacttccattacatgcttaggaagaacagaaaaactgtcacatgtgaaagaattgcagaataaaatctgaatgttttaaaatgaggacaacttaccataccaggtgagcttcactcaagagaatgacaga

SEQ ID NO: 360914 - DNA, 584 bp, Homo sapiens
tcattgcagccctgtctctccctccctaggtactggacagtccactgtagcccctcattcatatactcagagtcactcttctggctgtggcgaggacatcctgtgacatgatgcctagagagtctggaagaatgttctccagaacttttccagccctatccaacagaattcttgggtgggaacttggaggcattggatattatctttaaatgaagagatcaaattaataaattatttttaaaattartgtttatatttatttattgaacacctataaagagtaaaatttgtgtagaaaagaataaaaccagaatggtctgaaatgtgtggaaaaggttaaaggagaaatgagttttctttattagctatctctgtttcagaagactagaatgggaatttcactgctgtgggaaggtaagaaatattaatagatagtgaggatgtagaattccttgacttccattacatgcttaggaagaacagaaaaactgtcacatgtgaaagaattgcagaataaaatctgaatgttttaaaatgaggacaacttaccataccaggtgagcttcactcaagagaatgacaga

SEQ ID NO: 360915 - DNA, 574 bp, Homo sapiens
tcatagaatgagttaggaatccctcatccccaattttttggaatagttttagtaagattggtaccagctcttctttgcacgtctggtggaattcagctgtaaaattctgtctggtccagggctctttcagattagtagaatttttattactgattcaattacataactcattattggtctgttcaggatttcaatttcttcctggttcaatcttaagaagctgtgtgcttccaggaattyaactatttcttctaggtttttctagtttgtgcatgtagagatgctcatagtagtctctgaggatcttttgtatttctgtgatatgagttgtaatgtcacctttgtaatttctgattgtgcttatttggatctttttttcctggttaatctagctagtggtctatcaatcattcaaataaccaacttttcatttcattgatcctttgtattttttttatctctgtttcatttagttctgctcgatcttagttatttctttccttctcctagctttgggttttgtttcttcttcttttcctagttctttaggtgtggtattatgttgttaatttga

SEQ ID NO: 360916 - DNA, 574 bp, Homo sapiens
tcatagaatgagttaggaatccctcatccccaattttttggaatagttttagtaagattggtaccagctcttctttgcacgtctggtggaattcagctgtaaaattctgtctggtccagggctctttcagattagtagaatttttattactgattcaattacataactcattattggtctgttcaggatttcaatttcttcctggttcaatcttaagaagctgtgtgcttccaggaattcaactatttcttctaggtttttctagtttgtgcatgtagagatgctcatagtagtctctgaggatcttttgtatttctgtgatatgagttgtaatgtcacctttgtaatttctgattgtgcttatttggatctttttttcctggttaatctagctagtsgtctatcaatcattcaaataaccaacttttcatttcattgatcctttgtattttttttatctctgtttcatttagttctgctcgatcttagttatttctttccttctcctagctttgggttttgtttcttcttcttttcctagttctttaggtgtggtattatgttgttaatttga

SEQ ID NO: 360917 - DNA, 539 bp, Homo sapiens
ggcagctcaaaagcagtaggaggctgaaagcagctgcaaacaattgcattttttggctatttcttttggttttatcctcttcctctgccttgtccctattgttgtraactccaaaggccatgtttaagagttggctcatggagtttggggtcccattcctgccttttgtaacttcctcctaatgtcaaggatagattgagtaatacaacgcatgcccagaagagcccgcccttccgggttgtctgggtctacattagtatatttcctgagtgcctcaaccaagcagccctaaaacagaatgggattttcatccttccactgagttacttctctatccttgtcacaattaactggcttaatcacacaccttttcatactttctattaaacaagttagcatgtgatttctatgttcaagttcttgggaacccttctggtaatcccactgagggtctctatgtggaactgcatctccccctacataaatggtatggccttggatatgagcagctactctaactgcatattcacaggccagta

SEQ ID NO: 360918 - DNA, 539 bp, Homo sapiens
ggcagctcaaaagcagtaggaggctgaaagcagctgcaaacaattgcattttttggctatttcttttggttttatcctcttcctctgccttgtccctattgttgtaaactccaaaggccatgtttaagagttggctcatggagtttggggtcccattcctgccttttgtaacttcctcctaatgtcaaggatagattgagtaatacaacgcatgcccagaagagcccgcccttccgggttgtctgggtctacattagtatatttcctgagtgcctcaaccaagcagccctaaaacagaatgggattttcatccttccactgagttacttctctatccttgtcayaattaactggcttaatcacacaccttttcatactttctattaaacaagttagcatgtgatttctatgttcaagttcttgggaacccttctggtaatcccactgagggtctctatgtggaactgcatctccccctacataaatggtatggccttggatatgagcagctactctaactgcatattcacaggccagta

SEQ ID NO: 360919 - DNA, 571 bp, Homo sapiens
tcagcatctgccagcaagtttatggcatgccacggtggtatagtgattggcactttgtgttgtgaatgcagaaccttgattccaatccaaaatggcagtgtgtggcatctttttggggagaaactgagctgtcttttggtttgttttcaatccgtgcactgactgagtcctttagcagggtttaccactgactcctgtcaggcaaaaaggagaccccacattgcacatacctagggcccaggacatgccctatgtctcaccattgagcagaaaatatcccaaagggtaaaatgtcacctttcaaaccgccatgttggtagcttccactaatgcagtggtgtggtcataactggtttttactgttccttacaatggctgcaacccttatttgtgactagagaacaaggcttaccactgaattgccagcatgatacagccaggrccatcaaaagcacacctgcactaggtcattgggaactttggaggtgccttacatctgggcatgcattgaaccaccacacaaggtgaaatgcctcttctcaaagaggcttgcctgcagtttccactaacg

SEQ ID NO: 360920 - DNA, 571 bp, Homo sapiens
tcagcatctgccagcaagtttatggcatgccacggtggtatagtgattggcactttgtgttgtgaatgcagaaccttgattccaatccaaaatggcagtgtgtggcatctttttggggagaaactgagctgtcttttggtttgttttcaatccgtgcactgactgagtcctttagcagggtttaccactgactcctgtcaggcaaaaaggagaccccacattgcacatacctagggcccaggacatgccctatgtctcaccattgagcagaaaatatcccaaagggtaaaatgtcacctttcaaaccgccatgttggtagcttccactaatgcagtggtgtggtcataactggtttttactgttccttacaatggctgcaacccttatttgtgactagagaacaaggcttaccactgaattgccagcatgatacagccaggaccatcaaaarcacacctgcactaggtcattgggaactttggaggtgccttacatctgggcatgcattgaaccaccacacaaggtgaaatgcctcttctcaaagaggcttgcctgcagtttccactaacg

SEQ ID NO: 360921 - DNA, 571 bp, Homo sapiens
tcagcatctgccagcaagtttatggcatgccacggtggtatagtgattggcactttgtgttgtgaatgcagaaccttgattccaatccaaaatggcagtgtgtggcatctttttggggagaaactgagctgtcttttggtttgttttcaatccgtgcactgactgagtcctttagcagggtttaccactgactcctgtcaggcaaaaaggagaccccacattgcacatacctagggcccaggacatgccctatgtctcaccattgagcagaaaatatcccaaagggtaaaatgtcacctttcaaaccgccatgttggtagcttccactaatgcagtggtgtggtcataactggtttttactgttccttacaatggctgcaacccttatttgtgactagagaacaaggcttaccactgaattgccagcatgatacagccaggaccatcaaaagcmcacctgcactaggtcattgggaactttggaggtgccttacatctgggcatgcattgaaccaccacacaaggtgaaatgcctcttctcaaagaggcttgcctgcagtttccactaacg

SEQ ID NO: 360922 - DNA, 389 bp, Homo sapiens
ccgtgcaccctccttcaaataatggctttcaatgagcagactagaacgtttaggattgcaaaggaaaccgattcctttcaaacctggttatctttgtgatgtggcactgtgtgcatatcttcsttaaaatgcattgaaggccactgcactccaccctgggcgacaagaggtgactgtgtctcaaaaaaaccaaaaacactcccccctcaccccaaagcattagacatcaaggctggcagggatgtctgttctcttgaaagttcaatatcaattcaatactttaaattcactgtagtttcaatccattggtatggaaagtgttttgaattattgtactgatttttttctatcctctttctgatacgcatgctaatcatatggaccttgga

SEQ ID NO: 360923 - DNA, 389 bp, Homo sapiens
ccgtgcaccctccttcaaataatggctttcaatgagcagactagaacgtttaggattgcaaaggaaaccgattcctttcaaacctggttatctttgtgatgtggcactgtgtgcatatcttcgttaaaaygcattgaaggccactgcactccaccctgggcgacaagaggtgactgtgtctcaaaaaaaccaaaaacactcccccctcaccccaaagcattagacatcaaggctggcagggatgtctgttctcttgaaagttcaatatcaattcaatactttaaattcactgtagtttcaatccattggtatggaaagtgttttgaattattgtactgatttttttctatcctctttctgatacgcatgctaatcatatggaccttgga

SEQ ID NO: 360924 - DNA, 582 bp, Homo sapiens
ttcaagaatatttaaatataatccaaaccatcttagatacattttgtgatacaagaggatggtatcttctatttggaaatataaaatcccagggtctcacagtttaagtatactttccaggggtatgtataaaacaagaatcccactttacaaagttaatagaaaaaawatatgctaattggaaggagaggcttctgattgaggataaagtggaaattttcacatactgctaattacactttaatggagtaagaaaaaaagaattggaaatagtaccctataaaacttctgaaatgaaattacagtttctctctctctctttcttttttttttttcttgagatggagttttgctcttgttgcccaggcgagagtgcaaaggcgctatctcagcacactgcaaccttcacctcccgggtttaagtgattcttttgcctcagcctcccaagtagctgggattacaggcatgcaccaccatgcccgctaattttttgtatgtttagtgacccaccacgcctggctgtctcctctttttagaattaggagaactgatttttttcagtgctaaactggcactgtcct

SEQ ID NO: 360925 - DNA, 582 bp, Homo sapiens
ttcaagaatatttaaatataatccaaaccatcttagatacattttgtgatacaagaggatggtatcttctatttggaaatataaaatcccagggtctcacagtttaagtatactttccaggggtatgtataaaacaagaatcccactttacaaagttaatagaaaaaaaatatgctaattggaaggagaggcttctgattgaggataaagtggaaattttcacatactgctaattacactttaatggagtaagaaaaaaagaattggaaatagtaccctataaaacttctgaaatgaaattacagtttctctctctctctttcttttttttttttcttgagatggagtttygctcttgttgcccaggcgagagtgcaaaggcgctatctcagcacactgcaaccttcacctcccgggtttaagtgattcttttgcctcagcctcccaagtagctgggattacaggcatgcaccaccatgcccgctaattttttgtatgtttagtgacccaccacgcctggctgtctcctctttttagaattaggagaactgatttttttcagtgctaaactggcactgtcct

SEQ ID NO: 360926 - DNA, 582 bp, Homo sapiens
ttcaagaatatttaaatataatccaaaccatcttagatacattttgtgatacaagaggatggtatcttctatttggaaatataaaatcccagggtctcacagtttaagtatactttccaggggtatgtataaaacaagaatcccactttacaaagttaatagaaaaaaaatatgctaattggaaggagaggcttctgattgaggataaagtggaaattttcacatactgctaattacactttaatggagtaagaaaaaaagaattggaaatagtaccctataaaacttctgaaatgaaattacagtttctctctctctctttcttttttttttttcttgagatggagttttgctcttgttgcccaggcgagagtgcaawggcgctatctcagcacactgcaaccttcacctcccgggtttaagtgattcttttgcctcagcctcccaagtagctgggattacaggcatgcaccaccatgcccgctaattttttgtatgtttagtgacccaccacgcctggctgtctcctctttttagaattaggagaactgatttttttcagtgctaaactggcactgtcct

SEQ ID NO: 360927 - DNA, 582 bp, Homo sapiens
ttcaagaatatttaaatataatccaaaccatcttagatacattttgtgatacaagaggatggtatcttctatttggaaatataaaatcccagggtctcacagtttaagtatactttccaggggtatgtataaaacaagaatcccactttacaaagttaatagaaaaaaaatatgctaattggaaggagaggcttctgattgaggataaagtggaaattttcacatactgctaattacactttaatggagtaagaaaaaaagaattggaaatagtaccctataaaacttctgaaatgaaattacagtttctctctctctctttcttttttttttttcttgagatggagttttgctcttgttgcccaggcgagagtgcaaaggcgctatctcagcacactgcaaccttcacctcccgggtttaagtgattcttttgcctcagcctcccaagtagctgggattacaggcatgcaccaccatgcccgctaattttttgtatktttagtgacccaccacgcctggctgtctcctctttttagaattaggagaactgatttttttcagtgctaaactggcactgtcct

SEQ ID NO: 360928 - DNA, 384 bp, Homo sapiens
tgttagctggtgtctagttctttaagttccatgagtctattgtgtcttctttacatctcaaaaagaagagagaagaaacctgcatctaattactgaagcagtttcattcagcaaatgtaattgcatcgcaggcacatctcaaattaaaaatcttsatcttggtctctgtcatttccattttaaactgggactgaataacctgttttgccactcaaaataatagccagtgtctctttcttattaaaatatgtgatcttttgcttgattacctaattatgtcacctgcaccttacgtgaggcagatagaagagtcttccagtctgccagagcagatctaccaaactagactgcacatacaaattacctggggatcctgataaatta

SEQ ID NO: 360929 - DNA, 430 bp, Homo sapiens
atgttttgttagctggtgtctagttctttaagttccatgagtctattgtgtcttctttacatctcaaaaagaagagagaagaaacctgcatctaattactgaagcagtttcattcagcaaatgtaattgcatcgcaggcacatctcaaattaaaaatcttgatcttggtctctgtcatttccattttaaactgggactgaataacctgttttgccactcaaaataatagccagtgtctctttcttattaaaatatgtgatcttttgcttgattacctaattatgtcacctgcaccttacrtgaggcagatagaagagtcttccagtctgccagagcagatctaccaaactagactgcacatacaaattacctggggatcctgataaattacagattctgagtctgctttcaaagagggcctcaagtcaag

SEQ ID NO: 360930 - DNA, 427 bp, Homo sapiens
tgataacttgaaataagaatgggagaaaaggtcaatctgaattcttaaaatgttgaaggctgggaataagaagtaatatatcacagaatctgatagaaaaatttttatttattttatgggagaaaatgggagactaacagacaataggaataggaaagaattaatagaaatagcaaaaagaagtgtatctgcaattattaatataatacaagaggamattgtgtagagatatttaaagaaagattgatgaaatttagatttatggagaaatatcctaataaaggcattatttataatcaactgttcataattattatataattctgacagtttttaggatataaatgtaaggcagaatgatctaatataaaatgtataaatgggacaacatataattttgcttaggaaattgaataaataaagtagt

SEQ ID NO: 360931 - DNA, 427 bp, Homo sapiens
tgataacttgaaataagaatgggagaaaaggtcaatctgaattcttaaaatgttgaaggctgggaataagaagtaatatatcacagaatctgatagaaaaatttttatttattttatgggagaaaatgggagactaacagacaataggaataggaaagaattaatagaaatagcaaaaagaagtgtatctgcaattattaatataatacaagaggaaattgtgtagagatatttaaagaaagattgatgaaatttagatttatggagaaatatcctaataaagrcattatttataatcaactgttcataattattatataattctgacagtttttaggatataaatgtaaggcagaatgatctaatataaaatgtataaatgggacaacatataattttgcttaggaaattgaataaataaagtagt

SEQ ID NO: 360932 - DNA, 358 bp, Homo sapiens
ttaatagaaatagcaaaaagaagtgtatctgcaattattaatataatacaagaggaaattgtgtagagatatttaaagaaagattgatgaaatttagatttatggagaaatatcctaataaaggcattatttataatcaactgttcatmattattatataattctgacagtttttaggatataaatgtaaggcagaatgatctaatataaaatgtataaatgggacaacatataattttgcttaggaaattgaataaataaagtagtgatttacgatttgcattaatataaaaaaatttaaaatggtttacatcttgtttgaaatggatgataaacaggaaaagagtaatttagtaca

SEQ ID NO: 360933 - DNA, 427 bp, Homo sapiens
tgataacttgaaataagaatgggagaaaaggtcaatctgaattcttaaaatgttgaaggctgggaataagaagtaatatatcacagaatctgatagaaaaatttttatttattttatgggagaaaatgggagactaacagacaataggaataggaaagaattaatagaaatagcaaaaagaagtgtatctgcaattattaatataatacaagaggaaattgtgtagagatatttaaagaaagattgatgaaatttagatttatggagaaatatcctaataaaggcattatttataatcaactgttcataattattatataattctgacaktttttaggatataaatgtaaggcagaatgatctaatataaaatgtataaatgggacaacatataattttgcttaggaaattgaataaataaagtagt

SEQ ID NO: 360934 - DNA, 358 bp, Homo sapiens
ttaatagaaatagcaaaaagaagtgtatctgcaattattaatataatacaagaggaaattgtgtagagatatttaaagaaagattgatgaaatttagatttatggagaaatatcctaataaaggcattatttataatcaactgttcataattattatataattctgacagtttttaggatataaatgtaaggcagaawgatctaatataaaatgtataaatgggacaacatataattttgcttaggaaattgaataaataaagtagtgatttacgatttgcattaatataaaaaaatttaaaatggtttacatcttgtttgaaatggatgataaacaggaaaagagtaatttagtaca

SEQ ID NO: 360935 - DNA, 442 bp, Homo sapiens
gtagtagttgtattggttggagaacagaaagatgacactttcatatgcggctgattagagcacagattggtatattatttctgagatgcaatttgaaaatatgtaccatcagcctcaaagatgattatgaccatgtgtcactactttcttggaaatcattattaatgcatgtatagattgatgtttactgtagtattacttaacataatgagttgagtacaaccttcactcccaaaaaacatgaggtaggggtgaaytagttaaatatacaatcacaatgagctatgacaaaatgcagttacttaaaagcacatttataagactattaatggcaataaacatgatttgatataattttttcaaaaattaggggaattctattcctagcattgtgacagactaaatttgttgaatcactatcctgctatatgaaatctacaaa

SEQ ID NO: 360936 - DNA, 442 bp, Homo sapiens
gtagtagttgtattggttggagaacagaaagatgacactttcatatgcggctgattagagcacagattggtatattatttctgagatgcaatttgaaaatatgtaccatcagcctcaaagatgattatgaccatgtgtcactactttcttggaaatcattattaatgcatgtatagattgatgtttactgtagtattacttaacataatgagttgagtacaaccttcactcccaaaaaacatgaggtaggggtgaattagttaaatatacaatcacaatgagctatgacaaaatgcagttasttaaaagcacatttataagactattaatggcaataaacatgatttgatataattttttcaaaaattaggggaattctattcctagcattgtgacagactaaatttgttgaatcactatcctgctatatgaaatctacaaa

SEQ ID NO: 360937 - DNA, 615 bp, Homo sapiens
tatgacaaaatgcagttacttaaaagcacatttataagactattaatggcaataaacatgatttgatataattttttcaaaaattaggggaattctattcctagcattgtgacagactaaatttgytgaatcactatcctgctatatgaaatctacaaataccagataaaatgtacatgtcatttttcaaaagtatattactgacttgaatagaaattaaggtgaaccacataggccaagcataaggagaatacataaatccagagaggtatgcagacccccaaaccagaagcttccataaggacagtcctggccctagtaccctgagcttcaatttttatgaccacctgggatatgggagagtgtgagacaaaacctagtgcctgcccagtatagcagtcttacaggagaaaactgctgaaagccagagatatgaaggactataatttcagtgaaaggataaactagataaaaacctgttcctcagggggagacaaccaggaaattttcctgcctcaaactcggtgctatttagaggaaaaattagaaggccatcttcacatgaatttgtggtttaaattttcactgtaagtataattttaaaaaaacccacac

SEQ ID NO: 360938 - DNA, 553 bp, Homo sapiens
aaaaagtgaattcaataaaataaaatatttaactttgacaaatcttgtttagcaaacaagaaatagaagagctttcagtgtttgcttataaatcagaaactattcttcgtctttcaagcagaggtgatttaatacaggtgattgattacacaagtgatggaagccaaaccaggcttggtgagtcagcagctcaagagcaagaaaccagtactgcccctargactagaaggatcatggaagaaggtgttattatcagagccaaggggccaggacttcaggcaggttgctagagctaatgggaattgggtccatggagggaggggctatctggtgggaagcagccctgcagagaagaggcaggcttttatggcatctctcactggatagcctactgggaaaatggagggcaaaggagactgggaaataaatgttattttcctgaaacatagaacagagttggagagtaatttgggagggatctgggggcaaatttgtcaggacccaagacatgattaaagcaggcagggaaaagagatgttggtcaaagcaggtg

SEQ ID NO: 360939 - DNA, 649 bp, Homo sapiens
cacattaacaagttaaaggaggaaaagcaaatcatcattgtagaagaggcaaaaagtgaattcaataaaataaaatatttaactttgacaaatcttgtttagcaaacaagaaatagaagagctttcagtgtttgcttataaatcagaaactattcttcgtctttcaagcagaggtgatttaatacaggtgattgattacacaagtgatggaagccaaaccaggcttggtgagtcagcagctcaagagcaagaaaccagtactgcccctaggactagaaggatcatggaagaaggtgttattatcagagccaaggggccaggacttcaggcaggttgctagagctaatgggaattgggtccatggagggaggggctatctggtgggaagcagccctgcagagaagaggcaggcttttatggcatctctcactggatagcctactgggaaaatggagggcaaaggagactgggaaataaatgttattttcctgaaacatagaacagagttggagagtaatttgggagggatctgggggcaaatttgtcaggacccaagacatgattaaagcaggcagggaaaagagatgytggtcaaagcaggtggcctttgctggtatttcaaagtcctagttttaaaactcagaggttt

SEQ ID NO: 360940 - DNA, 587 bp, Homo sapiens
gatgatcgagctatatatttgtcaaataatatctaaaggtaaaaagatctagttcacagaggcgaatctctgatttttyaatttgcattaacagaaacaacattggaagggagtatattaagattttaatagtgactatttctgccaatggtttctgttttattgtttactattttcggtatatttccaatgtttcttaataagtgtttattatttaaaaaatgagaaaacagcaatgagtaattcagtaaaataaaatttttcaaaattgtgactgctatgattatgagccaattatgaaagaaagagacacagatagaaatagggtgaccaatctttcaacttactcaggaatgaaggattttctggatgggggatttttgttgctaaaatcgggacagtaggggacatattgggactgtggaaaaagcctacagggatttatttcctaactatgaatgtctatcttggtctagagacgactgttctcataaataggtagagtagatgtggtatttctggaatgagatttaacatctttacgtagcttgccctattaaaagtagacaaatgcttgtgagagaata

SEQ ID NO: 360941 - DNA, 587 bp, Homo sapiens
gatgatcgagctatatatttgtcaaataatatctaaaggtaaaaagatctagttcacagaggcgaatctctgattttttaatttgcattaacagaaacaacattggaagggagtatattaagattttaatagtgackatttctgccaatggtttctgttttattgtttactattttcggtatatttccaatgtttcttaataagtgtttattatttaaaaaatgagaaaacagcaatgagtaattcagtaaaataaaatttttcaaaattgtgactgctatgattatgagccaattatgaaagaaagagacacagatagaaatagggtgaccaatctttcaacttactcaggaatgaaggattttctggatgggggatttttgttgctaaaatcgggacagtaggggacatattgggactgtggaaaaagcctacagggatttatttcctaactatgaatgtctatcttggtctagagacgactgttctcataaataggtagagtagatgtggtatttctggaatgagatttaacatctttacgtagcttgccctattaaaagtagacaaatgcttgtgagagaata

SEQ ID NO: 360942 - DNA, 587 bp, Homo sapiens
gatgatcgagctatatatttgtcaaataatatctaaaggtaaaaagatctagttcacagaggcgaatctctgattttttaatttgcattaacagaaacaacattggaagggagtatattaagattttaatagtgactatttctgccaatggtttctgttttattgtttactattttcggtatatttccaatgtttcttaataagtgtttattatttaaaaaatgagaaaacagcaatgagtaattcagtaaaataaaatttttcaaaattgtgactgctatgattatgagccaattatgaaagaaagagacacagatagaaatagggtgaccaatctttcaacttactcaggaatgaaggattttctggatgggggatttttgttgctaaaatcgggacagtaggggacatrttgggactgtggaaaaagcctacagggatttatttcctaactatgaatgtctatcttggtctagagacgactgttctcataaataggtagagtagatgtggtatttctggaatgagatttaacatctttacgtagcttgccctattaaaagtagacaaatgcttgtgagagaata

SEQ ID NO: 360943 - DNA, 458 bp, Homo sapiens
aaaataaaatttttcaaaattgtgactgctatgattatgagccaattatgaaagaaagagacacagatagaaatagggtgaccaatctttcaacttactcaggaatgaaggattttctggatgggggatttttgttgctaaaatcgggacagtaggggacatattgggactgtggaaaaascctacagggatttatttcctaactatgaatgtctatcttggtctagagacgactgttctcataaataggtagagtagatgtggtatttctggaatgagatttaacatctttacgtagcttgccctattaaaagtagacaaatgcttgtgagagaatatcatatacttttgaaagctaatgtcttaactaatttgctgcaagcaaagctcttgaagactgtgatgtaacagagattcctaggtatcagtgaagatacggagatgaaaaagggaagttg

SEQ ID NO: 360944 - DNA, 312 bp, Homo sapiens
cagtaaaataaaatttttcaaaattgtgactgctatgattatgagccaattatgaaagaaagagacacagatagaaatagggtgaccaatctttcaacttactcaggaatgaaggattttctggatgggggatttttgttgctaaaatcgggacagtaggggacatattgggactgtggaaaaagcctacagggatttatttcctaactatgaatgtctatcttggtctagagacgactgttctcataaataggtagartagatgtggtatttctggaatgagatttaacatctttacgtagcttgccctat

SEQ ID NO: 360945 - DNA, 513 bp, Homo sapiens
tattttttttgacatgatctcactttgtcacccaggctagagtgcagtgatgtgatcatagcttaatgcagcctctctstcctgggctcaagcaatcctcccacctcagcttccagagtacctggggctacagctgtgtgccaccacgcccagctaaaggacttgaattttcttacatatcttggccctatagagtggttctcaaccttggctgcacatgtctattacctgagaaaagttttaaataacctaatactcaggtcacaccctagactttaggggtgagacaagcattaatattttttaacactcttagaattaagagccactaatattgtagcattgcaattcctataaagagaacagatgtgagtcaatttgttacagtattgttgtattcatctgttttcatgctgctgataaggacatacctgagaccgggcaatttacaaaagaaagaggtttaatggacttacagttccacatgggtggggaggcctcaaaatcatggtg

SEQ ID NO: 360946 - DNA, 453 bp, Homo sapiens
ttctcaaccttggctgcacatgtctattacctgagaaaagttttaaataacctaatactcaggtcacaccctagactttaggggtgagacaagcattaatattttttaacactcttagaattaagagccactaatattgtagcattgcaattcctataaagagaacagatgtgagtcaatttgttacagtattgttgtattcatctgttttcatgctgctgataaggacatacctgagaccgggcaatttacaaaagaaagaggtttaatggacttacagttccacatgggtggggaggcctcamaatcatggtggaggacaaagaggagcaagtcacatcttacatggatagcagcaggcaaagagacagcttgtgcagggaaactcccattttaaaaatgatcagatctcatgagacttactcactaacacaagaacagcacaggaaagac

SEQ ID NO: 360947 - DNA, 453 bp, Homo sapiens
ttctcaaccttggctgcacatgtctattacctgagaaaagttttaaataacctaatactcaggtcacaccctagactttaggggtgagacaagcattaatattttttaacactcttagaattaagagccactaatattgtagcattgcaattcctataaagagaacagatgtgagtcaatttgttacagtattgttgtattcatctgttttcatgctgctgataaggacatacctgagaccgggcaatttacaaaagaaagaggtttaatggacttacagttccacatgggtggggaggcctcaaaatcatggtggaggacaaagaggagcaagtcacatcttacatggatrgcagcaggcaaagagacagcttgtgcagggaaactcccattttaaaaatgatcagatctcatgagacttactcactaacacaagaacagcacaggaaagac

SEQ ID NO: 360948 - DNA, 566 bp, Homo sapiens
tcatgctgctgataaggacatacctgagaccgggcaatttacaaaagaaagaggtttaatggacttacagttccacatgggtggggaggcctcaaaatcatggtggaggacaaagaggagcaagtcacatcttacatggatagcagcaggcaaagagacagcttgtgcagggaaactcccattttaaaaatgatcagatctcatgagacttactcactaacmcaagaacagcacaggaaagacccatcctcatgattcagttatctcccactgggcacctcccacaacatgtgggaattatgggagctacaagatgagattgggtgtggacacagccaaaccatatcaattgtcatcactcaaggcagatgagtatatagaaagctatcagttgtaaggaattggactaagtttaagagaataataattaagatagaacaaatgtttggtcctgcttaagggctaggatagatgaggcacaatagaatcatgtggggagctgtaaaaatgcccaggccctactctgtgtcaattaaatcagaatccagaatctctgcttgagtgtg

SEQ ID NO: 360949 - DNA, 566 bp, Homo sapiens
tcatgctgctgataaggacatacctgagaccgggcaatttacaaaagaaagaggtttaatggacttacagttccacatgggtggggaggcctcaaaatcatggtggaggacaaagaggagcaagtcacatcttacatggatagcagcaggcaaagagacagcttgtgcagggaaactcccattttaaaaatgatcagatctcatgagacttactcactaacacaagaacagcacaggaaagacccatcctcatgattcagttatctcccactgggcmcctcccacaacatgtgggaattatgggagctacaagatgagattgggtgtggacacagccaaaccatatcaattgtcatcactcaaggcagatgagtatatagaaagctatcagttgtaaggaattggactaagtttaagagaataataattaagatagaacaaatgtttggtcctgcttaagggctaggatagatgaggcacaatagaatcatgtggggagctgtaaaaatgcccaggccctactctgtgtcaattaaatcagaatccagaatctctgcttgagtgtg

SEQ ID NO: 360950 - DNA, 509 bp, Homo sapiens
tgtggacacagccaaaccatatcaattgtcatcactcaaggcagatgagtatayagaaagctatcagttgtaaggaattggactaagtttaagagaataataattaagatagaacaaatgtttggtcctgcttaagggctaggatagatgaggcacaatagaatcatgtggggagctgtaaaaatgcccaggccctactctgtgtcaattaaatcagaatccagaatctctgcttgagtgtgtctagagtattggtcaaaggaaacagtgattttgatgtgcagccagttaagagctgatatcctcaaggatcatgatgtgacacagctgtttcagaagggtaaatctccatactcccactttagaagaaaagaaaagacaaaatgacaaaacaatcaagcaaaagggctggaagagctggtagataacagggtgtcaacttgaattaattcagctctttggtaaagattagctggagtaaagaaattccagttagtcaaatgggatga

SEQ ID NO: 360951 - DNA, 509 bp, Homo sapiens
tgtggacacagccaaaccatatcaattgtcatcactcaaggcagatgagtatatagaaagctatcakttgtaaggaattggactaagtttaagagaataataattaagatagaacaaatgtttggtcctgcttaagggctaggatagatgaggcacaatagaatcatgtggggagctgtaaaaatgcccaggccctactctgtgtcaattaaatcagaatccagaatctctgcttgagtgtgtctagagtattggtcaaaggaaacagtgattttgatgtgcagccagttaagagctgatatcctcaaggatcatgatgtgacacagctgtttcagaagggtaaatctccatactcccactttagaagaaaagaaaagacaaaatgacaaaacaatcaagcaaaagggctggaagagctggtagataacagggtgtcaacttgaattaattcagctctttggtaaagattagctggagtaaagaaattccagttagtcaaatgggatga

SEQ ID NO: 360952 - DNA, 569 bp, Homo sapiens
ataataattaagatagaacaaatgtttggtcctgcttaagggctaggatagatgaggcacaatagaatcatgtggggagctgtaaaaatgcccaggccctactctgtgtcaattaaatcagaatccagaatctctgcttgagtgtgtctagagtattggtcaaaggaaacagtgattttgatgtgcagccagttaagagctgatatcctcaaggatcatgatgtgacacagctgtttcagaagggtaaatctccatactcccactttagaagaaaagaaaagrcaaaatgacaaaacaatcaagcaaaagggctggaagagctggtagataacagggtgtcaacttgaattaattcagctctttggtaaagattagctggagtaaagaaattccagttagtcaaatgggatgaatgtccttttatggaaaccatatcatgctttttgaatgatctgagaaagactggaagcattagaggtgaagtatatccatttgctcaatgggagaagattttgttttattttatttacataatgtgatatgcttggccatctgcagtagtgcctga

SEQ ID NO: 360953 - DNA, 548 bp, Homo sapiens
aggctttctatttttgtttaataatttaccttcaagatattcttaacttttaacaactgtattgtataaatatattttttattwaaacaataggctaccaataacattaataacatatcttggtttatgtattttacaagattctccatgtgataaattccaacctgaaaagttgctatagaacatatgaatttaacattttttaattgctgcgatctaatatgatcctaaaacatggccctagtttatattcctatgagaatgtctaatacctacactcttgctaacattgactgctattgcattttaaagactaatttgattggattgatgttgaacatcttctgttactcctggccattacatttctttttctacctattaatctcccttgtataatattgcattattcgtcttttttgtctcatttatcgacaaagattaaagttattggcagtagtgaaaatggagaaaaaaatcaaaattcaaatactgtagagtacaatattttggagaataatttgattctatatattgaaatttaaatt

SEQ ID NO: 360954 - DNA, 548 bp, Homo sapiens
aggctttctatttttgtttaataatttaccttcaagatattcttaacttttaacaactgtattgtataaatatattttttatttaaacaataggctaccaataacattaataacatatcttggtttatgtattttacaagattctccatgtgataaattccaacctgaaaagttgctatasaacatatgaatttaacattttttaattgctgcgatctaatatgatcctaaaacatggccctagtttatattcctatgagaatgtctaatacctacactcttgctaacattgactgctattgcattttaaagactaatttgattggattgatgttgaacatcttctgttactcctggccattacatttctttttctacctattaatctcccttgtataatattgcattattcgtcttttttgtctcatttatcgacaaagattaaagttattggcagtagtgaaaatggagaaaaaaatcaaaattcaaatactgtagagtacaatattttggagaataatttgattctatatattgaaatttaaatt

SEQ ID NO: 360955 - DNA, 548 bp, Homo sapiens
aggctttctatttttgtttaataatttaccttcaagatattcttaacttttaacaactgtattgtataaatatattttttatttaaacaataggctaccaataacattaataacatatcttggtttatgtattttacaagattctccatgtgataaattccaacctgaaaagttgctatagaacatatgaatttaacattttttaattgctgcgatctaatatgatcctaaaacatggccctagtttatattcctatgagaatgtctaatacctacactcttgctaacattgactgctattgcattttaaagactaatttgattggattgatgttgaacatcttctgttactcctggccattacatttctttttctacctattaatctcccttgtataatattgcattattygtcttttttgtctcatttatcgacaaagattaaagttattggcagtagtgaaaatggagaaaaaaatcaaaattcaaatactgtagagtacaatattttggagaataatttgattctatatattgaaatttaaatt

SEQ ID NO: 360956 - DNA, 579 bp, Homo sapiens
ataatacaggaaaaaaacctttacagagattattcttataatgtttgtgatacaatatttacaggcaacataaattctcatccagagatcagagtaaatattatatagtatatctgtagaaygaaatgtaccttgctgtttaaatgagtaaattagttattatcataaaataaatgtcatgtaaagacatttattttatggtgtataaaattagaaaaacaagttattaaaaataacatgattttttgtaaaatgcttttattttgtttttaattgacataataattgcacatgtttatggggtacagtgtggtgctttagtgcatgtgtacattgcgtaatggtcaaatttaaaaattaaatgtattgatagaaaaagtgtttggatatttgtatcctaaatgctaacagtgatgatatctggaatgtggaactgctggtaatttttccctttttcttttagagatttttgtacttatttttaataataaacatatactaattttataataaaaataacaatgaagtcctttccattttgaaaaattaattccaatagaaaaatattgtacttgagcc

SEQ ID NO: 360957 - DNA, 431 bp, Homo sapiens
acaatatttacaggcaacataaattctcatccagagatcagagtaaatattatatagtatatctgtagaatgaaatgtaccttgctgtttaaatgartaaattagttattatcataaaataaatgtcatgtaaagacatttattttatggtgtataaaattagaaaaacaagttattaaaaataacatgattttttgtaaaatgcttttattttgtttttaattgacataataattgcacatgtttatggggtacagtgtggtgctttagtgcatgtgtacattgcgtaatggtcaaatttaaaaattaaatgtattgatagaaaaagtgtttggatatttgtatcctaaatgctaacagtgatgatatctggaatgtggaactgctggtaatttttccctttttcttttagagatttttgtacttatttt

SEQ ID NO: 360958 - DNA, 431 bp, Homo sapiens
acaatatttacaggcaacataaattctcatccagagatcagagtaaatattatatagtatatctgtagaatgaaatgtaccttgctgtttaaatgagtaaattagttattatcataaaataaatgtcatgtaaagacatttattttatggtgtataaaattagaaaaacaagttattaaaaataacatgattttttgtaaaatgcttttattttgtttttaattgacataataattgcacatgtttatggggtacagtgtggtgctttagtgcatgtgtacattgygtaatggtcaaatttaaaaattaaatgtattgatagaaaaagtgtttggatatttgtatcctaaatgctaacagtgatgatatctggaatgtggaactgctggtaatttttccctttttcttttagagatttttgtacttatttt

SEQ ID NO: 360959 - DNA, 579 bp, Homo sapiens
ataatacaggaaaaaaacctttacagagattattcttataatgtttgtgatacaatatttacaggcaacataaattctcatccagagatcagagtaaatattatatagtatatctgtagaatgaaatgtaccttgctgtttaaatgagtaaattagttattatcataaaataaatgtcatgtaaagacatttattttatggtgtataaaattagaaaaacaagttattaaaaataacatgattttttgtaaaatgcttttattttgtttttaattgacataataattgcacatgtttatggggtacagtgtggtgctttagtgcatgtgtacattgcgtaatggtcaaatttaaaaattaaatgtattgatagaaraagtgtttggatatttgtatcctaaatgctaacagtgatgatatctggaatgtggaactgctggtaatttttccctttttcttttagagatttttgtacttatttttaataataaacatatactaattttataataaaaataacaatgaagtcctttccattttgaaaaattaattccaatagaaaaatattgtacttgagcc

SEQ ID NO: 360960 - DNA, 590 bp, Homo sapiens
gatgatatctggaatgtggaactgctggtaatttttccctttttcttttagagatttttgtacttatttttaataataaacatatactaattttataataaaaataacaatgaagtcctttccattttgaaaaattaattccaatagaaaaatattgtacttgagccactttccagggttttcttattcttagtgctggtataaggtaccagtgatattatattttcagatatgtttggcttttctgccttatggttgaagatgagcttaggaagtattgctgcctaattttcaggcttttgagccaatgcttggtgcacaaaaagcaccacatcaactttaaacagaatattctgcttctttagactgtatttcctactttttatagtatttattagygccagaactctgtgactgtttcccaaagaacaagagagaaagatcaaggaaagtgagaagcaatgaaactagatttaattaatactctggcttgtcagcagccagatttgtttgttgaagaagttgaacctattagcttaaacagggattaactctgccaactctgacagagcatggacaattaagagttt

SEQ ID NO: 360961 - DNA, 563 bp, Homo sapiens
ttttcagatatgtttggcttttctgccttatggttgaagatgagcttaggaagtattgctgcctaattttcaggcttttgagccaatgcttggtgcacaaaaagcaccacatcaactttaaacagaatattctgcttctttagactgtatttcctactttttatagtatttattagcgccagaactctgtgactgtttcccaaagaacaagagagaaagatcaaggaaaktgagaagcaatgaaactagatttaattaatactctggcttgtcagcagccagatttgtttgttgaagaagttgaacctattagcttaaacagggattaactctgccaactctgacagagcatggacaattaagagtttattggaaattaattgaaaataatacagtgttgtgaggtgagatgaagatgatttcctttaaggaaattatgccaagtgttttgaatcagccaaggataaacaaatgcagactatcatttgatggaggtattataaactgataacatgattcgaagtataagaatggcaaattgtgaagattgaatgaaattacag

SEQ ID NO: 360962 - DNA, 563 bp, Homo sapiens
ttttcagatatgtttggcttttctgccttatggttgaagatgagcttaggaagtattgctgcctaattttcaggcttttgagccaatgcttggtgcacaaaaagcaccacatcaactttaaacagaatattctgcttctttagactgtatttcctactttttatagtatttattagcgccagaactctgtgactgtttcccaaagaacaagagagaaagatcaaggaaagtgagaagcaatgaaactagatttaattaatactctggcttgtcagcagccagatttgtttgttgaagaagttgaacctattagcttaaacagggattaactctgccaactctgacagagcatggacaattaagagtttattggaaattaattgaaaataatacagtgttgtgaggtgrgatgaagatgatttcctttaaggaaattatgccaagtgttttgaatcagccaaggataaacaaatgcagactatcatttgatggaggtattataaactgataacatgattcgaagtataagaatggcaaattgtgaagattgaatgaaattacag

SEQ ID NO: 360963 - DNA, 531 bp, Homo sapiens
tctttaaagtccacattataaatgtgcaagttaagtgagttatggaaatcattccagatactggttcaccagtaacatmagtttagccctaaatattgtcataagttctctgataggcgcatgtgatttaagctggtgctctgtcaagactagacttaggcgttttatcctttttatgacattatgtatgttgaagagaatatatgaatatatataaaaccttcattatcacattattctcaatccagcattttctcagcccctgattttcatgttagttcagcattcttacatctttacagattttcatctaagactacatttctattgttttatataatcagcccccctaagatcaacatgtccacattttttggcaaagacaaagcctactgatttcaggatcattattttcctttttcaaaagcacaaacccaaactgagaaataaatcaagagaaattctccttttttctatgctaatttagaagtagagtctttatttcttttcaaacccaaagagaatcagaca

SEQ ID NO: 360964 - DNA, 531 bp, Homo sapiens
tctttaaagtccacattataaatgtgcaagttaagtgagttatggaaatcattccagatactggttcaccagtaacataagtttagccctaaatattgtcataagttctctgataggckcatgtgatttaagctggtgctctgtcaagactagacttaggcgttttatcctttttatgacattatgtatgttgaagagaatatatgaatatatataaaaccttcattatcacattattctcaatccagcattttctcagcccctgattttcatgttagttcagcattcttacatctttacagattttcatctaagactacatttctattgttttatataatcagcccccctaagatcaacatgtccacattttttggcaaagacaaagcctactgatttcaggatcattattttcctttttcaaaagcacaaacccaaactgagaaataaatcaagagaaattctccttttttctatgctaatttagaagtagagtctttatttcttttcaaacccaaagagaatcagaca

SEQ ID NO: 360965 - DNA, 565 bp, Homo sapiens
ataaaaccttcattatcacattattctcaatccagcattttctcagcccctgattttcatgttagttcagcattcttacatctttacagattttcatctaagactacatttctaytgttttatataatcagcccccctaagatcaacatgtccacattttttggcaaagacaaagcctactgatttcaggatcattattttcctttttcaaaagcacaaacccaaactgagaaataaatcaagagaaattctccttttttctatgctaatttagaagtagagtctttatttcttttcaaacccaaagagaatcagacatacaatatgaatttatctactttcacttgctcagactgagaggaaagattaatattttcaggctgttagtcaaaactgttcattcaaatattatttaataaaatccaagaaccagctaaaaagtcgcttaagctaagaaaccttcaccagcctcatgggaaattgtgtacagttttccactagaatagcctataaatgcttactgaaaatgtctaagttcatatcttggtaactaacattttaattc

SEQ ID NO: 360966 - DNA, 531 bp, Homo sapiens
tctttaaagtccacattataaatgtgcaagttaagtgagttatggaaatcattccagatactggttcaccagtaacataagtttagccctaaatattgtcataagttctctgataggcgcatgtgatttaagctggtgctctgtcaagactagacttaggcgttttatcctttttatgacattatgtatgttgaagagaatatatgaatatatataaaaccttcattatcacattattctcaatccagcattttctcagcccctgattttcatgttagttcagcattcttacatctttacagattttcatctaagactacatttctattgttttatataatcagcccccctaagatcaacatgtccacattttttggcaaagacaaagcctactgatttcaggatcattmttttcctttttcaaaagcacaaacccaaactgagaaataaatcaagagaaattctccttttttctatgctaatttagaagtagagtctttatttcttttcaaacccaaagagaatcagaca

SEQ ID NO: 360967 - DNA, 565 bp, Homo sapiens
ataaaaccttcattatcacattattctcaatccagcattttctcagcccctgattttcatgttagttcagcattcttacatctttacagattttcatctaagactacatttctattgttttatataatcagcccccctaagatcaacatgtccacattttttggcaaagacaaagcctactgatttcaggatcattattttcctttttcaaaagcacaaacccaaactgagaaataaatcaagagaaattctccttttttctatgctaatttagaagtrgagtctttatttcttttcaaacccaaagagaatcagacatacaatatgaatttatctactttcacttgctcagactgagaggaaagattaatattttcaggctgttagtcaaaactgttcattcaaatattatttaataaaatccaagaaccagctaaaaagtcgcttaagctaagaaaccttcaccagcctcatgggaaattgtgtacagttttccactagaatagcctataaatgcttactgaaaatgtctaagttcatatcttggtaactaacattttaattc

SEQ ID NO: 360968 - DNA, 565 bp, Homo sapiens
ataaaaccttcattatcacattattctcaatccagcattttctcagcccctgattttcatgttagttcagcattcttacatctttacagattttcatctaagactacatttctattgttttatataatcagcccccctaagatcaacatgtccacattttttggcaaagacaaagcctactgatttcaggatcattattttcctttttcaaaagcacaaacccaaactgagaaataaatcaagagaaattctccttttttctatgctaatttagaagtagagtctttatttcttttcaaacccaaagagaatcagacatacaatatgaatttatctactttcrcttgctcagactgagaggaaagattaatattttcaggctgttagtcaaaactgttcattcaaatattatttaataaaatccaagaaccagctaaaaagtcgcttaagctaagaaaccttcaccagcctcatgggaaattgtgtacagttttccactagaatagcctataaatgcttactgaaaatgtctaagttcatatcttggtaactaacattttaattc

SEQ ID NO: 360969 - DNA, 565 bp, Homo sapiens
ataaaaccttcattatcacattattctcaatccagcattttctcagcccctgattttcatgttagttcagcattcttacatctttacagattttcatctaagactacatttctattgttttatataatcagcccccctaagatcaacatgtccacattttttggcaaagacaaagcctactgatttcaggatcattattttcctttttcaaaagcacaaacccaaactgagaaataaatcaagagaaattctccttttttctatgctaatttagaagtagagtctttatttcttttcaaacccaaagagaatcagacatacaatatgaatttatctactttcacttgctcagactgagaggaaagattaatattttcaggctgttagtcaaaactgttcattcaaatattatttaataaaatccaagaaccagctaaaaagtcgcttaagctaagaaaccttcaccagcctcatgggaaattgtgtacagttttcyactagaatagcctataaatgcttactgaaaatgtctaagttcatatcttggtaactaacattttaattc

SEQ ID NO: 360970 - DNA, 565 bp, Homo sapiens
ggaattacatatatttgtatgattcttctagttatatccatggtaataaacactcttttcagttggaaataaaacccatttgtgctatattattagggaaaatatctacataaattagtttttaatttaactaaagtctatcttttgaattcataagcataaaattttaaccacttgcaaaatttataacacacttaaggtagtcagatgccttgtcaagtagtttaacaaaagtgattttcacctgtttgttttaataasagtgcatcgattttatgaaaatcaggcatgccctcgggtcctaacaaagtatacgaagctgaatggatctatgccaaatatgccagattttactttctgagtctgattttatacttctgtcctctttcttaccacatggcttccagtatcacttacagactaacccttcaaaaggagaaggctaagttactaacatttggaaggcttatgaaagtgaagcatagttatgagccagcaatgtttttatttagggaatgtgtgcaaaccatacacttaagcaagctctggggaatgagagttgggg

SEQ ID NO: 360971 - DNA, 565 bp, Homo sapiens
ggaattacatatatttgtatgattcttctagttatatccatggtaataaacactcttttcagttggaaataaaacccatttgtgctatattattagggaaaatatctacataaattagtttttaatttaactaaagtctatcttttgaattcataagcataaaattttaaccacttgcaaaatttataacacacttaaggtagtcagatgccttgtcaagtagtttaacaaaagtgattttcacctgtttgttttaataagagtgcatcgattttatgaaaatcaggcatgccctcgggtcctaacaaagtatacgaagctgaatggatctatgccaaatatgccagattttactttctgagtctgattttatacttctgtcctctttcttaccacatggcttccagtatcacttacagactaacccttcaaaaggagaaggctaagttactaacatttggaaggcttatgaaagtgaagcatagttatgagccagcaatgtttttatttakggaatgtgtgcaaaccatacacttaagcaagctctggggaatgagagttgggg

SEQ ID NO: 360972 - DNA, 531 bp, Homo sapiens
agagcctagtaatgagtatctggtaccycagtatcctctcccacagaatctgtacagctctccgtttatgacagtttaaacttaatttaaattatcaaacagacactttcctcaaacatataaatgatgaggcagttcattcaggctgtatgtataaagttgttccagccacctttttctaatggcttctctatatcttttacatggagacaatgagagatttgcttaggacaatttgactgtaatttagaagtaggaaatgggaagtatttgtatcttctttgcctaactcacattagttactcaagtaagcatttcttccgttattgcattttcctgattacaagttttatgttttctctaaaacacatatcaaaagaaatgtcctaagcactatgcagggggaagccatgacatttatccaccactgtcagcaaaaacatgaacttagccctcaacagaatatttcacttcattctagtgtcacctctgcgtcacctgcactggagtcaccacttgcctgttgggtaa

SEQ ID NO: 360973 - DNA, 520 bp, Homo sapiens
ggagagcctagtaatgagtatctggtacctcagtatcctctcccacagaatctgtacagctctccgtttatgacagtttaaacttaatttaaattatcaaacagacactttcctcaaacatataaatgatgaggcagttcattcaggctgtatgtataaagttgttccagccacctttttctaayggcttctctatatcttttacatggagacaatgagagatttgcttaggacaatttgactgtaatttagaagtaggaaatgggaagtatttgtatcttctttgcctaactcacattagttactcaagtaagcatttcttccgttattgcattttcctgattacaagttttatgttttctctaaaacacatatcaaaagaaatgtcctaagcactatgcagggggaagccatgacatttatccaccactgtcagcaaaaacatgaacttagccctcaacagaatatttcacttcattctagtgtcacctctgcgtcacctgcactggagtcaccactt

SEQ ID NO: 360974 - DNA, 545 bp, Homo sapiens
aatgaaaactgacaaaactttttaaggggatagtattgtttcttcactctccccccctcctcacccctgcacacacatacatttctccttcctggggaactccaaagaaaacaaaggccctttarcaatcaagtagattgtctctcttgatggcatcccatgagttatggaattacatactgcaggcccaggtggattagggcccttagaaagtttgcttgatcaacagagtgctgttgattttttcaactgaattaattactcttggagtccaaactctccagtgtgccacagtcctcatcacttcctgtatcttaaatattgcattatctgtcccctaaaagtatttgaacatgtgacccagagaagaggacttacaacttgactaggcaacttctgtcacactggattcatatgaaattccactgcaagtgacatcaccagattggggaccctgaagtgtttgagtatcttctccacatctggtcatttaggctaagaaattccttcttgtctaccaggtcttttagcattcattttgtaag

SEQ ID NO: 360975 - DNA, 545 bp, Homo sapiens
aatgaaaactgacaaaactttttaaggggatagtattgtttcttcactctccccccctcctcacccctgcacacacatacatttctccttcctggggaactccaaagaaaacaaaggccctttaacaatcaagtagattgtctctcttgatggcatcccatgagttatggaattacatactgcaggcccaggtggattagggcccytagaaagtttgcttgatcaacagagtgctgttgattttttcaactgaattaattactcttggagtccaaactctccagtgtgccacagtcctcatcacttcctgtatcttaaatattgcattatctgtcccctaaaagtatttgaacatgtgacccagagaagaggacttacaacttgactaggcaacttctgtcacactggattcatatgaaattccactgcaagtgacatcaccagattggggaccctgaagtgtttgagtatcttctccacatctggtcatttaggctaagaaattccttcttgtctaccaggtcttttagcattcattttgtaag

SEQ ID NO: 360976 - DNA, 576 bp, Homo sapiens
tcatactccttgattgggaaactctcaactcaataaacattctttagtctcatgtcttttctaaaggaaagaaattaatrttatattcttgggtgaaaaaaatgtgaggtctcaaaagagtataatacaatttggggatgcatatatattttacatgtatatagacacataaaaatctaaaagcataaattttaatatgttaacagaagacagaagtcatgtattttttactttcttctttttggcatatctctttttctaactttttttttttctttttacaaaaaacaattgttatttgtgtacttttaaaacctcacagtaatattttcacactaccttcttggctgaaagttcacactcggaattccagagcagtccatggccaggcccactgggctccccttgctctctccttggctttggtaaccactggccccagggactcagcctgctttcctatccatcccctcagtagctgtcaccatgcaggttaccccttctgtttcttctaccactaactccatgtctgactgcaagtgaaaggaacagaagcccaaacctttgggttttaag

SEQ ID NO: 360977 - DNA, 576 bp, Homo sapiens
tcatactccttgattgggaaactctcaactcaataaacattctttagtctcatgtcttttctaaaggaaagaaattaatattatattcttgggtgaaaaaaatgtgaggtctcaaaagagtataatacaatttggggatgcatatatattttacatgtatatagacacataaaaatctaaaagmataaattttaatatgttaacagaagacagaagtcatgtattttttactttcttctttttggcatatctctttttctaactttttttttttctttttacaaaaaacaattgttatttgtgtacttttaaaacctcacagtaatattttcacactaccttcttggctgaaagttcacactcggaattccagagcagtccatggccaggcccactgggctccccttgctctctccttggctttggtaaccactggccccagggactcagcctgctttcctatccatcccctcagtagctgtcaccatgcaggttaccccttctgtttcttctaccactaactccatgtctgactgcaagtgaaaggaacagaagcccaaacctttgggttttaag

SEQ ID NO: 360978 - DNA, 537 bp, Homo sapiens
ttagcacacctctcaaataagaaggcagtactgggaaggctctgaacctgtggcagaaccactgatagctgtggagctattccaaggagtctgggaatcaggggrattatcaagatcattgttagaataaattaatcttactgtatatatagcagaagttttcaaacatatgtaaatgttactaataaccaaataattacaccttgtttttctttaaactgtaactctcaagtatgtctctacataattttttgattggtagtgtctgcatgctcaaaaagcttgaaaacactactggagaagaaggtctcgggagtgtgatgaaatacgtttacatggcagcttcatcatttgattggtgaaagtgactatgtgtcttaaactctctgagcctcagtttgcacatccaaaagcaaggatataattccatgaacctttccacctcaagtccacaaggcagaatagcaagatgttaactgccactctgaggaccaccaaataaaaggacaatttattaggccacttgccagcatggac

SEQ ID NO: 360979 - DNA, 537 bp, Homo sapiens
ttagcacacctctcaaataagaaggcagtactgggaaggctctgaacctgtggcagaaccactgatagctgtggagctattccaaggagtctgggaatcagggggattatcaagatcattgttagaataaattaatcttactgtatatatagcagaagttttcaaacatatgtaaatgytactaataaccaaataattacaccttgtttttctttaaactgtaactctcaagtatgtctctacataattttttgattggtagtgtctgcatgctcaaaaagcttgaaaacactactggagaagaaggtctcgggagtgtgatgaaatacgtttacatggcagcttcatcatttgattggtgaaagtgactatgtgtcttaaactctctgagcctcagtttgcacatccaaaagcaaggatataattccatgaacctttccacctcaagtccacaaggcagaatagcaagatgttaactgccactctgaggaccaccaaataaaaggacaatttattaggccacttgccagcatggac

SEQ ID NO: 360980 - DNA, 537 bp, Homo sapiens
ttagcacacctctcaaataagaaggcagtactgggaaggctctgaacctgtggcagaaccactgatagctgtggagctattccaaggagtctgggaatcagggggattatcaagatcattgttagaataaattaatcttactgtatatatagcagaagttttcaaacatatgtaaatgttactaataaccaaataattacaccttgtttttctttaaactgtaactctcaagtatgtctctacataattttttgattggtagtgtctgcatgctcaaaaagcttgaaaacactactggagaagaaggtctcgggagtgtgatgaaatacgtttacatggcagcttcatcatttrattggtgaaagtgactatgtgtcttaaactctctgagcctcagtttgcacatccaaaagcaaggatataattccatgaacctttccacctcaagtccacaaggcagaatagcaagatgttaactgccactctgaggaccaccaaataaaaggacaatttattaggccacttgccagcatggac

SEQ ID NO: 360981 - DNA, 578 bp, Homo sapiens
ataaaataggaaacatctcttactttaagagcaaccatggtacttgttcctatggtgaaaactgatgttatctcgattagttaattattcatcccaacacctggtcttgctcccttttccacctctagctatgttaacactagagttcagtaatttgytgataaagaatcttaactgcagtatctaacagatcttagtgattaagcatatgacttaccctttgtacagataagtaaactgaggccaaaagaactgaggtatcttattaaaaatcagagagctagttagttgaaaagtccacctgtccttcctttccacatgtctcaccagaaaaacagcaatggtgaaaagtcaactctgtttttaatgggccactttgtatattttaactgttaaaataatccaagaagatagtagtcatatacgaagatcctttagatataatgtgtaggaccagcattaatttaatcaaccaagtctcctctcattgaattgttaattcataattacaaagatgacattacagtaaattaagaaatactgtaatttcattctctccaaaaagtatacattgaagt

SEQ ID NO: 360982 - DNA, 625 bp, Homo sapiens
tttaactgttaaaataatccaagaagatagtagtcatatacgaagatcctttagatataatgtgtaggaccagcattaatttaatcaaccaagtctcctctcattgaattgttaattcataattacaaagatgacattacagtaaattaagaaatactgtaatttcattctctccaaaaagtatacattgaagtttggtgaatactgttatattttcaactagtaaatcartgtgccaattctgggtcttaggcatattgtatatactggaatgatattcactttaattaaatttgttttgagatatagaatgtaatacagatcctacgtgtttttaaaagttcacatcaatttcaagcttttaaaaatgtatgtacacaagaaagcttcttttgcaatttatatgtttacaaatgttgccattagctaaggtatattttggaatgtgatcaaacaatattgaatgtcaagtcttaacagcagggctggtctaaggaattccctctaagctaaatctgatcctttcatatgtggctactgctcttttaaactactgtatccctaaagggctaaaaggaagaaaatcctaacttaataagtgaaggcagcaaggcatagtatttga

SEQ ID NO: 360983 - DNA, 625 bp, Homo sapiens
tttaactgttaaaataatccaagaagatagtagtcatatacgaagatcctttagatataatgtgtaggaccagcattaatttaatcaaccaagtctcctctcattgaattgttaattcataattacaaagatgacattacagtaaattaagaaatactgtaatttcattctctccaaaaagtatacattgaagtttggtgaatactgttatattttcaactagtaaatcagtgtgccaattctgggtcttaggcatattgtatatactggaatgatattcactttaattaaatttgttttgagawatagaatgtaatacagatcctacgtgtttttaaaagttcacatcaatttcaagcttttaaaaatgtatgtacacaagaaagcttcttttgcaatttatatgtttacaaatgttgccattagctaaggtatattttggaatgtgatcaaacaatattgaatgtcaagtcttaacagcagggctggtctaaggaattccctctaagctaaatctgatcctttcatatgtggctactgctcttttaaactactgtatccctaaagggctaaaaggaagaaaatcctaacttaataagtgaaggcagcaaggcatagtatttga

SEQ ID NO: 360984 - DNA, 625 bp, Homo sapiens
tttaactgttaaaataatccaagaagatagtagtcatatacgaagatcctttagatataatgtgtaggaccagcattaatttaatcaaccaagtctcctctcattgaattgttaattcataattacaaagatgacattacagtaaattaagaaatactgtaatttcattctctccaaaaagtatacattgaagtttggtgaatactgttatattttcaactagtaaatcagtgtgccaattctgggtcttaggcatattgtatatactggaatgatattcactttaattaaatttgttttgagatrtagaatgtaatacagatcctacgtgtttttaaaagttcacatcaatttcaagcttttaaaaatgtatgtacacaagaaagcttcttttgcaatttatatgtttacaaatgttgccattagctaaggtatattttggaatgtgatcaaacaatattgaatgtcaagtcttaacagcagggctggtctaaggaattccctctaagctaaatctgatcctttcatatgtggctactgctcttttaaactactgtatccctaaagggctaaaaggaagaaaatcctaacttaataagtgaaggcagcaaggcatagtatttga

SEQ ID NO: 360985 - DNA, 625 bp, Homo sapiens
tttaactgttaaaataatccaagaagatagtagtcatatacgaagatcctttagatataatgtgtaggaccagcattaatttaatcaaccaagtctcctctcattgaattgttaattcataattacaaagatgacattacagtaaattaagaaatactgtaatttcattctctccaaaaagtatacattgaagtttggtgaatactgttatattttcaactagtaaatcagtgtgccaattctgggtcttaggcatattgtatatactggaatgatattcactttaattaaatttgttttgagatatagaatgtaatacagatcctacgtgtttttaaaagttcacatcaatttcaagcttttaaaaatgtatgtacacaagaaagcttcttttgcaatttatatgtttacaaatgttgccattagctaagstatattttggaatgtgatcaaacaatattgaatgtcaagtcttaacagcagggctggtctaaggaattccctctaagctaaatctgatcctttcatatgtggctactgctcttttaaactactgtatccctaaagggctaaaaggaagaaaatcctaacttaataagtgaaggcagcaaggcatagtatttga

SEQ ID NO: 360986 - DNA, 501 bp, Homo sapiens
actctacttcttaaattcacaattggatttgggtttgtttcaagttgttcacaatttactaacgaaatgtgcatctctcattcttcccccaaaagaaagaagtcatccactccagctacatataagtctccaatttctgtcttacaactaaacgtgaaaaccgaaataccactcattgaaaaaaaatatrtacagagaattggcaggctgcatgtttatgtgaaccttcagaaaacatggaaatacgcagccccaactcaccaggaaaattaacacttgtgatcaaactattttgtgacattttatgtcttttatacatttcacttcatatccagtattccagttttgcaccggcttgcctgtatcaaccccaaatcgcctgagagcaatctagtactgtagcagaaccgtttcaacatgaagagttctgctcatcgcctgtggcgtggtcttcgaaacacctgaatcaaacattgattcccctccccctgctatttaaaa

SEQ ID NO: 360987 - DNA, 501 bp, Homo sapiens
actctacttcttaaattcacaattggatttgggtttgtttcaagttgttcacaatttactaacgaaatgtgcatctctcattcttcccccaaaagaaagaagtcatccactccagctacatataagtctccaatttctgtcttacaactaaacgtgaaaaccgaaataccactcattgaaaaaaaatatatacagagaattggcaggctgcatgtttatgtgaaccttcagaaaacatggaaayacgcagccccaactcaccaggaaaattaacacttgtgatcaaactattttgtgacattttatgtcttttatacatttcacttcatatccagtattccagttttgcaccggcttgcctgtatcaaccccaaatcgcctgagagcaatctagtactgtagcagaaccgtttcaacatgaagagttctgctcatcgcctgtggcgtggtcttcgaaacacctgaatcaaacattgattcccctccccctgctatttaaaa

SEQ ID NO: 360988 - DNA, 510 bp, Homo sapiens
ctgtcttacaactaaacgtgaaaaccgaaataccactcattgaaaaaaaatatatacagagaattggcaggctgcatgtttatgtgaaccttcagaaaacatggaaatacgcagccccaactcaccaggaaaatyaacacttgtgatcaaactattttgtgacattttatgtcttttatacatttcacttcatatccagtattccagttttgcaccggcttgcctgtatcaaccccaaatcgcctgagagcaatctagtactgtagcagaaccgtttcaacatgaagagttctgctcatcgcctgtggcgtggtcttcgaaacacctgaatcaaacattgattcccctccccctgctatttaaaaccgagggacgtcaggcttgggttgtaggtaaagaaaagccacagtaatcaaacaagcaaccaaaatacccgaacacggaacacgctaagaacaaaggaaacacaagagtgtgaacaggaaatgaagcaactctacacccataaat

SEQ ID NO: 360989 - DNA, 568 bp, Homo sapiens
acttgggccctccatttggtggagtcaggggaggcctggccgggcgggaggsgagggctagagggcggcgaggtctctccgcgcagcgtcccaggggatgcggcgcgcccccgactgggtgcagcggcaggccgcccccggcagcaagtgccgggtgccatggcaacggcgggaatttcccggtcggggaggccggaagcagccccagcccggctcgcggcagcgaaagcaaaatccgatctctctcctgggggagcaaaatggacgaaaggcgaccccccaggcaggggcgctgggtgccttgggaatccgaggaatcccttctctttgccagtcggaggggactagatggagccgaaggggccggagatgggccgagcgctgccccccgggggtcctcggcgccgggcgcagcttacgagcgcagcgcagcaggctccattcccggccgccgccgctcagcccattacgcaaacctggtgggtccaaccaaccccgctctgccgccgctgctggaacccaggaggcgtgcttgcaggctttgggcactacgtggggctggaaatac

SEQ ID NO: 360990 - DNA, 568 bp, Homo sapiens
acttgggccctccatttggtggagtcaggggaggcctggccgggcgggaggggagggctagagggcggcgaggtctctccgcgcagcgtccsaggggatgcggcgcgcccccgactgggtgcagcggcaggccgcccccggcagcaagtgccgggtgccatggcaacggcgggaatttcccggtcggggaggccggaagcagccccagcccggctcgcggcagcgaaagcaaaatccgatctctctcctgggggagcaaaatggacgaaaggcgaccccccaggcaggggcgctgggtgccttgggaatccgaggaatcccttctctttgccagtcggaggggactagatggagccgaaggggccggagatgggccgagcgctgccccccgggggtcctcggcgccgggcgcagcttacgagcgcagcgcagcaggctccattcccggccgccgccgctcagcccattacgcaaacctggtgggtccaaccaaccccgctctgccgccgctgctggaacccaggaggcgtgcttgcaggctttgggcactacgtggggctggaaatac

SEQ ID NO: 360991 - DNA, 568 bp, Homo sapiens
acttgggccctccatttggtggagtcaggggaggcctggccgggcgggaggggagggctagagggcggcgaggtctctccgcgcagcgtcccaggggatgcggcgcgcccccgactgggtgcagcggcaggccgcccccggcagcaagtgccgggtgccatggcaacggcgggaatttcccggtcggggaggccggaagcagccccagcccggctcgcggcagcgaaagcaaaatccgatctctctccygggggagcaaaatggacgaaaggcgaccccccaggcaggggcgctgggtgccttgggaatccgaggaatcccttctctttgccagtcggaggggactagatggagccgaaggggccggagatgggccgagcgctgccccccgggggtcctcggcgccgggcgcagcttacgagcgcagcgcagcaggctccattcccggccgccgccgctcagcccattacgcaaacctggtgggtccaaccaaccccgctctgccgccgctgctggaacccaggaggcgtgcttgcaggctttgggcactacgtggggctggaaatac

SEQ ID NO: 360992 - DNA, 568 bp, Homo sapiens
acttgggccctccatttggtggagtcaggggaggcctggccgggcgggaggggagggctagagggcggcgaggtctctccgcgcagcgtcccaggggatgcggcgcgcccccgactgggtgcagcggcaggccgcccccggcagcaagtgccgggtgccatggcaacggcgggaatttcccggtcggggaggccggaagcagccccagcccggctcgcggcagcgaaagcaaaatccgatctctctcctrggggagcaaaatggacgaaaggcgaccccccaggcaggggcgctgggtgccttgggaatccgaggaatcccttctctttgccagtcggaggggactagatggagccgaaggggccggagatgggccgagcgctgccccccgggggtcctcggcgccgggcgcagcttacgagcgcagcgcagcaggctccattcccggccgccgccgctcagcccattacgcaaacctggtgggtccaaccaaccccgctctgccgccgctgctggaacccaggaggcgtgcttgcaggctttgggcactacgtggggctggaaatac

SEQ ID NO: 360993 - DNA, 335 bp, Homo sapiens
caggggcgctgggtgccttgggaatccgaggaatcccttctctttgccagtcggaggggactagatggagccgaaggggccggagatgggccgagcgctgccccccgggggtcctcggcgccgggcgcagcttacgagcgcagcgcagcaggctccattcccggccgccgccgctcagcccattacgcaaacctggtgggtccaaccaaccccgctstgccgccgctgctggaacccaggaggcgtgcttgcaggctttgggcactacgtggggctggaaataccacgcactgccccttcgcctagacccccgctcgggccacgcgggttctgcc

SEQ ID NO: 360994 - DNA, 335 bp, Homo sapiens
caggggcgctgggtgccttgggaatccgaggaatcccttctctttgccagtcggaggggactagatggagccgaaggggccggagatgggccgagcgctgccccccgggggtcctcggcgccgggcgcagcttacgagcgcagcgcagcaggctccattcccggccgccgccgctcagcccattacgcaaacctggtgggtccaaccaaccccgctctgccgccgctgctggaacccaggaggcgtgcttgcaggcttygggcactacgtggggctggaaataccacgcactgccccttcgcctagacccccgctcgggccacgcgggttctgcc

SEQ ID NO: 360995 - DNA, 335 bp, Homo sapiens
caggggcgctgggtgccttgggaatccgaggaatcccttctctttgccagtcggaggggactagatggagccgaaggggccggagatgggccgagcgctgccccccgggggtcctcggcgccgggcgcagcttacgagcgcagcgcagcaggctccattcccggccgccgccgctcagcccattacgcaaacctggtgggtccaaccaaccccgctctgccgccgctgctggaacccaggaggcgtgcttgcaggctttgggcactacgyggggctggaaataccacgcactgccccttcgcctagacccccgctcgggccacgcgggttctgcc

SEQ ID NO: 360996 - DNA, 433 bp, Homo sapiens
cgctgggtccgaggttctggaaaagcaagaactcacctgcaaacaggcagtcctcagctctggacttctggatcacgacgtcgatatccttctgaattcggtcttgccttgaacacatccccattaaataaatccttggaaaagaagcagccgctatttccaccccacccccctcgcacgctttcagctttcgtaaatattcagttaaaaatgaaacctctggccgaggcaggggctgaaggccaagtggtttcggaagtgatcctgggtgagaggaggagraggaggaggaggaggaggaggaggtggaggaggagggggaggtcggctttccatttccagatgtgaccgcccagctgctgctcgccgctgctggattccaatttcctccccttctggcgatggattggtgatgaaaccgagtctcactttc

SEQ ID NO: 360997 - DNA, 433 bp, Homo sapiens
cgctgggtccgaggttctggaaaagcaagaactcacctgcaaacaggcagtcctcagctctggacttctggatcacgacgtcgatatccttctgaattcggtcttgccttgaacacatccccattaaataaatccttggaaaagaagcagccgctatttccaccccacccccctcgcacgctttcagctttcgtaaatattcagttaaaaatgaaacctctggccgaggcaggggctgaaggccaagtggtttcggaagtgatcctgggtgagaggaggaggaggaggaggaggaggaggaggaggtggaggaggagggggaggtcggctttccatttccagatgtgaccgyccagctgctgctcgccgctgctggattccaatttcctccccttctggcgatggattggtgatgaaaccgagtctcactttc

SEQ ID NO: 360998 - DNA, 433 bp, Homo sapiens
cgctgggtccgaggttctggaaaagcaagaactcacctgcaaacaggcagtcctcagctctggacttctggatcacgacgtcgatatccttctgaattcggtcttgccttgaacacatccccattaaataaatccttggaaaagaagcagccgctatttccaccccacccccctcgcacgctttcagctttcgtaaatattcagttaaaaatgaaacctctggccgaggcaggggctgaaggccaagtggtttcggaagtgatcctgggtgagaggaggaggaggaggaggaggaggaggaggaggtggaggaggagggggaggtcggctttccatttccagatgtgaccgcccagctgctgctcgccgctgctggattccartttcctccccttctggcgatggattggtgatgaaaccgagtctcactttc

SEQ ID NO: 360999 - DNA, 637 bp, Homo sapiens
tgatgcaatttataagaaaatttggttagcatggcatacagcattttaacataataaccaaaattatgactgwtaacatactagatttctaggaatctcatacaacttttgtacacttatcccaataatatatccataaatataacttaaagatggcttagcatcactttttatttgaatgctacacatataatttagcacattaaataaatctaattggtttaatctctctttcatacaaaaaaaaatattctttgtggctttctgagggtccaatatggagaatcctaagttaatttgaggtcaaaaagacttaacttagaatgtgattttgggaagattgtcaaaaatgtcaaaaagtttaaaacatttaaaacaaatatgaccatagttatctatttaataaaagctccattaaaagattttaaaggcaaattcagattacatagttgtgaacaagaacttagctcctttaatattgagaagactcacttttcttaagtaaccaaaacctaataaaacaacatgaaactcaagaaattatcttgatgaaacagtctctgtttctgaggccaattacttaaaaggaaaaaaataccctttacattctcagaccaacattccaagaaaactttac

SEQ ID NO: 361000 - DNA, 637 bp, Homo sapiens
tgatgcaatttataagaaaatttggttagcatggcatacagcattttaacataataaccaaaattatgactgttaacatactagatttctaggaatctcatacaacttttgtacacttatcccaataatatatccataaatataacttaaagatggcttagcatcactttttatttgaatgctacacatataatttagcayattaaataaatctaattggtttaatctctctttcatacaaaaaaaaatattctttgtggctttctgagggtccaatatggagaatcctaagttaatttgaggtcaaaaagacttaacttagaatgtgattttgggaagattgtcaaaaatgtcaaaaagtttaaaacatttaaaacaaatatgaccatagttatctatttaataaaagctccattaaaagattttaaaggcaaattcagattacatagttgtgaacaagaacttagctcctttaatattgagaagactcacttttcttaagtaaccaaaacctaataaaacaacatgaaactcaagaaattatcttgatgaaacagtctctgtttctgaggccaattacttaaaaggaaaaaaataccctttacattctcagaccaacattccaagaaaactttac

SEQ ID NO: 361001 - DNA, 637 bp, Homo sapiens
tgatgcaatttataagaaaatttggttagcatggcatacagcattttaacataataaccaaaattatgactgttaacatactagatttctaggaatctcatacaacttttgtacacttatcccaataatatatccataaatataacttaaagatggcttagcatcactttttatttgaatgctacacatataatttagcacattaaataaatctaattggtttaatctctctttcatacaaaaaaaaatattctttgtggctttctgagggtccaatatggakaatcctaagttaatttgaggtcaaaaagacttaacttagaatgtgattttgggaagattgtcaaaaatgtcaaaaagtttaaaacatttaaaacaaatatgaccatagttatctatttaataaaagctccattaaaagattttaaaggcaaattcagattacatagttgtgaacaagaacttagctcctttaatattgagaagactcacttttcttaagtaaccaaaacctaataaaacaacatgaaactcaagaaattatcttgatgaaacagtctctgtttctgaggccaattacttaaaaggaaaaaaataccctttacattctcagaccaacattccaagaaaactttac

SEQ ID NO: 361002 - DNA, 428 bp, Homo sapiens
ggtgatcagacatcacctacagaatggtgaagaatgaagaacctgatcagatattgagaatgaggggttmtttggtaaacttggcagtgttctttgctaatgctggattttgtgaggaagtgcacagtttagcctagctgaagatttagaagcctgactaaagttggccaagcaaagaatctttgttatcaacatattccatcaaacctcacatccctgccttaaatgatcaaaccatccgcactcctgtatgctactgttctccatgaaaagttacttcttctttgtcttaaccaaaatccagccattctagaaagacaccagaaggctttctgcagcatctaaaatttccccacattctaggcccaaatccttttcctttccctgttgcttttagatccacattgtgtaaccctcatctagaaacc

SEQ ID NO: 361003 - DNA, 428 bp, Homo sapiens
ggtgatcagacatcacctacagaatggtgaagaatgaagaacctgatcagatattgagaatgaggggttatttggtaaacttggcagtgttctttgctaatgctggattttgygaggaagtgcacagtttagcctagctgaagatttagaagcctgactaaagttggccaagcaaagaatctttgttatcaacatattccatcaaacctcacatccctgccttaaatgatcaaaccatccgcactcctgtatgctactgttctccatgaaaagttacttcttctttgtcttaaccaaaatccagccattctagaaagacaccagaaggctttctgcagcatctaaaatttccccacattctaggcccaaatccttttcctttccctgttgcttttagatccacattgtgtaaccctcatctagaaacc

SEQ ID NO: 361004 - DNA, 428 bp, Homo sapiens
ggtgatcagacatcacctacagaatggtgaagaatgaagaacctgatcagatattgagaatgaggggttatttggtaaacttggcagtgttctttgctaatgctggattttgtgaggaagtgcacagtttagcctagctgaagatttagaagcctgactaaagttggccaagcaaagaatctttgttatcaacatattccatcaaacctcacatccctgccttaaatgatcaaaccatccgcactcytgtatgctactgttctccatgaaaagttacttcttctttgtcttaaccaaaatccagccattctagaaagacaccagaaggctttctgcagcatctaaaatttccccacattctaggcccaaatccttttcctttccctgttgcttttagatccacattgtgtaaccctcatctagaaacc

SEQ ID NO: 361005 - DNA, 428 bp, Homo sapiens
ggtgatcagacatcacctacagaatggtgaagaatgaagaacctgatcagatattgagaatgaggggttatttggtaaacttggcagtgttctttgctaatgctggattttgtgaggaagtgcacagtttagcctagctgaagatttagaagcctgactaaagttggccaagcaaagaatctttgttatcaacatattccatcaaacctcacatccctgccttaaatgatcaaaccatccgcactcctgtatgctactgttctccatgaaaagttacttcttctttgycttaaccaaaatccagccattctagaaagacaccagaaggctttctgcagcatctaaaatttccccacattctaggcccaaatccttttcctttccctgttgcttttagatccacattgtgtaaccctcatctagaaacc

SEQ ID NO: 361006 - DNA, 400 bp, Homo sapiens
ttatataatataacttgtacttttatgtagtaarttatcacaatggtgtcagacactctgaggaagagtattttactgtatcattcccattacccaatcaggaagtcttaacaggcagattttaacaaaaatataagacacaactgtgccctagcttttctcacatacttcctacctcacacttcacacatttctttttctcagcacccactcttaagtaataatttatttcccctgaatattatttaccttctgtgggctaccttacatatcatctgaaagcatgatcaaaacagttatatttgtgaataattttattttggtttatttcttagcagaaggaggagttaatagtaacattgggaggccgggcacggtggctcaagcctgtaatcccaac

SEQ ID NO: 361007 - DNA, 400 bp, Homo sapiens
ttatataatataacttgtacttttatgtagtaagttatcacaawggtgtcagacactctgaggaagagtattttactgtatcattcccattacccaatcaggaagtcttaacaggcagattttaacaaaaatataagacacaactgtgccctagcttttctcacatacttcctacctcacacttcacacatttctttttctcagcacccactcttaagtaataatttatttcccctgaatattatttaccttctgtgggctaccttacatatcatctgaaagcatgatcaaaacagttatatttgtgaataattttattttggtttatttcttagcagaaggaggagttaatagtaacattgggaggccgggcacggtggctcaagcctgtaatcccaac

SEQ ID NO: 361008 - DNA, 400 bp, Homo sapiens
ttatataatataacttgtacttttatgtagtaagttatcacaatggtgtcagacactctgaggaagagtattttactgtatcattcccattacccaatcaggaagtcttaacaggcagattttaacaaaaatataagacacaactgtgccctagcttttctcacatacttcctacctcacacttcacacatttctttttctcagcacccactcttaagtaataatttatttcccctgaatattatttaccttctgtgggctaccttacatatcatcygaaagcatgatcaaaacagttatatttgtgaataattttattttggtttatttcttagcagaaggaggagttaatagtaacattgggaggccgggcacggtggctcaagcctgtaatcccaac

SEQ ID NO: 361009 - DNA, 400 bp, Homo sapiens
ttatataatataacttgtacttttatgtagtaagttatcacaatggtgtcagacactctgaggaagagtattttactgtatcattcccattacccaatcaggaagtcttaacaggcagattttaacaaaaatataagacacaactgtgccctagcttttctcacatacttcctacctcacacttcacacatttctttttctcagcacccactcttaagtaataatttatttcccctgaatattatttaccttctgtgggctaccttacatatcatctgaaagcatgatcaaaacagttatatttgtgaataattttattttggtttatttcttagcagaaggaggagttaatagyaacattgggaggccgggcacggtggctcaagcctgtaatcccaac

SEQ ID NO: 361010 - DNA, 369 bp, Homo sapiens
tttctaagccctatgctatgcactaaaatctgcagagaaaatcaacacattctctacctcacagcagatttcttggagagagataggggtggggaggggaataagggttgctaaatgttgtcaactttgtaatacaactctcaaagggagatagttattagggaggcaaagtgctcaggctcagatttcaggttgcctagatttgaattctgtcttcactgcttctttyatgatttgcccaaattacttaagctctttaaaccacagtttcctcatccttaagagagggataataaatagaacttatctcataaaattactgtgagaattataagtgattatgaagttgattaaatttccccagtgctt

SEQ ID NO: 361011 - DNA, 369 bp, Homo sapiens
tttctaagccctatgctatgcactaaaatctgcagagaaaatcaacacattctctacctcacagcagatttcttggagagagataggggtggggaggggaataagggttgctaaatgttgtcaactttgtaatacaactctcaaagggagatagttattagggaggcaaagtgctcaggctcagatttcaggttgcctagatttgaattctgtcttcactgcttcttttatgatttgcccaaattacttaagctctttaaaccacagtttcctcatccttaagakagggataataaatagaacttatctcataaaattactgtgagaattataagtgattatgaagttgattaaatttccccagtgctt

SEQ ID NO: 361012 - DNA, 369 bp, Homo sapiens
tttctaagccctatgctatgcactaaaatctgcagagaaaatcaacacattctctacctcacagcagatttcttggagagagataggggtggggaggggaataagggttgctaaatgttgtcaactttgtaatacaactctcaaagggagatagttattagggaggcaaagtgctcaggctcagatttcaggttgcctagatttgaattctgtcttcactgcttcttttatgatttgcccaaattacttaagctctttaaaccacagtttcctcatccttaagagagggataataaatagaacttatctcataaaattactgtgagrattataagtgattatgaagttgattaaatttccccagtgctt

SEQ ID NO: 361013 - DNA, 387 bp, Homo sapiens
cacccttgctttgtgtagggggagggctttgcccatgccctggtgccctggcgcagggcatcgaggcctgcagrtcagaaccgcagtctaacctatgtcttggcggaataccctgctaattctccctggaatgtaagatgggaggtcttgtgaggaggtttctacaagtaagaaaacaaatttccattcggtttttattgacaaaattgaaaattataataactgagtccagcctctcagatgacaaatgtcttttgcactgagagctgggaacagccgcttgcctcagatcctgcgtgcaggtgcagccctcgcttccctccacactttctccagcgggtgtcagttcctccacaagaggcagacagcgttctgcagaaccacagc

SEQ ID NO: 361014 - DNA, 532 bp, Homo sapiens
aggtttctacaagtaagaaaacaaatttccattcggtttttattgacaaaattgaaaattataataactgagtccagcctctcagatgacaaatgtcttttgcactgagagctgggaacmgccgcttgcctcagatcctgcgtgcaggtgcagccctcgcttccctccacactttctccagcgggtgtcagttcctccacaagaggcagacagcgttctgcagaaccacagcgctcaaggccttcgagagccaaaaatctcggagcgagctgccctgtcctggctgtacctcacgactgacctagaaatggcctttgctgggagcaaagggtaggggggagatggtcgtcggagctggggcctgtgcactggaccagtttgaccacgggaggggaggtacccagagttagaagggggccaagcactgagacctcaccatcctcaatctccaaaaggactcagagagatgcagagactgagacaggcttcctttttcaaagaaagagaaaactactgaggaaggccccagggg

SEQ ID NO: 361015 - DNA, 387 bp, Homo sapiens
cacccttgctttgtgtagggggagggctttgcccatgccctggtgccctggcgcagggcatcgaggcctgcagatcagaaccgcagtctaacctatgtcttggcggaataccctgctaattctccctggaatgtaagatgggaggtcttgtgaggaggtttctacaagtaagaaaacaaatttccattcggtttttattgacaaaattgaaaattataataactgagtccagcctctcagatgacaaatgtcttttgcactgagagctgggaacagccgcttgcctcagatcctgcrtgcaggtgcagccctcgcttccctccacactttctccagcgggtgtcagttcctccacaagaggcagacagcgttctgcagaaccacagc

SEQ ID NO: 361016 - DNA, 532 bp, Homo sapiens
aggtttctacaagtaagaaaacaaatttccattcggtttttattgacaaaattgaaaattataataactgagtccagcctctcagatgacaaatgtcttttgcactgagagctgggaacagccgcttgcctcagatcctgcgtgcaggtgcagccctcgcttccctccacactttctccagcgggtgtcagttcctccacmagaggcagacagcgttctgcagaaccacagcgctcaaggccttcgagagccaaaaatctcggagcgagctgccctgtcctggctgtacctcacgactgacctagaaatggcctttgctgggagcaaagggtaggggggagatggtcgtcggagctggggcctgtgcactggaccagtttgaccacgggaggggaggtacccagagttagaagggggccaagcactgagacctcaccatcctcaatctccaaaaggactcagagagatgcagagactgagacaggcttcctttttcaaagaaagagaaaactactgaggaaggccccagggg

SEQ ID NO: 361017 - DNA, 577 bp, Homo sapiens
ttattgacaaaattgaaaattataataactgagtccagcctctcagatgacaaatgtcttttgcactgagagctgggaacagccgcttgcctcagatcctgcgtgcaggtgcagccctcgcttccctccacactttctccagcgggtgtcagttcctccacaagagrcagacagcgttctgcagaaccacagcgctcaaggccttcgagagccaaaaatctcggagcgagctgccctgtcctggctgtacctcacgactgacctagaaatggcctttgctgggagcaaagggtaggggggagatggtcgtcggagctggggcctgtgcactggaccagtttgaccacgggaggggaggtacccagagttagaagggggccaagcactgagacctcaccatcctcaatctccaaaaggactcagagagatgcagagactgagacaggcttcctttttcaaagaaagagaaaactactgaggaaggccccaggggctctgaaccaaaatccagacttttttttccacctgcagctttttgtttttatttttgcttgagaaggggtctcggtctgttgct

SEQ ID NO: 361018 - DNA, 577 bp, Homo sapiens
ttattgacaaaattgaaaattataataactgagtccagcctctcagatgacaaatgtcttttgcactgagagctgggaacagccgcttgcctcagatcctgcgtgcaggtgcagccctcgcttccctccacactttctccagcgggtgtcagttcctccacaagaggcagacagcgttctgcagaaccacagcgctcaaggccttcgagagccaaaaatctcggagcgagctgccctgtcctggctgtacctcacgactgacctagaaatggcctttgctgggagcaaagggtaggggggagatggtcgtcggagctggggcctgtgcactggaccagtttgaccacgggaggggaggtacccagagttagaagggggccaagcactgagacctcaccatcctcaatctccaaaaggactcagagagatgcagagactgagacaggcttcctttttyaaagaaagagaaaactactgaggaaggccccaggggctctgaaccaaaatccagacttttttttccacctgcagctttttgtttttatttttgcttgagaaggggtctcggtctgttgct

SEQ ID NO: 361019 - DNA, 532 bp, Homo sapiens
aggtttctacaagtaagaaaacaaatttccattcggtttttattgacaaaattgaaaattataataactgagtccagcctctcagatgacaaatgtcttttgcactgagagctgggaacagccgcttgcctcagatcctgcgtgcaggtgcagccctcgcttccctccacactttctccagcgggtgtcagttcctccacaagaggcagacagcgttctgcagaaccacagcgctcaaggccttcgagagccaaaaatctcggagcgagctgccctgtcctggctgtacctcacgactgacctagaaatggcctttgctgggagcaaagggtaggggggagatggtcgtcggagctggggcctgtgcactggaccagtttgaccacgggaggggaggtacccagagttagaagggggccaagcactgagacctcaccatcctcaatctccaaaaggactcagagagatgcagagactgagacaggcttcctttttcaargaaagagaaaactactgaggaaggccccagggg

SEQ ID NO: 361020 - DNA, 560 bp, Homo sapiens
taaacattctaacattctggagtatggtatcccttatatgaaatgcttgggaccaaaaatattgtagattttggattttttcaaattttgaaatattttcatatcataacatgatatgttargaatgagacccaatctaaatttatttacattccctacatatagtatacatgtagcctgaaggtaattttatgtatttgtaaaattttgtgcaagaaacaaaattttgactgtcttttggctgtgaccagtcatataatgtcatatgtgaaatttttcacctgtggcatcatatcagtgctcaaaatgtttccaattttgaagcatttcagatttcagattttttagttgaccttggaacaacatgggtttcaactgtgcaggtccgcctacactggtatttttttaaaaaaataaatatatcagaaaaagttttggagaattgcaattgaaaaaactagcagactaactgcatagcctagaatataagaaaaaaattaagaaaaagctatgtacatcctgaatgcataaagtatatgtatatgttaatctattttatc

SEQ ID NO: 361021 - DNA, 341 bp, Homo sapiens
tgaatgcataaagtatatgtatatrttaatctattttatcatttactaccataaaatatacacaaatctattataaaaagttaaaacttatcaaaatgtatgcacacaaaccgtacaagtcactatttgcagtcaagagaaacataaacaaacataaagatgctgtattaaaccacaactgcatacaattaactatagcacatactgtactacccaaataattacttttattttatttttataaatgtgctaggtacaagcatacttttattatatgattgttttgttatttggatatattgctagtggtgaagtctgagcttttactgtactcatcaccc

SEQ ID NO: 361022 - DNA, 341 bp, Homo sapiens
tgaatgcataaagtatatgtatatgttaatctattttatcatttactaccataaaatatacacaaatctattataaaaagttaaaacttatcaaaatgtatgcacacaaaccgtacaagtcactatttgcagtcaagagaaacataaacaaacataaagatgctgtattaaaccacaactgcatacaattaacwatagcacatactgtactacccaaataattacttttattttatttttataaatgtgctaggtacaagcatacttttattatatgattgttttgttatttggatatattgctagtggtgaagtctgagcttttactgtactcatcaccc

SEQ ID NO: 361023 - DNA, 328 bp, Homo sapiens
aaaggtcatttattagtaaggargagaagcaagcaccaagatttaaggcaggaagggataggctaactctactgctttgtgcaaatgtagtcgggtttatgatcagggctgcccttaactataaagctgctaacccctgagtcttgaaagggaaaagagaaacactagttgccagtcttttggttgtacaacaagaaggcgtggactatgagaatgctttttctggattagttccatcagtgctttgtccctgaagtcagaagtaccttgccagtaagggactgctttttaaagttttttgttgttgttgtttaattggaaaatgccc

SEQ ID NO: 361024 - DNA, 328 bp, Homo sapiens
aaaggtcatttattagtaaggaasagaagcaagcaccaagatttaaggcaggaagggataggctaactctactgctttgtgcaaatgtagtcgggtttatgatcagggctgcccttaactataaagctgctaacccctgagtcttgaaagggaaaagagaaacactagttgccagtcttttggttgtacaacaagaaggcgtggactatgagaatgctttttctggattagttccatcagtgctttgtccctgaagtcagaagtaccttgccagtaagggactgctttttaaagttttttgttgttgttgtttaattggaaaatgccc

SEQ ID NO: 361025 - DNA, 543 bp, Homo sapiens
ctggattagttccatcagtgctttgtccctgaagtcagaagtaccttgccagtaagggactgctttttaaagttttttgttgttgttgtttaattggaaaatgccccctggccacccagaaccccatgagttcaacaccaaaggcactgaagtgttctccttttcccccaaacacatctctacttcagcctctagataagggagtcataaggacctttaaggctctacatatggcactctatggaaaggtttgtcaacattgcaaaagagaaacccaatasagagaacatcatggaagtctggaaggcttacacctttcaagatgtcatcagttgatatagaaaaccatgaaactcaaaacaataaattcctgctggacaaaagtacaatttgtgtccagatgttgtgcatagctacagaattacgacaaacccaatttagagaaaaccatggaaagaagtatggatatgaagggaaaaaaaggtgtggagtgaagggttgcaagatatggatcttggaggaatttaagagctaatacacacc

SEQ ID NO: 361026 - DNA, 543 bp, Homo sapiens
ctggattagttccatcagtgctttgtccctgaagtcagaagtaccttgccagtaagggactgctttttaaagttttttgttgttgttgtttaattggaaaatgccccctggccacccagaaccccatgagttcaacaccaaaggcactgaagtgttctccttttcccccaaacacatctctacttcagcctctagataagggagtcataaggacctttaaggctctacatatggcactctatggaaaggtttgtcaacattgcaaaagagaaacccaatacagagaacatcatggaagtctggaaggcttacacctttcaagatgtcatcagttgatakagaaaaccatgaaactcaaaacaataaattcctgctggacaaaagtacaatttgtgtccagatgttgtgcatagctacagaattacgacaaacccaatttagagaaaaccatggaaagaagtatggatatgaagggaaaaaaaggtgtggagtgaagggttgcaagatatggatcttggaggaatttaagagctaatacacacc

SEQ ID NO: 361027 - DNA, 551 bp, Homo sapiens
tccttttcccccaaacacatctctacttcagcctctagataagggagtcataaggacctttaaggctctacatatggcactctatggaaaggtttgtcaacattgcaaaagagaaacccaatacagagaacatcatggaagtctggaaggcttacacctttcaagatgtcatcagttgatatagaaaaccatgaaactcaaaacaataaattcctgctggacaaaagtacaatttgtgtccagatgttgtgcatagctacagaattacgacaaacccaatttagagaaaaccatggaaagaagtatggatatgaagggaaaaaaaggtgtggagtgaagggttgcaagatatggatcttggaggaatttaagagctaatacacaccacaccagaggaattaacaaaagatgacttcatggagatgagtgcttcctaaccagtgccagataatgaggaagaagacataggaamagcagtgccagaaaacaaattggcattcaacaatctggcaaaagagctttgattattcaagactacttttgacttcttt

SEQ ID NO: 361028 - DNA, 397 bp, Homo sapiens
agctacagaattacgacaaacccaatttagagaaaaccatggaaagaagtatggatatgaagggaaaaaaaggtgtggagtgaagggttgcaagatatggatcttggaggaatttaagagctaatacacaccacaccagaggaattaacaaaagatgacttcatggagatgagtgcttcctaaccagtgccagataatgaggaagaagacataggaaaagcagtgccagaaaacaaattggcattcaacaatctggcaaaagarctttgattattcaagactacttttgacttcttttatgacatagaccgttccatgatacaggaactgaaactaaagcaaatggtggaagacggataggtactacactgaaatgtttttagagaaatgaaaaagc

SEQ ID NO: 361029 - DNA, 567 bp, Homo sapiens
aattaacaaaagatgacttcatggagatgagtgcttcctaaccagtgccagataatgaggaagaagacataggaaaagcagtgccagaaaacaaattggcattcaacaatctggcaaaagagctttgattattcaagactacttttgacttcttttatgacatagaccgttccatgatacaggaactgaaactaaagcaaatggtggaagacggataggtactacactgaaatgtttttagagaaatgaaaaagcaaaatagacagaaataaygatgtatttttgtaaagtttcaccaagtgtgcttgcctcttttgcttccccttccatcccttcaccctcttccacctctgctaccctaagacacaaagaccagctcctcctcctcctcctctgcctactcaacatgaagacaacaatgatgaagacctttaggatgatccacttccacttaatgaatgggtcatatattttctcttccttacaattttcttgattataatttcttttctgtagcttagtttattgtaagaatacagtatataatacacatagcatgcaaaatat

SEQ ID NO: 361030 - DNA, 545 bp, Homo sapiens
ggtactacactgaaatgtttttagagaaatgaaaaagcaaaatagacagaaataatgatgtatttttgtaaagtttcaccaagtgtgcttgcctcttttgcttccccttccatcccttcaccctcttccacctctgctaccctaagacacaaagaccagctcctcctcctcctcctctgcctactcaacatgaasacaacaatgatgaagacctttaggatgatccacttccacttaatgaatgggtcatatattttctcttccttacaattttcttgattataatttcttttctgtagcttagtttattgtaagaatacagtatataatacacatagcatgcaaaatatgtcttaaatgtaacgcatgttatcagtaagccttctggtcaacaataggttattagtttggggggaatcaaaagttgtatgcggatttttcactgtgtgggaggccagctcccctaaccctatgttgttcaaggggcaacaatattctttctcactggcactttactttccataaattcaaatcccaaaagtaga

SEQ ID NO: 361031 - DNA, 517 bp, Homo sapiens
aacaaattggcattcaacaatctggcaaaagagctttgattattcaagactacttttgacttcttttatgacatagaccgttccatgatacaggaactgaaactaaagcaaatggtggaagacggataggtactacactgaaatgtttttagagaaatgaaaaagcaaaatagacagaaataatgatgtatttttgtaaagtttcaccaagtgtgcttgcctcttttgcttccccttccatcccttcaccctcttccacctctgctaccctaagacacaaagaccagctcctcctcctcctcctctgcctactcaacatgaagacaacaatgatgaagacctttargatgatccacttccacttaatgaatgggtcatatattttctcttccttacaattttcttgattataatttcttttctgtagcttagtttattgtaagaatacagtatataatacacatagcatgcaaaatatgtcttaaatgtaacgcatgttatcagtaagccttctggt

SEQ ID NO: 361032 - DNA, 517 bp, Homo sapiens
aacaaattggcattcaacaatctggcaaaagagctttgattattcaagactacttttgacttcttttatgacatagaccgttccatgatacaggaactgaaactaaagcaaatggtggaagacggataggtactacactgaaatgtttttagagaaatgaaaaagcaaaatagacagaaataatgatgtatttttgtaaagtttcaccaagtgtgcttgcctcttttgcttccccttccatcccttcaccctcttccacctctgctaccctaagacacaaagaccagctcctcctcctcctcctctgcctactcaacatgaagacaacaatgatgaagacctttaggatgatcyacttccacttaatgaatgggtcatatattttctcttccttacaattttcttgattataatttcttttctgtagcttagtttattgtaagaatacagtatataatacacatagcatgcaaaatatgtcttaaatgtaacgcatgttatcagtaagccttctggt

SEQ ID NO: 361033 - DNA, 567 bp, Homo sapiens
aattaacaaaagatgacttcatggagatgagtgcttcctaaccagtgccagataatgaggaagaagacataggaaaagcagtgccagaaaacaaattggcattcaacaatctggcaaaagagctttgattattcaagactacttttgacttcttttatgacatagaccgttccatgatacaggaactgaaactaaagcaaatggtggaagacggataggtactacactgaaatgtttttagagaaatgaaaaagcaaaatagacagaaataatgatgtatttttgtaaagtttcaccaagtgtgcttgcctcttttgcttccccttccatcccttcaccctcttccacctctgctaccctaagacacaaagaccagctcctcctcctcctcctctgcctactcaacatgaagacaacaatgatgaagacctttaggatgatccacttccacttaatgaatgggtcatatattttctcttccttacaattttcttgattataatttyttttctgtagcttagtttattgtaagaatacagtatataatacacatagcatgcaaaatat

SEQ ID NO: 361034 - DNA, 545 bp, Homo sapiens
ggtactacactgaaatgtttttagagaaatgaaaaagcaaaatagacagaaataatgatgtatttttgtaaagtttcaccaagtgtgcttgcctcttttgcttccccttccatcccttcaccctcttccacctctgctaccctaagacacaaagaccagctcctcctcctcctcctctgcctactcaacatgaagacaacaatgatgaagacctttaggatgatccacttccacttaatgaatgggtcatatattttctcttccttacaattttcttgattataatttcttttctgtagcttagtttattgtaagaatacagtatataatacacatagcatgcaaaatatgtcttaaatgtaacgcatgttatcagtaagccttctggtcaacaataggttattagtttggggggaatcaaaagttgtatgcrgatttttcactgtgtgggaggccagctcccctaaccctatgttgttcaaggggcaacaatattctttctcactggcactttactttccataaattcaaatcccaaaagtaga

SEQ ID NO: 361035 - DNA, 443 bp, Homo sapiens
aatcccaaaagtagaactgcaagttcaaaaggatttttaaaaamataattactgtcagattacagaaagtttccaatttacattttcactaccaatgtacaatgttggcgtccctgaatccttatcagcaatgaatttttaaatatactataagagatgaaaaaaatttttttaaatttggaattccctgatcactaatgaagttaagcatcaatattattcctttaatatgcaaatgctgaaaatacatttaactataatagatgtcaaaaatctgtaaatcaggctaggtgtggtaggcactcacctgtattcccagccactgggagacttgagtccaggagttccagactgtagtatgcaatgatcaagcctgtgaatagccactgcactccagcatggacaacatagcaagaccccatctttttttttaaaaaagagtc

SEQ ID NO: 361036 - DNA, 443 bp, Homo sapiens
aatcccaaaagtagaactgcaagttcaaaaggatttttaaaaaaataattactgtcagattacagaaagtttccaatttacattttcactaccaatgtacaatgttggcgtccctgaatccttatcagcaatgaatttttaaatatactataagagatgaaaaaaatttttttaaatttggaattccctgatcactaatgaagttaagcatcaatattattcctttaatatgcaaatgctgaaaatacatttaactataatagatgtcaaaaatctgtaaatcaggctaggtgtggtaggcactcacctgtattcccagccactgggagacttgagtccaggagttccagactgtagtatgcaatgatcaagcctgtgaatagccactgcactccagcatggacaacayagcaagaccccatctttttttttaaaaaagagtc

SEQ ID NO: 361037 - DNA, 496 bp, Homo sapiens
aattaagacagtgatagaacttggggaaatatgtattccttgatgttttctatgcatttgcaataataaacaatgaaaatatggttgaattttagaaagagataggcctgtggtattgtcacaagggtatacaaatactgagattgacttgctgaggcagtggtctccattggtggtgaccttcagaagagacctgtgtttccacatggcctagacacctggaaggcagagatcctaacattccatgacacccccaccttctaattctgattgtgactccagaccattacctggcactgsgtcttacctctggcattcctatcagagcctgaaccacagacagtaccttagagtctaagcttagatacctttgtcttgtttttgtggctaaggattctcagagttgcgggatgctgatgaaatttatcccaaaagtaagttatgaatcagatctgctttcttttgactcatttaaatcctttgtttaatgtaaaga

SEQ ID NO: 361038 - DNA, 450 bp, Homo sapiens
tacatggttctaaacattaactgaataactacttgtatgggtacatactaccgggtgctgtaagttgggtaataggtagcactatctttagactcacagagctcacactctacattggaacccatgtgtattagtcyactctgacactgctataaacatatatctgagattggtgatttataaagaaaagaggtttaattggctcatggttctgtgggctgtacaggcttctgcttctgggcaggcctcagaaaacttacaatcattgcagaagtcaaaggggaagaaggcatggtcttcacatggccagagcaggagagagagagagagcaaagagggaggtgcacactttcaaacgaccagacctcatgagaactcactcactatcatgagaacagcaagggggaaatccaccaccatgatccagtcactatccagcaggtccctggt

SEQ ID NO: 361039 - DNA, 450 bp, Homo sapiens
tacatggttctaaacattaactgaataactacttgtatgggtacatactaccgggtgctgtaagttgggtaataggtagcactatctttagactcacagagctcacactctacattggaacccatgtgtattagtccactctgacactgctataaacatatatctgagattgrtgatttataaagaaaagaggtttaattggctcatggttctgtgggctgtacaggcttctgcttctgggcaggcctcagaaaacttacaatcattgcagaagtcaaaggggaagaaggcatggtcttcacatggccagagcaggagagagagagagagcaaagagggaggtgcacactttcaaacgaccagacctcatgagaactcactcactatcatgagaacagcaagggggaaatccaccaccatgatccagtcactatccagcaggtccctggt

SEQ ID NO: 361040 - DNA, 450 bp, Homo sapiens
tacatggttctaaacattaactgaataactacttgtatgggtacatactaccgggtgctgtaagttgggtaataggtagcactatctttagactcacagagctcacactctacattggaacccatgtgtattagtccactctgacactgctataaacatatatctgagattggtgatttataaagaaaagaggtttaatyggctcatggttctgtgggctgtacaggcttctgcttctgggcaggcctcagaaaacttacaatcattgcagaagtcaaaggggaagaaggcatggtcttcacatggccagagcaggagagagagagagagcaaagagggaggtgcacactttcaaacgaccagacctcatgagaactcactcactatcatgagaacagcaagggggaaatccaccaccatgatccagtcactatccagcaggtccctggt

SEQ ID NO: 361041 - DNA, 650 bp, Homo sapiens
ctttagactcacagagctcacactctacattggaacccatgtgtattagtccactctgacactgctataaacatatatctgagattggtgatttataaagaaaagaggtttaattggctcatggttctgtgggctgtacaggcttctgcttctgggcaggcctcagaaaacttacaatcattgcagaagtcaaaggggaagraggcatggtcttcacatggccagagcaggagagagagagagagcaaagagggaggtgcacactttcaaacgaccagacctcatgagaactcactcactatcatgagaacagcaagggggaaatccaccaccatgatccagtcactatccagcaggtccctggttggattacaatccgacatgagatttgagtggggacacagagccaaaccatatcaccatgagaaatatttaaacaataattagaaaaaaaataaatccgcacagagtaatgaaattactactcagaactttactttttttctttttttgagatggagtcttaccctgttgcccaggctagagtgcagtggtgtgatctcagctcactgcaacctcaacctcccaggttcaagtgatcctcctaggtcagcctccccagcagttgagagtataggtgcacaccacca

SEQ ID NO: 361042 - DNA, 650 bp, Homo sapiens
ctttagactcacagagctcacactctacattggaacccatgtgtattagtccactctgacactgctataaacatatatctgagattggtgatttataaagaaaagaggtttaattggctcatggttctgtgggctgtacaggcttctgcttctgggcaggcctcagaaaacttacaatcattgcagaagtcaaaggggaagaaggcatggtcttcacatggccagagcaggagagagagagagagcaaagagggaggtgcacactttcaaacgaccagacctcatgagaactcactcactatcatgagaacagcaagggggaaatccaccaccatgatccagtcactatccagcaggtccctggttggattacaatccgacatgagatttgagtggggacacagagccaaaccatatcaccatgagaaatatttaaacaataattagaaaaaaaataaatccscacagagtaatgaaattactactcagaactttactttttttctttttttgagatggagtcttaccctgttgcccaggctagagtgcagtggtgtgatctcagctcactgcaacctcaacctcccaggttcaagtgatcctcctaggtcagcctccccagcagttgagagtataggtgcacaccacca

SEQ ID NO: 361043 - DNA, 570 bp, Homo sapiens
ggtgcatgaatcatttcaggtcaggagttcaagactagcctggccaacatagcaaaaccccatctctacaaaaaatatataaattatcctggcatggtggtgggcatctgtagtcccagctacttggaaggctgaggcaagagaattgcttgaacctgggaggcrgagtcagaggcggaggttgcagtgaaccgagatcacatcactgcactccagcttgggcaacagagtgagaccctgtctcaaaaaaaaagaaaaaaagaattcaacttgggagttccttacagggattctaagagatctctcctctgaaacttctataacctattattcactacattccctcatacattttactcttctttcccaccttaggatacatgatcccttaattcaggctcaggctgaagaactgacccacttacaacagaagatacaggaagggagaggtgtctgctaccttttcacccagcatgtgaagaacacagtcaagtcttttgagggccttctcaggaacactgacattgcctactaccagagacagagattctgtgagcaaatggtacaagg

SEQ ID NO: 361044 - DNA, 562 bp, Homo sapiens
aattacagcaagctgaataggatattaattaaaaacataaacctggtgaaacccgaacatagaggctctagttcaaagatgcttccaatagttgacatggccattcattccttaaaaccagctatttttctttygaattacattacctttaattctgtaaattggatgttatatagtaccatgaaaactgctgtgagtaattataatactcattgctgagtgatgtgacttctttctcaaggctatttctgagggaaattgtacaattagatctttaggtattgtgacttgttttggaaatcatggtggccctccagggagctaatgaatctttaattatttagaggttcacatgagaccccttacagatataagcacattagctctgtagctaagggaacatttaaaaacagtaacatgaaatgtgtcagacatagaggaaagatgaagaagcaagtagaagctaatgcaaacagaggaactgccagctctctgtggcactctagctctctctgtcagtatttggttggcaatgtagacatagtggatgagtgcaattaca

SEQ ID NO: 361045 - DNA, 562 bp, Homo sapiens
aattacagcaagctgaataggatattaattaaaaacataaacctggtgaaacccgaacatagaggctctagttcaaagatgcttccaatagttgacatggccattcattccttaaaaccagctatttttctttcgaattacattacctttaattctgtaaattggatgttatatagtaccatgaaaactgctgtgagtaattataatactcattgctgagtgatgtgacttctttctcaaggctatttctgagggaaattgtacaattagatctttargtattgtgacttgttttggaaatcatggtggccctccagggagctaatgaatctttaattatttagaggttcacatgagaccccttacagatataagcacattagctctgtagctaagggaacatttaaaaacagtaacatgaaatgtgtcagacatagaggaaagatgaagaagcaagtagaagctaatgcaaacagaggaactgccagctctctgtggcactctagctctctctgtcagtatttggttggcaatgtagacatagtggatgagtgcaattaca

SEQ ID NO: 361046 - DNA, 564 bp, Homo sapiens
ggctctagttcaaagatgcttccaatagttgacatggccattcattccttaaaaccagctatttttctttcgaattacattacctttaattctgtaaattggatgttatatagtaccatgaaaactgctgtgagtaattataatactcattgctgagtgatgtgacttctttctcaaggctatttctgagggaaattgtacaattagatctttaggtattgtgacttgttttggaaatyatggtggccctccagggagctaatgaatctttaattatttagaggttcacatgagaccccttacagatataagcacattagctctgtagctaagggaacatttaaaaacagtaacatgaaatgtgtcagacatagaggaaagatgaagaagcaagtagaagctaatgcaaacagaggaactgccagctctctgtggcactctagctctctctgtcagtatttggttggcaatgtagacatagtggatgagtgcaattacatatgttaggctcattctgaaatgcaggagcattttagattttcatgtagaagcctgacaagcaaa

SEQ ID NO: 361047 - DNA, 564 bp, Homo sapiens
ggctctagttcaaagatgcttccaatagttgacatggccattcattccttaaaaccagctatttttctttcgaattacattacctttaattctgtaaattggatgttatatagtaccatgaaaactgctgtgagtaattataatactcattgctgagtgatgtgacttctttctcaaggctatttctgagggaaattgtacaattagatctttaggtattgtgacttgttttggaaatcatggtggccctccagggagctaatgaatctttaattatttagaggttcacatgagaccccttacagatataagcacattagctctktagctaagggaacatttaaaaacagtaacatgaaatgtgtcagacatagaggaaagatgaagaagcaagtagaagctaatgcaaacagaggaactgccagctctctgtggcactctagctctctctgtcagtatttggttggcaatgtagacatagtggatgagtgcaattacatatgttaggctcattctgaaatgcaggagcattttagattttcatgtagaagcctgacaagcaaa

SEQ ID NO: 361048 - DNA, 564 bp, Homo sapiens
ggctctagttcaaagatgcttccaatagttgacatggccattcattccttaaaaccagctatttttctttcgaattacattacctttaattctgtaaattggatgttatatagtaccatgaaaactgctgtgagtaattataatactcattgctgagtgatgtgacttctttctcaaggctatttctgagggaaattgtacaattagatctttaggtattgtgacttgttttggaaatcatggtggccctccagggagctaatgaatctttaattatttagaggttcacatgagaccccttacagatataagcacattagctctgtagctaagggaacatttaaaaacagtaacatgaaatgtgtcagacatagaggaaagatgaagaagcaagtagaarctaatgcaaacagaggaactgccagctctctgtggcactctagctctctctgtcagtatttggttggcaatgtagacatagtggatgagtgcaattacatatgttaggctcattctgaaatgcaggagcattttagattttcatgtagaagcctgacaagcaaa

SEQ ID NO: 361049 - DNA, 471 bp, Homo sapiens
ttaaaaacagtaacatgaaatgtgtcagacatagaggaaagatgaagaagcaagtagaagctaatgcaaacagaggaactgccagctctctgtggcactctagctctctctgtcagtatttggttggcaatgtagacatagtggatgagtgcaattacatatgttaggctcattctgaaatgcaggagcattttagattttcatgtagaagcctgacaagcaaactacatctaggatatactttgataaytttgagttgagagccaaattttttgaaggtaaaccatctccctgttttaaagtagtgtttaaaattataaaaatattaatacatctgtaacataaaatatttagatataaatactacaagtgcaaatgaatttttttttctacttctgcattcaacttttctcttctccctttagggaaaacacttttgtgtaaaggcctccaaaatatatgtagaggcgt

SEQ ID NO: 361050 - DNA, 471 bp, Homo sapiens
ttaaaaacagtaacatgaaatgtgtcagacatagaggaaagatgaagaagcaagtagaagctaatgcaaacagaggaactgccagctctctgtggcactctagctctctctgtcagtatttggttggcaatgtagacatagtggatgagtgcaattacatatgttaggctcattctgaaatgcaggagcattttagattttcatgtagaagcctgacaagcaaactacatctaggatatactttgataattttgagttgagagccaaattttttgaaggtaaaccatctccctgttttaaagtagtgtttaaaattataaaaatwttaatacatctgtaacataaaatatttagatataaatactacaagtgcaaatgaatttttttttctacttctgcattcaacttttctcttctccctttagggaaaacacttttgtgtaaaggcctccaaaatatatgtagaggcgt

SEQ ID NO: 361051 - DNA, 471 bp, Homo sapiens
ttaaaaacagtaacatgaaatgtgtcagacatagaggaaagatgaagaagcaagtagaagctaatgcaaacagaggaactgccagctctctgtggcactctagctctctctgtcagtatttggttggcaatgtagacatagtggatgagtgcaattacatatgttaggctcattctgaaatgcaggagcattttagattttcatgtagaagcctgacaagcaaactacatctaggatatactttgataattttgagttgagagccaaattttttgaaggtaaaccatctccctgttttaaagtagtgtttaaaattataaaaatattaatacatctgtaayataaaatatttagatataaatactacaagtgcaaatgaatttttttttctacttctgcattcaacttttctcttctccctttagggaaaacacttttgtgtaaaggcctccaaaatatatgtagaggcgt

SEQ ID NO: 361052 - DNA, 471 bp, Homo sapiens
ttaaaaacagtaacatgaaatgtgtcagacatagaggaaagatgaagaagcaagtagaagctaatgcaaacagaggaactgccagctctctgtggcactctagctctctctgtcagtatttggttggcaatgtagacatagtggatgagtgcaattacatatgttaggctcattctgaaatgcaggagcattttagattttcatgtagaagcctgacaagcaaactacatctaggatatactttgataattttgagttgagagccaaattttttgaaggtaaaccatctccctgttttaaagtagtgtttaaaattataaaaatattaatacatctgtaacataaaatatttagatataamtactacaagtgcaaatgaatttttttttctacttctgcattcaacttttctcttctccctttagggaaaacacttttgtgtaaaggcctccaaaatatatgtagaggcgt

SEQ ID NO: 361053 - DNA, 550 bp, Homo sapiens
tatggacctgaaaattgcttataataaatttgaactgaacatataggcataaatgtggttcagaagtgtccagttgaagcaacttcactttgttaggtcaacaaaagttggggacactaagatctactcctctgattttgttctagcattatcttaatggaaatgtttactgaaatggaaatacatgtagtggacatcgtggtggtgtctcaagcattcagtgttccctgctctcacacactcctarccaaataatgaatttctcagcttcacaatgtttaagtgacatgagtcccatgcccaattcttggtcactgtaattggtgcatgaaggaacgtgtgccttctgctaatcaaatcagaatgaagtacaactttttcattccatgattgaagagggaaatgccttctttccaaatgcagcagaggaagcacgaggtactaggattggaagttgtctactcatgacatgatattttaagccatagaataaaactgagacctaatgtcttagtcctttcaggtcgctataccagaatatcacagcctg

SEQ ID NO: 361054 - DNA, 550 bp, Homo sapiens
tatggacctgaaaattgcttataataaatttgaactgaacatataggcataaatgtggttcagaagtgtccagttgaagcaacttcactttgttaggtcaacaaaagttggggacactaagatctactcctctgattttgttctagcattatcttaatggaaatgtttactgaaatggaaatacatgtagtggacatcgtggtggtgtctcaagcattcagtgttccctgctctcacacactcctagccaaataatgaatttctcagcttcacaatgtttaagtgacatgagtcccatgcccaattcttggtcactktaattggtgcatgaaggaacgtgtgccttctgctaatcaaatcagaatgaagtacaactttttcattccatgattgaagagggaaatgccttctttccaaatgcagcagaggaagcacgaggtactaggattggaagttgtctactcatgacatgatattttaagccatagaataaaactgagacctaatgtcttagtcctttcaggtcgctataccagaatatcacagcctg

SEQ ID NO: 361055 - DNA, 611 bp, Homo sapiens
acatcataatttgtctgtactagtagtatttgctagaacgtttaggggaatacttgcttgttaactttttagtaaatataacactccatgttcaaatacatttggaaaatactgagcatttcacacttttagagactcaaaacaggcagcacatttttaaaaaataaaaataaaaccaaatagcattgcatttggagaatggtataaaaaaagagaatttgataaactggagttatcagaactcagtggatactatgtgttagacattattataagccattaaacattttacaagcttgatatctgagttaaaaattaataacccaaagacacattggaagagaaaagttgacatatttttattatattaatgacctaaaaatatcatagcaactaacrtcattatagtcaacaagtgaatgaacgtaaataatattaaataactattagaaagtctctctgattaagcatggaaataaataagcagtgcttttgaccaataaatggaggagttacaatactttccaatacaaaacaaaaagattctaaatgtaaaggtattaggcccaaaatatgttagtcaattcatgacagcagaaattcagcaggtc

SEQ ID NO: 361056 - DNA, 611 bp, Homo sapiens
acatcataatttgtctgtactagtagtatttgctagaacgtttaggggaatacttgcttgttaactttttagtaaatataacactccatgttcaaatacatttggaaaatactgagcatttcacacttttagagactcaaaacaggcagcacatttttaaaaaataaaaataaaaccaaatagcattgcatttggagaatggtataaaaaaagagaatttgataaactggagttatcagaactcagtggatactatgtgttagacattattataagccattaaacattttacaagcttgatatctgagttaaaaattaataacccaaagacacattggaagagaaaagttgacatatttttattatattaatgacctaaaaatatcatagcaactaacgtcattatagtcaacaagtgaatgaacgtaaataatattaaataactattagaaagtctctctgattaagcatggaaataaatargcagtgcttttgaccaataaatggaggagttacaatactttccaatacaaaacaaaaagattctaaatgtaaaggtattaggcccaaaatatgttagtcaattcatgacagcagaaattcagcaggtc

SEQ ID NO: 361057 - DNA, 546 bp, Homo sapiens
aggtggtttcttgttttcgtcaaaactgagaggctgaggaattcctcaaacacagcaacaaacatcaaataataaatwttcatgctttaacttgctcaatatcaatataaactttcccttttgaaagtaaacacgaaagacccaagcttccttctaacagagtgcaactatttctctaataattgaacatgtacctacaatctcttgaacaatgaaacaataaaaaattctcaatcacagcatgtactctaagtctaagaattctgggttatgtccattcctctacgaagttcttcactatactctcttgacattctgccatatatcatttaaaaattaagttaatcaccctcaataagccctgttttaaaaagagggataaatggagaggaaagaaggaaagttgttaagatacataagtatgcacaggacaatacaagagaaacaatgtgtttggatgtcaaggctctcctttctgcaagtggccagcaggtcactattggcatctatggccatgtgccctcagctaacacctctgctagtcag

SEQ ID NO: 361058 - DNA, 426 bp, Homo sapiens
cattcctgacagagaaatgtccttgrtaatctttttgtgtgagcgtgccatggtcattgttaatttctttcatttaacaaaataatagactttattttttgagcagttttagctttatggaaagatcgagcagaaagtacagagttctcacatactgtcacctttatcccacccccagtttacattagggttcactctttgtgtggtacaggtctaggagttttgcaaaacgcataatgtcatgtacccatcattacattattaccaatgtattttcaatcccctaaaaatcgcctgtttcagaactatttatctccctacccatccccaaactcctggcaaccactgagcttttttgttgttgttgttgttacttagtttttatttcataatcataaacttaactcaactctgcaatccagctag

SEQ ID NO: 361059 - DNA, 426 bp, Homo sapiens
cattcctgacagagaaatgtccttgataatctttttgtgtgagcgtgccatggtcattgttaatttctttcatttaacaaaataatagactttattttttgagcagttttagctttatggaaagatcgagcagaaagtacagagttctcacatactgtcacctttatcccacccccagtttacattagggttcactctttgtgtggtacaggtctaggagttttgcaaaacgcataatgtcatgtacccatcattacattattaccaaygtattttcaatcccctaaaaatcgcctgtttcagaactatttatctccctacccatccccaaactcctggcaaccactgagcttttttgttgttgttgttgttacttagtttttatttcataatcataaacttaactcaactctgcaatccagctag

SEQ ID NO: 361060 - DNA, 545 bp, Homo sapiens
cattattaccaatgtattttcaatcccctaaaaatcgcctgtttcagaactatttatctccctacccatccccaaactcctggcaaccactgagcttttttgttgttgttgttgttacttagtttttatttcataatcataaacttaactcaactctgcaatccagctaggcatggaagggaacaaggaaaacatggaacccaaagggaactgcagcaagagcacmaagattctaggatattgcaagcaaatgtggtggaggggtgctctcctgagctacagaaggaatgggtctggtggtgaaaataaaacacaagtcaaactcattagaattgtccacagtcagcaatggtgatcttcttgctggtcttgctattcctgtacccaaagtgctccatggcttccacaatattcacacgttctttcaccttgccaaaggccacatgcttgccatccaaccactcagtcttggcagcacagatgaaaaactgggaaccatttgtgttgggtccagcatttgccatggacaagatgccagaacctgt

SEQ ID NO: 361061 - DNA, 545 bp, Homo sapiens
cattattaccaatgtattttcaatcccctaaaaatcgcctgtttcagaactatttatctccctacccatccccaaactcctggcaaccactgagcttttttgttgttgttgttgttacttagtttttatttcataatcataaacttaactcaactctgcaatccagctaggcatggaagggaacaaggaaaacatggaacccaaagggaactgcagcaagagcaccaagattctaggatattgcaagcaaatgtggtggaggggtgctctcctgagctacagaaggaatgggtctggtggtgaaaataaaacacaagtcaaactcattagaattgtccacagtcagcaatggtgatcttcttgctggtcttgctattcctgtacccaaagtgctccatggcttccacaatattcacacgttctttcaccttgccaaasgccacatgcttgccatccaaccactcagtcttggcagcacagatgaaaaactgggaaccatttgtgttgggtccagcatttgccatggacaagatgccagaacctgt

SEQ ID NO: 361062 - DNA, 545 bp, Homo sapiens
cattattaccaatgtattttcaatcccctaaaaatcgcctgtttcagaactatttatctccctacccatccccaaactcctggcaaccactgagcttttttgttgttgttgttgttacttagtttttatttcataatcataaacttaactcaactctgcaatccagctaggcatggaagggaacaaggaaaacatggaacccaaagggaactgcagcaagagcaccaagattctaggatattgcaagcaaatgtggtggaggggtgctctcctgagctacagaaggaatgggtctggtggtgaaaataaaacacaagtcaaactcattagaattgtccacagtcagcaatggtgatcttcttgctggtcttgctattcctgtacccaaagtgctccatggcttccacaatattcacacgttctttcaccttgccaaaggccacatgcttgccatccaaccactcagtcttggcagcrcagatgaaaaactgggaaccatttgtgttgggtccagcatttgccatggacaagatgccagaacctgt

SEQ ID NO: 361063 - DNA, 541 bp, Homo sapiens
tggctcccctcaccaatgaaatccggcctgtcagcagctgcacccctcagcatattggaccagctatcccagaagtcagctctgtctggtttaaacagtacatttaygtttatcatatcactggacaaggaccaccatcccttttattatccaaaggtacaagacctcgaaaactgccagatatatttcagagttacgatcgattgctaataacatcttggggtcacgatcctggagtagttcctacctcaaatgtgctcacgatgttgaatgatgctttaacacattctgcagttttaattcaggagcatggtctgcatgggataggagaaactgtccatgtcccatttccatttgatgaaacagaactacaaggagactcgtgtcaatatgggtgttcataaagcattgcagatactaaggaacagagtggacttacaacatctctgcggatatgtcaccatgttgaatgcttccagccaacttgcaaatagaaaactcagtgatgcttctgatgagagaggaaaacctgatttggctt

SEQ ID NO: 361064 - DNA, 541 bp, Homo sapiens
tggctcccctcaccaatgaaatccggcctgtcagcagctgcacccctcagcatattggaccagctatcccagaagtcagctctgtctggtttaaacagtacatttatgtttatcatatcactggacaaggaccaccatcccttttattatccaaaggtacaagacctcgaaaactgccagatatatttcagagttacgatcgattgctaataacatcttggggtcaygatcctggagtagttcctacctcaaatgtgctcacgatgttgaatgatgctttaacacattctgcagttttaattcaggagcatggtctgcatgggataggagaaactgtccatgtcccatttccatttgatgaaacagaactacaaggagactcgtgtcaatatgggtgttcataaagcattgcagatactaaggaacagagtggacttacaacatctctgcggatatgtcaccatgttgaatgcttccagccaacttgcaaatagaaaactcagtgatgcttctgatgagagaggaaaacctgatttggctt

SEQ ID NO: 361065 - DNA, 475 bp, Homo sapiens
tgggtgttcataaagcattgcagatactaaggaacagagtggacttacaacatctctgcggatatgtcaccatgttgaatgcttccagccaacttgcaaatagaaaactcagtgatgcttctgatgagagaggaaaacctgatttggcttctggctcagatgttaaatgggagtacagagtcatttgaaatggtcattgaagaagcaactatagattcagcaacaaagcaaacctctggtgccacaacagaagcagattgggttcctctcgagctgtgctttggaattccrctgttcagttccgaattaaaccggaaagtttataggaaaattgctacacatggcctttgcagaaaagagagccttcaaaacctcttacattccagtagaaaactctctctgcaagtccttaactttgttcactcattccaggaaggtgcttcaacattggatattcacacagagcccagttttt

SEQ ID NO: 361066 - DNA, 521 bp, Homo sapiens
ttttaaacaccatttatatgtggacttctgttgtcactgactttgggctttatattttcacagagtctttatggaaaaagtagaatttattttccactcttgtagctatagctgctgcacattttcatcctgatttatttttttgtttcttacctttgatgttttcaaaccaaggattgtgattttaggttagaattacatattagaagcattaagactatgtctttggatcaraatgctttagtgattaacctactttgaagacatactcttaagcaatctggatcttaaatttatgtgaatacatttttagaaaatgataaagaaaaatggaattacttcaaagtgtttcttgagtcattgattcttttagcatctcaaatgttaattagaataattggaatcactttttagacttttcaagttaccttccttgggaagtttgtgtagtgttacagtttagtttagctcctcttatagggcaatggtttgctagtttaaaactgtaaccaaatgaactg

SEQ ID NO: 361067 - DNA, 521 bp, Homo sapiens
ttttaaacaccatttatatgtggacttctgttgtcactgactttgggctttatattttcacagagtctttatggaaaaagtagaatttattttccactcttgtagctatagctgctgcacattttcatcctgatttatttttttgtttcttacctttgatgttttcaaaccaaggattgtgattttaggttagaattacatattagaagcattaagactatgtctttggatcagaatgctttagtgattaacctactttgaagacatactcttaagcaatctgkatcttaaatttatgtgaatacatttttagaaaatgataaagaaaaatggaattacttcaaagtgtttcttgagtcattgattcttttagcatctcaaatgttaattagaataattggaatcactttttagacttttcaagttaccttccttgggaagtttgtgtagtgttacagtttagtttagctcctcttatagggcaatggtttgctagtttaaaactgtaaccaaatgaactg

SEQ ID NO: 361068 - DNA, 590 bp, Homo sapiens
ctgaaaaaccatggggtcccctctggtttcttgtgttgaatgaggcaagagtaatcatctgattctgagctaaagacctctcatactctcaaggagggagagtgcatttttagagcttttagcaaaaatgtgaaaagttcatgtttgcactttgctttgtgaatttggcttccttttacttatacattaactcatgtaatgtcttaaatcttacaagtattgatccatttcaacaaaaaggtaaatttaaaatgcagactttgttacttgccaaagaagattcatgaaaaatttatatccaattattttccaaatagttaatttaatttggctttttaccacattccttcctttctttcccracttctttaatgtaatttaaatcctggaaaacattttttagaaaccaagaggaaaagaagaacacataccaaaaaagacatataacttaaaatggtacatttcacatctaaaatgggtttgaagaaacgcaactttatatcattaaaaaataagatcatctgatttcctttatttcttttttaaattatgtaatcagatgattttatattttttggggggggcagaat

SEQ ID NO: 361069 - DNA, 590 bp, Homo sapiens
ctgaaaaaccatggggtcccctctggtttcttgtgttgaatgaggcaagagtaatcatctgattctgagctaaagacctctcatactctcaaggagggagagtgcatttttagagcttttagcaaaaatgtgaaaagttcatgtttgcactttgctttgtgaatttggcttccttttacttatacattaactcatgtaatgtcttaaatcttacaagtattgatccatttcaacaaaaaggtaaatttaaaatgcagactttgttacttgccaaagaagattcatgaaaaatttatatccaattattttccaaatagttaatttaatttggctttttaccacattccttcctttctttcccaacttctttaatgtaatttaaatcctggaaaacattytttagaaaccaagaggaaaagaagaacacataccaaaaaagacatataacttaaaatggtacatttcacatctaaaatgggtttgaagaaacgcaactttatatcattaaaaaataagatcatctgatttcctttatttcttttttaaattatgtaatcagatgattttatattttttggggggggcagaat

SEQ ID NO: 361070 - DNA, 486 bp, Homo sapiens
aatttgatcattgacacatatgacacgtttacaattaaactgtggtgttgatcaagttaaaaaaaaggcggaggccttccataagtcatttcaaatggactaagctttaaagttctctttggagccatcctcayatgcaaaagggctatgagtaggaggaaaactcaggcctctgaggtctcctgaaagagttttgctaatgtcacaactggctttctatgttatctgaagattgagatctccatgaagagtgaagataggtaatgcttaaggctgaggcattacctcactgggtcaccttagctgggaagggaggtcagttatccccttgcaaacattttggtaatccaaatcttgggatgatttctttaagtaagaatttagacacttccaatacttttcttgtccttgtggggaaagcttctatccacctggtgaaagtgtttataaatacttgcaaatattgtagtcccctgtaaggtggca

SEQ ID NO: 361071 - DNA, 486 bp, Homo sapiens
aatttgatcattgacacatatgacacgtttacaattaaactgtggtgttgatcaagttaaaaaaaaggcggaggccttccataagtcatttcaaatggactaagctttaaagttctctttggagccatcctcatatgcaaaagggytatgagtaggaggaaaactcaggcctctgaggtctcctgaaagagttttgctaatgtcacaactggctttctatgttatctgaagattgagatctccatgaagagtgaagataggtaatgcttaaggctgaggcattacctcactgggtcaccttagctgggaagggaggtcagttatccccttgcaaacattttggtaatccaaatcttgggatgatttctttaagtaagaatttagacacttccaatacttttcttgtccttgtggggaaagcttctatccacctggtgaaagtgtttataaatacttgcaaatattgtagtcccctgtaaggtggca

SEQ ID NO: 361072 - DNA, 537 bp, Homo sapiens
catggtgcctggcccatactcacatttttttaaggctcacagtaatttggaattccaacaacttacattttaaattacttattttcacagaaagaatctttgtcagttgtaactcgcttatttctccaaagaccatagtcctgtccagtgatcctccccaagacaatagctctctctagtaactatagytttcctttcccatttcaatttccactccaattgactgaattgtgaacaccaactcccacacttaaatgttgaagccctaacccccagtgtgatggtttatgcagctggggcctttgagaggtaatcaggtttaaaagaggttatgagagtggggtcctcatgctgagattaatgccattataagaagagacactagaaagcttgctcatccgccttccccatggtgcacaaagaaatggtcacatgggcacacagtgaaactacagccacttacaggctgtaggaagagatcttagaaagaaatccgctttgctagcacctttatcttggacttcccaacttctagaa

SEQ ID NO: 361073 - DNA, 486 bp, Homo sapiens
aatttgatcattgacacatatgacacgtttacaattaaactgtggtgttgatcaagttaaaaaaaaggcggaggccttccataagtcatttcaaatggactaagctttaaagttctctttggagccatcctcatatgcaaaagggctatgagtaggaggaaaactcaggcctctgaggtctcctgaaagagttttgctaatgtcacaactggctttctatgttatctgaagattgagatctccatgaagagtgaagataggtaatgcttaaggctgaggcattacctcactgggtcaccttagctgggaagggaggtcagttatccccttgcaaacattttggtaatccaaatcttgggatgatttctttaagtaagaatttagacacttccaatacttttcttgtccttgtggggaaagcttctatccacctggtgaaagtgtttataaatactwgcaaatattgtagtcccctgtaaggtggca

SEQ ID NO: 361074 - DNA, 578 bp, Homo sapiens
gtgtcttccttctggtgtcccctgcagtgaatacttgttatttctttgggaattggacggcatctaaaagttccaagatctgagtaaagttgtatgggggatcccttggctcttgatagtcccctttccttccctatggttgcatgagcctgaagcacccggaaaccatacttagagtcagtaaacacattgactcttgagggtttttttttcttttttgaaacggagtcttsctctgtcgcccaggctggagtgcagtggcatgatcttggctcactgcaaactctgcctctcagtttcaagtgattctcgtgccccaccctcccgtgtagctgggattacaggtgcccaccaccatacccggataatttttgtatttttagtagagacagggtttcgccatgttggccaggctggtctcgaactcccaacatcagatgatccacccacctcggcctgccaaagtgctgggattacagtcgtgagccatccaacccaggcttaagtcttttcacagttggaaggtcctgattagagcagctaattctgctttttgagcagaattctgagaaggtaaa

SEQ ID NO: 361075 - DNA, 537 bp, Homo sapiens
catggtgcctggcccatactcacatttttttaaggctcacagtaatttggaattccaacaacttacattttaaattacttattttcacagaaagaatctttgtcagttgtaactcgcttatttctccaaagaccatagtcctgtccagtgatcctccccaagacaatagctctctctagtaactatagctttcctttcccatttcaatttccactccaattgactgaattgtgaacaccaactcccacacttaaatgttgaagccctaacccccagtgtgatggtttatgcagctggggcctytgagaggtaatcaggtttaaaagaggttatgagagtggggtcctcatgctgagattaatgccattataagaagagacactagaaagcttgctcatccgccttccccatggtgcacaaagaaatggtcacatgggcacacagtgaaactacagccacttacaggctgtaggaagagatcttagaaagaaatccgctttgctagcacctttatcttggacttcccaacttctagaa

SEQ ID NO: 361076 - DNA, 486 bp, Homo sapiens
ttattcatccacatagaggatgaaaggtttttctaagttygagagtcttgaagcaggggctgtccctgggttttcttttaaggctaagaatgccttttgacaggctccattgcaattcaaaggcttatgaccactcacttttggaggttcgtagagtggttttgctatgagcccaaacctgggaatccaaacccagcagaatccagctattctcaaaaaggaatttgagggacctggagtgccaggatggtctcttttcatccctgggtcaagatcctggtcccaggagtgagaatgtgtcccaaatacgtgaccctttggacagaaatttgggcctttcggggggatacctgatacccttgttttgtttcaaaattaaggacttgaagttgtatgtttctcagagtcttcccctagtagggctggaaattaataggtgatacacatatggtaagagggatccattaattaactgtagttcccata

SEQ ID NO: 361077 - DNA, 486 bp, Homo sapiens
ttattcatccacatagaggatgaaaggtttttctaagtttgagagtcttgaagcaggggctgtccctggsttttcttttaaggctaagaatgccttttgacaggctccattgcaattcaaaggcttatgaccactcacttttggaggttcgtagagtggttttgctatgagcccaaacctgggaatccaaacccagcagaatccagctattctcaaaaaggaatttgagggacctggagtgccaggatggtctcttttcatccctgggtcaagatcctggtcccaggagtgagaatgtgtcccaaatacgtgaccctttggacagaaatttgggcctttcggggggatacctgatacccttgttttgtttcaaaattaaggacttgaagttgtatgtttctcagagtcttcccctagtagggctggaaattaataggtgatacacatatggtaagagggatccattaattaactgtagttcccata

SEQ ID NO: 361078 - DNA, 486 bp, Homo sapiens
ttattcatccacatagaggatgaaaggtttttctaagtttgagagtcttgaagcaggggctgtccctgggttttcttttaaggctaagaatgccttttgacaggctccattgcaattcaaaggcttatraccactcacttttggaggttcgtagagtggttttgctatgagcccaaacctgggaatccaaacccagcagaatccagctattctcaaaaaggaatttgagggacctggagtgccaggatggtctcttttcatccctgggtcaagatcctggtcccaggagtgagaatgtgtcccaaatacgtgaccctttggacagaaatttgggcctttcggggggatacctgatacccttgttttgtttcaaaattaaggacttgaagttgtatgtttctcagagtcttcccctagtagggctggaaattaataggtgatacacatatggtaagagggatccattaattaactgtagttcccata

SEQ ID NO: 361079 - DNA, 537 bp, Homo sapiens
catggtgcctggcccatactcacatttttttaaggctcacagtaatttggaattccaacaacttacattttaaattacttattttcacagaaagaatctttgtcagttgtaactcgcttatttctccaaagaccatagtcctgtccagtgatcctccccaagacaatagctctctctagtaactatagctttcctttcccatttcaatttccactccaattgactgaattgtgaacaccaactcccacacttaaatgttgaagccctaacccccagtgtgatggtttatgcagctggggcctttgagaggtaatcaggtttaaaagaggttatgagagtggggtcctcatgctgagattaatgccattataagaagagacactagaaagcttgctcatccgccttccccatggtgcacaaagaaatggtcacatgggcacacagtgaaactacagccacttacaggcygtaggaagagatcttagaaagaaatccgctttgctagcacctttatcttggacttcccaacttctagaa

SEQ ID NO: 361080 - DNA, 572 bp, Homo sapiens
gtgatgattattcttagtataaccagattaagtaagatttcacaggtggagttaagaattaagaatttttgattcaagagtctcattcaccctcttccttctttgttaatagttctgttaggatctgcctttaatttgtcttttcctttagggcgctcaaaacaacacaaggattaaatgcctttctatkgtcaaagttctctccttatttgccagttctttttttcatgtcccaatcataatcttaatggtatcattgatcactcaagcaactaaccctgaagactgcccagtcacaggagccaatacatctttttatgtttaaactcaatcacttcaaatgttgatcttaccttgcataatagaaattagtcgtagagactgtggtgggatgagatagcattgcgggtaatctggctcagctatggctgagtggaagaaacttgcatcaattatttatggttaatacagagtatcctagatcgtagttgtggactgaatacagacattcagctccctcccccactgagctctcataacaatgcagggactggaaagaatgtcagcatatg

SEQ ID NO: 361081 - DNA, 572 bp, Homo sapiens
gtgatgattattcttagtataaccagattaagtaagatttcacaggtggagttaagaattaagaatttttgattcaagagtctcattcaccctcttccttctttgttaatagttctgttaggatctgcctttaatttgtcttttcctttagggcgctcaaaacaacacaaggattaaatgcctttctatggtcaaagttctctccttatttgccagttctttttttcatgtcccaatcataatcttaatggtatcattgatcactcaagcaactaaccctgaagactgcccagtcacaggagccaatacatctttttatgtttaaactcaatcacttcaaatgttgatcttaccttgcataatagaaattagtcgtagagactgtggtgggatgagatagcattgcgggtaatctggctcagctatggctgagtggaagaaacttgcatcaattatttatggttaatacagagtatcctagatcgtagttgtggactgaatacagacattcagctccctcmcccactgagctctcataacaatgcagggactggaaagaatgtcagcatatg

SEQ ID NO: 361082 - DNA, 530 bp, Homo sapiens
aatgagaatagctttgtgtttctttgaagttctgggtgcttctgaaaactctaaaggttttcaagcatttaaatttctctagcccttttctcaaacaaacaaaaaaccccaaacaaggaaaatctcatagaaatataaaaatgagttaaaataagttgtgaggaatattctatacatcaacagtaaagtattactcaacctcaaaaattacgtctctaccataatctataatctgactggataaggactataaataaatagcatatgaaagtctacaataaagcagggagaaaatcatcactggctccgaatttgataatgacttcttgttgtatgtatgtaaatatcttctgaacaaattattgtacattttcctatctctggagaaaattaatgarttaggttaaacaatttcttaagtttaatggagcttctgttttccttggcttatgtatactagcacaggtaacttgctgaactgcagctcagaagaaaaaatctatagagaggtttagttctgaggtgaatta

SEQ ID NO: 361083 - DNA, 552 bp, Homo sapiens
acatgagtgatgaaccagctttaattaacaatataaccattctcctctgtcactgtaggctgttctaaaaaaagaaaaaagtttacaaaagccttaattaccttatgctatttggggagaattaagcaatgaatggagtgttgcatttaacaggttatagaaaatttttctgtgtccagcatataatcaactactaattttcagactggtttggcacaatatagattttctgccaytgaatagaaactaaaaaatttgaaagtcagaaaattatttcccaggttctgaaagatatcaacaaagatatttttaattgactatgtatgattattgatttgagatttaatataccatgtctatgagaattctttgtaatacttctgcagtgtaatttgctacataatgaaaattcatttttcataataaatagttttcagaagtcatgttatctttcttgctcccagcaagtagctctatttcttggccacattgaggaatcaaaatctaatgtaattcttctaaatagaatagagaacacctagagtcgctgct

SEQ ID NO: 361084 - DNA, 552 bp, Homo sapiens
acatgagtgatgaaccagctttaattaacaatataaccattctcctctgtcactgtaggctgttctaaaaaaagaaaaaagtttacaaaagccttaattaccttatgctatttggggagaattaagcaatgaatggagtgttgcatttaacaggttatagaaaatttttctgtgtccagcatataatcaactactaattttcagactggtttggcacaatatagattttctgccactgaatagaaactaaaaaatttgaaagtcagaaaattatttcccaggttctgaaagatatcaacaaagatatttttaattgactatgtatgattattgatttgagatttaatataccatgtctatgagaattctttgtaatacttctgcagtgtaatttgctacataatgaaaattcatttttcataataaatagtttycagaagtcatgttatctttcttgctcccagcaagtagctctatttcttggccacattgaggaatcaaaatctaatgtaattcttctaaatagaatagagaacacctagagtcgctgct

SEQ ID NO: 361085 - DNA, 627 bp, Homo sapiens
gtgacactgtttttgataccatattccccaaatttaaccctcaaatccaaaatagtaaaactactgagatgttatttatgaatacagtatctctgggtttctcagatggctgctgggaaactccagagatcctcctcctagctcttaacatgaagatatattagaaataaaggtaatgttttgcattctccagatatttaattkgctcaaaactatgctcaatatagtggaagctgctgtgtttttcaaggccatattctgagaaaatagcaataaaatcatcttaaattaattaaatgcaataattatgtatgattactgtggctatgttacaataattgtgcacttctcaggttggattcaggcatatttatgttcatgtacaaagactggtgcaataaatgtcaaccaactgattaaaaaaagtaaacttatcagttggtgacaaataataatatctactttgtggggaaaattaaaggccctggagaggtatcgggatgcactaattgttcttcatgtgttctgtcttttacggtaatcactgattaaaatttcattagatgagtatgtattacacctcaacagagaatgccactgtcccccattgtgatgtcgtttgctatg

SEQ ID NO: 361086 - DNA, 601 bp, Homo sapiens
cctggagaggtatcgggatgcactaattgttcttcatgtgttctgtcttttacggtaatcactgattaaaatttcattagatgagtatgtattacacctcaacagagaatgccactgtcccccattgtgatgtcgtttgctatggcaaaaaattaaccaaactttacagttttattattagcaacatctcctccccctatccccgctgctttttttttttttttttttttaagatggaatctcgctctgttgcccaggctggagtgcagtggtatgacctcagctcactgcaaactctacctctcgggttcaagctgtcctcctacctcagcctcccgagtagctatattcaggtgcccgccaccatgcatggctaatttttcyattttcagtagacacagggtttcaccatgttggccaggctggtctcaaactccagacctcaagtgatctgtctgcctcagcctcctaaagtgttgggattacagacatgagccactgtgcccagccctcctttccctttaagcatacctaaaggcctctctacaaagcgccaatcagaatttgagtcatctggaagaaatatcaaaagagctccagt

SEQ ID NO: 361087 - DNA, 601 bp, Homo sapiens
cctggagaggtatcgggatgcactaattgttcttcatgtgttctgtcttttacggtaatcactgattaaaatttcattagatgagtatgtattacacctcaacagagaatgccactgtcccccattgtgatgtcgtttgctatggcaaaaaattaaccaaactttacagttttattattagcaacatctcctccccctatccccgctgctttttttttttttttttttttaagatggaatctcgctctgttgcccaggctggagtgcagtggtatgacctcagctcactgcaaactctacctctcgggttcaagctgtcctcctacctcagcctcccgagtagctatattcaggtgcccgccaccatgcatggctaatttttccattttcagtagacacagggtttcaccatgttggccaggctggtctcaaactccrgacctcaagtgatctgtctgcctcagcctcctaaagtgttgggattacagacatgagccactgtgcccagccctcctttccctttaagcatacctaaaggcctctctacaaagcgccaatcagaatttgagtcatctggaagaaatatcaaaagagctccagt

SEQ ID NO: 361088 - DNA, 601 bp, Homo sapiens
cctggagaggtatcgggatgcactaattgttcttcatgtgttctgtcttttacggtaatcactgattaaaatttcattagatgagtatgtattacacctcaacagagaatgccactgtcccccattgtgatgtcgtttgctatggcaaaaaattaaccaaactttacagttttattattagcaacatctcctccccctatccccgctgctttttttttttttttttttttaagatggaatctcgctctgttgcccaggctggagtgcagtggtatgacctcagctcactgcaaactctacctctcgggttcaagctgtcctcctacctcagcctcccgagtagctatattcaggtgcccgccaccatgcatggctaatttttccattttcagtagacacagggtttcaccatgttggccaggctggtctcaaactccagacctcaagtgatctgtctgcctcagcctcctaaagtgttgggattacagacatgagccactgtgcccagccctcctttccctttaagcatacctaaargcctctctacaaagcgccaatcagaatttgagtcatctggaagaaatatcaaaagagctccagt

SEQ ID NO: 361089 - DNA, 582 bp, Homo sapiens
agcaaaaccaccaagacaggaaatgagatggaattgataaggcaatgcaaataattcaggttatttagatcatcagtgttgggggaagctgggtttatgggaatcaatggttaatcagaatgtgagcamcattggtttggtaattcatggaagaggttatcattcaacagggggagtggcttctcgattataaacatgtctgaaggtcactgaacatcaaggctatccttcagttaaaatcttattaaaattatactgacctctgatgaccttcagagagctccagctagatggattgatgataagagaaattcgagaaggcaatggggcaaatctttgtgcaaatctctgttatgtcatatatctaaggcttctgctggatccagtgatttgtttgttctgactgtagtacaaatctattggaacaataaatctagttataataaatgacagagggcattgaagcagatgcaagaagcaaaatatacaggtgtaaagacaaactatattaggcctcccatcaagcttctctaatattttcacagcacagccctgcctgacttctctctatctggataggcc

SEQ ID NO: 361090 - DNA, 582 bp, Homo sapiens
agcaaaaccaccaagacaggaaatgagatggaattgataaggcaatgcaaataattcaggttatttagatcatcagtgttgggggaagctgggtttatgggaatcaatggttaatcagaatgtgagcaacattggtttggtaattcatggaagagrttatcattcaacagggggagtggcttctcgattataaacatgtctgaaggtcactgaacatcaaggctatccttcagttaaaatcttattaaaattatactgacctctgatgaccttcagagagctccagctagatggattgatgataagagaaattcgagaaggcaatggggcaaatctttgtgcaaatctctgttatgtcatatatctaaggcttctgctggatccagtgatttgtttgttctgactgtagtacaaatctattggaacaataaatctagttataataaatgacagagggcattgaagcagatgcaagaagcaaaatatacaggtgtaaagacaaactatattaggcctcccatcaagcttctctaatattttcacagcacagccctgcctgacttctctctatctggataggcc

SEQ ID NO: 361091 - DNA, 582 bp, Homo sapiens
agcaaaaccaccaagacaggaaatgagatggaattgataaggcaatgcaaataattcaggttatttagatcatcagtgttgggggaagctgggtttatgggaatcaatggttaatcagaatgtgagcaacattggtttggtaattcatggaagaggttatcattcaacagggggagtggcttctcrattataaacatgtctgaaggtcactgaacatcaaggctatccttcagttaaaatcttattaaaattatactgacctctgatgaccttcagagagctccagctagatggattgatgataagagaaattcgagaaggcaatggggcaaatctttgtgcaaatctctgttatgtcatatatctaaggcttctgctggatccagtgatttgtttgttctgactgtagtacaaatctattggaacaataaatctagttataataaatgacagagggcattgaagcagatgcaagaagcaaaatatacaggtgtaaagacaaactatattaggcctcccatcaagcttctctaatattttcacagcacagccctgcctgacttctctctatctggataggcc

SEQ ID NO: 361092 - DNA, 455 bp, Homo sapiens
cattctatctgtgcagcaacctattctctagtctgtcctgtgatgtctagccaccctgtcttcttcaaagttactaccaggctctgcctgggtcctccctccctgctctacagttgacaatctcaggcagcaaactggagcaatcatagggctcacctcttttatttattatagtactgcactrtatccaatgttgaagatagagtttaaaatactttttccagtttctcagttgtttaaggtggaggacaaatcaggtccccattactccaaattggccagaagcagaagtctccattccatctttgtggtcagaaagaacagtatgacagaaggcagcttgttagaatgggaagacccatgggctaagaatcagcattacctaggctctagtctcagcactgtatttactaactttgtgcaagtgattgatccttcttgaatttctgtttccc

SEQ ID NO: 361093 - DNA, 539 bp, Homo sapiens
cttcttcaaagttactaccaggctctgcctgggtcctccctccctgctctacagttgacaatctcaggcagcaaactggagcaatcatagggctcacctcttttatttattatagtactgcactgtatccaatgttgaagrtagagtttaaaatactttttccagtttctcagttgtttaaggtggaggacaaatcaggtccccattactccaaattggccagaagcagaagtctccattccatctttgtggtcagaaagaacagtatgacagaaggcagcttgttagaatgggaagacccatgggctaagaatcagcattacctaggctctagtctcagcactgtatttactaactttgtgcaagtgattgatccttcttgaatttctgtttccccatttgtaaagtgggtcaaatcataattccaaggctgctgtacagatcagttgaagtagtatcttaatgttcatgagtgtatttctctttcagggttatttatttttttatttttgggtcccaataaaccgtccaaatctttt

SEQ ID NO: 361094 - DNA, 647 bp, Homo sapiens
cagtcttaccgaaaagtaaactaaccagggatccctggtttctgtatctttaaaacctatagggttacaaaccaaagtgagatgcctatctggtttctgcacagttgtcctgaattatgttggcagatattttatagccagaaatttaccttgaaaaataaattgaaaccataccaagtatttagagctaggggtctaaaatctgcaaaagccstgggaggttgtgttgtctcaagagccagtattcagtggaccactccacatcatatcaaataaaatttaaacacagcattttgaagccgacagtatgggtcactgtgtgtcctgtgtgccgtgagcgtattgtagagtagttgttgagtctgctgccttatctgtgtgttatgaggtcaatgcactgatcacttgcttttttcacttctatactaactctaggcacactttactcccagtcaaaagtggactgtatacttcctctttgatgtgatggtccctttggttttggtgcctcttccatgagcttcagatcagaactagctatgtggttccaggctgccttggtttaatcccttgtcttgcctacttcacctggctcaagagggaagtccaggaggaagaaatggatgaagtcctggagtactcactag

SEQ ID NO: 361095 - DNA, 551 bp, Homo sapiens
cctgtgtgccgtgagcgtattgtagagtagttgttgagtctgctgccttatctgtgtgttatgaggtcaatgcactgatcacttgcttttttcacttctatactaactctaggcacactttactcccagtcaaaagtggactgtatacttcctctttgatgtgatggtccctttggttttggtgcctcttccatgagcttcagatcagaactagctatgtggttccaggctgccytggtttaatcccttgtcttgcctacttcacctggctcaagagggaagtccaggaggaagaaatggatgaagtcctggagtactcactagatgaacagtatttgactcattccagctgccatgactcccaccagcttcccagcagcaatgccttcctctttgatgcacaggaaggcccctcggctgtggaaacagccagtaagtgctcctttgataagaaaaataaagctccatcaatctctcagtagctcctacattctacatgctcaccacctctgtctaaactgagagatgttattctctgcaggcaggcccta

SEQ ID NO: 361096 - DNA, 551 bp, Homo sapiens
cctgtgtgccgtgagcgtattgtagagtagttgttgagtctgctgccttatctgtgtgttatgaggtcaatgcactgatcacttgcttttttcacttctatactaactctaggcacactttactcccagtcaaaagtggactgtatacttcctctttgatgtgatggtccctttggttttggtgcctcttccatgagcttcagatcagaactagctatgtggttccaggctgccttggtttaatcccttgtcttgcctacttcacctggctcaagagggaagtccaggaggaagaaatggatgaagtcctggagkactcactagatgaacagtatttgactcattccagctgccatgactcccaccagcttcccagcagcaatgccttcctctttgatgcacaggaaggcccctcggctgtggaaacagccagtaagtgctcctttgataagaaaaataaagctccatcaatctctcagtagctcctacattctacatgctcaccacctctgtctaaactgagagatgttattctctgcaggcaggcccta

SEQ ID NO: 361097 - DNA, 566 bp, Homo sapiens
ggtcactgtgtgtcctgtgtgccgtgagcgtattgtagagtagttgttgagtctgctgccttatctgtgtgttatgaggtcaatgcactgatcacttgcttttttcacttctatactaactctaggcacactttactcccagtcaaaagtggactgtatacttcctctttgatgtgatggtccctttggttttggtgcctcttccatgagcttcagatcagaactagctatgtggttccaggctgccttggtttaatcccttgtcttgcctacttcacctggctcaagagggaagtccaggaggaagaaatggatgaagtcctggagtactcactagatgaacagtatttgactcattccagctgccatgactcccaccagcttcccagcagcaatgccttcctctttgatgcacaggaaggcccctcggctgtggaaayagccagtaagtgctcctttgataagaaaaataaagctccatcaatctctcagtagctcctacattctacatgctcaccacctctgtctaaactgagagatgttattctctgcaggcaggccctaaa

SEQ ID NO: 361098 - DNA, 629 bp, Homo sapiens
gccatgactcccaccagcttcccagcagcaatgccttcctctttgatgcacaggaaggcccctcggctgtggaaacagccagtaagtgctcctttgataagaaaaataaagctccatcaatctctcagtagctcctacattctacatgctcaccacctctgtctaaactgagagatgttattctctgcaggcaggccctaaacattcactttaaaaaagtgattaggctgaacacagctctgggatcaactctcaagtacaggtccctggtgggtcaggtaatttgctctgttcctgtcctcacctcagtccctctggtccagacsggcatctgcaagccggtatactcaaagcaggccagaatggagagagtgaagagattatggcagactctctgccactactgccgcgcatgtacaaatctgtttaacagatcttcttctttaaaatgggacatctcatctttcctgaaatatatatattttttgagacagggtctcttgttctgtcacccaggctagagtgcagtggcatgatcttggctcaccacaacctaaaacccaggttcaaatgaccctcccacctcagcctcctgagtagctgagaacacagatgcatgccactactcc

SEQ ID NO: 361099 - DNA, 629 bp, Homo sapiens
gccatgactcccaccagcttcccagcagcaatgccttcctctttgatgcacaggaaggcccctcggctgtggaaacagccagtaagtgctcctttgataagaaaaataaagctccatcaatctctcagtagctcctacattctacatgctcaccacctctgtctaaactgagagatgttattctctgcaggcaggccctaaacattcactttaaaaaagtgattaggctgaacacagctctgggatcaactctcaagtacaggtccctggtgggtcaggtaatttgctctgttcctgtcctcacctcagtccctctggtccagaccggcatctgcaagccggtatactcaaagcaggccagaatggagagagtgaagagattatggcagactctctgccactactgccrcgcatgtacaaatctgtttaacagatcttcttctttaaaatgggacatctcatctttcctgaaatatatatattttttgagacagggtctcttgttctgtcacccaggctagagtgcagtggcatgatcttggctcaccacaacctaaaacccaggttcaaatgaccctcccacctcagcctcctgagtagctgagaacacagatgcatgccactactcc

SEQ ID NO: 361100 - DNA, 629 bp, Homo sapiens
gccatgactcccaccagcttcccagcagcaatgccttcctctttgatgcacaggaaggcccctcggctgtggaaacagccagtaagtgctcctttgataagaaaaataaagctccatcaatctctcagtagctcctacattctacatgctcaccacctctgtctaaactgagagatgttattctctgcaggcaggccctaaacattcactttaaaaaagtgattaggctgaacacagctctgggatcaactctcaagtacaggtccctggtgggtcaggtaatttgctctgttcctgtcctcacctcagtccctctggtccagaccggcatctgcaagccggtatactcaaagcaggccagaatggagagagtgaagagattatggcagactctctgccactactgccgcrcatgtacaaatctgtttaacagatcttcttctttaaaatgggacatctcatctttcctgaaatatatatattttttgagacagggtctcttgttctgtcacccaggctagagtgcagtggcatgatcttggctcaccacaacctaaaacccaggttcaaatgaccctcccacctcagcctcctgagtagctgagaacacagatgcatgccactactcc

SEQ ID NO: 361101 - DNA, 629 bp, Homo sapiens
gccatgactcccaccagcttcccagcagcaatgccttcctctttgatgcacaggaaggcccctcggctgtggaaacagccagtaagtgctcctttgataagaaaaataaagctccatcaatctctcagtagctcctacattctacatgctcaccacctctgtctaaactgagagatgttattctctgcaggcaggccctaaacattcactttaaaaaagtgattaggctgaacacagctctgggatcaactctcaagtacaggtccctggtgggtcaggtaatttgctctgttcctgtcctcacctcagtccctctggtccagaccggcatctgcaagccggtatactcaaagcaggccagaatggagagagtgaagagattatggcagactctctgccactactgccgcgcatgtacaaatctgtttaacagatcttcttctttaaaatgggacatctcatctttcctgaaatatatatattttttgagacagggtctcttgttctgtcacccaggctagagtgcagtggcatgatcttggctcaccacaacctaaaacccaggktcaaatgaccctcccacctcagcctcctgagtagctgagaacacagatgcatgccactactcc

SEQ ID NO: 361102 - DNA, 358 bp, Homo sapiens
attaggtatataagagccctttggtttggtagcctctctggtgtgtgtatagattaaaaccttgacctatatctcctctcccttacttgaatgtttgactttactttgggggcaaaagtttggattgttaggagactatatgctttatatactcttctatgcaataaaaagagattatattaattcactcattgagctttcacagtaatrtaaaccatattaggcttgtcattctgtcagtgatgggtgtaagtttgtggctttaattagtcataccatcttctgacaaaggcatccttatttctctttccaatttcacagtaatggtgcagaagaaggtctttaccatctgttaaag

SEQ ID NO: 361103 - DNA, 510 bp, Homo sapiens
cccaccttaatatccattcttgcacaagttctgttaggtataagccaaaatcacatgggatttttttttttaccctctcatgcctatgtttgcttttgcttccaaagacccttctgagtaaggactgtcctcagactactggagtcacttagtcacaagcttgcctgaggctcagagctggcaatacctggyagtttatgtcaatcccacatgcaaccctgcctgcaaagtatttacccatgattgacaggtgcaggtgtatgaaagcccagctccttgacttgaggggtgcgtttgtggtgaattagctttgggaaaagggaatccagaggccaactttgtaaaaatccagataggtaaatggagagaaatctttgccttggaagtccagttgagaaagatagtgatttacttcggactgtgaaaagagagactaaaatctttactttctcatgggaaagaagcctatggtgaaagagaaacaaagaaaatggtgggaaatagggtagg

SEQ ID NO: 361104 - DNA, 510 bp, Homo sapiens
cccaccttaatatccattcttgcacaagttctgttaggtataagccaaaatcacatgggatttttttttttaccctctcatgcctatgtttgcttttgcttccaaagacccttctgagtaaggactgtcctcagactactggagtcacttagtcacaagcttgcctgaggctcagagctggcaatacctggtagtttatgtcaatcccacatgcaaccctgcctgcaaagtatttacccatgattgacaggtgcaggtgtatgaaagcccagctccttgacttgaggggtgcgtttgtggtgaattagctttgggaaaagggaatccagaggccaactttgtaaaaatccagataggtaaatggagagaaatctttgccttggaagtccarttgagaaagatagtgatttacttcggactgtgaaaagagagactaaaatctttactttctcatgggaaagaagcctatggtgaaagagaaacaaagaaaatggtgggaaatagggtagg

SEQ ID NO: 361105 - DNA, 510 bp, Homo sapiens
cccaccttaatatccattcttgcacaagttctgttaggtataagccaaaatcacatgggatttttttttttaccctctcatgcctatgtttgcttttgcttccaaagacccttctgagtaaggactgtcctcagactactggagtcacttagtcacaagcttgcctgaggctcagagctggcaatacctggtagtttatgtcaatcccacatgcaaccctgcctgcaaagtatttacccatgattgacaggtgcaggtgtatgaaagcccagctccttgacttgaggggtgcgtttgtggtgaattagctttgggaaaagggaatccagaggccaactttgtaaaaatccagataggtaaatggagagaaatctttgccttggaagtccagttgagaaagatagtgatttacttcggactgtgaaargagagactaaaatctttactttctcatgggaaagaagcctatggtgaaagagaaacaaagaaaatggtgggaaatagggtagg

SEQ ID NO: 361106 - DNA, 586 bp, Homo sapiens
aaaatcccaaaagaacatttactgtaaaagaacattgactataaacatctttctgtgaatccttatttctgtcccagccaccatgacccaataatctctaaaacctgttagtgttctccagattgaagccttccctctaactgctcctaaatctgtgatgtagtggaaaaggtttgaggccttgattctcakcccgggtttttcacctacagatcatatggccttagcctcttgacaccattgtctccttatggccaaagatggaactgtacttgggtggtatctgagcaccctgttggctttgacattctagggctcttcccttggcaccactctcttatttaaaaggaataggatgtggacttagaagggttatttctctgcaaactatcctctctttcttatgacaagctatttctgaatgtgcacatttgaggctaagcaaatcccttcctgggaggtgtgaaagacctttatttctctccagaggagtattatggatgtggtagagacctggctaactcatctgcagcggctttgagcaaggcttttagaaccataaggtggctggggtcctgtgtcctac

SEQ ID NO: 361107 - DNA, 567 bp, Homo sapiens
tctttctggaagttcctgggcctgctcctggccactgggaaactcctccaggtctggggcagaaacccctcctatgagcccacccggcactaggtcttttagggacgccgctggccccatcccctgtcaatcaggccttcatctcccaagatggtrgatctcacaaagtgaccgggaagacagggtggagagggcagaggcaggacctggaggagggcactagggtaagctggtaagggctggtcaggggtatgatttgggcttcttttgcttccagggggaccctggaccagatggaccatcggggcccccaggaccccctgggaaacctgtaagtgtccccagacccccgacatggcaaagtgcaggggaaggagaagggtctttgagcaagcctgcggcgggaaagggtcaggccaagctccatcttcatgtctcctctcagggtcgcccgggaaccatccagggtctggaaggcagtgcggatttcctggtgagagacgaggtctggggcggggctaacacaggggggcggggccacagagatggggaggcggggccacggag

SEQ ID NO: 361108 - DNA, 606 bp, Homo sapiens
tctttaagccaaaaccatttcctatatatggagttctggcatttttgcaaatgtgctttatggtacccttgaggatggtctcyggatgtttcctgatttcaaacttgtatgaaagattagaccagggaatttctttgtgtagaaattttctcatagttgtcttaagttttaactcatgtacattaatctttagctttgctttacatttgttttctgttgatagccaagtcattgcttgttaaatattccttagaaatgaactttcctatcaatttaaaattattttagctgtatctgtggcacttttttttttttctcttttgagatggagtctcgctctgttgcccaggctggagtgcagtggtgtggtcttggctcactgcaacctccacttcccgggttcaagccattctcctgcctcagcctcccgagtggctgggattagagacgcctgccaccacacctggctaatattttgtatttttagtagagaggggtttcatcatgttggccaggctggtctccaactcctgacctcaggtgatcgcccaccttagcctcccaaagtgctgggattataggtgtgagccgccgcacccagcctgt

SEQ ID NO: 361109 - DNA, 606 bp, Homo sapiens
tctttaagccaaaaccatttcctatatatggagttctggcatttttgcaaatgtgctttatggtacccttgaggatggtctccggatgtttccygatttcaaacttgtatgaaagattagaccagggaatttctttgtgtagaaattttctcatagttgtcttaagttttaactcatgtacattaatctttagctttgctttacatttgttttctgttgatagccaagtcattgcttgttaaatattccttagaaatgaactttcctatcaatttaaaattattttagctgtatctgtggcacttttttttttttctcttttgagatggagtctcgctctgttgcccaggctggagtgcagtggtgtggtcttggctcactgcaacctccacttcccgggttcaagccattctcctgcctcagcctcccgagtggctgggattagagacgcctgccaccacacctggctaatattttgtatttttagtagagaggggtttcatcatgttggccaggctggtctccaactcctgacctcaggtgatcgcccaccttagcctcccaaagtgctgggattataggtgtgagccgccgcacccagcctgt

SEQ ID NO: 361110 - DNA, 621 bp, Homo sapiens
tgcttgttaaatattccttagaaatgaactttcctatcaatttaaaattattttagctgtatctgtggcacttttttttttttctcttttgagatggagtctcgctctgttgcccaggctggagtgcagtggtgtggtcttggctcactgcaacctccacttcccgggttcaagccattctcctgcctcagcctcccgagtggctgggattagagacgcctgccaccacacctggctaatattttgtatttttagtagagaggggtttcatcatgttggccaggctggtctcsaactcctgacctcaggtgatcgcccaccttagcctcccaaagtgctgggattataggtgtgagccgccgcacccagcctgtggtaccttttaaaaagtaaaaaattcaatggcgtgaaacaacagaaggagttctgcttccatttctagttgttaaacgcctttctctagccaagatcacatatatttctggttttttatagctagtgcactataactctgacagtcatggttagattgatagttttactgaaagtaatttatcaaaatccccattagattgtcttttaatgtcaacatattaaacctgttccctgagagatactttc

SEQ ID NO: 361111 - DNA, 587 bp, Homo sapiens
gaatgcatgtaatggcacacagtgcctgctatacagaagattctcaatacgtgggagttcgcggaagagctgcgcccctaggaccccgctcccagggtcgcttgcagccccggggacgcccagcttcctgcactgtctgaggactgccccaccccgtgtgtgtttttcaaagaggtccaccgggagagcggggccccccgggtcccccgggaccgccgggagtgcctggatccgacggcatcgacgtaagtctctaacctgagaccagggcgggagggaggcggcagacaaaggagaactttgtgagcgctgtggtgggggtggggactgggggtgcccggagatgtagtgcccctcgtcgccaataggcggcgccggcccgcaccacaaggacgccgtttgttctgcaaaaacctcaaaccagccctgacatgcggagcccgttatagccgccgacagacaaggagytgctgttcagtccgccggccgcagctcacagcgaggcctcatcccccttctctcctttcccctccttgtggggtaggaggcgactcaacccctcaccctgcctttggcacatttggacg

SEQ ID NO: 361112 - DNA, 480 bp, Homo sapiens
tattttcttgtaccaacttttaaagtaaatttcaaactgacataaaagttgaaacaatagtacaataaaacccatgtatcttcttccttaaattcaccaactgttaacatttgccatattttctctccctccctataaaaaaacttacatttttttgatgagtatcaaaagttgcagattaaaaaaaaaaaaaagctgcagctatcacgacatttcattcctaagtcaggaggcacctcataagaatgaacactttaacagaaccacaaaacaatgaacacgctcaaaaattttaacattaacaccatattstaatgtacatggcatttcattttcaaatctctgtagtctcctttaagctaaaccagtttccctaacacttccttccatttcttcctgacactgacatttttaaaaacccaggacagttattttgtagcatacccctcaatttggattcatctcatgttttctcataat

SEQ ID NO: 361113 - DNA, 558 bp, Homo sapiens
ctcacagtctatcaagggcctggtaatgccaagacaaagagccagggtctctaccaagtactttcctatatccagttgtgtttaattctgatttcttatrttgaaagcattagtttgtatagattcacatttaaaaagacttggagtttacaaaggtcttcaaagattctgatactatgcaatatctgaagattttagacagataaggagataaaattgaaaggcagttatcacttaaatcctagaagaaaacacaggaaaaaaaatcagtgtatttttatagcgatggtgctaagactgaactctttccactaacaataaattttgactaaatttttttctttcctccatagctgctgggagttttctcttcccaatttccccagaaaagccatgagttcagtgtgtgataagagagcaacagacattactctgggagctgtgaagggatttgggtaaacaaatatgaaagaagattaatttttaaaaacccttttcagataactttctgtgtaaatatgatcttatattcaaaatccacagtaatttcatcaacaa

SEQ ID NO: 361114 - DNA, 558 bp, Homo sapiens
ctcacagtctatcaagggcctggtaatgccaagacaaagagccagggtctctaccaagtactttcctatatccagttgtgtttaattctgatttcttatgttgaaagcattagtttgtatagattcacatttaaaaagacttggagtttacaaaggtcttcaaagattctgatactatgcaatatctgaagattttagacagataaggagataaaattgaaaggcagttatcacttaaatcctagaagaaaacacaggaaaaaaaatcagtgtatttttatagcgatggtgctaagactgaactctttccactaacaataaattttgacyaaatttttttctttcctccatagctgctgggagttttctcttcccaatttccccagaaaagccatgagttcagtgtgtgataagagagcaacagacattactctgggagctgtgaagggatttgggtaaacaaatatgaaagaagattaatttttaaaaacccttttcagataactttctgtgtaaatatgatcttatattcaaaatccacagtaatttcatcaacaa

SEQ ID NO: 361115 - DNA, 598 bp, Homo sapiens
ctgcccatccctaagcatctattacgcttctgatgttaagcagcctccattctctcccactctgatcttacctctcccttcagtattccctaagaaagctaatgctatgccttgtgaaaactgtcagaataaaactgaggtcacttgtgtgtttaaaaagcaaacacactgacaaatagagatggagaaggccatgaagagagggttctcgtgmttatatgcctgataataagaactatcataaaagactacacaaaacacaaccttgcataaaggccatcgcaaccttacagcaaaaatacttctgcaaggacattggcccagcaactgcctgtccgagctcagactggtgtcacccttattatgaatctttgtggccaagaaaaactattttgaaatacttggggcagggtggcctatgccccttttcttacaagctcagaagaggaagatccccatcatctcccttgtcatacccaaataaacttgtatggagtcttccagcaaaggcccacaaatgccacattctgtcatagttttgtctgctctggttcctcccatcttaaaacaaaaacaaaaaacaaaatacaaaacaaaa

SEQ ID NO: 361116 - DNA, 598 bp, Homo sapiens
ctgcccatccctaagcatctattacgcttctgatgttaagcagcctccattctctcccactctgatcttacctctcccttcagtattccctaagaaagctaatgctatgccttgtgaaaactgtcagaataaaactgaggtcacttgtgtgtttaaaaagcaaacacactgacaaatagagatggagaaggccatgaagagagggttctcgtgcttatatgcctgataataagaactatcataaaagactacacaaaacacaaccttgcataaaggccatcgcaaccttacagcaaaaatacttctgcaaggacattggcccagcaactgcctgtccgagctcagactggtgtcacccttattatgaatctttgtggccaagaaaaactattttgaaatacttggggcagggtggcctatgccccttttcttacaagctcagaagaggaagatccccatcatctccmttgtcatacccaaataaacttgtatggagtcttccagcaaaggcccacaaatgccacattctgtcatagttttgtctgctctggttcctcccatcttaaaacaaaaacaaaaaacaaaatacaaaacaaaa

SEQ ID NO: 361117 - DNA, 528 bp, Homo sapiens
acaacttcttattaactacagtcaccactgtttgatagatctccagaacttattcctcctgtctaactgaaactttgtaccctttgatcaatatctccacaaccctcttccctccaccctctggcccctgaayaccaccattctaatctgtttctttgagttcggattttttagattccacatggaagtgagtctgtgcagtgtgatagtttgcatgttgtcccctccaaatctcatgttgaaatttaacccccaatgctggagatggggcctaatgagaatgtttgtgttataggggaggatccctgatgaatagattgatgcccttctgggggaaaaggtaaataagttctttctcttttagttcctgagaaagctgattgtgagtaacagcctggcctctccctgccccttcttccttcctctctcaccatgtgatctctgcatacaccggctcccctccaccttctgcaatgagtggaagcagatgctggcaccatgcttctcgtaaagcctgtagagctgtga

SEQ ID NO: 361118 - DNA, 571 bp, Homo sapiens
ataattaacattccacatagttctgccgttgtggtttttaaaaataggtctacaattctttgatattcttactttctagaggtggaacttaatttccctcccctcaagtatacggtggccttaatgaccagcatgtaatgaatagaaaattgcagaaatgatgaaatgtcactgaagtgaggttatgaaaagacggaggcttctgtcttgggtggtcttggctagctctctctcacactgtctctctttctctctttctytctctctctctcatactctctcttccttggattatttgctctgggggaagccagctgccatgtttcaagctggcctgtggagaagcccactggagaggaacagagggaggcctctggccaacagcttctgaggaactgaggtctgtcaacaactacatgagtgagtttggaagtggattcttcagccccagttgagatatgagatgatcgcagccctatttgacaaaaatctcacaagagaccacccagctacatacatacataaaacgagttggaaccaaaggtggcaatctaagacagacacaatttta

SEQ ID NO: 361119 - DNA, 250 bp, Homo sapiens
gcattttataaacattaatctgacaaatttctcacartgatcctatggaataggcattagtactctcatttgttggatgagagatccaagtctgacaaagaaaacaagcagcaacacagctgttctgttttctgaatttatcttttaacttgattctcttatcatctatatggaattgaaagcttcttgagaacttattctattttgaactgcttcatagtacctagcacagtaatttatttgggggttt

SEQ ID NO: 361120 - DNA, 539 bp, Homo sapiens
tacacatgtaggctctctgggcattttcatacctgaggacgactttgcagacattctcagttcatgatctttttgttgtaaattctgtagacattgctccacagctttttgctaattggtattgctggagaaatatcttaagtcagtaatttttgtatttctgtaaacaatgaattatttctgcttgatctcataggtttttttcccctttatttttctgtcttcatccattaactgtcattggattctgatattgaaactaaagaactgaattgacaaaggattctttggggtgccactttgccagccagaaatttccatggtcggcrgtgctccttccagagcttcactcggctccaggctcaccgctggacttgctctgcccactcagcctggcaggttgctcttggctcctgctaccagcccagatctcacacccaccaagggcaagccaggtgctctggctgctgcagcatgacgggcagctacaggtcccataacaggtgccagctccatgcgagactgtggctggaccaagc

SEQ ID NO: 361121 - DNA, 519 bp, Homo sapiens
cagctccttcggtctcactgccccatctcggcccacagctcctgggcaggcccagtcccactgccacttcccatcatgtggggtacacaccccctgctggcagtggacaggagtactacagggttacagctcctttcacacccactgttcagcagtcccaggttcttgtcccgtgtccaagaagaatgaggttacatggatgactgaagagtgagtgaggcagagaagagttttattgaacaacagaataactctcagcagagaatggaccsaatgtgggtagcccctacccaaggcaggtagtgccaatgtgtggctgagtccagggtttttatgggctcagaataggggagtgtgtttgactggtccctgggtgagcctagaaaaagcaccatttgattggctaaaaggcatcaaggaagttcttactccagtcagaggctttacccggaactggcagcttgattttcaggctttagtttgtctttagtttgaaggttgggtttcactggggatcag

SEQ ID NO: 361122 - DNA, 413 bp, Homo sapiens
ctcatcttgttccagggtgactctgcagtgctgagatgggatattttaccctggctctaattcctttcaacctgataatctgaacaaatgagatacaacaaaaaagtatatagttgtaatagtagagaaaaatatagtaattcctcaatatccwtgagggatttgttacagaacccctcacagatagcaaaattctcagatgctcaagttcctgatataaaatggccatagtatttgtgtataacctatgtatatcctcccatatactttcaatctctctggattacatataatacctagtgcaaagtaaatactatgtaaatagtagttttgtattatttagggaaaaatgacaaggagaaaaatctgcacatttcactacagacacaaatgtcctttttttaaaaaaaaat

SEQ ID NO: 361123 - DNA, 603 bp, Homo sapiens
ccataacagtagcttatccttttgtgtattttcaatcatgaatgcatggttttaccattggtttacaaatctaggtttgcatgtgtcttcaacctgttgtgccaattaatggaaggaatgtggacaaaaagaaaataaataataatctcccactgtcccatccctgctgtcatactcaagggctgtgcctattcttgttcccctactatctgcatgcttcttcaaggaactggggaatagtagattggcagaaaggtcctaggtgaatggatgtataccctgacaggctggcttgtgattatgcctataattgtattcttgccctccatggctgtcatctctggagtcctgttatctattgtttgcattattatataactcttcggtatattaaaattttgccttttcaactaaattttcagtcctgagtgtcagcggcagaacctatgaaactcttttgtatatctctcatatattaggtgttcaataaacatttgttgagtcaagcagaagcgcatgcaactgacaayatataaaaatgttcctacacactcagggaatcaaggtattcaaattctttttatgttctggctaaaagcataa

SEQ ID NO: 361124 - DNA, 443 bp, Homo sapiens
aagagcaaaacaaaaaaatccatctatgacttaggagttattgccagttatcttgaagcaattttggatagttgaagcrttaaacgactggagataggaaatgtcccaattttcataatggaggtaagagtataatcatagactcacaagcttgaggccacacataatggtgaagcagattattaaacagatggcttgttagcaccttaggaaaaaaatcgaagtatacatgtctattgctatatttgaacccttcctacttctataaaggagatattgattactagtaactggtaagttttgcttaggataagtaaatttatttcaaactcttacctttcttgaaacttactgattaagaatagggcctgtgtattttgtaaggcatttgataatgtctctcatgtgctccctattttagttttatgtgggttagataatgt

SEQ ID NO: 361125 - DNA, 624 bp, Homo sapiens
acattatatctcgtcctactcatgccttaatatttgaaatgccaagacattataggtaagtcagtattttgaaggactggggaaaatggtagtggcctgtagatcatagttcaccatagtaggacttggttgtgtagatgaataggacatgattttaagtttggttagtcaatcagtgtagaaagatccgggtcactgcaggaaattaaaaactccagtaggagtggtgctaggagaagacttcagaaaataaagagacctctaaggtagcaaaagaaaaaagcaagaagatgagaaacaggtggaaaggaatatcaaggacaaattgtgcttaatttattatttttcttcactccagtcccaattttaacaatgtccataaaagaacaacgattctacttacctaatctctattgattaattgataaaaactctttaagtgtgagacattgtgagactaatgggaatttaagaccagttgggagaacacmagggtcattgcaggccaatgaatgagctactttgaggtttgcaaagccatttatattgctctctataatatttgcctagtcatttaacctctgggcttcagttacttcatctgtaaaatgatgatgtggaact

SEQ ID NO: 361126 - DNA, 624 bp, Homo sapiens
acattatatctcgtcctactcatgccttaatatttgaaatgccaagacattataggtaagtcagtattttgaaggactggggaaaatggtagtggcctgtagatcatagttcaccatagtaggacttggttgtgtagatgaataggacatgattttaagtttggttagtcaatcagtgtagaaagatccgggtcactgcaggaaattaaaaactccagtaggagtggtgctaggagaagacttcagaaaataaagagacctctaaggtagcaaaagaaaaaagcaagaagatgagaaacaggtggaaaggaatatcaaggacaaattgtgcttaatttattatttttcttcactccagtcccaattttaacaatgtccataaaagaacaacgattctacttacctaatctctattgattaattgataaaaactctttaagtgtgagacattgtgagactaatgggaatttaagaccagttgggagaacaccagggtcattgcaggccaatgaatgagctrctttgaggtttgcaaagccatttatattgctctctataatatttgcctagtcatttaacctctgggcttcagttacttcatctgtaaaatgatgatgtggaact

SEQ ID NO: 361127 - DNA, 635 bp, Homo sapiens
ttttgtctggttaaaataaaaggttataagatagatttacaagcctcatggtaacctcaagccaaaaacatacaatggatacacaaaaaataaaaagcaagaaactaaattatattaccagagaaaatcactttcactagaggaagatgagaatgaaacaaagaaggaagaccacaaagtaaccagaaaacaaataacaaaatggcaggagttagtccttacttatcaataataacattgaatgtaaaactataataagatatcacctcaccccagttaaaatggcttatatccaaaagacgggcaataacaaatgctggcagggatgtagagaaaaaggaacccttgtacactgttgaatgtaaattagtacaacccactacggagaacagttttgaggctcctcagaaaactaaaatttagctaccgtatgatccascaattccactgatgcgtatgtacccaaaagaaagaaaatcagtatatcaaagagatatctgcactcctctgtttgttgcagcactgtttacaatagctaagatttggaagcaacctaagtgtccatcaacagacgaatagataaagaaaacatggtacatatacacaatgaagtactgttcaacaataaacaagaa

SEQ ID NO: 361128 - DNA, 629 bp, Homo sapiens
ctgtaaggtttccactgagaagcctgctgtcagacctattggagctccattttatgttgtttcttttctcttgctgcttttaggaccctttctttatccttgacctttgggagtttcattattaaatgccttgaggtaatcttctttgggttaaatctgcttggtgttcaataaccatcttgtacttggataccgatatctttctctaggtttgagaagttctctgttattctgccattgaataagctttttrccccatctctttctctacctcctctttagggctgataacttttaaatttgtccttttgaggctattttcttgatcctgtaggtgtactttatgttttttacttttttcttttgtctcatctgacctgtatttcaatttagcctgtctttaagctcaccaattctttcccgtgcttgatccattctgttattaaaggactgtgatgcattcttcagtatgccagttgcatttttcaactctagaatttctgcttgattcttttaattatttgaatctctttgcttgtctgctatcaaatttatctgatatcattctgaattccttctttgtgttatctttaatttctttttgtttcctcaacccagatattttgaat

SEQ ID NO: 361129 - DNA, 528 bp, Homo sapiens
tgctctgaacatacattattccaatcatttgaataatgctatacatattatagtttgttatttgaggatataaaagaatacaatttaattacattttaagtttaattaagcttttacaggaaactttttttttttttgaggcagggtcttggccttttgctcaggctggagtgcagtggcacattcatggctcactgcagcatcaaccacccaggctcctgccccagcctcccatgtagctgggactgcaggtgtgtgccacatgttctgatgatttttaaattttttttgtagagacaattatctcactatgttgcttaggctcgtctcaaactcctgggctcaagcartcctcctgcctcagcctctgaaagtgctaggattacaggtgtgagacactgcccccagccaggaaacctcttattaaagttttacttgttaataagtttatgtgcaaaattttcagtggattaagtctgtcacatttaaatattgtattttcgtagcaatacatgaagtgaaaagagg

SEQ ID NO: 361130 - DNA, 606 bp, Homo sapiens
ctttgctactttattccatgaagaatgttcacacagagtcataatacatcccagatggttttaggtagtatttttctaagggcatggaatacacatgactggaaattggaaaaacaattttaggtcatacctaagtgtacactttttatcttaatgtgtattgaaaaactattgcttgaacaacaaaatgttattgcacaaacattyttgcttaagacaaggctaaagtaagtattgaatttcaatgatttaactcaacctaaagaagagtagtaagtaaatattaaagtatatgaatatagcaaaaatagagaaagttttatacagaagactgaagtttgtaaagcattgtactaaggtgatggattaattatacttttacttttataattttaattataaaagtaaaattataattttacttttatttattttatttatttattgagatggagtctactttgttgcccaagctggactgcagtagtgtgatcttggctcactgcaacctctgcctcccaggttcaagcaattctcatatctcagcctcccaagtagctggggctacaggcacacaccaacacacacagctaatttttgtatttt

SEQ ID NO: 361131 - DNA, 398 bp, Homo sapiens
aaattaattgaccataaacatgtggattaatttccgggctatctattctgtaccattggtctacacgtttatttaggggttgatatccagtgtatatcaggaatttaaacacctcaatagcaagaaaacaaataacctaatttaaaagtggactcagtctatcaacaatgaaacatgataaatatttcttgaaagaagacaaatggccaacagatatattaaaaagtgctcaacttcactaatcgtcagggaaatgtgaatcaaaaccacacagtgagatatcactgcatacctgttagaagggttatgttcaaaaagacaaaagataagtgttgatgacaatgtagagggaagagaatccttrtatactattgatggaaatgtgaattggtatagcc

SEQ ID NO: 361132 - DNA, 493 bp, Homo sapiens
ttataaattactgctgttttatatagaacaatgatgataatractataaatatattataggcataacattttttgttttatataccactgaacagacactatctcattaattagaaggctttcttgactcatcttcggttaatattaaataatctatttggaactcacaatggtaactaatatttacaacagatcgttgcttttataattttcttacatatagataaataattagtaatttacaacttcataatatataatatgtaaatttgtcgatgcatttttagatagatagatagatagatagatagatagatagatagatagatagatgtgtatagactccaggttatgttttctaatctaatctatataaacataaccatttgaaatccctattgattcaacacaactttctgtgcaacatattcttccataattgtaaattttaactattatgctctggtcagaaatgagtagtaagctgatctgt

SEQ ID NO: 361133 - DNA, 558 bp, Homo sapiens
atgaatgattagagaaagtttatcwtgtgaagttttataagctgatcttcattgttatgaaaaatcctcagagtacaggatttattgatatctcatttaggttatgcttcttatattgttatctctataggcccttctatgaaaaggtaaagcccctactgacgattattgttcactagtgatattttaaggaaataaaatttgtaaaccatcctggaattgggacaattatacttgggttgcataataagacctttgtgaaatataaagactcctgttctatcaaggaattttatttaaaaataagttacacaccttgattttaaagacagttttaggcaacttacattcatatttgtatgttcatattttgaaatataaaagctgaagtaaaatttcagattgtagattttatcatatttttttaattaaagaatttcacggctgtctcttcaatttcctgtattactttaaaatgtctttgaggatagccacttcaaaatcctctgccaaactcattctgaaatatcatctacttaaatcactttaatataaata

SEQ ID NO: 361134 - DNA, 558 bp, Homo sapiens
atgaatgattagagaaagtttatcttgtgaagttttataagctgatcttcattgttatgaaaaatcctcagagtacaggatttattgatatctcatttaggttatgcttcttatattgttatctctataggcccttctatgaaaaggtaaagcccctactgacgattattgttcactagtgatattttaaggaaataaaatttgtaaaccatcctggaattgggacaattatacttgggttgcataataagacctttgtgaaatataaagactcctgttctatcaaggaattttatttaaaaataagttacacaccttgattttaaagacagttttaggcaacttacattcatatttgwatgttcatattttgaaatataaaagctgaagtaaaatttcagattgtagattttatcatatttttttaattaaagaatttcacggctgtctcttcaatttcctgtattactttaaaatgtctttgaggatagccacttcaaaatcctctgccaaactcattctgaaatatcatctacttaaatcactttaatataaata

SEQ ID NO: 361135 - DNA, 571 bp, Homo sapiens
gctaattgcttttctaccttggctaaaacagaaacaaatacaggatagaatagtaagtgatttggagaaaaaataagtggctgtttcttagtatatctctatggcaaagacataatctaattataatttacatcttttttaggtctgaccacattttccctgtctttgccttactgatttccctcaagcactagagaatgtaacttagaagttacgagtaagagctttggaatcagagttgaatttgtgttctagttttgccagttactagctgtgttctaatcaagttactttactgctctgagtgaatggcttcacctagaaaatggagatgataatcaatttacagagtttctgtgaaaaawtaaaatgaaatatattcaaacagctttgtaccatgatggccacattagaaatgctcagtctctcatagccattcgaattaatacacctattgcatgccactcatttgtaatgtcttctgataatcagtgctatcaggcactggagcttggaattatgtaatccacctaatttatcctaggatttggggagctccagccatcttaga

SEQ ID NO: 361136 - DNA, 451 bp, Homo sapiens
tacattaatggcatgtggtgaaagaaagtgtttcaagggcccaagtcgtttttcttagtcctttacctgtttattttaaagatgtttttgtcctttttcttaaagcagctgaatcattgcaaacttttattttcccaaacctttatgaagtaactagtttgtaccatgaaaatactacttgcactttagaatgaggctcctaagtaaaatacttttttaattacctgtattagagaaaatccttgtgcttaattatattttatgattcttgataaaagatcactatttcattaatgtgagggaaayttcagacttaggatttaatattaatattggaattaaacaactgaacgaacagtgttaggttctgtttgttatacaatttagtaatatccatttccatttcgaatttatgaccacaaactttagtgcttgtagtaatatatgtact

SEQ ID NO: 361137 - DNA, 526 bp, Homo sapiens
ttggctttcaggctttaaactstctttggcttggaggtggggtttcactggggacccacccctatctgcctaggcatttgcctgcctcctgctgctctcactttgaccaggctggtctcgaactcctaggctctaaggattctctcacctttgcctcccaaagtgctgggactacaggagtaagccaccgtgccctgctagagctgagtcttaaaatatgaatagactttcctgagagaagaagggcaatcatttttagcagagaggacaagctaggtaataaatcgcatggagaatgtgaaaccaaacccatttggtatttgcatgaaatataaaatgcaagaggtacagaaaataaacccatagatgggcaaggcagaaatcttggacttccctgtatgctatgatttctctggaatttagtaccagttacaacgtacaacatggagaaggtagtgagccatttctgaatgtcattaattgatatattattaagaaatgtttgtttgaaaatctgtgaaaacca

SEQ ID NO: 361138 - DNA, 637 bp, Homo sapiens
ccggcataatacattttctcatttataagtattaaaaagtaactaaggggcagagcaagatggcagaatggaagyatacactgtttgtccccttctgctggaacagcacattttaacaactgtctgcacatagaaaagctccatgacaagaaccaaaaatcagatgagcaatcaaagtacctggttttagcttcatattgctaaaagagggcactgaggagagcaggagaggcagtcttgaatcaccattgacacccctccccattccccggctgtggtcatgaggcacagagagagtatttgtgcactttggggagggagacacagtgactgagaaactttacattgaattcagtgctgccctgtcacagcagagaattaaaccatgctgggctcagccagcacccacacaagaagggagcatttggaccagccctagacagaggggaatcactcatcccatgggccggaacttgggtttcatgcaagcctcaccactgagggccaaagtgctctggggtcctaggtaaacttgaaaggagatttgggacacaaggactgcaattcctagtgctaggctaggcttagagccagtgaacttgggtggcatgtgacttaggaagacaccacctggcac

SEQ ID NO: 361139 - DNA, 544 bp, Homo sapiens
gggaaggagattgggatgaacagtaattggcrtgcagaatcttactgtggtgataacaatattctaaaactgatttattgcagtggttgcaacagttgctaagttcactaaaaacatcactgtactattgaaatgagtgaattatatagtatatacaaatgcttcaacaaatttacattaaaaataaatcattacatgagagaagccggacaaaaagtatacaatatatgaaaccttttattaaaattacaaagtgggcaaaactaatttagtttttcaaatcaggatagggcaatccttgtaggaaggaatatggctggtgcagagcacaagggggcgctttctgaggtgacattaattttctgccttatctgtgatagttacatggatgagcttgatttgtgaaaattcattgaggtgtacacgtatgatatacggaattttctgtaggcatattatacatcaataaaacgtccacagcagaacagcaataaacttgtgaaccaaggatgagcaaaagattactagaaaaaagctatgccct

SEQ ID NO: 361140 - DNA, 585 bp, Homo sapiens
agggtcagagtcacaaattttgtcatcagtcctgccatagttggcactttctatcatgatgacgtctgttcctggacagcgaagctctataggatagctctcacaggatagctctctgcggaccacagccattggaattggggcacggctgaaagctgccaaaaggaagaggaagaaaagagatgccatcgttactacatacaaaggaaaattacatgtgttcgcttttccaatgtttggggtaaatcaatacgaagatataaagcagttaagattcataattttaattaaactagaatatttttctcttcagtaactttataaatatttttcttctaatctaacagraacagttatttcttaaaatctttatcacactttttttcttataaatgaaaaaaggcactgtcgattttctattaaactcttggcctagtgtgtcagattaaaactagatagaaatatcatccagtttatacagtcagatattcaaataaaacttgcaagtgttcctttcttctttctttttaataacaaaatcatcattgaaaaattgcactattgttgactttaaatatacttatt

SEQ ID NO: 361141 - DNA, 585 bp, Homo sapiens
agggtcagagtcacaaattttgtcatcagtcctgccatagttggcactttctatcatgatgacgtctgttcctggacagcgaagctctataggatagctctcacaggatagctctctgcggaccacagccattggaattggggcacggctgaaagctgccaaaaggaagaggaagaaaagagatgccatcgttactacatacaaaggaaaattacatgtgttcgcttttccaatgtttggggtaaatcaatacgaagatataaagcagttaagattcataattttaattaaactagaatatttttctcttcagtaactttataaatatttttcttctaatctaacagaaacagttatttcttaaaatctttatcacactttttttcttataaatgaaaaaaggcactgtcgattttctattaaactcttggcctagtgtgtcagattaaaactagatagaaatatcatccagtttatacagtcagatattcaaataaaacttgcaagtgttcctttcttctttctttttaataacaaaatcatcaytgaaaaattgcactattgttgactttaaatatacttatt

SEQ ID NO: 361142 - DNA, 600 bp, Homo sapiens
tcgcttttccaatgtttggggtaaatcaatacgaagatataaagcagttaagattcataattttaattaaactagaatatttttctcttcagtaactttataaatatttttcttctaatctaacagaaacagttatttcttaaaatctttatcacactttttttcttataaatgaaaaaaggcactgtcgattttctattaaactcttggcctagtgtgtcagattaaaactagatagaaatatcatccagtttatacagtcagatattcaaataaaacttgcaagtgttcctttcttctttctttttaataacaaaatcatcattgaaaaattgcactattgttgactttaaatatacttatttaagtaatctatttcaattttacaacatacgtccattgttttaggcaatactttgtgagttcactgtagaactaatgcttgctatttatttaagaaaatggagattcrtttggaggaaaagttatattttcctttagctcctccccatactcttccccactgtcaacaggtaattagttacccatgtggagacctcccaattagaattttcttcacagaaacagacatgtgtgtgt

SEQ ID NO: 361143 - DNA, 633 bp, Homo sapiens
tcagtggtcactgacgacttgaagaaggtgctccttagtcatgggagagatacacagaaggtcatttcatatctattcaaggaagattttgactgtatggactaaatcacctgccattgcactaggggaagggaacgtaaataattacatgatagatgaatcaaacatttctctgtctctccctgggccaagtcttcaatgtcctagtcaaatctgtttttttttttcatgcattgctctacatatttagcgatccagtcaaaaatgagggctacacattaatggtagactggttaaagaaaatatggtacatatacaccacagaatactatgcaatcataaaaaggaatgagatcatatcttttgcaagtacatgaatggagctcaaaggcattatcctcagcaaactaacacaggaacagaaaaccaaacaccacatgttttcacttataagtgggagctgaacaatgagaacacatggagacagggagrggaacaacacatactggggcctggaggcaggagcggggggagggagagcaccaggataaatagctaaagcatgcacggcttaatacctaggtgatgggctgataggtgcagcaaacaactatggcaccatttacctatgta

SEQ ID NO: 361144 - DNA, 610 bp, Homo sapiens
gctaaaactcttattagaggaagctgaaaacatattattaaaaacagacatttacttgaatcaataagttattgaaggagaaagtagaaaggatgattaaawtctcaaatggctttctgtgattcaaaccaaaaaagagtaaatgaggggataaactgcattcctttttctgcttcaatcaaaccacatcacgttgtaagaatattccaatacaggtggttaagaaaaaatcaactgacatttttaaagagatttttagttctttaattcaattgatgtaaaagataatattcccgagaaagcagctgtaaaatgatgcttgcaaacattaataataatatataagccttctaatattaataataaataacatactaaaattttctcatataaattagccaatttctctatttctaaaatatttacatgagcaaaaacagtaaatcctaaaattatcatttcaggattataaagtgaaatgaacattgtttttcatgaaagaatcctttcaatgcctagaaatgtgccccagcttcaagaaatacatccaccattagaaatatattaattcaaaattgttttgtatgtcaacccatcttcctgtcaaacc

SEQ ID NO: 361145 - DNA, 620 bp, Homo sapiens
agtattaatataatttgaagaaaatgagaagagagacagttggagagtagtgtagtatatagacttctagaaattatcataattcttattttgtttgtttgggcatgtcttgctggagaagccttaaaaatgtttatagatatttgatgtggggccatgcaaaaagagattaaaaatgaaaggagataagattatatgctgatagagaaagaatatttccgatgaaatcagataatacaataatcacataattgctagattcaaagataaatgaaaattgaatgagaaaaaaatataaggcacyacaataagggaaaagaccacaacaaatgaattaataattagactcaatttacttcctgccttgacaagaatggtatgaggaagacatcagataattcaatggaggttccaggagggaataaggaagaagtagcaatctaattaaatattcagatggtgagaagacaaaacgtcatgtttaagctttactattattttttcttcttaataatgggccagttaatctgataatagtacaaattgaggtgcaacttcaatagttccaagactgcaagatacatactctattttccctacttatgtatgtacttgctaaa

SEQ ID NO: 361146 - DNA, 505 bp, Homo sapiens
ctggcttcaaacttcaaaggacgggctgactttcttgtaaaaggctaatgyagctggtgactttaagttgagccaatacttatttaccactctgaaaatcctaaggcccttaagaattatgctaaatctactctgcctgtgctgtctaaatagaacagtgcctgaatgacagcacatctgtttatggtatggtttactgaatattttaggcaaattgttgagacctacttctcagagaaaaaaaagactccttacaaaatattactgcttatttacaatgcattctgtcacccaggagctccgatggagatgttcaaggacattaatgttgttttcatgcctgctaacacaacatactccagtctatagatcgagtaatttcaactttcaagtgttattattttaaaaatacattttataagattttagtgttatatacatataacactctctatagctgccataaatagtgaatcctctgatgattctgggtaagtagattgca

SEQ ID NO: 361147 - DNA, 627 bp, Homo sapiens
actcatattaaatgggttcaaataccaagtttgagtctcattaattatgaatgactgctctgcaacagatggcttgtgtttctctttttaagaatgaatggtaagtgtaaagtgagaaacatatgttattctgtgtctttagractctgtacttcttaattcactcatcgatatggtctgcatttgtgattagcactgattctaacacacaatttgagaatttatgacgaattatagtacttgatcaaatcttgacactcgctgctacttaggtacctgatgatagtttctaaaatgttgaaataccttatctttatcctcagacagtagcttgaacactattaggagctgtttaccaaaaatcccatttattattggttttgaagatctaggactgatagggaccaatctatgaaggccatattggccttgtttttctttttaacctaactcatggaaaacaggaacttttttccttttttatggatattggagttaaagagtcccattgcttactacaaatatccaagtgaatgtgatgcttttgaaaaaggtttatttcttcaagacaaacccttacctcatggttactttgactatttgaataagtaatgcatataacagaat

SEQ ID NO: 361148 - DNA, 562 bp, Homo sapiens
actctgtacttcttaattcactcatcgatatggtctgcatttgtgattagcactgattctaacacacaatttgagaatttatgacgaattatagtacttgatcaaatcttgacactcgctgctacttaggtacctgatgatagtttctaaaatgttgaaataccttatctttatcctcagacagtagcttgaacactrttaggagctgtttaccaaaaatcccatttattattggttttgaagatctaggactgatagggaccaatctatgaaggccatattggccttgtttttctttttaacctaactcatggaaaacaggaacttttttccttttttatggatattggagttaaagagtcccattgcttactacaaatatccaagtgaatgtgatgcttttgaaaaaggtttatttcttcaagacaaacccttacctcatggttactttgactatttgaataagtaatgcatataacagaattaaaacagtttccagcacacaagtagtgcttgataaaagtttgctataattactttaacaaagtctatctaatacgga

SEQ ID NO: 361149 - DNA, 583 bp, Homo sapiens
tttctttttaacctaactcatggaaaacaggaacttttttccttttttatggatattggagttaaagagtcccattgcttactacaaatatccaagtgaatgtgatgcttttgaaaaaggtttatttcttcaagacaaacccttacctcatggttactttgactatttgaataagtaatgcatataacagaattaaaacagtttccagcacacaagtagtgcttgataaaagtttgctataattactttaacaaagtctatctaatacggatatttagcctattgttggaaaaactaaatcataaaattctgaataccaaggtataaaaattactgtattcttctgatgtaagctcttgagatattctacctggatgtgtttttaagagttaaaatwatgacattgactagtgttcatgtctcttcagatccttttagtagactgtagacttttacagaaactcagatctaattttatattagtgatggttgctaggtaattttttgatgcaaattaatcattaaacactagcagctcattttctgattggagtggaagctagaatgacttaggagacgacag

SEQ ID NO: 361150 - DNA, 583 bp, Homo sapiens
tttctttttaacctaactcatggaaaacaggaacttttttccttttttatggatattggagttaaagagtcccattgcttactacaaatatccaagtgaatgtgatgcttttgaaaaaggtttatttcttcaagacaaacccttacctcatggttactttgactatttgaataagtaatgcatataacagaattaaaacagtttccagcacacaagtagtgcttgataaaagtttgctataattactttaacaaagtctatctaatacggatatttagcctattgttggaaaaactaaatcataaaattctgaataccaaggtataaaaattactgtattcttctgatgtaagctcttgagatattctacctggatgtgtttttaagagttaaaattwtgacattgactagtgttcatgtctcttcagatccttttagtagactgtagacttttacagaaactcagatctaattttatattagtgatggttgctaggtaattttttgatgcaaattaatcattaaacactagcagctcattttctgattggagtggaagctagaatgacttaggagacgacag

SEQ ID NO: 361151 - DNA, 411 bp, Homo sapiens
acagtgccaaaatttatgagtaaaacaacttaaagataagaataggtttttttattattattattattggctytgtaaggcttaatgatctccactttgtgaaaagaaaagtaataattggaataataatagaaagtataaccttttgtttgatgctattctcttatgctttaattcactattattacaattatttatttagtttcctatataaagtaaccaaattaaacagtaaagtgtcatgttcacctttctaaagcttcagagtaatgaatagctctagctccaaccaaagttttttctatttttttttcttaatgtgatagacaaaccaaagatacagcatgccagaactctaactggtatgtctaaagcttatcatgctagatccctaaaatcagtattattaaa

SEQ ID NO: 361152 - DNA, 411 bp, Homo sapiens
acagtgccaaaatttatgagtaaaacaacttaaagataagaataggtttttttattattattattattggctctgtaaggcttaatgatctccactttgtgaaaagaaaagtaataattggaataataatagaaagtataaccttttgtttgatgctattctcttatgctttaattcactattattacaattatttatttagtttcctatataaagtaaccaaattaaacagtaaagtgtcatgttcacctttctaaagcttcagagtaatgaatagctctagctccaaccaaagttttttctatttttttttyttaatgtgatagacaaaccaaagatacagcatgccagaactctaactggtatgtctaaagcttatcatgctagatccctaaaatcagtattattaaa

SEQ ID NO: 361153 - DNA, 640 bp, Homo sapiens
ctttggtcagtcaataaggttaaaaagataaagtttatttagttttcaacattgccttcttgcagtcaaatgtctatttaattaaattttccaatatttggcaagaaaggactggcagtgtcagctttcttcagcttgatattaaatagcatcttgtgaaattkggtaaagactatctacagtgatatgaaacagatatactttgattccacttaggagaggagtgagaagtccaaattctttgtcaaggcagttaataacttctaagtttctgaatgctaaaagtatgaattacatctttggatcttaagtatgacattcatttgctaactgacttttggtgacttgtagaattctgcttctacaaatactgaacaacaacaaaatacatatacagagtgtaattctcaaaagatagtaataatgacttcaaaacagtgtatcttctatattttatctgcaactcaggcacccattatattatatcatgctatttttctgtcctatactattttaaaattttgtcattattttttttttttttttttttttttttttttttttttttaaaaggcaggatcttgttttgtggccaaggggggtctaaaaccccgggcctaaaggaacccccctgccttgg

SEQ ID NO: 361154 - DNA, 571 bp, Homo sapiens
gacattcatgtgtatattcactgcagcagtattcacagtagcaaagatatggaatcaacctaaatacccatcaatggtatactggataacatggtacatatacaccatggaaaactatgcagccataaaaagaatgagaccatgttctttgcagtaacatggatggagcttgaggacattatcctaagtaaactaacacaggaacagaaaaccaaataccacatactctcacttaaagtgggagttaaacatacagacacaaagaagggagcaacaaacattggtgcctacttgagattgaagggtgagagaagggtgaggattgaaaaactacctatcaggtactatgcttattacccggtgacaaaataatctgtgyaccaaattcctctgacatgcaatttacctacatgacaaacctgcacatgtatccctaaatctaaaaaaaaaaaagtaaaaaaaaccaaaaaacccagaaaattattgtggctgatagatacacagagagcaatggtgtgctggtaaatatttaacaaccagttctttagaaagacacatgtatgtatacaga

SEQ ID NO: 361155 - DNA, 571 bp, Homo sapiens
gacattcatgtgtatattcactgcagcagtattcacagtagcaaagatatggaatcaacctaaatacccatcaatggtatactggataacatggtacatatacaccatggaaaactatgcagccataaaaagaatgagaccatgttctttgcagtaacatggatggagcttgaggacattatcctaagtaaactaacacaggaacagaaaaccaaataccacatactctcacttaaagtgggagttaaacatacagacacaaagaagggagcaacaaacattggtgcctacttgagattgaagggtgagagaagggtgaggattgaaaaactacctatcaggtactatgcttattacccggtgacaaaataatctgtgtaccaaattcctctgacatgcaatttacctacatgacaaacctgcacatgtatccctaaatctaaaaaaaaaaaagtaaaaaaaaccaaaaaacccagaaaattattgtggctgatagatacacagagagcaatggtgtgctggtraatatttaacaaccagttctttagaaagacacatgtatgtatacaga

SEQ ID NO: 361156 - DNA, 611 bp, Homo sapiens
ttgtttgtttgtttgtttgtttgggtggaacctctgtcacccaggctggagtgcagtgatgcaatctcggctcactgcaacctccgcctcctgggttcaagtgattcttctgcttcagcgtcctgagtagctgggactacaggcgtgcaccaccacacccggctaattttttttgtagtttaagtagagatggggtttcaccatattggtcaggctggtcttgaactcctgacctcgtaatccgcccaccttggcctcccaaagtgctgggattacaggtgtgagccactgcgcctggccagattggtcttttgagacttttttcagactytttcattctggcaaccgactggctccacccacactcatgactcatgactccaccagttctgtgaacacccaaccagaggcagacttgatacactgggagtgttttccacacccctatgattgcatcccccactcatcagcagcacccattccctagtcccccacccaccaaactgtccttggaaaaccctaacctctgagtctttggggagactgatttgagtaataactcctcttcttcatggcaaggctagtgttaatttaactctttctttactgca

SEQ ID NO: 361157 - DNA, 603 bp, Homo sapiens
ttgcttgaaatatcttactttaatagaatggagaaaatataagaaattcaattattcaatacccaggccaaaggaatgatttgtaggtgatatgatatgctacatttctgattaatatagtgacattttcatagctcaaaatatagccccttttaagtatgtagatgaactcctgagtttactttgagaaactaataatatccctgctcatagttgtaatctattatacagtattatacttggcattgttatttctagtgaaggataaactgttttgtgattgttctgcataataatactgaattgcctttgaagtaagggatggatagttttgattgtttccccagcatctgtctctcaagctttctgtcaagaacctgcagactgacctttggtgagctctgttcyttcattttttaatatgtgcttcacatgggattgaaactaatcttagctcaaagggtgggcaccgattggcttaaggcagggtttctcaatattggtaatatagacacttggagcttgctattttttgttgttgggggctttctgtacgttacaggatattttgcagcatgtttggcctcttcacattacaaatcc

SEQ ID NO: 361158 - DNA, 596 bp, Homo sapiens
acagtattcttatttgtgaagtgaattgatttggagaggctggctaaggcttagttttagagccatgatatatttattaatatataggtcattagtctagggagctggccaactragtaattaccctgtttaataatggctctacaaatccaggtaattcctacatatctcactacttagattataagttaagctggccacagggcccgccttactgttctctgtcagcttgtatgtgtatgtgtgtgattaggcacttgtaaatttttacattgaagatattaatcacgtggtagctattttttcttttctcatatcagcttacatgttagtaggctgtaagtaaacacctgatccaagggtgactgtgaatattccttttagattaaattaaggattctgaggctatttctccagaaccaggccttgagacaagtgtaatcgcaattatacagtaactccttaaacacttaaaacttaattatttagcaacctattaaaggtgttatcaaatgcatagtgatttttatataaaagttttgtagtcagtgaaaaagaaatgacacatatcaaggtcataatcagaatgtatcatt

SEQ ID NO: 361159 - DNA, 554 bp, Homo sapiens
cccacttctaaaaaaaaagttaaaaaaataataatgatagcatttctgattttggataccaaagtaagagattatatatttataacatggaagtttaatttttttatattaggcacatcatatagcatgaggaatagaactgaaagtcacaaattactattagaaatccagcctttcacgtttcaagtatmaatcaaaatcataaaggaaatcttggtcaatgtgggaggttgtagtcaatagttggatagagactatttttccaactggcagcactgtttttgttttgttttgttttttaatcttcaactaatcaagctgtttgagaaggacaaggcgtctcttgtggtttttgtgttgcttaaaattctacatgatatcttaaggacagcaacattcaggttcctttctctgattattgaagtgaaaattaatgtccagtagtaatgaaattgttttttccacttaactattcaacagtttttactatcaaaataaaaatattaatggctttaaattatatattcacatgtcaattataggagttttaggct

SEQ ID NO: 361160 - DNA, 554 bp, Homo sapiens
cccacttctaaaaaaaaagttaaaaaaataataatgatagcatttctgattttggataccaaagtaagagattatatatttataacatggaagtttaatttttttatattaggcacatcatatagcatgaggaatagaactgaaagtcacaaattactattagaaatccagcctttcacgtttcaagtatcaatcaaaatcataaaggaaatcttggtcaatgtgggaggttgtagtcaatagttggatagagactatttttccaactggcagcactgtttttgttttgttttgttttttaatcttcaactaatcaagctgtttgagaaggacaaggygtctcttgtggtttttgtgttgcttaaaattctacatgatatcttaaggacagcaacattcaggttcctttctctgattattgaagtgaaaattaatgtccagtagtaatgaaattgttttttccacttaactattcaacagtttttactatcaaaataaaaatattaatggctttaaattatatattcacatgtcaattataggagttttaggct

SEQ ID NO: 361161 - DNA, 548 bp, Homo sapiens
ttgcttttatcacaatgaaattctcagcatacaaagcatattgctatagatgacagaaattgagctacattttaggtgaccaagaaaggtaaacttttaaagcattttatggaaattggaatgtattttcaatttggacttacgtaaaacctcacaaaatgtgaaatatcaaacattaagaaatttttaaccaaatccactgatttatattaaattaatgtttcagtgttactatgtttttctagaaacaaatgaaaagtgactcatgttgatggactgaaataaatcattttattccracaaaatacaatttatgaattccctaccgtattacaagatcttatttgcctatgctctaaaaattttcagtggcaatttaaaaaaatactaacttcttttgattttcttactataaatgtatatttataaatgtatgaatcttaaaggcttattcctaggaatatataaaattgacttaataatattctgaaaatgtagaaatgtgtttgaaaatgtggtaatcttgcaaagaagtctaatttccaaat

SEQ ID NO: 361162 - DNA, 594 bp, Homo sapiens
agattctaagtaaaataaaatgattacacaggcaaccaagtaaagtattctacatccaaaccacacagtttcatttttgatcaattgggtttaatgtggaaagttactcagaagaaagacacctcttagcactgtaaaaatcacttttcttcctttacactggctcaccatctactaagattattaatgcatggtaatctttatatcactatgtcattatactttattcatcaacagcttagttagaatactcctgattaacagagacaaaaataggaaaccatttagttagggagaattggcctgtamtttaaaaccatctccatctccacataaacaatatttttggctttaaggagatctccttgcaaataaataatgactaaataaaaatcgattcatttaaaatagatttaaaaaaggaatacatgtgggtatagccagagaaagtatgattaaaattacatatatgctttaagaaaaagattctgaatcaaaagacaattttcaaagtaacaattgtgcaagcaaacaactttatccttctgagttttactatactcatgtaaaacaatagggactgtgacagagctt

SEQ ID NO: 361163 - DNA, 449 bp, Homo sapiens
gtacaactttttaccatagaactcagaaagaatttaggcctctaaaaactatacacttgttcacaaaaaaaaaccatccaccaattatatattgtaaattataagttgcattgtattttaaaacaataatcattcaatcaagccctgttgagctcctaaatatagtatagaaggaattaaatatccagtccttataataaaaaaagaaaatatagatgaatggagagaaatcaagtgttaaataaaaattatattagaaatgtcttaaaacaatttgtgatgagttcaataactgatgcmatgagattatatcaaggcttactgtgattgtaggctgaaggttttaagcactagattcgataggagaaagactttggaaaaggaatggaaagcttttctatcattggaagggaaggcctcagatgtgagagatctatataagtaaagca

SEQ ID NO: 361164 - DNA, 564 bp, Homo sapiens
ttttttctggactaagaattttacaccatggtaaatgtttatcttcaaaaacttatttygttgcttttattgtgtgtctggctcagtgatcctctgcccaattgatgtaagtttcttaatcctacccttaactagaattgccatgttaacctacattgtggaattacctaactttgtgaaatgtcttaaagaaaaattgtttaaatgtgtgccttgacatatgaagctgatgaactcatattatgtgtttatactggaaacataagtaattatgcttcatttcctctttgaggaattcagattaataagtcttacattttgagttatgcttctcaatttcagagctctctaaaaattaagaaatcagttcacagtaatatgaacttaagctgaactcagtaatcatctcttaattttacttaatgcagtgtgcatattcacatggcaaattagctgatttagctgaccgctgcccaggtcatggatcaattcaccaaatgtatttatctatttctccaaagtcatacaccggtgaaccacaaaattaggatcttctcttttgga

SEQ ID NO: 361165 - DNA, 564 bp, Homo sapiens
ttttttctggactaagaattttacaccatggtaaatgtttatcttcaaaaacttattttgttgcttttattgtgtgtctggctcagtgatcctctgcccaattgatgtaagtttcttaatcctacccttaactagaattgccatgttaacctacattgtggaattacctaactttgtgaaatgtcttaaagaaaaattgtttaaatgtgtgccttgacatatgaagctgatgaactcatattatgtgtttatactggaaacataagtaattatgcttcatttcctctttgaggaattcagattaataagtcttacattttgagttatgcttctcaatttcagagctctctaaaaattaagaaatcagttcacagtaatatgaacttaagctgaactcagtaatcatctcttaattttacttaatgcagtgtgcatattcacatggcaaaytagctgatttagctgaccgctgcccaggtcatggatcaattcaccaaatgtatttatctatttctccaaagtcatacaccggtgaaccacaaaattaggatcttctcttttgga

SEQ ID NO: 361166 - DNA, 564 bp, Homo sapiens
ttttttctggactaagaattttacaccatggtaaatgtttatcttcaaaaacttattttgttgcttttattgtgtgtctggctcagtgatcctctgcccaattgatgtaagtttcttaatcctacccttaactagaattgccatgttaacctacattgtggaattacctaactttgtgaaatgtcttaaagaaaaattgtttaaatgtgtgccttgacatatgaagctgatgaactcatattatgtgtttatactggaaacataagtaattatgcttcatttcctctttgaggaattcagattaataagtcttacattttgagttatgcttctcaatttcagagctctctaaaaattaagaaatcagttcacagtaatatgaacttaagctgaactcagtaatcatctcttaattttacttaatgcagtgtgcatattcacatggcaaattagctgatttagctgaccgctgcycaggtcatggatcaattcaccaaatgtatttatctatttctccaaagtcatacaccggtgaaccacaaaattaggatcttctcttttgga

SEQ ID NO: 361167 - DNA, 447 bp, Homo sapiens
tctcttttaacttaaccatttccatcctctatttaaaatgagacaattacagaaagtaaaatatttaatagtctattagttattttacattctttatatacacaaaacatttttaygtatatatattcaatgctgtatatcatgtacaagaaattcaacacataaagcagtctacacggagtcacccattagtttgtaggcattgcaaagttgaaaattaattcattagattttaaagataaaaagtctttgaagtttttctttgttttctctaatacatatttttaagtagaatgttcttatgaactgatttgttttcatgtaacactacgttaaaacttactttctcgggccaagcacagtggctcacacctgtaatcccagaactttgggaggcttaggcaagtggatcacttgagctcaggagttggagaccagcctgggtaa

SEQ ID NO: 361168 - DNA, 447 bp, Homo sapiens
tctcttttaacttaaccatttccatcctctatttaaaatgagacaattacagaaagtaaaatatttaatagtctattagttattttacattctttatatacacaaaacatttttacgtatatatattcaatgctgtatatcatgtacaagaaattcaacacataaagcagtctacayggagtcacccattagtttgtaggcattgcaaagttgaaaattaattcattagattttaaagataaaaagtctttgaagtttttctttgttttctctaatacatatttttaagtagaatgttcttatgaactgatttgttttcatgtaacactacgttaaaacttactttctcgggccaagcacagtggctcacacctgtaatcccagaactttgggaggcttaggcaagtggatcacttgagctcaggagttggagaccagcctgggtaa

SEQ ID NO: 361169 - DNA, 447 bp, Homo sapiens
tctcttttaacttaaccatttccatcctctatttaaaatgagacaattacagaaagtaaaatatttaatagtctattagttattttacattctttatatacacaaaacatttttacgtatatatattcaatgctgtatatcatgtacaagaaattcaacacataaagcagtctacacggagtcacccattagtttgtaggcattgcaaagttgaaaattaattcattagattttaaagataaaaagtytttgaagtttttctttgttttctctaatacatatttttaagtagaatgttcttatgaactgatttgttttcatgtaacactacgttaaaacttactttctcgggccaagcacagtggctcacacctgtaatcccagaactttgggaggcttaggcaagtggatcacttgagctcaggagttggagaccagcctgggtaa

SEQ ID NO: 361170 - DNA, 447 bp, Homo sapiens
tctcttttaacttaaccatttccatcctctatttaaaatgagacaattacagaaagtaaaatatttaatagtctattagttattttacattctttatatacacaaaacatttttacgtatatatattcaatgctgtatatcatgtacaagaaattcaacacataaagcagtctacacggagtcacccattagtttgtaggcattgcaaagttgaaaattaattcattagattttaaagataaaaagtctttgaagtttttctttgttttctctaatacatatttttaagtagaatgttcttatgaactgatttgttttcatgtaacactaygttaaaacttactttctcgggccaagcacagtggctcacacctgtaatcccagaactttgggaggcttaggcaagtggatcacttgagctcaggagttggagaccagcctgggtaa

SEQ ID NO: 361171 - DNA, 707 bp, Homo sapiens
gcagagatcagagaagataagaaacttttttaaaacaactcaaggaaacatcccaaatagtgttacaattaaacttgggcttggagttttgtaacattctgttaagggaaaaccaaaatttgcatgcaagaaggaggcckacagagacagatatgaatgtcaaagtattattcacatgctttgttttccatagctgatatcttttccctaagtaccacagtggaaatagaaatacaaattaaatctacaggagagttatgtatctggcatgttgataagaaaacttttagatcagattcaggattggcaaggatgcagttaaatgagcaagctcaaaaatttctgaaaggagagaaaattcctatactactcctgtgggtgatttgacgatttgtacaatttggtaattagaaatgttaaaatccattagcctggtgacttcactgcttggagtttatactaagaaactcatcagctatgcatactaagatttacacatgaagatttttattgcaaataattcaaaatatctgagggactagaaacaacataaatatttaacaagacagaagagagtaaatcaattatgaaacagccatagactagaacactttaaagctatgtaaaacatgtttgtgaagaaaatgtaatgacttgggaacatgctcatcatattacatggatagcaatatagtataataatgcga

SEQ ID NO: 361172 - DNA, 564 bp, Homo sapiens
atatttggaaaaacctaaagactctgacagaaaaccactagaactgataaacaaattcagtaaagttgcaggatacaatatcaacatgcaaaaatcagtaccatttctatatgacaacaccaaactatctgaaaaacatatcaaaaaactaatctcatttatgatagctacaattaaaattaaatatctgggaataaaacaaaaaaggtgaaagatctctacaatgaaaactataaaatattgatgtaagaaattgaagaggtcaaaaaaatgaaaaggtattctatgttcacagattggtagaatatatatttttaaaaatgtatatattrctcaaagcaatctatatattcaataaatgcctatcaaaataccaataacattcttcacagaaatagaaaacataatcctaaaatgtatatggaaccacaaaagtcccagaatagacaaagctatcctgagcaaaaatttgaacaaaacttgaggaatcacattacctgactccaaattatgcgacagagataatgtaaggaaaacagtatggtactggcatataaacagaca

SEQ ID NO: 361173 - DNA, 548 bp, Homo sapiens
ctttgtgtgaaatcaggcacacatgtgaaagctccagggagattagaaacagaaagaaattctcactcaayggcttgacatataccatcaacagacatgtgaaagtggcacagcttgtgccaaaaaagatagtaagttatcaagaatataattttgtgtaacctgggtcagttgaagcattttaatgcgcttagatgaggagaacattcaaaggtaattacatacttacaagactggatggtttggctgtccttttttttttattattattgtggaaagaaaacatgatgtcataagaacatgcatccagtgtttccaaggataagaataaaatagcttttggtatttagtattgtgtaagacatttaaagcctatttcatcatttattcaaatatttgttccaagtccaaaactgacataccttttgagagaatgataattatttgctaataattgtcttttacatgtctaaaccgatccataatccacaaataattagtttccgactgttgcatcagtgcattgtgtcagaaaatcataactgtat

SEQ ID NO: 361174 - DNA, 606 bp, Homo sapiens
tgtctatgatttcctaagttccttaggctgtagttgttagtggaagtggtggtaaggcttggctatgtatgggtactttagatcagctggtcattgggcactagtgscaacagcagtgggctgggtgtgtaaacacttgagccctcagatggcatacatgtgcagtgatgttagtgggtccaggtaggccaatcctcttgcctccaggcaactttcttggtgccagcagtgacagcaatgggccaaataagtggataggtcgtcaggcccctgggcagtgtgcatgacatcatttatatcagtagcatcaataagccaaccttcaggcccctaggcaacaacacagaggtgccagcagtggcttgggcaggccagacctcaggcctccaggtagcatatgtggtaggggccaatggtatagttgtgtcagggtggccaagaaggcatgcataggtgccagtggcaaaaggccatgtgggtcaattcccaggcccccatcagtgcacaaaggcactggtaagggagcacctggtggggcagggctgtcctcaggacccccgagtgtgaacatgggcacaggctacagtgagtgaggctagtttatcc

SEQ ID NO: 361175 - DNA, 606 bp, Homo sapiens
tgtctatgatttcctaagttccttaggctgtagttgttagtggaagtggtggtaaggcttggctatgtatgggtactttagatcagctggtcattgggcactagtggcaacagcagtgggctgggtgtgtaaacacttgagccctcagatggcatacatgtgcagtgatgttagtgggtscaggtaggccaatcctcttgcctccaggcaactttcttggtgccagcagtgacagcaatgggccaaataagtggataggtcgtcaggcccctgggcagtgtgcatgacatcatttatatcagtagcatcaataagccaaccttcaggcccctaggcaacaacacagaggtgccagcagtggcttgggcaggccagacctcaggcctccaggtagcatatgtggtaggggccaatggtatagttgtgtcagggtggccaagaaggcatgcataggtgccagtggcaaaaggccatgtgggtcaattcccaggcccccatcagtgcacaaaggcactggtaagggagcacctggtggggcagggctgtcctcaggacccccgagtgtgaacatgggcacaggctacagtgagtgaggctagtttatcc

SEQ ID NO: 361176 - DNA, 590 bp, Homo sapiens
tgctttggctttgatttttggatgggcatggtagtgtagtctcagtatgatttcttcagctgtaatatgcatcaatagtgtctatgatttcctaagttccttaggctgtagttgttagtggaagtggtggtaaggcttggctatgtatgggtactttagatcagctggtcattgggcactagtggcaacagcagtgggctgggtgtgtaaacacttgagccctcagatggcatacatgtgcagtgatgttagtgggtccaggtaggccaatcctcttgcctccaggcaactttcttggtgccagcagtgacagcaatgggccaaataagtggataggtcgtcaggcccctgggcagtgtgcatgacatcatttatatcagtagcatcaataagccaaccttcaggcccctaggcaacaacacagaggtgccagcagtggcttgggcaggccagacctcaggcctccaggtagcatatgtggtaggggccaatggtatagttgtgtcagggtgsccaagaaggcatgcataggtgccagtggcaaaaggccatgtgggtcaattcccaggcccccatcagtgcacaaaggc

SEQ ID NO: 361177 - DNA, 557 bp, Homo sapiens
ttgggcactggcaggctgagctgacccatctccaggccccctgaaggtatgcacaggtgtaggtggcagtgagtgaggtggatcaatccccaggtcsctggatgatgtgcatgagtgctggtggcagtgatgagtgggcaggtctttcttcaggtcctctaatggtacatatgagtgccagctgtggtgggtgagacaagtccatccccatacccccaaatggcattctcaagcagtggcggttacagtggtaggcaggagtggcttgtcctcagcccccagaatggtgcccaagaggaccattctccagattgccagaaggcacattcaggggcaaggagcccctactgctagttggtagggagagtttgctgtcagtgtcagcatcgccaggcaagcagaagctctagtggggatacactttggttctctttgtcctaggggcagctttcccagtgtgctacattgtctataccttggggtgtaggatactgtgtgggctagagtgctggggacctggctgcaccactgagtctagctgacatcgtgatcctgca

SEQ ID NO: 361178 - DNA, 605 bp, Homo sapiens
tattagtttaatgagtgagcactcactgtcacacatttatttctcacatatgtttcagcttatgttagcatagttgtagttgttcagacttcaacttacatacatttttttaaaatcacttctcattcaaaagtattttatattggaaagtgtaattttctttgccaagaataggaacccccctaaaacttttaaatactatcttaaccttagttatgaagatgtctattccatcaaagggtaaggaggattagcacattcattcatatttctattggaaaaagagaagcgattaatttattgcttctctgcccgagtgattaagcaataacttattctggcatccttgtcaactgatagcaattgagtttgtttccaaacgacaaatataaatataaaccaaatctattttagttttttgagagattaaaccaatgttatttaaactttatttcttaatgaaaccatcaaaggaacagtttwaaaaaaaaactgtgattttttttcaatagcaaagacttggaaccaacccaaatgtccatcaatgatagactggattaagaaaatatggcacatataaaccatggaatactatgcagctgtaa

SEQ ID NO: 361179 - DNA, 625 bp, Homo sapiens
tgacaatatttaatattgcttgtttgatttaaatgatttgcgagtaaaattcttcaaaattaagagaaaaaaatcagccaacaccaacattttggggctttgtctttgtcaatattctcatcaaattctttaacttcactgtattattctcttgagaagaatctatggtcagactagttttcaaatatggttctacttctcatttttgaacttgggactttagctaccacctctgacactcagtgttcttacacattaaatgagatttatactagtaagacttatagcagtccaacagatagcttcaaaaatagactagattaagcagaagaatttctaaacttgaaagtagktcttgtaaaataccccagtcaggcaaaaaaaaaaaaaataataataatgaaaaacaaaaagtgatgaagaaaaactgtgtgatatatgggacaccataaaatgaccacatattctaattctgggcatcacagaaggagaagagatgggtgaaggcaaagagaaactattttaaaaaataatagctaacaagttctcaagtttggaagagatacacacatccagacacaagaagctcaaaaatccccaaatagattcaatccaaaaaggtttt

SEQ ID NO: 361180 - DNA, 594 bp, Homo sapiens
gataaaccatatgttaggccacaaaataagtctcaattaaaaaaaaatctaaatcctataaagtattttttcagaccacattagaaaacaaaggccacctgaaaactatataaatgaaaattaaacatattcctgaatgactactgtatcaaaaaagaaatttttaaaaattgaaaaaattattgaaacaaattaaaatggaaatataacatactaaatcctatgcaatacaacaaaagcagtaagagggaagtttatcacaataaatggctatrtcaaagaagtagatttcaaataaacaaacttgtaacaatatagctcaaggtactagaaaaacaagagcaaaccaaactcaaaattaggaaaaggaaataaataatacaaattagagcagaactaaacaaaataaagacttaaaaaaaaacacacacaaagattagtgaaatgaaaagttgattttcagaaaagataaataaaattaatgcactattagctcaactaaccaataccaaaaaagacccaaatcaataaaatcaaaattaaaaaaaagagtcattacaactgatatcacagaaatacgaagaaacattagag

SEQ ID NO: 361181 - DNA, 586 bp, Homo sapiens
aaggaaataaataatacaaattagagcagaactaaacaaaataaagacttaaaaaaaaacacacacaaagattagtgaaatgaaaagttgattttcagaaaagataaataaaattaatgcactattagctcaactaaccaataccaaaaaagacccaaatcaataaaatcaaaattaaaaaaaagagtcattacaactgatatcacagaaatacgaagaawcattagaggatatgatgaacaagtatatgctaacaaattggaaaacctagagcaaacagataaattcccagactcacacaacctaccacaactgaagcaggaatgaacaaactaataacaagaagcaagattgaattggtagtaaaaagtcttccagaaaagaaaatcctaggacttaacagctttaccactgaactctaccaaactgttaaataagaactaacaaaaactcttctctatctattccaaaaattgaagagaagggaattctttctaactcattttatgaggccagcagtattctgacaccaaaaccagacaagggcacaacaacaactactacaaccctcaaattctgcacatca

SEQ ID NO: 361182 - DNA, 516 bp, Homo sapiens
aaatcaataaaatcaaaattaaaaaaaagagtcattacaactgatatcacagaaatacgaagaaacattagaggatatgatgaacaagtatatgctaacaaattggaaaacctagagcaaacagataaattcccagactcacacaacctaccacaactgaagcaggaatgaacaaactaataacaagaagcaagattsaattggtagtaaaaagtcttccagaaaagaaaatcctaggacttaacagctttaccactgaactctaccaaactgttaaataagaactaacaaaaactcttctctatctattccaaaaattgaagagaagggaattctttctaactcattttatgaggccagcagtattctgacaccaaaaccagacaagggcacaacaacaactactacaaccctcaaattctgcacatcaatatccttaatgaacacagacacaaaaatcttcaggaaaatactagcaaactgaattcaacaacacttcaaaagataatacaccag

SEQ ID NO: 361183 - DNA, 586 bp, Homo sapiens
aaggaaataaataatacaaattagagcagaactaaacaaaataaagacttaaaaaaaaacacacacaaagattagtgaaatgaaaagttgattttcagaaaagataaataaaattaatgcactattagctcaactaaccaataccaaaaaagacccaaatcaataaaatcaaaattaaaaaaaagagtcattacaactgatatcacagaaatacgaagaaacattagaggatatgatgaacaagtatatgctaacaaattggaaaacctagagcaaacagataaattcccagactcacacaacctaccacaactgaagcaggaatgaacaaactaataacaagaagcaagattgaattggtagtaaaaagtcttccagaaaagaaaatcctaggacttaacagctttaccactgaactctaccaaactgttaaataagaactaacaaaaactcttctctatctattccaaaaaytgaagagaagggaattctttctaactcattttatgaggccagcagtattctgacaccaaaaccagacaagggcacaacaacaactactacaaccctcaaattctgcacatca

SEQ ID NO: 361184 - DNA, 591 bp, Homo sapiens
tattctgacaccaaaaccagacaagggcacaacaacaactactacaaccctcaaattctgcacatcaatatccttaatgaacacagacacaaaaatcttcaggaaaatactagcaaactgaattcaacaacacttcaaaagataatacaccaggatcaagtggtatttatcctagggttgcaagatttgttcaacatacacaaataaagaaacatgatacattacattaacaaaatgaagaacaaagccaatgattatctcaatagatgtagaaaaattcaacatcccttcatgataaaacatctcaacaaattaggcacacaagaaacatatctcaaaataataaaggtcatatatgactaactaacagctaatatcaygctgaatggggaaaagctggaagccttttctctaagaactagaataagaaaaggatgcccactcttaccactcttactcagcatggtactggaagtcctagccagagcaatcagtcaagataaagaaataaaaggcattcagattggaaaagaagtcaaattgtccttcttcgcagatgacataatattacatattaaaaacaaaacctaa

SEQ ID NO: 361185 - DNA, 572 bp, Homo sapiens
aaatacttaaatataagactcaatactataaaattagaaagaaaacataggggaaatgctgcaggacattggtctaaacaaaagtattatggcctagacttcaaaagcacaagcaacaaaaacaaaaatagacaaatgagattatattaaactaaaaagcttttgcacagcaagagaaacaatcaacggagtaaagagacaacctgtggaataggagaaagtgtttgcaaattattcatctgacaaaaggctaatattcagaatacaagctgggagctccttagggcaaacctgcctcccattctattcctagaaatgatagctgtaaagataaaaatgttacatacctccctcacaaggaatttccttgtggacaaaggacagacagaactcaaagtcatccttctgctcactgagataaatgcatatctcctcctttggaaaggcttatcagaaactcaaaagaatgcaaccttttgtccttatctacctattacctggaagtcccttcactgctttaaattgtcccacctttcaggamtgaacaaatgtacatctcacatatattgatt

SEQ ID NO: 361186 - DNA, 477 bp, Homo sapiens
ctgcaagtcaagacaaatggtaattagctaaatcaaagcatatgaagaattgtaaatgttgcttttaggaaagwagaatatctgaaaattaatgagaggcatgtctaacataggaaggcagattaaaaccacagaataaatcaaaagaatatggaaggaagaaaattataaaacaaaacaacaggaatcaaagaaccagaaacattacaaagtcatacaagtcctagtgttgggtaacaagggaggaactatacacaggataagggccagcttggtcaaaccactttagagagcacattgtaatatctaatttatttaaaaacacacatatcctcaaacctagcaatatccagtaatcctatttttaggtatacagcctattaaaattttgtgtaaaaaatgtgattccagtaatgtttgaaacagagaaaaattgtaatgaatatccatatccatcaacaggagaataaattgtgg

SEQ ID NO: 361187 - DNA, 477 bp, Homo sapiens
ctgcaagtcaagacaaatggtaattagctaaatcaaagcatatgaagaattgtaaatgttgcttttaggaaagtagaatatctgaaaattaatgagaggcatgtctaacataggaaggcagattaaaaccacagaataaatcaaaagaatatggaaggaagaaaattawaaaacaaaacaacaggaatcaaagaaccagaaacattacaaagtcatacaagtcctagtgttgggtaacaagggaggaactatacacaggataagggccagcttggtcaaaccactttagagagcacattgtaatatctaatttatttaaaaacacacatatcctcaaacctagcaatatccagtaatcctatttttaggtatacagcctattaaaattttgtgtaaaaaatgtgattccagtaatgtttgaaacagagaaaaattgtaatgaatatccatatccatcaacaggagaataaattgtgg

SEQ ID NO: 361188 - DNA, 534 bp, Homo sapiens
tcaacttgttttttgcctattcaatttatttttcactgaaatataactttgatatttcttacagtgaagttctatgtatagaaaagttaatcttaaaatatcttcatattcacttaatatagaatgatatttaactggatatagaactctactatttttttcccaatagcactttgaaaataataattaattattttctggcttgataagaattggactgtcagtcaagttaatttctattcataagtaaaccatttttattgtttaaaaaatattctctgtgttttaatttttaaagatgcgcagtatcaatttctctagtcacaaataaatatgactgtctaagaggcatatgtgttttttttaaaaaatttttcraaaataacttgtcatttaaaaaattatattctttattctatttcactgtggatactctgttaacatatagattgtacattatcattctcaactccatttctattaacttgccttttatatttatcttgctttacatctttgtaacttttcctggta

SEQ ID NO: 361189 - DNA, 569 bp, Homo sapiens
aatattgtcttcaaagctttcaaatacacagttcagcttacctgacttttaaccaattttttatacaaataactttttgttagttcctaattctctgattttgtttcattacatcttccattayatgctctgcttcttctctatgactttaattaattttttaaaattattacttagggtttgagagtattttattacacccaggttcaagtataaatcctcctctttgttatgttgaccttctctttctcataatggcctatttacacttgtggattgtttttagcttgggttatattttaccaaagattcctatgtacattgggttgtgaaagtaaccctacaaagtcatttcacctgtgctttagcagattgatccagctatttcacagaaatgggtggagtttaattgctaatttttgagtttagattcccaatgcataggctgtgtaagtttggcctctaggcctacggagtacaggattgaacgtgcaattcctactcctttccgtctctacccacaaacacctaaagcattgctatattacttctttaccacttcccagttt

SEQ ID NO: 361190 - DNA, 596 bp, Homo sapiens
gaccccgttctggccaatgagacgtgaggagaagtcatctgaggggtcctcagaaagattttcctgtccagtaaaactggagatgcgtagggaaaaatgtctcctttatttctttggtttagagattatctttatgaatgtgatgctgagagtcgtggtagcctttgctttatcaggggaaagattataagatcagggaaaacttgtcataattgagttgcttcatcaatcagtccagaaaacagtgactttcaggcttctgttacttgaaaaagggcctattgtttttgtaatctttagttggcttgtgttactttggctaatgcttcctaactgacacattcacaatgactagagatgttgcatttacaacttctggtaaattggaagttataatatatctatctactttagttcttttccagtaactgaaatgaagcagactagaagtataaataatatgaaacaatacagaactatacatagaaaaaaatctggaagtagtttctgyatgaacaacattttcttatgtgtttatgtaggaagtttgtcttccaatagcaatgaaaatgaaactctccagaaatcaaattcag

SEQ ID NO: 361191 - DNA, 634 bp, Homo sapiens
ttgttttaaaaaagattaaaaagactgaaccatgtagctggaatttatatgaattatggatgcttagragaaaacctacaaataaatacctaacaagtgggttcaagtcccataaaaaggaagcagtgctgtatattcaatttcttctgcttagaaagaattaaacttccgcatatccatctcttactcatcttctaaaacccagccacacaacattttgcaaggctatcagtgtttccccatggactgttacttccttcaaatcatttgttcatccttcttcaaagtacctactattttgtactgtaattaatctgctgaaatgtcattatcaacccattcttcccaggtttgtttctgctgtgagttcctttatgagtagccatgtccagcactgatacaagatgaacatagaaagacgcacaataattgctcaatgacttacaaattcttagttggtagcatccaaatggacctgtattttggatagtttaagctctgctcatttgaaaggtcaaagccctaaataaaacattaccttcagaactactctgagctttaccagctacacagttctatgtcctgaaagaacggagaactttcaggatggatccagtttttgcctctgcttcct

SEQ ID NO: 361192 - DNA, 560 bp, Homo sapiens
tcaatattcctgatgaaccaagggggtgaaagatctctacaaggaggartacaaaacactgctaaaagaaatcatagataacatgacaaatggaaaaatgtccatgctcatgaactggaagaatcaatatatttaaaatggccatactgcccaaagcaatctacagattcactgctattcctatcaagctaccaacaccatttttcacagaattagaaaaaaaattttataaaaatcatgtagaactaaaaaagagccgtaacagaaaaagcactcataagcaaaaaagaataaagctagaggcatcacattgcccaaattcaaactatactataaagctacaacaaccaaaatttcatggtactggtacaaaagcagatacatataccaatggaacagaatagacaacccagaaatagagtcacacacgtatagccatctgatctttgacaaagtcaacaaaaataagcaatgaggaaaggactcctattcaataaattgtgttgagaaggctagctagtcataggcagaagaataaaactggaccccttccttttacc

SEQ ID NO: 361193 - DNA, 552 bp, Homo sapiens
gattttgtttctccaaaatatcttgtgtcttctccattttagggataataattctttaatggactctatttaatggattctctttcttcccttcaaactaattagcaaaatagacaaattttaaaatatgtgatttttcatctactaaatcagcagagaacatgataacaaccagcagcagtgggagtgtgggggagctaacgctaatcgacatacagaatgggattggaaattggtatatctttccatagggtaattcgtcaatgttaattgagatctaaagctaagtttccttttacacacaaaagtctcttctaggaatatttggcaaataaagttacctattacagtgctttcgtttattgtactgattgtttaaaaatarcccaaatatcaaacaataaggaatgggtaaattgtggcagaccttttccaaaatttagtatgaattaattcaagtgtcttttgtagagaatgtttacttgaacagactgacagtacagtgttaaaaatacagttacaaagcacttcgcttataggctatactagaaa

SEQ ID NO: 361194 - DNA, 421 bp, Homo sapiens
tggttcttagttgcttaaaaagagtcccattgttctttgctcaagacagtcttgtgttgagttcagggggtcakttaggtcctgaagatctaaaataatggagtctctcaaaggtcatggtttttcaacaacctcatctagttaatgctctttgtggaaaaacataacattcagttttactatctccatgcaagtgctgcagaaatggaaagtttttctttctattctttttccaggggctaaataaaagaatataaactcaagagtgggggagaatcctacctttaagccaataatttagaaaatgcattgtatatatagaacaaatttaaaagttgaagggtttatttcagtatgtatagtaaaagtagggcctgaataaagaccatgtaggtgcaccaacagcttcactttttaaaga

SEQ ID NO: 361195 - DNA, 561 bp, Homo sapiens
aaatatatttgtaaacaaatgatatgagactgtgaaatatcctcagaagctactgaacataggaagatgcatatattcatgtatttagcagataaaaatacgttagcacttaggtttacatcattccattcagttacatttgtatcttaataattggcagcataattaatattaaagttgacactagaatcagaaagcacaatgcctggaagattgaaaaatttyagagactgaacacagtatgaagagaagagatctatgatgaagagacagctttggagcttagaattgcaaattaatatcttatgtaactttggtgattaatagactctgaccctaagtttctttatctgcaaaatgggtttaaggataattagatttgaagttgtagcaaggattaaaaattaaataatatgcatcaaatgaatgccacatattggtatgtgtctactcaaaaatcaattactgagtacttactgtgtacccaggcacagtactaatgatggggaaacacaaatgagcaagacagatacatttcctagacataacgtgccagagcgt

SEQ ID NO: 361196 - DNA, 561 bp, Homo sapiens
aaatatatttgtaaacaaatgatatgagactgtgaaatatcctcagaagctactgaacataggaagatgcatatattcatgtatttagcagataaaaatacgttagcacttaggtttacatcattccattcagttacatttgtatcttaataattggcagcataattaatattaaagttgacactagaatcagaaagcacaatgcctggaagattgaaaaattttagagastgaacacagtatgaagagaagagatctatgatgaagagacagctttggagcttagaattgcaaattaatatcttatgtaactttggtgattaatagactctgaccctaagtttctttatctgcaaaatgggtttaaggataattagatttgaagttgtagcaaggattaaaaattaaataatatgcatcaaatgaatgccacatattggtatgtgtctactcaaaaatcaattactgagtacttactgtgtacccaggcacagtactaatgatggggaaacacaaatgagcaagacagatacatttcctagacataacgtgccagagcgt

SEQ ID NO: 361197 - DNA, 603 bp, Homo sapiens
atataaaaaaagtgttaaaacttcaaataaacaacctattggtgtattttagagaagtagaagatcaagaacaaatcaaaccacaagttacaagaataggaataatgaacttcggagcagaaataaatgaaattgaaaggttaaaacaatataaaagatgaacaaaatgaaaagttgtttttttgaaattataaagaaagttgataarctttaactagactaagaaaaaaacaaaaaagacctaaataaacaatgttagagatgaaaaagggacattacaactaataccacagaaattcaaaggatgactagaggctactctgagcaactatatgccaataaattggaaaacgtaaaagaataaattcctagacacacaatctactaagattgaaccgtgaagaaatccaaaacctgaatcgatgaataacaagtaatgtgatcgaagccataataagaaagtctcccagcaaagaaaatactaggacccagcggcttcattgctgaattttaccaaagttttgaaaaagaactaatatcaattttaatcaaactattctgaaaaggggagagggaatacttccaaactcattctatgagatc

SEQ ID NO: 361198 - DNA, 612 bp, Homo sapiens
aactgtgactagccccaagcaagcggcctgcaaggctgtctagccttcgaaacacttagaaatctggtgatgcccctgtgagttcactggaatgcttaagactgacttttaacttttattgtaaaaagtcaaggttttttatcgttaccaacagatgtttttgtgtttactacaaatggagcatcattgtgaaaaggtatgacaagttatttcatcaaacaaaggaaaaaaactttataaaatttctccttcctacaaaacacagtacagtaacataaatgtggatgcaacactataggcaactgactgcttatccttcttgctggctctgttcttaaaatggctggaggaagcaggtgatataggagatggaaactaaagttcttactttcttgtagggagtggggacagggcatgaaagaaaaaacaaagctacatggaaaatgcaggtaattccacccccaaaaacagggaggaagaagatgggttctcttgtctccaatgttctyccatatccatctccccaattctggccaataaatatcacctaaacagggaggtgatttcttaagcttctgatgcatcttaagaaatcagaagcttaagaaagat

SEQ ID NO: 361199 - DNA, 612 bp, Homo sapiens
aactgtgactagccccaagcaagcggcctgcaaggctgtctagccttcgaaacacttagaaatctggtgatgcccctgtgagttcactggaatgcttaagactgacttttaacttttattgtaaaaagtcaaggttttttatcgttaccaacagatgtttttgtgtttactacaaatggagcatcattgtgaaaaggtatgacaagttatttcatcaaacaaaggaaaaaaactttataaaatttctccttcctacaaaacacagtacagtaacataaatgtggatgcaacactataggcaactgactgcttatccttcttgctggctctgttcttaaaatggctggaggaagcaggtgatataggagatggaaactaaagttcttactttcttgtagggagtggggacagggcatgaaagaaaaaacaaagctacatggaaaatgcaggtaattccacccccaaaaacagggaggaagaagatgggttctcttgtctccaatgttctcccatatccatctccccaattctggccaataaatatcacctaaacagggaggtgatttcttaagcttctgatgcatsttaagaaatcagaagcttaagaaagat

SEQ ID NO: 361200 - DNA, 574 bp, Homo sapiens
aagatttttgatgttcataacacaaagaaataataaatgaggagacacgtgttaattatcctgatttgagtattatacactgtatacatgtataaaaatatcactctgtatgccgtaagtatgtgcaattakaatatgtcaactaaaaaaataaaagaaaataatttttaaatgaatgcctggaatataaaaaaggtcttggtatttggatattaaataaatgaatgaaagaacagaaacttacaggaattttctttcctgtcatcaatttggccaattttatgtggcatttggaaaatattcgacttaataaaattttaaattaattcttttctctttttgattgtcaacaggtattttgccaaaaaaattgtttaaaaagaagccagtttaattagaaatatgaagtaactattgaattgttctatttgcaatgaaataaattgtaatcatgcaggaaaaatttccttagaacaaactatagtgataaataaatttatttcacattttaattttaatgccttttatttttatagaacattaaaatgtctaaagtagggctacatacattatt

SEQ ID NO: 361201 - DNA, 574 bp, Homo sapiens
aagatttttgatgttcataacacaaagaaataataaatgaggagacacgtgttaattatcctgatttgagtattatacactgtatacatgtataaaaatatcactctgtatgccgtaagtatgtgcaattagaatatgtcaactaaaaaaataaaagaaaataatttttaaatgaatgcctggaatataaaaaaggtcttggtatttggatattaaataaatgaatgaaagaacagaaacttacaggaattttctttcctgtcatcaatttggccaattttatgtggcatttggaaaatattcgacttaataaaattttaaattaattcttttctctttttgattgtcaacaggtattttgccaaaaaaattgtttaaaaagaagccagtttaattagaaatatgaagtaactattgaattgttctatttgcaatgaaataaattgtaatcatgcaggaaaaatttccttagaacaaactatagtgataaataaatttatttcacattttaattwtaatgccttttatttttatagaacattaaaatgtctaaagtagggctacatacattatt

SEQ ID NO: 361202 - DNA, 581 bp, Homo sapiens
gggactataatgtcttgttcactatactgtacatcctcagcctttagaacaatgtataggacataatagttactcaatatttacttgctcttgctgtttttgaccaatatacaagtaaatatgtttacataaataaatttgataattatactttcctttgttttaaaatagaatcatgtttaaaatgcaactcagtttgtatctatgcctatgtttgtagcatgcatggtttcagtacgttaaaaaataattaacagtttagaatctgggccacagacctaaactgtaagaaacataataattcactctctaatctttgacggtgtttgaaccatacattgttttcaatgcttccaattagcaagatttcttttataaggcttgaaaactctagccatgattacatcattgataaatttagtgctrttgttttgttttcttaacattagggataaataacccaaaggactttctgccttgttgtttgtaaaccaaatgactgcagctttattctctgagtggaaaaaatgtcaaggaatgatcgtgtggcacagtcagccacaatggacttctcagtttgg

SEQ ID NO: 361203 - DNA, 594 bp, Homo sapiens
ccacataaactgactatggacatctagttgcttttttgtcagcagtaaacagttgtttcaaactcttgtgtttttcaagaatataaacactttgttagatgattcagaggttgtgtcatgaattggcgctgattattttacttgtctacaagggggtctctgcctattccctcaatgtgatacatgctcttcgttagaatgcatgtttttaaagtaaaacaccctccctgtcttataactcatgaacgctagatgtcagtattgctctttttcttccaaaccaatgcccttagtgaatgatgtcatagcctgctcggtctttcagcaacgttgtacacacagaaaattgttcagctcagagtcttttactgaaatagtcggaaccatatactctctggctttctatgatatggttcacgttgttttaagsaaacattatcatttctcttctgcaaagagcagtatttttatgaaaaaattaaaggtagaatcaaaataatagaaaaaaaattatatttgtcaaggcctttttaataataatggttttataaaatgcagctgccactaatcacttttggatatagctaaattgca

SEQ ID NO: 361204 - DNA, 567 bp, Homo sapiens
tttttgttttttcattggcaattttagtggatactggcatgatatatagatagagctagggagcgagataaagagatcccaaatctccagcaaatataattgcttgccgtccttttcaatcaatgtcaggtgttagataraactagctttgagtataacagatgttataacttcaggttttcatgggttaaaagactaatgactaaatgactgttaatatatcaagaaaaccagtaggtagctgtaaatccagtttgtatctcaacactttccccagtgatgatctggtggcctcaagccctcaggagctctgatagcatgagaatgaattgggaggtggtagcaaccccaagcagaatatagggaaaataatctgaatattgcccctggtaaccaataattttaacacataattgtaacagtttcctaactcacttaactttgaagcacttgagaacatcttgtttcttctaataggaacagatgggtgtatcatagatgatcacactctaaacacttcatgcaatggcctcctcaatccctcattcctacatggtttgcacattt

SEQ ID NO: 361205 - DNA, 538 bp, Homo sapiens
gttctttatcaaaattacaaactgagctatatgattcactcaagttagcattttcacaaattccaaaattctgcagttagaagcattaagagtaggtaaaaaaaagtaatagttgagaggttgatagcttttgtaccgagggagaaaaattctctacatttccactaaaacttagtytttataaagatcttttatttaacataaatgctagcaactatttccttcattttgaaaatgtttttatactttggcttatactctgtgctttctttcctgcctgggatgtgattgggaaatacacagatgctcctcaacttgcagtggggttatgtccagataataaacccatcataaactaaaaatacaatagttgaaaatgtacttagtacacttaacctaccaacatcataacttagcccagcctgccttaaatattttcagaacacttacaatagcctacagctgtgcaaaatcatccaacaaaaagcctgttttacaataaagtgttgaatatttcatgcaatttattgaatactgt

SEQ ID NO: 361206 - DNA, 564 bp, Homo sapiens
agcgccatggtcagcatcagctcgatggccctctgggatggagctcccagagcagaaggagcaggcagccatctttgttgttctgcagcctcccctggtgatatcttcaggtccaggtgaattgggtctggagtggtctcccagtaaactgcagcagccttacagaagaagggcctgactggtaaaagaaaaacaaacagaaataaacaacaacaacagcaacgtcaacaaaaaagaccccacaaaaaccccatccaaagatcaccagcctcaaagatcgaaggttgaaaaccccacgaaggtgagaaagaaccaatgcaaaaatgctgaaaactcaaaaagccagagtgcctcgtctccaaatgattgcaacacctctccagccagggcacagaactgggaagaggctgagatggataaattgatagaagtaggcttcagaaaataatgaacattgctcagctaaaggagtatgttctaacccaaygcaaaaaggctaagaaccatgataaaacattacaggagctgttaaccagaataaccagtttagagaggaacataaat

SEQ ID NO: 361207 - DNA, 634 bp, Homo sapiens
gcaatcccattactgggtatatacccaggggaatggaaattctgttataaagatacatgcacacgtatgtttgttgcagcactattcacaatagcaaagacacggaatcaacccaaatgtccctcaatgatagactggataaagaaaatatggtacatatacacaatagaatactatgcagccataaaaaggaatgagatcatgtcctttgcagggacatagatggagctagaagccattatcctcagcacttataagtgggttctcacttataagtgggagctgaacaatgagaacacatggacacagagaggggaacaacacacattggggtccatactggggtggtggggagagggagagaatcaggaaaaatagctaatgcatgctgcacttaatacttaggtgattggttgatagctgcagcaaaccaccatggcacaagtttacctatgtaacaaacctgcacatcatgcacatgtaccattgttctgaaaattaaattaaattwaaaaaagaaaatgttgaataactcctccaaagcactttttaaaaataactgtaggtagccaagcatattttgaggagtttgaagcttatcttctctgaagcaagaaacgaatatgttccagga

SEQ ID NO: 361208 - DNA, 587 bp, Homo sapiens
ttatttctgatataagtagtttggcatacaaaatatttatcttataattctaagaggtaacagatagaaactgtagggaaataaaattgtagataaggagtaattacttaaatatgaagatcctagttgatagtaacaaccaaaataaaagctggcttcttgaaatatttggtaataaatcttatcactagttttgaaataattatctcataataagaaaatttttactgcataataatgcagtaactaaaataaaatatcatttattcaataactatctgttaaaccaatattataaacaactactttgccacaaggtaggtgatagtctattattgtaggtgctagaaatatagtagtgaaaagataaaaacgcctgcagtcatgagtctcacattctaactacacactcacccacrcatacacactcaaacatacagttggggcacaatacaactaagtttcaggaagatgctgcatttaaagaatacattccaaaacaacaaatattaactaatgctgatatttactttcaggtctcccataatattgtattaaagttccctttctctgttttctagtttctt

SEQ ID NO: 361209 - DNA, 584 bp, Homo sapiens
attgtattaaagttccctttctctgttttctagtttcttcaacactgttcttatttctcattctatgaaaccttcactcttggtcctgtattccaaatcattccattttctagctctggtgagttttaattttcttcctctcttaggctcttycagctgttctcttgggacaatgaatgtattattttgtaaaagtgttgcagtatcacaccttcttcattctcaagcttcttgttttgattcaactattgcttgactggactttttccaagaatgtttactagcaggtgcattcaagcttcttgttttgattcaactattgcttgactggactttttccaagaatgtttactagcaggtgcattttctgagttgtttcatgtttcagaatgtgcctatactatatgctatggattgctacaggtgctgtgtgtataacagtgaataagtggttcctgctgtcttggatattatctagatgatacttacagacacatttccattctcttttggcattgatggttattgtgaagatgtctgagaccaaatagatttttcctttttcatgcttcttgctttaatga

SEQ ID NO: 361210 - DNA, 511 bp, Homo sapiens
tttggagagagaacaaaatgtttcctcctgtaaacttgtgggtttcaaggctttgtaactctggatatagtctcaactcaaccacagagattttgattttaaacccttccattgcgtcctaatgtagaacgtcacctaggaaaataaagtcattttaaaatgcaggagctaattwaatagctctgtagacggtcatggagtccatctgtgttaatttgagatggactttggaaggtaatgcaggtcagtttcctcagttgtcaaaacaagatgtcatgtatacctcctgttcatctggaatttaaatcacatggatacttctataatcaataccggtagaagagctgtacttcaggcacttgtcagaggatgcagctataaataggctgtgatgcagcacttgcctgaggcttactggagagagctgatatatgataggcacagtctaacgacaggctagctctttattcctcaactttctccaaactctttccctgtattaagtcaaatg

SEQ ID NO: 361211 - DNA, 581 bp, Homo sapiens
aaatcaaacacatttgataattaacagtaatagtattaaggataatactcttgacatattccattatactaagtgacctcaatttgctgaatctataatgaataaagaattatctgattattcacagctgggtttcatttagtttattattcccaaatacattttaaaataaattctgatttccttaacactcttctcaagcttactttgaacatgtatcttaaataaactttaattggttaataaccagaagatcagtgcagatatagaccatcaatgcaartaagtcccaaggaaaaaagaaaatagcaccaagttaagtgattgtcctagacaaaattgctaaattatattctgtgaaagattgtggaagactcagaatgaatgagggggtcagaactttttattttaaatatgccacaatttttctatttgtaaaaattgataatataatagtatttatctcgtggactcttctgagaattaaaagagttaatacaactaaagatcttaaattagtacctggcatatgggatgagcttaataaatagtataaattatatgattgagagatttggcac

SEQ ID NO: 361212 - DNA, 577 bp, Homo sapiens
gtaaaatgctaaaggggaaaacagagaaagagaaggaggagattggcattcctagctggcaatttttttataatttatggtacatataaatttttgtttttaatatagccagataattaattcttatgattgtggatkgattaaaattgtgtaaaggtcataaatacataatgtacctttatattctaatattatgtcatattatatgtaccaattgtctatttattgcttctcaattctaaatatgtttttcattgcctgctgtagaaaatggagctggtccctttgaaaaattatcctttgctctcctgatgtgaagctgcatcaatacagaaccacgcaggatgttgctggaggaaggggcttctcttcctagttttggtgtccttctctgcttctctcagtaggctctggaagaccgcacagcttccctgtagcccagctactggagttcaggtgacttcctaaaaccagttcaaaatgagagtttttctatagcaaggaattaaatttatggtcagtgaaaaagagcatctgcaagtattagagtcaaatggttatccaaaatgtttgcatt

SEQ ID NO: 361213 - DNA, 564 bp, Homo sapiens
atgtagggtggaaaataatttaaaaaattaatttartaaaatgcctggagcagtaagtaacaattattaacaatacaacaatgaagctgtctgtactttcatttaacaacacacttaaggcaaatgttgaattaatataaaaataatatgtggtaaactgatacttgacatgatacaataaaaattaattttcacgttgaagacctagttatgacaacatctctatatgccttctaaatacctaatttctcagttgtgcagagcatagctcactatggcctaataagatgtcaatcagaatatccagaatatttcttaatatagagcaatacatttcccctaccacatcaggcaaaataatttaatatatttattttcacaaaaggctcatactaactccaaactatagggttttttaaatttctagtactaattctgattcttaaagatagctatcattggtattctaaatttcatgctgttcttaaaaagagcaaaatgcttatcctgtaagttttactctaattcacccctaaaatttactttatgtgggaaagtttcacc

SEQ ID NO: 361214 - DNA, 564 bp, Homo sapiens
atgtagggtggaaaataatttaaaaaattaatttaataaaatgcctggagcagtaagtaacaattattaacaatacaacaatgaagctgtctgtactttcatttaacaacacacttaaggcaaatgttgaattaatataaaaataatatgtggtaaactgatacttgacatgatacaataaaaattaattttcacgttgaagacctagttatgacaacatctctayatgccttctaaatacctaatttctcagttgtgcagagcatagctcactatggcctaataagatgtcaatcagaatatccagaatatttcttaatatagagcaatacatttcccctaccacatcaggcaaaataatttaatatatttattttcacaaaaggctcatactaactccaaactatagggttttttaaatttctagtactaattctgattcttaaagatagctatcattggtattctaaatttcatgctgttcttaaaaagagcaaaatgcttatcctgtaagttttactctaattcacccctaaaatttactttatgtgggaaagtttcacc

SEQ ID NO: 361215 - DNA, 564 bp, Homo sapiens
atgtagggtggaaaataatttaaaaaattaatttaataaaatgcctggagcagtaagtaacaattattaacaatacaacaatgaagctgtctgtactttcatttaacaacacacttaaggcaaatgttgaattaatataaaaataatatgtggtaaactgatacttgacatgatacaataaaaattaattttcacgttgaagacctagttatgacaacatctctatatgccttctaaatacctaatttctcagttgtgcagagcatagctcactatggcctaataagatgtcaatcagaatatccagaatatttcttaatatagagcaatacatttcccctaccacatcaggcaaaataatttaatatatttattttcacaaaaggctcatactaactccaaactatagggttttttaaatttctagtactaattctgattcttaaagatagctatcattgrtattctaaatttcatgctgttcttaaaaagagcaaaatgcttatcctgtaagttttactctaattcacccctaaaatttactttatgtgggaaagtttcacc

SEQ ID NO: 361216 - DNA, 627 bp, Homo sapiens
tctgggtaagtgatgtctttgagccatatttttctcaagggtaaaatacagatgaaaataatggtaccaattttagtgaggtctgagaatttaaaacatgaaaatcacttagaatctaccacttagtaactcaataatttttaaaattgttctacctaatactgtctctagtctcaaataactattttcataaagaagatgccagagtattaactcaagtttaatcgtaacaatttaagaaccccaaatgcaaagaagtaagaagtaacttaaaattcaacaatagatataaaactcctctgcrtgtgtttgtgttatatagaactttctatatagaatatatacaatagtagtattttacttcgatagaaatatttatctcacttgatggggaaaaacctacatatatcattaattataattatcttcgcagttctacaacctatccaacaatagcctgtgtttattacatgaaaaaatagtaaatgttcctcaaagctcctttaaaaaagataaattaataagcataggctataccagttatttttgagtgaactttgttgctcaaggtaaatacaccaaagaaataaataagtgtccataaaaccttttagttagtataattta

SEQ ID NO: 361217 - DNA, 624 bp, Homo sapiens
ctcacaaaaacatatgttgtatggaatcaaggtttaagggatctagggctgtgcaggacgtgccttgttaacaaaatgtttacaagcagtatgcttggtaaaagtcatcgccattctctagtctcgataaaccaggggcacaatgcactgcggaaagccgcagggacctctgccttggaaagccgggtattgtccaaggtttctccccatgtgatagtctgaaatatggcatcgtgggatgagaaaggcctgaccgtcccccagcccgacacctgtaaagggtctgtgctgaggtggattagtaaaagaggaaagcctcttgcagttcagatagaggaaagccactgtctcctgcctgcccctgggaactgaatgtcttgatataaaacccgattgtacatttgttcaattctgaaataagagaaaaaccgccctatggcaggaggcgagacatgttggcagcaatgytgctttgttattctttactccactgagatgtttgggcggagagaaacataaatctggcctatgtgcacatccaggcatagtacctccccttgaacttaattgtgacacagattcctttgctcacaagttttcttgctgaccttctccctattatca

SEQ ID NO: 361218 - DNA, 513 bp, Homo sapiens
tatcctacccttaggcacttaaactaaactcaataaagtattattatatttttacaaaacttaaatgcaacaaatcttcatagcataaatgaaaggagaataattttcactatatatttgtttatttagctcttacaaaccatatcattagcaaacactgataatacttaatgctagaatatttttaatttacttttcatgtagatggtacacttattttaatattggacatcttggagagtttgaatgctttgctcttatttatgacatttaaaaactattctaatttacctgtgttgtaattttcatctgtgtgacttagcacatttaaaataaaaaataattaaatgtataacacactacagatcacaaagsaaagtttaattgagatggactgaaaataatattgtccaagctattaataattacataaattacaggttatttgccattgccaaaggctctttcctttccccagaaaaaccatcatacattgaagaaataaagccgcca

SEQ ID NO: 361219 - DNA, 517 bp, Homo sapiens
aagcaatgagatcttttatttaaacttgcatatttagaatgtcttgctttttgtatattatccagttaatggaaagcatcttcctactagctccagtgtttatgactacatattatcttgaagaaaaaaatgaagtaatctatcccttttaaagaaaaacataatttgaaatgtttgacatttttattttgttttgattatcttcctgaatttcatgaagcaaaaacatggaatataaaatattacttttcaataaaaaaacttccatagagagttacactgagaatcaagaactttttttttttaaatttcaaaaagattatctacttttttactttartttccctaaggcttttttcttctgaatgagagtgcttaaatatattattaactttacatagaactttactatttaaagacagtgttttgcagcctcaggagacaacataaaactagtgtgaggaggttgtgaagactcagactgaagaaatggttacacaaggtcttgagttgtcct

SEQ ID NO: 361220 - DNA, 571 bp, Homo sapiens
taatgcttttctacatagaatttgcatgtgcttttgcttgtaaggggaagctaccaacctggcgtgatttyggtcttttttgggctaagaatatgttccttcatattgcttcttgcccaaagactggccttccttcctcagggaaaatttatttcccctttaggtttacagctcaagttcaggtcaagttccaattcatgtttcctttcactttcactccctaaaagcctgagcccaagaatgcaataacaacacacctaagagggtatctgttttgttgtagagtgagagctctttagactattaagctgccatactgctaggtatgaaatttttaattctacaaatttttatacttcatttacaaataatagttcacattgaatcatctggtttcttgcacagcttaaattctctcgtgccagttttgttcatacttttgaattcttataaatattctacttttgtcttaaaaaatcatgtcagtcaatacacactcatgtacattttatagatacccatgatttaattaactactgggaaaggctatgacccatctctttgggtcaca

SEQ ID NO: 361221 - DNA, 547 bp, Homo sapiens
tataatgcttttctacatagaatttgcatgtgcttttgcttgtaaggggaagctaccaacctggcgtgatttcggtcttttttgggctaagaatatsttccttcatattgcttcttgcccaaagactggccttccttcctcagggaaaatttatttcccctttaggtttacagctcaagttcaggtcaagttccaattcatgtttcctttcactttcactccctaaaagcctgagcccaagaatgcaataacaacacacctaagagggtatctgttttgttgtagagtgagagctctttagactattaagctgccatactgctaggtatgaaatttttaattctacaaatttttatacttcatttacaaataatagttcacattgaatcatctggtttcttgcacagcttaaattctctcgtgccagttttgttcatacttttgaattcttataaatattctacttttgtcttaaaaaatcatgtcagtcaatacacactcatgtacattttatagatacccatgatttaattaactactgggaaag

SEQ ID NO: 361222 - DNA, 599 bp, Homo sapiens
ttggaacttttatatttgatggcttttagtggaaaacctgaggacctaaatttataatgcttttctacatagaatttgcatgtgcttttgcttgtaaggggaagctaccaacctggcgtgatttcggtcttttttgggctaagaatatgttccttcatattgcttcttgcccaaagactggccttccttcctcagggaaaatttatttcccctttaggtttacagctcaagttcaggtcaagttccaattcatgtttcctttcactttcactccctaaaagcctgagcccaagaatgcaataacaacacacctaagagggtatctgttttgttgtagagtgagagstctttagactattaagctgccatactgctaggtatgaaatttttaattctacaaatttttatacttcatttacaaataatagttcacattgaatcatctggtttcttgcacagcttaaattctctcgtgccagttttgttcatacttttgaattcttataaatattctacttttgtcttaaaaaatcatgtcagtcaatacacactcatgtacattttatagatacccatgatttaattaactactgggaaag

SEQ ID NO: 361223 - DNA, 567 bp, Homo sapiens
caggcagacctcatagccttcctttcatttccagttatcttaagttcaatccagttgaaaactccaattttgtctcttcttctatcctcaagcaatggcttaactctttactaaaaggacctgcatgaagaagcgtctgctttayaaaacaccatctccctttttttgattgaattctagccactgtggagacaggcaggcattagggtggatgggcaaaagccttcttgcataatggtgcatgtgattacactccatgtttctgctgcttcactggctgacactgtctgagtatgaatgtcttctgtgaggcaggcatctgggtgatggcccttttatgcagagcctttgggtctgccccagtgcccaagttcctgacttgggaaagccaattctgatgaagttttttctacccatttacttcagctctttatcaatggtacaaactttcaccttttgaagtttgattaccttacgtggggagtcaagttcttgtgtggggcaagagcaaaagggagcaaacctggctactttctaagctgaagcattccttctgtgaaacaaaca

SEQ ID NO: 361224 - DNA, 512 bp, Homo sapiens
agaaaaattaaaatgcatctcacaccaatttcaagtgcataagaagcctacatgaaagggaaagtgatcacctgtaatcctatttactcragagattggggcaggaaaataccttgaacctaggaggcagaggtttcagtgagctgagatcatgccattgtactctaccctgggtgacagagcaagactccacctcaaaagaaaaaaaaaagcaaaactatagagtctttagaagattgtataggaaaaatctttgtaaccttggggagagaagtgtttttaaaaacaatacataagacttactaaacctaagggaaaagaattataagagtggttacattacattaaaagtatatattcatctagtatcttaaagagagtaacatcagaagccacaactagatgcttgtatcaaagaagctgaagtgatactacttctaaggatgctaaggtctagtattatactgtgaatatatgtagactcatattaatttataatgagaattataaca

SEQ ID NO: 361225 - DNA, 576 bp, Homo sapiens
gcttgtatcaaagaagctgaagtgatactacttctaaggatgctaaggtctagtattatactgtgaatatatgtagactcatattaatttataatgagaattataacaaccaggttgttaaaaatataattttatcaaatgttggtgagaacttagagcaatgcaaaccatcttaagctattgatgggatgaaaattgctaccattctttgtcaaaccattacatagtaaaattgaagatctccatccagtgacccaacggagaaacttttacacgtgtggaccaggagatatgtatatgagtgtttattgaagtattatttgtagtatttcctaatcagaaacagcccaaatgtcaatcatagtagaaggaataaataatttgtgacatcttcattcaatggaatacaagaaaaggtggaagtgaacgaattacagctacacacttaacaacacgtacgaatctcgcagtgttgagtgcaagaacccagacaggaaggactgactatatgtgataccatataatttgtaygcaatctcaaacctgggcaaaagtaaattatatttcttatgagtg

SEQ ID NO: 361226 - DNA, 533 bp, Homo sapiens
taccattgtcacttttacacgttaataaagtggcatagataatgaaatgcaataaaatcattacttgcttccattaacactggttagtgggagaaatgtgactgggtgggataggaattaaatatctcatgaactggataaataattttttttgtctaaacacaatttcaaagttaaactcaagactccttctcttctgatagcacgtgatataagatcagtacctcattttggcagagcagttgattggagatgaaagrcatcctatatcttttacaaactccatagccagatgggtgagaggtggtaaagcttcctctcactttcctgcccaggaatttatgcacaactgggctgccgtagatgattaaaaaaaatcagaacagcttcgttgggatataattcacatactataacagtcacctttttaaactgtagaattttgtaggtttttttgttgtatattcttggagttgcacaactctcactgctaattaatttgaaaatatttttattactcaaaaaagaaacta

SEQ ID NO: 361227 - DNA, 585 bp, Homo sapiens
ggcattaggttgatttcctccctttggctattctgaataatgctgctattcatgtagttgttgttttgttctgtttgaagcttatatttgcatttattggttatacataagagtgaacttttgggtccaggaggaaaagccaaactgcttttaaaatggtggcatcatattgcattctccccagcagtgctggaggtttcaatttctgtatatctttgtcaattcttgttattgtctgatttttaaaaattttagcctcaccagtaaatgtgaagaggtatttcaytgtggttttgatttgcatgtctttagtgactaatggtgctgaacattttgcctgtggttattggccatttgtgtaacctctttggagaaaggtctattcaaatcttttgccaatatttaaaaaaaaattctgtcagtcattttacttttttttaaactgaggcaagaacatttaatatgcaatctgccctgttaacatttttttgttccaatacagggtttcattctgctacccaggttggagtacagtggtgctatcagggctcactgcagctccgacctcccagggttcaggtgatc

SEQ ID NO: 361228 - DNA, 517 bp, Homo sapiens
cattttataaagccaaattcaattttgacatgtatgtgtagtacattttaaaatgaaatatattaaaggctattaaatagaatatatactaagtacaatattaacagcacaagttttttatatatgtaatactttataacagtatgatttcatatgtcaaaaaatttttacacctaaaaacaaaggattcctccacccttcaatatagcttattcttaaatattaaaaaatttggcaatgtttgaaaaaattatgattttatcaraaaacaaaaaagcataaaccacaattttagaaaataaggaggacaatttgatattgtgaactggctaaagagacaggtatctgaagactaaaaatgcaaactgcaacatggataaatacttcaagtagtaagtgcaggaagagctattacccctggtgctggtgtcgcgggacttttccttagttcagctaaaggtggggttctttgtcccacagccatgaaaattcaggcttgcagacaatttgattagta

SEQ ID NO: 361229 - DNA, 472 bp, Homo sapiens
ctttttggagtcttctgtgatatagctagctatatgtagaagataatacaattttaaaaactgaacagaaaaatctgtgataaatgaatagatgtgagaaatagaaaaaaaacttgagtaatactcactaaagctgttgaacagttgtagtttactataaataggagcaggagagaaagaagaacagtggggtttatatcatacatttctgagtcattcagaattgttaagataatcatgtagtattttataagttcaaaatctacacatggtaaaacatttatatatttttatgatttttgaggtgattcatacattagcttttaatagtcatagtaggaatctgactataccttttggttttattgcccacagatgcaaagtgtygctatttgtgaatattttaatttactggatataagcaaatctaaacctttgatttgtaaaaccaaaatgaatgaaagcagctatt

SEQ ID NO: 361230 - DNA, 527 bp, Homo sapiens
tatctttctttgctttttatattttatgctttacaatgacagttttactatgacagataaatatgaaaatgaaaaatgtcagtcatgtttaagccacataatgctttcttttaaagactaagcttgctgaaacttggaagatgatccaataaaagagtaaaaaaaaatgtctgaaaggggcttgactttttctgatatcaacaattgcattcaaaatcataggaagggagtacagggaagcaaggagaatttayatatttaatgatgaccactccaatgttaatacaagtcacataatgtagtaaattcacaaccagaaatttaaaaagtaaaaatgtttagcggagataaaatctgagctctcccacagttatgcagaattcaatatcttagtaaactgcctaagtgcaaagtctgtcaaacattctttaacctctgcataaacactcagatgaagtaaaattaaacagaccaaaaaggatttggtgcataaaaacgaattaacactgttaaaagcaaatctgaga

SEQ ID NO: 361231 - DNA, 527 bp, Homo sapiens
tatctttctttgctttttatattttatgctttacaatgacagttttactatgacagataaatatgaaaatgaaaaatgtcagtcatgtttaagccacataatgctttcttttaaagactaagcttgctgaaacttggaagatgatccaataaaagagtaaaaaaaaatgtctgaaaggggcttgactttttctgatatcaacaattgcattcaaaatcataggaagggagtacagggaagcaaggagaatttacatatttaatgatgaccactccratgttaatacaagtcacataatgtagtaaattcacaaccagaaatttaaaaagtaaaaatgtttagcggagataaaatctgagctctcccacagttatgcagaattcaatatcttagtaaactgcctaagtgcaaagtctgtcaaacattctttaacctctgcataaacactcagatgaagtaaaattaaacagaccaaaaaggatttggtgcataaaaacgaattaacactgttaaaagcaaatctgaga

SEQ ID NO: 361232 - DNA, 575 bp, Homo sapiens
taaaagagtaaaaaaaaatgtctgaaaggggcttgactttttctgatatcaacaattgcattcaaaatcataggaagggagtacagggaagcaaggagaatttacatatttaatgatgaccactccaatgttaatacargtcacataatgtagtaaattcacaaccagaaatttaaaaagtaaaaatgtttagcggagataaaatctgagctctcccacagttatgcagaattcaatatcttagtaaactgcctaagtgcaaagtctgtcaaacattctttaacctctgcataaacactcagatgaagtaaaattaaacagaccaaaaaggatttggtgcataaaaacgaattaacactgttaaaagcaaatctgagagaaatggctaagagtgcagtgacactggcagcataatttttgatctttctgaatccttatgttaaaacacacagagagactagaggtgaaaacacaaatgcatatggagaatatttaccataaagctagaaacaagacattccaaaactactaatgggaggggaaatgtaccatcaaccacacgacctatgttttta

SEQ ID NO: 361233 - DNA, 527 bp, Homo sapiens
tatctttctttgctttttatattttatgctttacaatgacagttttactatgacagataaatatgaaaatgaaaaatgtcagtcatgtttaagccacataatgctttcttttaaagactaagcttgctgaaacttggaagatgatccaataaaagagtaaaaaaaaatgtctgaaaggggcttgactttttctgatatcaacaattgcattcaaaatcataggaagggagtacagggaagcaaggagaatttacatatttaatgatgaccactccaatgttaatacaagtcacataatgtagtaaattcacaaccagaaatttaaaaagtaaaaatgtttagcggagataaaatctgagctctcccacagttatgcagaattcaatatcttagtaaactgcctaagtgcaaagtctgtcaaacattctttaacctctgcataaacactcagatgaagtaaaattaaacagaccaaaaaggatttggtgcayaaaaacgaattaacactgttaaaagcaaatctgaga

SEQ ID NO: 361234 - DNA, 579 bp, Homo sapiens
ttataaagatgcatctatttcatcttcctaattttttccctaattattcctaatgacaaaaaccgcaattacttttgcaccaacctaatactttaatcgtatatttttttctgctgtatgaacaaggagttccatgttttcatttttgtgctagccttggaaaccacaacaacatattgttccattccccccaaaagtttcatcacgtccctttgcagttgatctcctcctctgttcaacatctggcaaacattgatttgttttgcacccatatggttttgccttttgcagaaggaatgaaatcacacagtagctttttgagcatagcttctttcactcagcataatgcctttgagattgatakactacatattgttgcatttattaatagttcattgctttctattgctaagcagtcttccatcttttatccattcatctgttggtgaatgatgatttctagttcttggtgattatgaaaaacgttgctatacatgtgatttctttttcattttttgataaaagatcaaacaaaacggcctgaggatcttaatcacttacagtgctatattatataca

SEQ ID NO: 361235 - DNA, 584 bp, Homo sapiens
gttagtgccatgagtaccaagtcagcagcaccataattaagaactactatttgttgggtatgtagtatgtgctgcacagcatacttcgtgtttttcatttatagcatagatctgtaacaatacctcatggtaggttttattatccccattttataaatgaaaaactgaagtataattaactaaatcaatataattactgctgagatccagtattaaaatccagccccgtcttttyccatggctagcaagtagaagtgttggatgtgaaacaagagttatacaatatacttagatatgtaagtaatttagcttttccttacagtaatttttcgatataaaagccaaagaaatttccttacttttttttttccaagtttatacttcaactctctttgaaatctagaataaaaaacagacacactgccctttttctgtttcactgatatgatttacaatttatagtaagtgactggacactaggcttacacaaaattgtttccaagtaaggaacaatgtgacaaaggtgttacaagctctggctctcctggattatgctcaaatcccacctctgggcttgttagttg

SEQ ID NO: 361236 - DNA, 628 bp, Homo sapiens
aatgccaaatgcactctatacttggagtgtgtttgtgtgtgtatgtgtgtgtatgtgtgtgtgagagagagagagaaagagagagagagagagagagatttccctatctttgaaattttctcaacatcttcttgctcctaaaatgtgggctaggggctgggtgcagtggctcatggctgtaatcccaacactttgcgaggctgaggtgggaggattgcttgaggccaggagtttaagaccagcctgggcaacacagaacctgtaaaagtcaaaaaaaaataaaagagagagagagagaaaagaaaaagataatgtgctgtataggatgacctgcccaagctgtctcttgcctagtaggctgcttatatctttagctgattgttccaggtgcttatatactgtccctcactacmttacattattctatgaaagaataagttagatagacctccgtctttgattaagacaataaataccttcttccaaggcttcattggtagagcagcagcatcttgttcttctattgtcagggtcataattatgatttttactcacttcccttgaaagtttcctatttttgtgtccctttcccttaaaaacacatcatcattgtgtttgtttatatttt

SEQ ID NO: 361237 - DNA, 487 bp, Homo sapiens
ggaaggtctctgaaataatgactattagcatctgttcacaacaatatttgtgccagatatttgtttttaaaaaatggagcaaatgtattaggtaatatttrtagagacacactatacatcaaggactatcgttaggtggttcttttgattcagagccctctgtgcctcgccaaacaggaggaattctttaatagaacttttgtgagcaattggtgatcaccttccaaatgtaatctgattcagaatataatagttattctgtttaattatcagattgtaaccatggaagacacatctaaactcaaaaaagagaaacgtctgtgagatctgagaattacctgtgttcattatgaagaagtaaataaaatacaatgattaagaaaacatatacaactttccctactacagagcaacttcatgtatgtatttgatttcagtacatagttctcatttgtcattttgtttctagctgcctcagttagggtgg

SEQ ID NO: 361238 - DNA, 586 bp, Homo sapiens
aacatcccctttgttttacacagtagacttattctaataatatcctatcaatttaattatctgaaacactaaaaattatattttaactttatactaaaattaatttgatgtttgctatgttctgaagatcgtttcttatttaaaagtactattttaagtagtatcagggataaatacattttgaaaaaagtaggtaagggaactatatgcttcacaccaggactttgtcttcattactagataaactttggttaggcaaattatgtcaaacagcatgatacctctgcattctcatgctaatattaggtattgacttataattttgatgagattgataggtaatgttcctttcacctttccaaagagtggraatctgtgggctgtatttcagctttgcggaaaaaaactggcttttttcatgtatgattcatagagaaaatgaccttcttaaaggtaaatttgttggtgaatgaatgtgtaaaaagattcattccttctacattttcatacctacccattggcaatgcagattggacctcatttctgttgataacacatggaaccagtgttcttccttgactccaac

SEQ ID NO: 361239 - DNA, 507 bp, Homo sapiens
tttatgcaaaaattactaacaatccaagtctaagacattctttttttcatttcaattttgtatcaagcaagtcatattagtgatgrttcaatgcattttttcattatataccaacctaccatttttattgtgatgttacacacaatagttatttttataacacacatatttattaatgaggtgaggctaaaccattctagaaatatcattctgactgagatgcagctgctcacttatcagcatgtgcaacactgaaaaactatccaatgaaagaaattaatatttattgaacacttactatatcggagcaatgttctatttgctttatttatgttgtcttattttattttcacagcagtgctgtcaggtaagtattaatagaggatggattggaagcccagggaggttaaataattggcctgaagtcatatagctaaaatatgtgaggctaggtctatttgacactattctctttttaatataccttgcagtcaatcaatcactcac

SEQ ID NO: 361240 - DNA, 507 bp, Homo sapiens
tttatgcaaaaattactaacaatccaagtctaagacattctttttttcatttcaattttgtatcaagcaagtcatattagtgatgattcaatgcattttttcattatataccaamctaccatttttattgtgatgttacacacaatagttatttttataacacacatatttattaatgaggtgaggctaaaccattctagaaatatcattctgactgagatgcagctgctcacttatcagcatgtgcaacactgaaaaactatccaatgaaagaaattaatatttattgaacacttactatatcggagcaatgttctatttgctttatttatgttgtcttattttattttcacagcagtgctgtcaggtaagtattaatagaggatggattggaagcccagggaggttaaataattggcctgaagtcatatagctaaaatatgtgaggctaggtctatttgacactattctctttttaatataccttgcagtcaatcaatcactcac

SEQ ID NO: 361241 - DNA, 650 bp, Homo sapiens
ctctctttcagttcctattctccctaagtaatccttatcttgatttctaagatcatagttcatttctgctattgcgtcttccccattctctttcactcctcttccctgactctaagtaaacacattttatatcttttcactgtgtcctttacatctcatcctttttttctccatgtgtttcatttataccttctgtttacttattgtccagttcactaattctctcttctggttttttgactaatttgctattaaatccatatataaatttttcatttaggttatattttatacttgtagaatgtccatttgatatttttattgtttcaagttctctgataacatttttattatgtcatctatattttgagcatagtaataatagttattttaaaattaatatctggcaacatgaatataaagatgttttgtatattcttactattarggtttttccttttttgttcattctgttagcatgtctcatggaatacactaaaagttttatcgagtgcctcacataactaataaagaaaatgtagagataatgttagatttatctggagggaatttcattttgcttctggtaactatttaggctaagaatacatctccttaatccaatcaagaattgatgtgattccaagttg

SEQ ID NO: 361242 - DNA, 514 bp, Homo sapiens
gtatgataggtgcaattaaatgctatacaattagacatttttacccacaagtgttcccattatatattttggatatctgtataaaccttctatcaaaaaaagaataaattttcttataaggrttagactagtcagtgacaaaaatatttatttatccaaaacatcttccataatatcgagaacaaaattacccatctgcagacctgaaactctagggacaaaacttatagaaagccaggtgttaacatagctattctttgactgagtaatttaactcaatgatacataaaatatgaacagaatattttagttatgtggaatagagtagtaaattgattatgctctctttaaaatgcatgttgaaatggtattccttaaaaataattgctttcacataatacccaaaatgaagattcacattttgggagatagtaatcgcctacatatttttcttctatcattaaaaaatagtcttatacatatcatacaagatgtatcttataaaacacccaag

SEQ ID NO: 361243 - DNA, 524 bp, Homo sapiens
tttcacagagaactagagagctgagtaattacactaaattcttggcaatatttttttgtgataataattaatatgattattcaggtaactactgtcaaactttagaagtatagagattaacaaggaataataggcacaaaataagaattatgaaaatatgtccaagctgacaagagttgacttcaatttgcttcacaaagctgcctgaccatgaaagatacattacagtagcctgagatttgttaataagyttttcttgttcaagcttgctgaagtatttcatgttttcaaattttatgccaagtaaaaatatgttcacattttataaatatttaggaactgagtcatggtgctctggtgttttggttcctaagacatagttttatttcacttctgtgatggttagttttaggtatcaccttgactggattaaaggatatccttcctgatagctggtataccattgttttggggtaggtctgtgagggtgtttccaggaaagagtgaatgagtggactgtgtaa

SEQ ID NO: 361244 - DNA, 587 bp, Homo sapiens
ctgttgtcttaagccacacaatgtgtgatgtattgttatggcagccccaggaaactaacattgggcacattatgttttcaaactgaaccagctccctcacaacttcaaagtacarctgaagtattaaaacatggggacagcaatgtcaaattgtaatcagaacaagcatgaaatgccattgccaagcacatctcttccaaggaatgacattcagatcatgagcctatgtgtccttggggcaagggatggatgagcagagagagatatttatttatatctgtatttataaatatacatttatatgcatttatatttatggtcactgcacctatgaatagatctatccttagagcttggtaaggatttcttaattccaagaaacacatagttaaatgtcacatgtccagtttcaatgaaagcagactctgaggtagagataagcctgcaggatgtttgctggggaaggcttctgggattaacacctgtgaaggaaagtaaaagaagcaagataagcaaacgagaagttggatggttgtgtagtcactgtatggcctctgccaaccccaccatcacattgagttcctgaa

SEQ ID NO: 361245 - DNA, 561 bp, Homo sapiens
cttttttgccattggggtaattgtaccttcttatccatccctttccatttgggggcatgtcccttctccccatccctgkccctcatttgttagttactgtagcttacactggtttttaggttttaattactcccctcccacagccaggttcttgccaaccatctaccatatacaatattgcagctacaagctgttctcagaaaatccactcaaaatagctgaggaacagctgctcctgtgatattttcaaaagaaagaaatttgtatttggcttcatggtctaagggtctgttggttttgcatagaaagagacaaatgaagcccttcactccagctgaaattctctgtccctcattctcaggctcctatttcagtggaaggataagtgggccaggaaatggaaagatggttctggaaaaagcatgcatcatttgcttgagggctgttcatttacttctcatatttttgcaactgatatttacaagtagattaacaagagttaatttgtgggtacaaattagcgggaaaaacaagaccagttgaatccaattagcatttttt

SEQ ID NO: 361246 - DNA, 482 bp, Homo sapiens
cacaccccctctcaatttccatcatgggatgacataaaaagaaggccctcacccaaggctggcccctcagttttggacttcttagcctccagaatggtgataaataaatttctcttttttataaattrctcaacctcaggcattctgttatagcaacaaaaaatggactaaaatagaacacaaggtcgttctttggagatcaccttttttacttgcctatcagataagctccctcacactggaagaaagccattggcataaaactgtgtttttgtgttaaaaatgtacaaatggtcaaacacttaaaaattctagagttaaaaagcaatgaccctttgatgttttctgaatgcttgtcaaataatgaagttattgccctgatcaggcaggagaggttgataaagagtataggggttaagggttgcttacaaatgacaggagggctggctgtatcctgtctatgaagcccttatgaagaaaaa

SEQ ID NO: 361247 - DNA, 678 bp, Homo sapiens
ggctggctgtatcctgtctatgaagcccttatgaagaaaaacgaagtcccaggaaaataaaaggcatttagtgttatgatctttatagatcctttgcttagttttttgcgaggtaaaactcaacttagagaagatattttattctcaatgtgtccaggcatctttgccagctcaggaacaaatgtagagctctgcaatagataaaacctgcattgtgattagatgagctgccaatcaaagtcctcagtggtgtctgattggagaacagaatcctggatttgtagaaatttggagtgggctgaaccaataaacctccacacacctcagataccctgggactagttccaaaaagagagccmgaaaccagtatgcagtgtgggtttgggcagagacaggagttttctccagtgggtggaaagaaaaaatttgacaaaaggaacaaacctggagttcctaggagcccacggtgatctggtgatctctgtataacatactctagatagcttttacccctagtgcaagtttcaaaatgacagttttcaactttgatattagcttttattattttgctccaactgacattttcttaatattagatgtaaatgtatatactgaatttttatatatattacataatttagtaattagagagtttatttttctgaaaaaaaatcaagc

SEQ ID NO: 361248 - DNA, 678 bp, Homo sapiens
ggctggctgtatcctgtctatgaagcccttatgaagaaaaacgaagtcccaggaaaataaaaggcatttagtgttatgatctttatagatcctttgcttagttttttgcgaggtaaaactcaacttagagaagatattttattctcaatgtgtccaggcatctttgccagctcaggaacaaatgtagagctctgcaatagataaaacctgcattgtgattagatgagctgccaatcaaagtcctcagtggtgtctgattggagaacagaatcctggatttgtagaaatttggagtgggctgaaccaataaacctccacacacctcagataccctgggactagttccaaaaagagagccagaaaccagtatgcagtgtgggtytgggcagagacaggagttttctccagtgggtggaaagaaaaaatttgacaaaaggaacaaacctggagttcctaggagcccacggtgatctggtgatctctgtataacatactctagatagcttttacccctagtgcaagtttcaaaatgacagttttcaactttgatattagcttttattattttgctccaactgacattttcttaatattagatgtaaatgtatatactgaatttttatatatattacataatttagtaattagagagtttatttttctgaaaaaaaatcaagc

SEQ ID NO: 361249 - DNA, 612 bp, Homo sapiens
gctggcatttggtcttttaattaaggcaacattaattccaccatatcattactttcaaattatttctatgttatgtctctcaattgcttttgtaggctaacatgttggctaggagttaagccatggctttaaaatgcattctgatgtgattgtattcatttaccagttgaagaaacattattgataccatagtttattttctgttactttccaaatttttaaaactttgaaaatcacccaaactatatcaagaaatctatagtatgcctataaacttagaatatctaacaaaagacatctattgttttaacataatcatcctttcctttttctgatatcttatrttttcctggaccatcatgcacttcaggttttaaaatacatttccgtagagttgagacagatgattttaatttgcttgctatgattcattctcattaccaattataattttgtgattttgtgctttttcctgtatttttaagttcatgtttattttttcaaagaacaaagttctgcatatatttataaaagttattgtttcgctttattaatttctgcttgtatatttgttatttctctcctgccagtatatcttggttgattttgctt

SEQ ID NO: 361250 - DNA, 612 bp, Homo sapiens
gctggcatttggtcttttaattaaggcaacattaattccaccatatcattactttcaaattatttctatgttatgtctctcaattgcttttgtaggctaacatgttggctaggagttaagccatggctttaaaatgcattctgatgtgattgtattcatttaccagttgaagaaacattattgataccatagtttattttctgttactttccaaatttttaaaactttgaaaatcacccaaactatatcaagaaatctatagtatgcctataaacttagaatatctaacaaaagacatctattgttttaacataatcatcctttcctttttctgatatcttatattttcctggaccatcatgcacttcaggttttaaaatacatttccgtagagttgagacagatgattttaatttgcttgctatgattcattctcattaccaattataattttgtgattttgtgctttttcctgtatttttaagttcatgtttattttttcaaagaacaaagttctgcatatatttataaaagttattgtttygctttattaatttctgcttgtatatttgttatttctctcctgccagtatatcttggttgattttgctt

SEQ ID NO: 361251 - DNA, 604 bp, Homo sapiens
cactacaattctctccattatacaaaaaaaaaaaaaaaatgagacagaaagaaagaaacttgaggtctgaacactttctcctggatttgcctttataaaggtcattggtcacctttgcaggaaaggttgtagtggaatggtagtagcarataccgtgtcggcatgtgatgaggaatcatttcctggaaaaatgatgggaaatggcatttgtaaacaatttcctctatcctgaggtttggctggaaaaaaaaacggtgaaactgcatggtaactacaagggaaatatggaatcaaaggcagggttgtatagcttcttcatttgtttctgaaataatggggaccatgaggacatatttctatgccaatgaaataagatctcacataacacttcctttgatttccagttctgtctttgctgctaatgctgtcttaagatcaatgcaagacaattaaatcaacaaatcttcgctccatgtctgctgctatgcaccaataccttcctcacattctactgccctgattcaaaatcatttgtttctgagacccttgtgagggctcccgttatgtttgatctctataattgtactcacgggtttttggccct

SEQ ID NO: 361252 - DNA, 546 bp, Homo sapiens
caccatgcccagctagattttcttggctgttgtcaagatgaggtctccttctgttgcccaggctggtcttgaactcctgggctcaagcgatcctcccaccttggccttgcaaagtgttgggattasaggcatgaaccaccacacctagtctatgcattaatttctaaaaaaatagtttatctaagtatgttgggtttttctgttgtttgattttggtttatttgtttttaccctgtgactctactgggtcattgactattcttttatatactcattttgaaattttgagaaatgagaatagacaattaggataagatgaaaatcagtaatatttgtatgaactttgacaagcagaggaaagatgataaactacttttttcataagtttgccttccctttcccatattgtgcttcaagaatcattcaacattgtaagctgaattactacttgtctttttagacatctaataaatgcatgaataaaaagttttatagtggtctttatcatattttaagaatggaagcgagagacaagaacaggatatg

SEQ ID NO: 361253 - DNA, 604 bp, Homo sapiens
cactacaattctctccattatacaaaaaaaaaaaaaaaatgagacagaaagaaagaaacttgaggtctgaacactttctcctggatttgcctttataaaggtcattggtcacctttgcaggaaaggttgtagtggaatggtagtagcaaataccgtgtcggcatgtgatgaggaatcatttcctggaraaatgatgggaaatggcatttgtaaacaatttcctctatcctgaggtttggctggaaaaaaaaacggtgaaactgcatggtaactacaagggaaatatggaatcaaaggcagggttgtatagcttcttcatttgtttctgaaataatggggaccatgaggacatatttctatgccaatgaaataagatctcacataacacttcctttgatttccagttctgtctttgctgctaatgctgtcttaagatcaatgcaagacaattaaatcaacaaatcttcgctccatgtctgctgctatgcaccaataccttcctcacattctactgccctgattcaaaatcatttgtttctgagacccttgtgagggctcccgttatgtttgatctctataattgtactcacgggtttttggccct

SEQ ID NO: 361254 - DNA, 604 bp, Homo sapiens
cactacaattctctccattatacaaaaaaaaaaaaaaaatgagacagaaagaaagaaacttgaggtctgaacactttctcctggatttgcctttataaaggtcattggtcacctttgcaggaaaggttgtagtggaatggtagtagcaaataccgtgtcggcatgtgatgaggaatcatttcctggaaaaatgatgggaaatggcatttgtaaacaatttcctctatcctgaggtttggctggaaaaaaaaacggtgaaactgcatggtaactacaagggaaatatggaatcaaaggcagkgttgtatagcttcttcatttgtttctgaaataatggggaccatgaggacatatttctatgccaatgaaataagatctcacataacacttcctttgatttccagttctgtctttgctgctaatgctgtcttaagatcaatgcaagacaattaaatcaacaaatcttcgctccatgtctgctgctatgcaccaataccttcctcacattctactgccctgattcaaaatcatttgtttctgagacccttgtgagggctcccgttatgtttgatctctataattgtactcacgggtttttggccct

SEQ ID NO: 361255 - DNA, 320 bp, Homo sapiens
cctaatgtagatgatgggttgatgggtgaagcaaaccaccatagcatatgtatacctgtgtaacaaacctgcacattctgcacaygtatcccagaacttaaagtataataaatacaaacaaacaaagaaacaaacaaaagatcatgcacaggtttctgatttgcagtttggaaagctggtgttacccatcaatatgtactgtgtgaagaagagttaggaaagataattcggtttgggccatggcatcttgtggttcctgtgatgtatgcccaggaagggcctagcaatagaattgagaaatccaggggggggacagattg

SEQ ID NO: 361256 - DNA, 505 bp, Homo sapiens
ggatcatgactacaaccaaggattaattcctaattggaatagaatgaaaattgccagacaagtttgagtgaatctaaggacatcagcctgatgtccctttttctctgtcataaactgggaggagtgaaagcttgccagaggagacytaaattcccagcattacatccaactgttgtggaaagggaagaggagaaatggttgacttggggtctggatgagtgaacctggaaccagcttcacctctctggctctgtgtaaaagcagtcaaccaaacaccagggtgtgcttacccctgagagaacacgtatgttgtccaaggttagcaatatttgaaggtttattttaagtgaaattaatttccagatattcaacttccagatgtactccttccaaaatttgatttgcctgagaactcactccctctctttagacaataagtccttccattttacaaaataagaacatattgtttggtgcgttgccctggatgtaaaaagtatgggac

SEQ ID NO: 361257 - DNA, 604 bp, Homo sapiens
aacagggcaggacacggagtgacaaaacaagccaggccatagtaggaattatcagaagtatcatttgccaaatcttaagccaaatttcagatcatttcacttcactcataacagggcaggacacggagtgacaaaacaagccaggccatagtagacacaatgaggactgaggctaatggccataaaccagcaggaatagcaaccagatgttagtgctagaaccagatacacagccacccatgaggtttttctagattccatctgtgttattttgtctcaaraaaatcaaaattaaataatatagggatatcaaattaatatatcttaggataatatatatcttgggataatagtcatatatctgcatgagaaatttcttaatttattatcatctataatgtctagatcatggaattctttcatctactcatattttgaatgcccagtgtctagctttgatggaaaaactaaattatgcaagtatcaagatttagtaccacctgaagcaaacaaattaactaaatgatttctcaattttccttccaagtcttatgatttaatgaggttatgcaaaagatgactaaatacaaaatgtgtggaaatg

SEQ ID NO: 361258 - DNA, 620 bp, Homo sapiens
atgttcatctgcctattatctcataggcacttattaggttgaaattaccatttttagtttatcaaaatgataaaatgtttgcaatccacactgtttgacttagtagaaggattgttgtggttgagtgtttcctccttcctgagagttggtttcctcttcatttgaaagcacattgttccttatcaaacaaatgtgggggaagacctattaaacttaaaagtgactaacaagctgaaattgatactatgggcaacatgaaaatccaagcttattctagtattatcaaatctctttatagatgaaatgcactaaatttacagtttgcctttcaaatctctttttcttaatttttaaaaaaatgttataaatgcatcaaatccatgcaaaatataagattaacttttgttggccaaatatttcataaatcctgatcaaactgcttatccaaactgtcgatgttatatttattctcatgaattctttgagacaaagaccaaggtttcagatactttcagacacragagggaaagaatcactagaaaggtcactagaggccaggaagagagagaccaaagacagtttgctaaaaaagaagttcatttaaacacagtaatttgaaa

SEQ ID NO: 361259 - DNA, 646 bp, Homo sapiens
agggtgatgatggtaataataatcatcatcatatatttcctgcaactatctctgacttcttgaagaagtaattgccattcctgtacatttctatagtatttttaaatatctgtgttatagttgtgagaggaaaataaaaacttgggaccacaattcattctgcaaaacggaaaaaaattaagctgaaaggggaaacgtgcaagaagctggcttttcttttgttcctaagcagatagctacagaaaaaaaggttaaatatcttcacaggtagctactctatgttcaccttatcttatgtaaagtgctgattaaagagcacaagaacataactgactattcttctaccttctctttcctcttgcaacatgtggattcagtaatgtgaccacaccctccctctttcccctccagcccacttttcccttttaaatattgaagacttcaaagtcatctttggagaaaggcacagaacacaggcttttactgtgattccatttttgtttttgttttttctttcccaggcactgtcgttaaccttgccaaaataaacatytaaattgattgagacccaacgcagatactttttggtttacatagcagttactgcattattttacattcaattgttttatttcttacttaaatt

SEQ ID NO: 361260 - DNA, 549 bp, Homo sapiens
attatcttctggcttctacagttgccttggagaagactgttctcagtttacattgtctttctatcgtaggtaatctggcatttctgtcttgttttctacatcttctctttgtctttggtgttctgcatttcaccatgatgtgattagatatagatttatttgtttgtattatgttagggatgttataatagctaaaacaaagaatttacatatttcattaaatctctatgttttgatcatcatatctttggatattagccttcctgaattatatttttttctctgaaatttattttggatataaattgaaacttcttttttttctcatgcctctcaacatatttcctaactttttattctttatgctgaattctaattatataatatcagtgttttgattcaccatttctctyatcaaatgtgtatatgttgatgttcaatctgttcaataggcttttaatttcagtctttatatttttaatttttataggttccattgagtgctttaaaattgacttttatgattgtgtttttctcacattttcaaca

SEQ ID NO: 361261 - DNA, 549 bp, Homo sapiens
attatcttctggcttctacagttgccttggagaagactgttctcagtttacattgtctttctatcgtaggtaatctggcatttctgtcttgttttctacatcttctctttgtctttggtgttctgcatttcaccatgatgtgattagatatagatttatttgtttgtattatgttagggatgttataatagctaaaacaaagaatttacatatttcattaaatctctatgttttgatcatcatatctttggatattagccttcctgaattatatttttttctctgaaatttattttggatataaattgaaacttcttttttttctcatgcctctcaacatatttcctaactttttattctttatgctgaattctaattatataatatcagtgttttgattcaccatttctctcatcaaatgtgtatatgttgatgttcaatctgttcaataggyttttaatttcagtctttatatttttaatttttataggttccattgagtgctttaaaattgacttttatgattgtgtttttctcacattttcaaca

SEQ ID NO: 361262 - DNA, 582 bp, Homo sapiens
gattgtgatattttattcagtactttaagttttcgttttctgtttttccaaaagtaacgtcaggttatctagtttgtcatattgccctgttctccacattctgaaacatatggtctttttctgttcttacattagagcaaaacacacacacacacacccacacacacacacacacgaagaaatgstgcatatggtagttatggcatatgctagccatttcaacattaaatatttaaactttaatgaagctttgaagttcagatgacatagcctaaagttggcttcatttacaacaacacttaatatttatgactatttttaatctaatagttaaaactgtgttacagtagatttctcagagcttgatagaagtacagctaattgaagttatggagctaatgcactgacccattcacaggatgattacccaagatttatggctgtcacagaacagccaaaacatgctgatttacttaagaaatttttaacacatggaaatgcgaaatggttcaataggaaaccattactgctgtcttcatttcttgcctctttgcatagtaatacacaaaactgatcaatgca

SEQ ID NO: 361263 - DNA, 532 bp, Homo sapiens
gcttattgaatgcaatgtacagtatctgcctcatggttacactaaagcccagattccaccactatgcaatatatccgtgtaactatacaccctgcattccataatttacctttagtgtatcccaatgagaaattcaactgtaaattatatcctctcaaactttccaagttcatactgaagattttaaatcttactttccgcttcatacacttacaattagtttgtcctttaatcatgcgcttcttgcactatttttctgtctttaaatttttatttatttattattttttatttattaaaaaataaataatttctggacattggtctgtggaaacaatcttgtttcccttttaaccagaatccatgtagtttaaaaatcatgagaaattctaagtcaacattgtctgtagtcataattacattaaaatttattaatacatttgaaaacattttaaattraacaggattgtttcccgtttaaccagaatccatgtagtttataaataatgagaaattctaagtcaacattgtc

SEQ ID NO: 361264 - DNA, 539 bp, Homo sapiens
tttgacacaattctcaaaatcccagcttttttctcttgcaggaattttaggattcatatgaatcctaaaattcatatgaaattcartgcactcagaataatcaaaacagtcttggaaaagaagttggaagattcacacttctcaatctgaaaacttactacaaagctacattaatcaagatactgtggttctggcataaggatagacatagatcaaataaataggttgaagtcctgaaaataaactcttacttctaaggtcagttgatttcaataaagatatgaagaaaattcaatggaggaagaatagccatttttacaaatgatgctggaatgactagatagccacatgtaaagaacaaaattctacttctgctcacatgataccaaaccaagccccatcataatgaatcaaggacctaaatataagaactaaaactacaaaaatctcagaagaaagcatggaagtaaatatttgtgactttaaattagacaatggtttcttagataaaatactatatagaagacatatagatgaat

SEQ ID NO: 361265 - DNA, 570 bp, Homo sapiens
taattcttatattctcaaggtgtacttgctttcattcagttgactttcttctatctcaatatttctgtattaattggtatgatcctaattacagagaaaatgatatgtggggaacagaatagatttctgctctcactctgctatatcaaactgtatagaggatatcatcaaactatttgtatttaaatttgccaatttaaaaactcataatcatatgatgagaaataagtgataatatgaaactattaagttgtgaaaaaaattagaaattggtgaaggctcaccattaccttgagggacacaaataaattagtacagcctcctctgttgagtgattttgagggtgggtttaggtataatttgactactaggttttcagagggttrctctgttatcctcaaatgttgctctgttatcctcagaggtcaattatgcaatcattaattgtcttcattttgctaatttttctgtaagaggaaagacattcacacattagccctaactgtttcacttcagcttaggtacatttgatataacttctgggatgggcaggggagaatgaggcatttt

SEQ ID NO: 361266 - DNA, 644 bp, Homo sapiens
aatgaactaaatacattatcacatgtcctttcctcagagcaagcctgtatgctaagtctccaataagccaattttacagatgaggaaattaatacttggagacattaaatgactagactgaaatcatatggctagcaagagatggagctggaatttgtagccctcaaatttataccagccaccaagctgccactatacttaactgcaaaaccataacaactggtaaaagaaatgtagaagcacaaaagaaatgattgtcctgatatatgagaacatatactaaacagtatgtaactttttatgtaacgtattttgtcattttgctgtcctgctttcacgcacagacatttaatgaaacatgccatatatgttaacagaactcatgtttacattatcgttcccccaaataccatttggktagagaagttagagacattcacttatatttttgctttagaaaggagtatcctctattttattttatttttattttaaagatagaatacatctgcctaggatatgagcaacctttggtttttgcctttcaagatttcagaagttgtactgttaccagattgcacattaagtatcagtattttacaatagcaaatgtaggtagtaggtagggtagtaggtagctggct

SEQ ID NO: 361267 - DNA, 619 bp, Homo sapiens
tgtcttcaaagaaccataatatatattgccttgtgttgtgctcataaatgagaaagtgtgtatgtattgttcttgcactactataaagaaatacctgagactgggtaatttgtaaagaaaagaggtttaattggctcatggttctgcaggatgtacaggaagcatggctggtgaggcctcargaaacttacaatcatggtgaaaggtgaaggagaggaggcgaggcatgtctttcatggcaggagcaagaggaagagagagaagggaattgtgtcatgcagttttaaacaaccagatttcatgagaactcactcactatcatgagagcagcactgaggggatggcatcaaaccattcatgaacaatctacccccattatccaatcacctcccaccagaccccacatccaacattgaggattacaattgaacatgaaatttggatggggacacagatcgaaccatatcaaagagggaagtcatttgcaaaaataagatgttataagtatgccactggttgaagaggaaaaggataatgcagacccactgtttgttacaggactgtggctaacaacatatagttctccacatcattttgtgacaccatctggtaaattatg

SEQ ID NO: 361268 - DNA, 579 bp, Homo sapiens
tgtgggcccagtggctggctgttctggaggttaaagtctagggcaaccagaaattggataaatgagaagggacctcatagcctaattaaaagcacccagagtacttcatgaatctctcattggacatttgctaatttgtctgattaagtgagaagcagacctagagtagacttgataaagagaacataatttaaaatggaaccgcttcaagctgtaacttctaccttacccttatccagtcaaacagccttactaggcaaggataagtggcttggcaggagcccacttaagagattaaaaacttgcctcatgtaaaagtgaggtatgggaccgggcgcggtggctcaagtctgtaatcccagcactttgggaggccgagaagggcggatcacgaggtcaggagatagagaccatcctggctaacacggtgaaacaaaccctgtctctaccaaaaatacaaaaaaattagccaggcatggtggcaggcrcctgtagtcccagctactcaggaggctgaggcaggacaatggcatgaacccaggaggtgaagcttgcagtgagccgagatcacaccactgc

SEQ ID NO: 361269 - DNA, 586 bp, Homo sapiens
caggcaccctgtcatgcttacaatactgtatgactgttagcactgttaaggttgggaagtaggtttacgataaaaggataaattcccctgaacaaattcctatgtgatttgctcactctttccaatgagatttgaaccatcctgactaaatggcactaaactactaatcataatacataaaaggtagaagacatagtaggttttaaagatgcaaaagagcacacaaaaaaataatcaaatgagagtagtcaggttaaattaaataaattacaggcaatcttttaggagaattttagtcctgttgagctttaccttttcaataaattgatatgtgttgttgattgttaaactgcacattctcaacctggcctaaaatgcttaactggaacattccccarttgtttctggttggctacagctcaggaacattgcggtaacagaggccttcacgggccctggtggccaagtcatacctcacattttccctctgctgccctcacctttctagaagtggagccacttccccagagagcctcttaactgctaaagctccattccatcttcaccagagcaacttctgctcaga

SEQ ID NO: 361270 - DNA, 464 bp, Homo sapiens
gatctcaaatacaatggcttaaataatcatgcctctgttcaaggctttcttaatgttggttttcataactacccatttgaacaatgctagcagcagaaaatgatacccagaaaagtctgcctgatgtgtcctagccaccaatgggaaaaaagtgggataattcacatccacttagacaggaattacttcactagatgctcaatctctgtccagctgcttttaaacagttattgaggaaagtggacactcaaaccaaaagacaatgttttcttggagtgctttagataatttaygtagctcagtggttctcaaccctggctatacagtaaaactacctgggaaggtttaaaacaaagagcagtgcctaggtttcaccctcggagtgagttaagtggtctgagataggaactaagtatcagtattttaaaagttacatttatctataaacacatatagttgtgtaa

SEQ ID NO: 361271 - DNA, 528 bp, Homo sapiens
gcttctttcttgtttttattgtggaatattcagtttttcactgtaggcctcaatgggctttgaaatttctccttgcatattctgcaaaaagtctgtttccaacttggagaatcaaaagaaaggtataactcggtgagttgaacccacatatcacaaagcagtttcacagatagcatctttctcatttacattttggcatattctgttttttaatatagcccaaagtgcactccaaaatgtttccttgcagattctacaaaaagagtgtctccaaccagctrcatcaaaagaaaggtttaactctgtgagcttaatccacaaattacaatgcagtttcacagataacttctttctagtttttatcacaggatatttggtttttcaatttagcccccagtgggcgtggaaatgtcccttcacaaattttacgaaaggagtttttccaacctgccgaatcaaaagaattgtttaacctgtcaactgaatgcacatatcacaaagtggtttcacagatagttttttctatat

SEQ ID NO: 361272 - DNA, 602 bp, Homo sapiens
tttaagttcgtaaactgaatgcccatatcacaaagcagtttcatggatagcttctttttagtttatatcgtggcatatttggtttttcagtataggctttagtgggctctgaagtgtcccttcacagatttctacaaaaaggttatttccaacctgctgaataaaaaaaatgtttaactataaactgaatggacacatcacaaagaggtaacagagaacttctttctgtttttatcatgagatattctgtttctcactataggcctcagagagcactgaaatgtccctttgcagatactacaaaaagcatgtttccaacctgctgaatcaaaagaaaatttaactcagagaactgaatgcaaacatcataaagcagtttctcagatagcttctatctagtattcatcgtgatattttcagttttttaatacaggcctcagtttactccaaaatgtccctytgcagattctacaagaagagtgttgacaacctgctgaatccaaaaaaaaagttttaactctgtgagttgaatccacaagtcacaaagcaatttcacagatagcttcttcctagttttactgtgggatatacctttttcagta

SEQ ID NO: 361273 - DNA, 598 bp, Homo sapiens
cagtttctatgaaaatagtgtttccaacttgctgaatcaaaataaaaatttaactctgtgaactgactccgcaaatcacaaaacagtttcacagatcacttatttctggtttctatcatgggatattcagttttacactataggcctaagtggactctgaattgtctttttgcagattctacaaaaacagtgtttccaacttgctgaataaaaaacaaggtttaacctgtgaggtgaatccacaagtcacaaagcagtttcacagatcacttatttctggtttctatcatgggatatttggtttttcactataggcttaatggactctgaattctcttcttgcagattctacaaaaagagtgtttccagcctgctgaataaaagacaagattgaactctgtgaggtgaatccatacatcacaaagcagtttcaaagatggcttctttctagtttttattgttgaatattcaggttttcagtataggcctcagtaggctctaaaatgtcccttcacagattctacaaaaagagtgtttyccacctgctgaatctaaagaatgattaagctctgtaaactgaatgcaagcatgacaaagc

SEQ ID NO: 361274 - DNA, 563 bp, Homo sapiens
atgaatgcatatatcacaaagcagtttcacagagagcttctttgtagttttatagctggatattgggtttttcattacaagcctcaggttgcattgaaatatcccttcacagattgtacaaaatgagtgtttccatcccactgaatcaaaagaacaatttaactctgtgagctgaaatggcacatcacatagcactttcacagatagcttgtttctagtttttatatatayatttttttactgtaggtctgtgtgctctgaaatgtctctttgcagatcttacgaaaagagtgtttctaacctgctgaatcaaaaaaaattatctctataagctgaatctacgcatcaaaaatcagtttcacagatatcttctgtgtagtttttatcataggatattttgtttttcactgtaagtctcagtggactctgaaatgtccctttgcagattatacaaaaagagtgtttccaaccagctgaatcaaaagacaggtttaactctgcgagctgaatccacacatcacaaagcagcttcacagatagattctttctagtttttaatcaca

SEQ ID NO: 361275 - DNA, 601 bp, Homo sapiens
acctgctgaatccaaagaaaggtttaactctatgagttgaatcaacacatcacaaagaagtttcacagatagcttctttctagtatttattgtagaatattcagtttttcactataggcctcagtttccttcaaaatgtcttcttgcagattccagaaaaagagtgttcccaacctattgaatcaaaagaaaggtttaactctgtkagcttaatccacacttcacaatgcagtttcacagataatttctttctagtttttatcacaggatcttcactttttcactataggcctcagttggctctgaaatgtcccttcgcagattctataaaaagagattttccattctggtgaattaacaggaatgtttaatgttttgaagtgaatgcatgcatcacaaagctgtttcacagatggcttgtttgtagtttttattttaagatatttggtttatcactgtaggcatcatttttctctgaaatgactttttcaggttgtacaaaaagagtgttctgaatcaaaagaaagttttaactctgtgagttgaatccacacctcacaaagcagtttctacagaatgtcccttcaaaaatttcacaaaa

SEQ ID NO: 361276 - DNA, 578 bp, Homo sapiens
atacttggtatctcactataggcttcattgggttttgaaatgtcccttcgcggatctacaaaaagagtgtttcccacctcgtgaattaaaagaatggtttatctctattagttaaatccacacatcacaaagtagtttcacagatagcttctttcttgttttyatcacaggatattcagcttttcactgtaggcctttgtgggctttgaaacaccccttcgctgattctacaagatgagtgtttccaacctgctgaatcaaaagaaaggtttaactctttgagatgaatccacacatcacaaagtcgtctcacagatcatttctttctaatttttatcacgggaaattcagtttttcactgtaggttctagtgggttccaaattttcacctcatagtttctacaaaaagagtgtttagaacctgctgaatcaaaaaaaagttccactccaggagctgaatccacacattacaatgcagtttcacaggcctataaggccctagtgggctttgaaatgtcccttcacagattctacaaaagaagtgtttcaaaccttctgaattataagaaaagtttaat

SEQ ID NO: 361277 - DNA, 554 bp, Homo sapiens
agctgaatttacagatcacaaagcagtttcaggatatcttcttaccagtttctgttgtgggattttaggtttttcactataggcctacgtgggctttgaaatgtcccattgtagattcyaaaaaaacagtgcttcccacctgctgaatcaaaagaaaagtttaactttgtgagctgagtgcacacatcccaaagtattttcacagatagcttttttctaatttttaaccccaaattttcattttttcaccataggcctcaatgggtttggaatatttcctcacagattctaaaaaaaagagtgtttcaaacctgctgaatgaaaagaaaggtttaactctgacaggaacccacacaacacaaagcagcttcacagatagcttctttttagtttttattgtgggattttcgggttttcactataggcattggttcgctctgaatattccatcagattctacaaaaagggtttctccaacttgctgaatcaaaagaaagtttttactctttgacctgaatgcacacatcacaaagcagtttcacagataaattctt

SEQ ID NO: 361278 - DNA, 554 bp, Homo sapiens
agctgaatttacagatcacaaagcagtttcaggatatcttcttaccagtttctgttgtgggattttaggtttttcactataggcctacgtgggctttgaaatgtcccattgtagattctaaaaaaacagtgcttcccacctgctgaatcaaaagaaaagtttaactttgtgagctgagtgcacacatcccaaagtattttcacagatagcttttttctaatttttaaccccaaattttcattttttcaccataggcctcaatgggtttggaatatttcctcacagatyctaaaaaaaagagtgtttcaaacctgctgaatgaaaagaaaggtttaactctgacaggaacccacacaacacaaagcagcttcacagatagcttctttttagtttttattgtgggattttcgggttttcactataggcattggttcgctctgaatattccatcagattctacaaaaagggtttctccaacttgctgaatcaaaagaaagtttttactctttgacctgaatgcacacatcacaaagcagtttcacagataaattctt

SEQ ID NO: 361279 - DNA, 540 bp, Homo sapiens
aaaaaaaaaaggcttaagtctgagaactaaatctacacatcacaaagctgtttcactgatagctactgtctagtttttattttgggatatacggtttttcactttagggatcagtgggctccaaaatatttcttagcagattctacaaaaagagtgtttccaaactgttgaatgaaaagaaaggtttaattttgtgatctgaatccacacatcacaaagcagtttctcagatacaccctctagtttttattgtgagatatttarttcttctctagaggttccagtgggtttctaaatatcccctcacagattctaaagaaagagtgtttccaacctgttgaataaaaagaaagttttaactttgttagatgaatccacacatcacaaagcattttctgtttttcatcagggtatatttgatttttcacaagaggtctcagtgggctttgaaatatccctttgctaatcctacaaaaagagtgttttcaaactgctgaatgaaaagaaaggttaaaatctgtgatctgagtccaaacatca

SEQ ID NO: 361280 - DNA, 590 bp, Homo sapiens
ctgttgaataaaaagaaagttttaactttgttagatgaatccacacatcacaaagcattttctgtttttcatcagggtatatttgatttttcacaagaggtctcagtgggctttgaaatatccctttgctaatcctacaaaaagagtgttttcaaactgctgaatgaaaagaaaggttaaaatctgtgatctgagtccaaacatcacatccagtatcacagatagcttctttcaagtttttatcacaggatatttggtttttcactctacacctcagttggctctgaagtgtccccgtgcagatagtacaaaaagggtgcttccaacatgcagagtcaaaataaagttttaactttttgagctgaatccacacatcacaaagcagttttccagatagyttctttctagtttttatcaagggatattcacttttaactataggcctcagtggttccaagatgtcccactgctgattctacaaaaagagtgtttctaaccagctgaatcaaaagagaggtgtagctctgtgtcctgaatccatacatcacaaaagagtttcatacatatcttatttttagtttttattgtag

SEQ ID NO: 361281 - DNA, 613 bp, Homo sapiens
gctaaactccttgaactgaatgcacacatgaaaaagcagtttcacatacatattcttactcgtttttatcacaggatatttgttttttcactgtgggcctcagtgagttctgaaacgtccctccacagattcttcaaaaagagtgtttccaacaagctgaaacaaaaaatagcaggttaactttgttaactgaatggacaaatcacagagcagtttcacagatagcatatttctagtttttatcatggaatattcattttttcactatgggccttagtgggctctgaaatgttgcctcataaattctacaaaaagagagtttccatcctgctgaatgcaaaggaaggttgaactctcttagcttaatccacacatcacaaagcagcttcagagatagcttctttccagtttttatcacaggatattcagtttttcactataggcttcagtggactctgaaatgactcttagcagattctaccgaaagagtgtttaccaaagtgctgaatcaagggaaagctttaaatatgtgagctaaawcacttgttacaaagcagtttcacagatagcttttttcttgttttctctcacgatgtttggttttacaaaatag

SEQ ID NO: 361282 - DNA, 366 bp, Homo sapiens
ttcacagacagcttctttctagttgttatcatgggatattctatttttcaatataggcttcagtgggctctgaaatgtctctttgaagatcctacaaaaagggtgtttaaacctggtgaatcaaaagaatgttttaactctgtgagctgaatccacacatcacaaagcagtttcccagaggccttctttctagtttttactgcaagatattcagtgtctttactataggcctcaaagcactctgaaatgtccctttgcagattttacaaaagagtgtttgcaaaaaactgaatcaaaaatwaagtttacctatctgtactgaatgcaaatatcaaaaagtggttttacagagagtttctttctagt

SEQ ID NO: 361283 - DNA, 559 bp, Homo sapiens
agtttcacagatagtttctttctagtttttatcatgggatatttggtttattactataggcctcactgcagtccaaaatgtcccttcacagattccacaaaaagaatgttcccaaactgctgaatcaaaagtttggtttaactctgttagctgaattcatacatcacaaagcagttacacagagagcttctttccagtttttatctttccagtttttatcaygggatatttgatttttcactatagggttcactgagctccaaaatgtccctttgcagattctacgaaaaaaagtgtttccaaaccgctgaatcaaaagaaaggtttaattctgtaagctgaatccacacatcacaaagcaatttctctgatagcttctttctagttttcaccacaggatattctgttttttaatacatgcctcaaagcgctttgaaatgtttcttcccatattctacaaaaagagtgtttacaaacagttgaatcaaaagtaaggtgtaactctctgatctgaatacacacttggcaaagcagttttactgatatcttcttgctggtt

SEQ ID NO: 361284 - DNA, 571 bp, Homo sapiens
aagcgtttaactctgtgagattaatctacacacgaggaagcagtttcaaaaatatcttctttctggtttttattgtgggatattcttgtttatattactacagtctcactgtgctctgaaatgccccttcacagattttacagaaagaatgttttcaaactgctgaataaaaagkaaattttaactctattagctgaatttgtacatcacaaagcaattttatagagcgcttttttctagtttttatcacgggatattcggttttttactacaggcctcaatgcacttttaattgtatcttcaggattcttctaatagagtgtttccaacctgctgaataaatagtaaggtttaaggctgggagctgaatccacacatcacacagcagtttcacagatatcttctttctagctttcatcactggatattctgtttttcactataggcctcagtgggctcgaaatagtccctttgcagattttgcaaagagagttcttttaaactgctgattcaaaacataggtttagctttgtgagctgaatgtacacttacaaagcaggttcacagatag

SEQ ID NO: 361285 - DNA, 571 bp, Homo sapiens
taactcagttagctgaatccacatatcacaaagcagtttcacagagagcttctctctaatttttatcgtggaatattcactttttcactataggcttcactgtgctccaaaatgtcccttcatagtttctacaaaaagagcacttccaaactgctgaattgaaagaaatgtttaagactctgagctgaatcaacatatcacaaagcagtttcccagatagcttctttctagttttttatcrtgtgatattctgttttttactacagtcctcaaaacacttcaaaatgtcccttaacagattctgcaataaaagtgtttacaaacagctgaacccgcccccccaaaaagagatttagctatgtgagctcaatccacaaatcacaaaacagtttcacagatagcttctttctagtttttatcgtgggatattgttttttactataggcctcaaagcgctctgaaatgtcccttcacagattctacaaaaacagtttttccaaactgctgtaacaacagaaaggtttaactctatgagctgaatccacatatcacaaagcaacttcacagatag

SEQ ID NO: 361286 - DNA, 571 bp, Homo sapiens
taactcagttagctgaatccacatatcacaaagcagtttcacagagagcttctctctaatttttatcgtggaatattcactttttcactataggcttcactgtgctccaaaatgtcccttcatagtttctacaaaaagagcacttccaaactgctgaattgaaagaaatgtttaagactctgagctgaatcaacatatcacaaagcagtttcccagatagcttctttctagttttttatcgtgtgatattctgttttttactacagtcctcaaaacacttcaaaatgtcccttaacagattctgcaataaaagtgtttacaaacagctgaacccscccccccaaaaagagatttagctatgtgagctcaatccacaaatcacaaaacagtttcacagatagcttctttctagtttttatcgtgggatattgttttttactataggcctcaaagcgctctgaaatgtcccttcacagattctacaaaaacagtttttccaaactgctgtaacaacagaaaggtttaactctatgagctgaatccacatatcacaaagcaacttcacagatag

SEQ ID NO: 361287 - DNA, 395 bp, Homo sapiens
tgggacatttcggagcccactgcggcctattgtgaaaaactgaatatgtttcaataaaaactagaaagaagctacctgtgaaactgctttgtaatgtgtgcattcagctcacaaagttaatctttgttttgattcaacaggttggaaacagtctttttgtagaagcatttcataggccactgaggcctattgtgaaaaaamcaaatatctcactataaaaactaagcagaagctatctgtgaaactgttttgtgatgtttgcattcagctcacagagttaaaacttttttttgatcagcaggttggcaacactctttttgtaggtggtggggcatttcagaggccactgcagcctataatgaaaaatggaacatgctatgataaaaactagtaag

SEQ ID NO: 361288 - DNA, 553 bp, Homo sapiens
taggagcccactgaaaccaaaagtgaaaaacagaatatctcacaataaaaactaagaaaatgctatatttgaaacaactattttgtgatatttatattcagctctgaaatttaaatttttgttttgactcagcactttggaaacacggtttttgtaggatctgcaaaaggacattttgtaggccattaatgcctataggtaaaatcaatagttaaaatcaaatatcccacgatgagaactaaaatgaaaatatctgtgaaactgatttgtgatgtgtgcactcaactcacagagataaacttttctttccattcagcaggttggaaccactctttttaaggcatctgcaaatggacatgtcaaagcccactgagtcctatatcagaaaaccaaatactttgtgataaaaacaagaaataagctatctggaarctgttttgtcatgtttaaatacagctcacagaattaaaactttcttataattcagcaggttggaaacaatttttgtagaatctgtgaagaggcatttcttaggctgcagaagcctatggtg

SEQ ID NO: 361289 - DNA, 423 bp, Homo sapiens
ttaaatatttcttttcattcatcatgttgggaaactctttctgtagaatctaagaagggacatatcagagccaactgaggcctatagtgaaaaatggaatatcccacagtaaaaagtagaagctatctgtgaaacagctttgtgatgtgtgcattcaactatagagttaaacctttcttttggttcagcagattggaaacactcttcttgtagaatcttcaaagggaaattttggagccctctcaggcctctattaaaaaatcgaatatctcgtgwtacaaactagaaagaagatatatgtgaaatggttttgtgatgttttcattcagctctcagacttaaacatttctttttatgcagcagtttggaaacactctttttgtagaatctgggaaggggcatttcagaggccactgaggtcta

SEQ ID NO: 361290 - DNA, 443 bp, Homo sapiens
atcgggggaggagggagagatagcattaggagatayaactaatgttaaatgacaagttaatgggtgcagcacgctaacatgacacatgtatacatatgtaaaaacctgcaagttgtgtacatgtaccctaaaacttaaagtataataaaaaaggagtgttgccaacctgctgaatcaaaatcacggtttaactctttgaggtcaatcaacacataacaaagcagtttcacagatagtttcattctagtttctattgcgggatattaggtttttcaccacaggccttatagccctccaaaatgtcacctcgcaggtttacaaaaagatggtttccagcctgctgaatcaaaagaaatgtttacctttgtgagctgcatccacacgtcaccaagtactttcacagatagcttctttctagttgttatcaccagatattcagtttt

SEQ ID NO: 361291 - DNA, 589 bp, Homo sapiens
gaaaaaccgaatatcctggaataaaacctagaaagagctatctttgaaattgctttgtgatctttgcattcagctcacagaggtaaacttttcctttgattcagcaggttggaaacactatttttgtagaatatacagaggaacattttggagcccactgaggcctatggtgaaaattcaaatatcccatgataaaaactagaaagaagctaactgtgaaactcctttgtgttgtgttaattcagctcacagagttaaacctttattttgattcaacaagttggaaacactctttttatagaatctgcgaagggacgtttcaaagcccactgaggcctatagtgtaaaacagactatcccacagtaacacaacaaagaagttgtctgagaaactgctttgtgatatgtggattccattcacagaggtaaacctttctttwaaatcagtagattagaaacattctttttgtagaatctgtgaagagacttttaggagcccacttgggcccatagtgatgaatcaaataccccaagataaaaagtagaaagaaggtatctgtgaaacttttgtgatgtttgcattcagccc

SEQ ID NO: 361292 - DNA, 588 bp, Homo sapiens
aatgaatgagtgtacttgggtcgtggtgcaggaaggaaggggaagcatgatcaagcctggtgcgtgttattcacacaaaactgcagcacctggtttctgccttcctcacatccctaagtgctaaggacgtgatttgtcacaatggttctgactgctggattagggaccaagagtctgattgtagactatggtacatcttgaggggctaagagtatgttggggagaggggggagtcccaccctcttatattttccttgacagtccttctctagcttctgtggccctgcctaacgaatgtatgtatccccatgacaaacaggcaccagtgagagtttcttgttaagccactgttttcaattaagactcccagtggatttgctggatgtgagcagccaagggagcccattccataaattactggcatcagggggcaattagatactgccccagttsgattctgtgctaggggcctgagcagccaattgacaacattaatgtcccattaaagagatgaatgcctggtgtctgggctctccctgtttatcagcctgctgttgggtgactgggtacttctggcagtgacaaatg

SEQ ID NO: 361293 - DNA, 609 bp, Homo sapiens
atttggtcaaaatgctcattcattcgaggaatcttttttgagcacctattagatgccaggctctgttttggactcaggggtaccagtggtgaataaaacaggcaaagttccatccacattaagcatacattctacctgaggttggtagacaataatgaagtaaatatataatgtcaagcagcatttccatctgatacttgtatattgattaaatatgagataaacacatattttaaaaacgctttgttgagatataattcatataccatagaattcatccattgaaaatagacaaatcagtgggttttggtatattgagttgtgtaattatcaccacagtcaattttataacattttcatcactccaaaaagaaactcagcaatctttagttatcaccctcctataccccataccctacctccagtcctagacaaccacaaatctactttatatatagatttgtctattctggayagagaaaatatcatcttttgagagtgaggaggcatgggaggagactttactgtcctcacctcccagatgaggcattttggatttagttttccttggagctccctctaagatccagacttttaatcgcttcacag

SEQ ID NO: 361294 - DNA, 609 bp, Homo sapiens
atttggtcaaaatgctcattcattcgaggaatcttttttgagcacctattagatgccaggctctgttttggactcaggggtaccagtggtgaataaaacaggcaaagttccatccacattaagcatacattctacctgaggttggtagacaataatgaagtaaatatataatgtcaagcagcatttccatctgatacttgtatattgattaaatatgagataaacacatattttaaaaacgctttgttgagatataattcatataccatagaattcatccattgaaaatagacaaatcagtgggttttggtatattgagttgtgtaattatcaccacagtcaattttataacattttcatcactccaaaaagaaactcagcaatctttagttatcaccctcctataccccataccctacctccagtcctagacaaccacaaatctactttatatatagatttgtctattctggacagagaaaatatcatcttttgagagtgaggaggcatgggaggagactttactgtcctcacctcccagatgaggcattttggatttagttttccttggagctccckctaagatccagacttttaatcgcttcacag

SEQ ID NO: 361295 - DNA, 585 bp, Homo sapiens
ttttacctatttacatggcctttgtttttcattttcttttaatctaatgcatttttttctaaagtaaaagactcacagaaataaaggaaaataggttccaaatctgcttccagctctacagttccagttctaagcttaccatcaaaatatgtaaataggacaaatctgcataccagttggagataaagagtcagtgtctttccatgttgaaaaaccagagggacccatgcaagattcaatcttcaggtcgtatcatgtattagtttccaagggctgccataataaaggatcacaaactgggtgccttacaacaccagaaatgtattccttcacagtctggaggctgtgagggagaatttgttctatgcttctctyctggtttctggtggttgtcggcaatccttgatttccttggcttgtagatgcatcactctctgccttaatggaggtgatggtattctttctgtgtgtctgtctccaaattttcctctttttataagacaccagtaattagattagagccccttctaatcaattacaaactctcttaatttgattataactacaaagaccttaagataaagt

SEQ ID NO: 361296 - DNA, 537 bp, Homo sapiens
aagctataaaatgaagcaaatgtatattttagagttgaaatgtcagtarcaaaaataagaaatttactagatgttctcaatagcaaatttgagatggctgaagaaagaatcagtgtatttgaacattgttcaatataaattatctaatctcaagggagaaaaaggattgaaagaaatgaaaacagcttcagagccatataggacagtatcaagtatggtaacatacatgaaacaggagtagtagaaaaagaagtgaaagagtaaggggatggatcaaatatttgaagaaaaaatggccaaaaacttcacatatttgattatttaaaaactttcttaaaattaatctacacatccaagaactttaacaaaacctgaataggacaaacacaaagagacacccataatcaaacttctgaaagccaaaagacacatcataatcaaacttctggaagccaaaaagaaagactaaattataaaagtagcaattgaaaggagcaaaaaccaaccaaccaaacaaacaaaaacaaaagctcatcc

SEQ ID NO: 361297 - DNA, 537 bp, Homo sapiens
aagctataaaatgaagcaaatgtatattttagagttgaaatgtcagtagcaaaaataagaaatttactagatgttctcaatagcaaatttgagatggctgaagaaagaatyagtgtatttgaacattgttcaatataaattatctaatctcaagggagaaaaaggattgaaagaaatgaaaacagcttcagagccatataggacagtatcaagtatggtaacatacatgaaacaggagtagtagaaaaagaagtgaaagagtaaggggatggatcaaatatttgaagaaaaaatggccaaaaacttcacatatttgattatttaaaaactttcttaaaattaatctacacatccaagaactttaacaaaacctgaataggacaaacacaaagagacacccataatcaaacttctgaaagccaaaagacacatcataatcaaacttctggaagccaaaaagaaagactaaattataaaagtagcaattgaaaggagcaaaaaccaaccaaccaaacaaacaaaaacaaaagctcatcc

SEQ ID NO: 361298 - DNA, 537 bp, Homo sapiens
aagctataaaatgaagcaaatgtatattttagagttgaaatgtcagtagcaaaaataagaaatttactagatgttctcaatagcaaatttgagatggctgaagaaagaatcagtgtatttgaacattgttcaatataaattatctaatctyaagggagaaaaaggattgaaagaaatgaaaacagcttcagagccatataggacagtatcaagtatggtaacatacatgaaacaggagtagtagaaaaagaagtgaaagagtaaggggatggatcaaatatttgaagaaaaaatggccaaaaacttcacatatttgattatttaaaaactttcttaaaattaatctacacatccaagaactttaacaaaacctgaataggacaaacacaaagagacacccataatcaaacttctgaaagccaaaagacacatcataatcaaacttctggaagccaaaaagaaagactaaattataaaagtagcaattgaaaggagcaaaaaccaaccaaccaaacaaacaaaaacaaaagctcatcc

SEQ ID NO: 361299 - DNA, 604 bp, Homo sapiens
ggcaaggctcaccagtggctcttaatatcatgtaaccagaattatgtgcctctcatataactatgcatcatctatcacgtagtcttgccaaaaaaaaaaaaaaagaaaaaagaaaacctaaatgtkatcaagtctctgtcaagaatataagataacttagagtttataagtctaactataaggtgaaaacatagagatactatgggactataagagcaaaatccaggctggacaaatcatcaaatttattcaacaaatatatcgcaaaggaaaaataacaaatgtaatatagctttcagattaaaagggaatttccaaataatcacaatatatctagtttatctgcatcctaatttaaaaaaaaaaacaaaatataacatcaggctgatgggatattgaataatattaaatactaatttttttttagttttggtggtagattatggcttttttttaatgacatctttatcttttaaagattcatactaaaataaacaagaagtcttgcattttctccaaagtaatcttggaaggcagcagttgataagggtttaaataaaatgagattgcctatgagttgataattgttgaagttgtatgttca

SEQ ID NO: 361300 - DNA, 568 bp, Homo sapiens
cctgtgaccctaatctcattactagaatatacgtaccacctagcaagaccaaagacaaatgaaaaggccarttgtaatcctgagatgggaattcttttcaggtgaggtggagataattttcgtcaggttgtcatcatgtatacaccaatctctcctatgcaaggactcgtggtgaatatggacgatgctaagacagaaggaaatgcttttgccattcaggagattaaatttagatgggagaagagaggttttcatgtaaataaacaagggcgactgtcttcctggacgtccagatcaccccctataccaccactgcaaatacttgccatgataattgccatacttattcagtattcctcagctaatgatttcttgcagaatttagatgtagttactgcttgcctagtccagtgctccccaaacctttattatcaccccttcccaacttcccatgagtttcaggtcactggggatattgggtcaggtagtactgacagtgattttccagggaaggcctgggaactcaaagtcctttatagaaggtcaggaagagacataactgctctgg

SEQ ID NO: 361301 - DNA, 523 bp, Homo sapiens
ccatatttgccctgccagagagaatataaatcttaagacattttgtgactggctttccaagtgctcaaatcaactgtagaaaatagagaaattcttgttacctaagggatggaattcaatagcagtacttaagatagawaaaaataaggatgacaaacctatctctaccaatgacaagattcttttttttgaaagccagagggttaagggatctaatgctataactatgggaaaatgagtattataaaatccaggtctcttacatataggcacataatattacaaaatctcagaaaagctgcaatacaacttttgctgtcactagtggcttagcattgactgaagtcattgctccctgggagctaaattaccccagagttgacaagccagtctagtctcagtagaaaacagaaggcacattcaaaagtgataattgaatagagtttaatataggggctatatataaagatgtagtagggcttaggggagaccaggggtagcatagttcttaggggctagcaac

SEQ ID NO: 361302 - DNA, 523 bp, Homo sapiens
ccatatttgccctgccagagagaatataaatcttaagacattttgtgactggctttccaagtgctcaaatcaactgtagaaaatagagaaattcttgttacctaagggatggaattcaatagcagtacttaagatagataaaaataaggatgacaaacctatctctaccaatgacaagattcttttttttgaaagccagagggttaarggatctaatgctataactatgggaaaatgagtattataaaatccaggtctcttacatataggcacataatattacaaaatctcagaaaagctgcaatacaacttttgctgtcactagtggcttagcattgactgaagtcattgctccctgggagctaaattaccccagagttgacaagccagtctagtctcagtagaaaacagaaggcacattcaaaagtgataattgaatagagtttaatataggggctatatataaagatgtagtagggcttaggggagaccaggggtagcatagttcttaggggctagcaac

SEQ ID NO: 361303 - DNA, 261 bp, Homo sapiens
caaccaggtgcatgtccgaggcacagaggacggtatttataacccatagtaacattaaatgcaatgccytcttctcctggttgagcagggcaacggtcatctctagctccaggcatccacacacgatcgttagtatagatttcctcaggagcatccatccaggtgaaagttcgaataagtggaggaaaaggcacataagcccaataagaataattttgtgtagcaggtaaatcagtttgaggggaaactggtgagacagaa

SEQ ID NO: 361304 - DNA, 261 bp, Homo sapiens
caaccaggtgcatgtccgaggcacagaggacggtatttataacccatagtaacattaaatgcaatgccctcttctcctggttgagcagggcaacggtcatctctagctccaggcatccacacacgatcgttagtatagatttcctcaggagcatccatccaggtgaaagttygaataagtggaggaaaaggcacataagcccaataagaataattttgtgtagcaggtaaatcagtttgaggggaaactggtgagacagaa

SEQ ID NO: 361305 - DNA, 585 bp, Homo sapiens
tagctctggatactatgagtacatgaaagtgataaaactaatgtgtaaaaaatatatacttcaaactttttgttaactttacaaatattactctatttgaagtttcctgtctttttaaagaaaaaaaactaggtgtaaataaatgtgactttaaaaagacttagaggttgtactcttgttaactatgaataaggtttcctttagttcaatgtgccaaattgctcgcgacacagtgaaacattcagctttgtcacattattaaataaccaattagttacaaaaatttccactattgtcaagagacacacaggggttaaaggagcctgcatatcatccagtttactccgggaatcatttactttacttgtcagtcttcactactctattcatcagtatcttagtatttactttacttatcaacagcagtatctatctattgcctaatgacaattattattatagggtctatttttttccttttatttttgttgacaygtgataattgtacacatatatgggatacagggggacattttgatacatgtatacaatgtgttatgatcaaaccagggtaataggcatatc

SEQ ID NO: 361306 - DNA, 539 bp, Homo sapiens
tttgttctgtcatgcttcctcacttttgccctgctattttctatgttcaaaatgtctttttctcccttatttgcctgaccaatttatttatctttaaagactcagctctctgctttagtaccacttcccaacttttccccttctttgtgtttccttgttactgtattcatatctctatcattaacattcatcatcctgcgtataattattgatttcttcatctgtctcctccaactaaactgtgagctccttattaaggtaggatcattacattttcttgctatattctgagatccaaagtagtatctgggctgcaggaggcatccaraatctgtttttgatgggtgaatgaatgaatgcatcaactaatgatacaattgatcaatgaagagtgactaagtaagactagtagctagtctctggccatcttctgctctatataagggatcagagtaggaaagagactgaaattagagctcatagcaattttagggagggaattttaagttcagaacaccatagcttttctttcaatagct

SEQ ID NO: 361307 - DNA, 529 bp, Homo sapiens
tggctgattctccctagaggggaaaaaatactccttttttctattgcaaacaacatatggtctaatgtgtgaactaataactagattcattagtttacacattcctgataagggaaatttaactttcataattaagactctgcacaacaattgtgttacattgttatccagagataarttcttgccaaacattccctgttctcaagcagtttcaaagagagtttccaaaggtccttttcccttgcaagtcttaatttccattgttttatgaatttaatgttgtcattctgcagagcaattctcaagaaagctgtgaaaaaaatttaaaattaggtatttttgatacatttcagatagtcttgattatcaaagtcagcataagtaaaaagattcctgttaaaaatttaaaggcaacaatatgcttgtaggagaacagtctgtaaaaagaaatgcttcagctttagtggagtgaaggaaggaccttcttgaaaaagaagggttaatggagtgtgtgaataagatttttttt

SEQ ID NO: 361308 - DNA, 526 bp, Homo sapiens
gttcttgccaaacattccctgttctcaagcagtttcaaagagagtttccaaaggtccttttcccttgcaagtcttaatttccattgttttatgaatttaatgttgtcattctgcagagcaattctcaagaaagctgtgaaaaaaatttaaaattaggtatttttgatacatttcagatagtcttgattatcaaagtcagcataartaaaaagattcctgttaaaaatttaaaggcaacaatatgcttgtaggagaacagtctgtaaaaagaaatgcttcagctttagtggagtgaaggaaggaccttcttgaaaaagaagggttaatggagtgtgtgaataagattttttttgtcagttctaaaaatggattcttccaaatcacatcttaagttcaagactgtttttgagagagaaagatgcacaaacaagaatatatgtatattgttctattctatttcttagaagaaacataataaactacagtatgagtgattcatactagatgttaggagaaatgtcatgat

SEQ ID NO: 361309 - DNA, 562 bp, Homo sapiens
ttaaaagaaggacaaaagaaaagagaaaaggaacaaagacagatgtcaaaaagatacagtagccaacatgatagagcttccagtggtcaaatctgaagaaatttgagcaataaaataaacaactatagcactgaattaaaatccagtgaatttaaaacaatccatgaatccatactaataaataaagaactgaataagaaataaatggaggataagggacaaatctttcatacmcaataattccaagtaatatacctctagaaagcaaagcttaattccttttctcttgaatgtggcctggagttaatttcgcttccaaagcatagagtatgaaaagaaaaaatggtaactttagagtgaagagacatgacagaccccaccttaagccagtgatcaatgttatcattactaatgataaattatgttgataatatgtgcccattatgatatgacgtaataaaaaaggtacttcacctctctgttatgtttccccaaaactcataaccccaatttaatcatgaactaacatcagacaaacctaaattgaggagcattctacaaa

SEQ ID NO: 361310 - DNA, 577 bp, Homo sapiens
acttttaaaagaaggacaaaagaaaagagaaaaggaacaaagacagatgtcaaaaagatacagtagccaacatgatagagcttccagtggtcaaatctgaagaaatttgagcaataaaataaacaactatagcactgaattaaaatccagtgaatttaaaacaatccatgaatccatactaataaataaagaactgaataagaaataaatggaggataagggacaaatctttcatacccaataattccaagtaatatacctctagaaagcaaagcttaattccttttctcttgaatgtggcctggagttaatttcgcttccaaagcatagagtatgaaaagaaaaaatggtaactttagagtgaagagacatgacagaccccaccttaagccagtgatcaatgttatcattactaatgataaattatgttgataatatgtgcccattatgatatgaygtaataaaaaaggtacttcacctctctgttatgtttccccaaaactcataaccccaatttaatcatgaactaacatcagacaaacctaaattgaggagcattctacaaaatatctgacca

SEQ ID NO: 361311 - DNA, 506 bp, Homo sapiens
gttttctgacctccaaaagactgcactagttccaaagcaaggkttctcaaccaggatgaaatgactgaaatgacagatgtagaattcagggcatagagaggaatgaagatcatgaaaattcaggagaaagttgaaacccaatccaaggattctgaggaatacaataaaatgaaataggaggtgaaagataaagtacacattgtaagaatgaaccaaacttattttagagagctgaaaaatctcactttgagaatttcagaatacaatcacaagtattaacttcagaattcatcaagctaaggaaagtatctcagagctcaaagactggctctcccaaataactcaatcagaaaagaatttaaaaataaagaaagaaaaatgagcaaaacctcaaagaaatgtgagattatataaagagagcaaatctatgatgcattgtcatctctgaaagagtgaaagagaaaggaagcaacttggaaaatgtatttcaggatatggttcatgaa

SEQ ID NO: 361312 - DNA, 602 bp, Homo sapiens
ttgttgagaagttttgagaatgcagatagacaatagttttttcaagaaaattaaagattagctatcaatcagataatcattgttaacatatttcagcataagcataggaatactagacttacttaatcatgctgtattttaagttattacctttttaaagtctgattcaagtcttttggagaagagcggtataaaagaaggtataaataaatacattgatataaaaatttaaaaagacccatttttgtccttgctcttattttgtcttggttagatcttttcaatttgtaggttgaacaaattctatttctgtgtcttcatataggcattgagaatcttaacatctaggaatatacctgtagtcaccaatttatctttaacactgaggatatagaacatattttgcccaatgcataataatacagtgaccgatcaatgattccttaattaataaggaattgagcataagcattctatttctttttgtcttaattggaacttggaacaaatttaccttttccctcttaattgaagaatggcawcattcattaggtaactattgaagtaaaagttttactcaggggcctctttagagttctgct

SEQ ID NO: 361313 - DNA, 590 bp, Homo sapiens
atttcataaagaaaaggggcttgattcaacaagaagacctaactcttctaaatatatatgcacataatgcaggagcaccaagattcatgaaacaagctcttagagacttaggaggagacttaaacaaccacacaataattctgggagactttaacacctcactgacagtattagatcactgaggcaggaaactaagaaagatatacaggacctgaatttgacacttgacaaaatggacctaatagacatctgcacaactctccaccccaaaacaacagaatatacattcttatccctgctacatggcacatattctgaaaacaactgcacaatcaattctcagcaaaaaaaaaaaaaaaaaaaaaaaagggtcttggtacccaccctttcaaaccacagcaaawtaattaaaagtaaaattaaataataaaaaattggctcaaaatcatacaatgacatggaaaattaaacaagctactcttgtttgactttagagcaaacatttaaattaaaacagaaatccagaaattatttgaaagtacagaaatacaaaaactctcagagattattacaaacatttctatgcacac

SEQ ID NO: 361314 - DNA, 590 bp, Homo sapiens
atttcataaagaaaaggggcttgattcaacaagaagacctaactcttctaaatatatatgcacataatgcaggagcaccaagattcatgaaacaagctcttagagacttaggaggagacttaaacaaccacacaataattctgggagactttaacacctcactgacagtattagatcactgaggcaggaaactaagaaagatatacaggacctgaatttgacacttgacaaaatggacctaatagacatctgcacaactctccaccccaaaacaacagaatatacattcttatccctgctacatggcacatattctgaaaacaactgcacaatcaattctcagcaaaaaaaaaaaaaaaaaaaaaaaagggtcttggtacccaccctttcaaaccacagcaaattaawtaaaagtaaaattaaataataaaaaattggctcaaaatcatacaatgacatggaaaattaaacaagctactcttgtttgactttagagcaaacatttaaattaaaacagaaatccagaaattatttgaaagtacagaaatacaaaaactctcagagattattacaaacatttctatgcacac

SEQ ID NO: 361315 - DNA, 590 bp, Homo sapiens
atttcataaagaaaaggggcttgattcaacaagaagacctaactcttctaaatatatatgcacataatgcaggagcaccaagattcatgaaacaagctcttagagacttaggaggagacttaaacaaccacacaataattctgggagactttaacacctcactgacagtattagatcactgaggcaggaaactaagaaagatatacaggacctgaatttgacacttgacaaaatggacctaatagacatctgcacaactctccaccccaaaacaacagaatatacattcttatccctgctacatggcacatattctgaaaacaactgcacaatcaattctcagcaaaaaaaaaaaaaaaaaaaaaaaagggtcttggtacccaccctttcaaaccacagcaaattaattaaaagtaaaawtaaataataaaaaattggctcaaaatcatacaatgacatggaaaattaaacaagctactcttgtttgactttagagcaaacatttaaattaaaacagaaatccagaaattatttgaaagtacagaaatacaaaaactctcagagattattacaaacatttctatgcacac

SEQ ID NO: 361316 - DNA, 590 bp, Homo sapiens
atttcataaagaaaaggggcttgattcaacaagaagacctaactcttctaaatatatatgcacataatgcaggagcaccaagattcatgaaacaagctcttagagacttaggaggagacttaaacaaccacacaataattctgggagactttaacacctcactgacagtattagatcactgaggcaggaaactaagaaagatatacaggacctgaatttgacacttgacaaaatggacctaatagacatctgcacaactctccaccccaaaacaacagaatatacattcttatccctgctacatggcacatattctgaaaacaactgcacaatcaattctcagcaaaaaaaaaaaaaaaaaaaaaaaagggtcttggtacccaccctttcaaaccacagcaaattaattaaaagtaaaattaaataataaaaaattggctcaaaatcatacaatgacatggaaaattaaacaagctactcttgtttgactttagagcaaacatttaaattaaracagaaatccagaaattatttgaaagtacagaaatacaaaaactctcagagattattacaaacatttctatgcacac

SEQ ID NO: 361317 - DNA, 482 bp, Homo sapiens
attagggcaaaattaatgccgtgtctttaatcatgtaaatgcaagcaaaaatcccaaatgtaaaatcccaaggcaaacatagcagaacccattgtaccagcagagagggaaagaataccatatttattaaatttttaaaaaaatatttgctaggacattgtattgcagtagcacagagagtcatgactttacatgttctgcctttctatatgattaaaataccaattttgacactgcattaatttcaaccaaaattcactcattttatgaaatattctttaaaaatgaagtattattctaagacttaaaatgtgaaaaagaattayttatcagtgttattggctcacataacatttataaaaaatgaagagacagcttgaaatgattctgaggtcacacagtagagactttaagctgtccagccccaattcacacttggcacctggcaaacatttaaaccacacatctgtgaaacacttagc

SEQ ID NO: 361318 - DNA, 523 bp, Homo sapiens
tacttatcagtgttattggctcacataacatttataaaaaatgaagagacagcttgaaatgattctgaggtcacacagtagagactttaagctgtccagccccaattcacacttggcacctggcaaacatttaaaccacacatctgtgaaacacttagccattctttgagtaataggaatgcctcatacagaatctactctggtagaggaaccagctgggmagatgtgccattcatcacaaagtggaggcccagcattttcatggggtgtggaagaggcaccagcagtattttctagcctcaattgtctctttgcctacagctttctatcatttacttaacactcaatttcctttcacctttcaccatcaccatcattgttttcagttcttttagctcagaaagtgtgggcctaatattaatatctggattggtcagttccagaagttaaaggtccttgccagccttaatctaaagtaaaacacacacacccacacacacatgcatacacacagatagagtga

SEQ ID NO: 361319 - DNA, 510 bp, Homo sapiens
agccacttttttagtttctatttttccatatagttcaaatatgcagtgccagaggagtggtgtgcacagagactgaacttcaagtcagaaggcagagggagaggattctttggagaacaaaaaaagagaatgagagatagcaagagggggaagcaattaagtatatttgacaatagaccccattgtcagcatatttaattgtcttcacgcatctttttgtacctaggcacctcagcctcctaacatcaccacctggccaagytgcagcctcctatccagcattctcctatcttgctccctaacaccaggtactgttgatttcagtccaaagtcagcccttcatcttcagtcacactttcacctatgctcagaaatattttttttttgcctcctgtcaccatcctcccactaactagtccaaaattccctgttccactttccttagggctccttcctcactgattttcacaaataacccatcttcccttctatttatacataaggttggag

SEQ ID NO: 361320 - DNA, 599 bp, Homo sapiens
ttctaaatgtgattaaaaatctagatgcrataagattaaaagtctataaatttaattacataaaattatacttaaaacactatagacaaaaaagcaaatgacaatctgttaaaaaatcatttccaacatatatctcagatcagaataggtaggtagatagattataaagttgcaaatttggaaaattctggtgtctggtctgatatgtaaaaagtttggaagccatcactctatcctcacaaggtaaagctgaacaaacaaaaaaacagtaatgcttaattgatctatcagagaactgaggtcacagggcaaaccactgccctgaaaactggagagacaaaatactgagaaccacagcttattgaaattagaaaccactgctggagcctattaaaaataactaaattaaatggtatttggctaattgacagagactgagcatggaactagcttgagagataagaactccaagagggcccagaaccatgaggctctcagggtaagtatcagagaaaaatttatcatatctgttggggggggagaggataagtaaccattctgaaataagtccagaatgctctgttcttaacaaaggcctg

SEQ ID NO: 361321 - DNA, 599 bp, Homo sapiens
taatgttcaccaaatgccttcatatgtcagccactatgctaggtaccacagattcaaaggtgagctagtctcatggagctaatagtgtagagaggtatgtaastattcaccaaaacacagaatgcataatcacagaaaggaataaggatcccaaaggaaagatacactcttccaggagagcctgttacattgaatctgcctgtgccagtctatgtgatgtcaagcttcataaggaagttagagccctaagagatttataggcacaattggacaagccagacaaaactctccatcaaaatcttgtctgaaggcccttgtattctgtcacatcatggagcactctccaaacagaatagttaattagtgcttcgtgaagacaggtgaacttatgtgctaggaagcagccaacatcctcccagcctctgtgcaagcctattaattaattgtattgtcactatatcaagtcttgcttgacagctgccaagactcggtgaactataggaacaaagtaacatgacagcttagaagcactaaggaagaagtcccaagatagactgatctcatacgaacacaatttctacacctctcttcatttcagg

SEQ ID NO: 361322 - DNA, 379 bp, Homo sapiens
gacagggcacttactataaatggagcttgtaggactgaaagttgctctgggtgagtcagcaggtgaatataaaaacctaggtcattactgtacactactatgactctataaacactgtccacttaagctacactaaatttattttaaaaaattctttcttcaataataaattaaccttagtttactgtaaccrttttataaattttcaatattttaaaacttccgactcttttataataaaacttagcttaaaacacaaacattgcatatttgtacaaagttatttttctttatattcttatctgtaagcttttctctattgttaaggttttctgatttttaattttgctttttaagtgactggcaacgcagtaagtgt

SEQ ID NO: 361323 - DNA, 605 bp, Homo sapiens
gactcctgggatccacttgagttacgctttcaagtgctatggcctaaaaactctcttcatgcaataagatggtaatcagaggactcaactcactcatttcccatctctcattatgactcttctttattgcccaatgtaaaatattttaaaaaccatttattaatattttgttcaacgttttagtygttttacaggaaggcaaatctcactcctgttattccatcttggcaattagcagaagttaattataacaccctccaaactaaccatactgttctagtttattctaataaaaagaaaataacaataacagtagcaacaacaaaatatgtattgagacctaaattatgttgggagaatgcaggatatttgtgacaagaatatgaagaactcataggctcatctttaaaatgatcagaatttattcctttctaaatgtgtctttgaatggatgaatttctacaaaacagtataaggaaaaccatctttctaaaacccatctaggattatgctatcttctaaaaacctataatgcccccacaaactatttatcatggtatacaatgtcttctgtgagctgtgtttctaagtaaacatcacagctt

SEQ ID NO: 361324 - DNA, 527 bp, Homo sapiens
tggtgatgaaaagaatatgtattctgaacccattgaatgaaatgttttataaattgtaaatttatattataaatttataaatgaaatgttttataaatgtactgttaggtacatttggtctaaaatgcattgtaaatccaatgtttttttgttgtcatcaacgttattgttatataataaccttgtctcttttacagtttttgtcttaaaggctgttttatcttatataagcatagctactcctgcttgcttttggttttcatttgtgtggaatacctttttttttttttgcatccttttattttatgtgtctttacatgtaaagttttgtgttascagcatatagttgggttatgtttttttcatccattcagctactctatgctctttaaggggggaatttgatccatttacattcaatgttattattgatatatgagaacttactcctgtcattttgttaactgttttctggttgtgttgtatatcctgatttaaaaatttttatttcttttttcattggtgct

SEQ ID NO: 361325 - DNA, 535 bp, Homo sapiens
acgtggttatctagcaaagcttcattcaggaggtgaggcagactgcgcctctattcagggctcctagatatgtctgtggcttctactcctatcccttttcccattgtcactaaccctatgtgaggaataagtatttgttccttttcagatacccacattactgtctttttctaatgtttttctgacttccatttcttttcctacctaaagaatttttattccctaaaggcgaggaggggagaggaaggcttctactgtcatcattctttacaaatkcaaagttttgagaataaatttttacttttgatatttttgtgattcaaagttcctttatcctaatttatttctccatcatacttttaaaagccatattgaaattagtacaaacttattttttggttttaaaatttttgctataacaattctgagcaaagggcagagagtatccattaacttcattgttgcctgaattgagggatgggcggcagtgccaagggtgagaacacaaagaagaaagaaatattaatgtcagcta

SEQ ID NO: 361326 - DNA, 631 bp, Homo sapiens
cccagctaattttttgtattttagtagagacggggttttaccatgttgcccaggctgatctcctgagctcaggcaatccacctgcctcggtctcccaaagtgctaggattacaggcttgagccaccgcgcctggcctagactcacatcttttatacagtcactgcccaattcagttctttatggtttatttttgcttgtttcactataaaaaactagacagttgcataaattcaaccacttacttgttgaatccatttagtcaatgcaayctcaacattttcatatttattttttgccttatgcaatatttttcaacattttcatgagtttttggtcagcactatattaactttcaacagcttgcccttctaagtcataaatagtgatgctgctgcaattatttttcactaacatgcctcagatttctgtagtgattctacatttgatattattcacaatgtaaaatgcttctatttattcatttcacttttacccacaggattattttaaagttatgtttgtcattttcacacttcaatcaaacataaagacaaaaacatcaaaaacatgtacatagtgttttacgtatgtgtatatttacacacatatatgtatgtgtgtttatatgta

SEQ ID NO: 361327 - DNA, 631 bp, Homo sapiens
cccagctaattttttgtattttagtagagacggggttttaccatgttgcccaggctgatctcctgagctcaggcaatccacctgcctcggtctcccaaagtgctaggattacaggcttgagccaccgcgcctggcctagactcacatcttttatacagtcactgcccaattcagttctttatggtttatttttgcttgtttcactataaaaaactagacagttgcataaattcaaccacttacttgttgaatccatttagtcaatgcaacctcaacattttcatatttattttttgccttatgcaatatttttsaacattttcatgagtttttggtcagcactatattaactttcaacagcttgcccttctaagtcataaatagtgatgctgctgcaattatttttcactaacatgcctcagatttctgtagtgattctacatttgatattattcacaatgtaaaatgcttctatttattcatttcacttttacccacaggattattttaaagttatgtttgtcattttcacacttcaatcaaacataaagacaaaaacatcaaaaacatgtacatagtgttttacgtatgtgtatatttacacacatatatgtatgtgtgtttatatgta

SEQ ID NO: 361328 - DNA, 631 bp, Homo sapiens
cccagctaattttttgtattttagtagagacggggttttaccatgttgcccaggctgatctcctgagctcaggcaatccacctgcctcggtctcccaaagtgctaggattacaggcttgagccaccgcgcctggcctagactcacatcttttatacagtcactgcccaattcagttctttatggtttatttttgcttgtttcactataaaaaactagacagttgcataaattcaaccacttacttgttgaatccatttagtcaatgcaacctcaacattttcatatttattttttgccttatgcaatatttttcaacattttcatgagtttttggtcagcactatattaactttcaacagcttgcccttmtaagtcataaatagtgatgctgctgcaattatttttcactaacatgcctcagatttctgtagtgattctacatttgatattattcacaatgtaaaatgcttctatttattcatttcacttttacccacaggattattttaaagttatgtttgtcattttcacacttcaatcaaacataaagacaaaaacatcaaaaacatgtacatagtgttttacgtatgtgtatatttacacacatatatgtatgtgtgtttatatgta

SEQ ID NO: 361329 - DNA, 540 bp, Homo sapiens
gagcagctttctgacttcataaatttctcacccaccaagaaggggactgtgctaatcccttgagtgtcgggtttctcctctcccacatcctattttcatttgctccatgttctcatctccatcagcacaggtcactgagggtagccctgtaatactttctagaaacacctgtaccccctggggaagmaatcatgcctgccaggcaggagaggctgtccctcttttgaacctccccatgatgtcacaggtcaggatcacctgctgtccgtgggctccaggccctgcctctgggtctgagactgagtttctggtgctgttgctctgagttgtttgttgtaatctgagaagaggagaagtataggggccttcctgacatgaggagagtccaatctcagctctgccttttattaggtctgtcactctaggcaactacttaacctcattgggtctcaggctttctgtggatcagatgttgaagtcctgccttacatcaaggctgtaatatttgaatgagtttgatgcctgaatcttgtaactgtt

SEQ ID NO: 361330 - DNA, 540 bp, Homo sapiens
gagcagctttctgacttcataaatttctcacccaccaagaaggggactgtgctaatcccttgagtgtcgggtttctcctctcccacatcctattttcatttgctccatgttctcatctccatcagcacaggtcactgagggtagccctgtaatactttctagaaacacctgtaccccctggggaagcartcatgcctgccaggcaggagaggctgtccctcttttgaacctccccatgatgtcacaggtcaggatcacctgctgtccgtgggctccaggccctgcctctgggtctgagactgagtttctggtgctgttgctctgagttgtttgttgtaatctgagaagaggagaagtataggggccttcctgacatgaggagagtccaatctcagctctgccttttattaggtctgtcactctaggcaactacttaacctcattgggtctcaggctttctgtggatcagatgttgaagtcctgccttacatcaaggctgtaatatttgaatgagtttgatgcctgaatcttgtaactgtt

SEQ ID NO: 361331 - DNA, 540 bp, Homo sapiens
gagcagctttctgacttcataaatttctcacccaccaagaaggggactgtgctaatcccttgagtgtcgggtttctcctctcccacatcctattttcatttgctccatgttctcatctccatcagcacaggtcactgagggtagccctgtaatactttctagaaacacctgtaccccctggggaagcaatcatgcctgccaggcaggagaggctgtccctcttttgaacctccccatgatgtcacaggtcaggatcacctgctgtccgtgggctccaggccctgcctctgggtctgagactgagtttctggtgctgttgctctgagttgtttgttgtaatctgagaagaggagaagtataggggccttcctgacatgaggagagtccaatctcagctctgccttttattaggtctgtcactctaggcaactacttaacctcattgggtctcaggctttctgtggatcagatgttgaagtcctgccttacatcaaggctgtaatatttgaatgastttgatgcctgaatcttgtaactgtt

SEQ ID NO: 361332 - DNA, 573 bp, Homo sapiens
tgacctcgtgatctgacacctcgccctccgaaagtgctgggactacaagcgtgagcctccacatccagctgacagatgttatttctatcatcatcattataaatatgtttgaagacaaacagactttctaaatccttatgtattattggtgggaatgtatgattttacaaatatctggaaatatgacaatttcttaaaaagtttaacataaatttgccatatgacccagcaatttcactccttggaatctacctgagacataaaaacatatgtcctcacaaagatatgtgttcaagggttcagaacagccttagccatagcaggcccaaactgaaaacaatacaaatatccttcaattagtaaatggattaacaaaatgatactacatccatgcaaggcaatatcattcaacaataaaagggaacaaaaacagacttatctgacaggggagataccataaacatgaggwtagttttcccaaggcaagtttcaacccatgcactctggatgatgagacattacttaatggggacaatgcatgtgatttgggtggtggatactgtagaaacacta

SEQ ID NO: 361333 - DNA, 568 bp, Homo sapiens
tgggtgggcatcattcagtccattgaggacccaaatagaacaaagaggtggaggaggggtgaattctctttctctttgagctgggacatacatctacttctacccctggacaccagagctccttcttcccctcctcctgccatgactccagcccatgtcctggttytcaggcctttggcctcagactgggagttgtaccattggctcccttgatcctcaacccttctgactctcactgaattacaccacctgctttcctgggtctcctacttgcagatggcatattgtggcacttcgtggcgtccataattgagcgagtcaatcaccatacatatctttttgtctctgtttctctggagaatcctgactaaaacattgaatatatttaaacatatgtatagtggctactttaaatatttttctgttaaatttgttctctcaagcaattttttctgccttctatttttctggtgtattggtcatactttcttgtttctttgcatagctcataatttttattgaaaaatgaacattttaggaactatattatagcaactctgggtactac

SEQ ID NO: 361334 - DNA, 568 bp, Homo sapiens
tgggtgggcatcattcagtccattgaggacccaaatagaacaaagaggtggaggaggggtgaattctctttctctttgagctgggacatacatctacttctacccctggacaccagagctccttcttcccctcctcctgccatgactccagcccatgtcctggttttcaggcctttggcctcagactgggagttgtaccattggctcccttgatcctcaacccttctgactctcactgaattacaccacctgctttcctgggtctcctacttgcagatggcatattgtggcacttcgtggcgtccataattgagcgagtcaatcaccatacatatctttttgtctctgtttctctggagaatcctgactaaaacattgaatatatttaaacatatgtatagtggctactttaaatatttttctgttaaatttgttctctcaagcaattttttctgccttctatttttctggtgtrttggtcatactttcttgtttctttgcatagctcataatttttattgaaaaatgaacattttaggaactatattatagcaactctgggtactac

SEQ ID NO: 361335 - DNA, 491 bp, Homo sapiens
tattgcagtagtgttatttgctggagacaaatgatgttacttcactcagtggttgcataggaagaaaactgataagtaatggagatttttataaagaccctttgtccagaaaactgacctgcttcatcttaaagcacagagtctgggaaccaggatagataaccaacctgggggtttgagaactcagtctttggatgctatctctgaaagaagaaaagaggcctaaaaaaattccacattttctctttctacccattagatagtaatactttgcacaagtttggaaggacacaaggcactcagtaaaaccagtaccctagtctcactgtcacctccccagccttgatgctcctcctctacctatatgacacttgccttaccaacagatgwttttgctgttttacatttgcacacttcagttcatcaccttcctaagaagtgactgctcagcttctaaggcctctcataaaaacaggtcctctctgtgcatc

SEQ ID NO: 361336 - DNA, 563 bp, Homo sapiens
tgtgggttcgcacttgttctgtctgcagaccttggggactctggctcacatcagcagactcagacctgcatggctggctgaggagtttgcccatgattctcaccctgtgacgaatgctcctgccaggccatccctgggcctaactggatccctgatgctggccctagcctgcacaggctcacctagctgtcctgtggtggcatagtctcctctccctcatacagctgagaccccttggttttaaaataaacatctgcaacatatgtggagctccagggtagaacaaagttccagaggcacagaggtagtagccgtattggtggttgtttctctaagcacctggagcttttgggtaatgactgcacttaaaatgatggtgatgaaattagcaatgactttcacagactgtttggctttatgagaagtcaataaagcttcgagccactccctgtaactgggkccctttagtctgctctagataagcatcaagatctttgttccccccacccacagcccagcctcagagcctggggcttctaattatggtgagcctaagggcagcc

SEQ ID NO: 361337 - DNA, 581 bp, Homo sapiens
cttgtaacagggtccatgtgattctgaggcaccaagcagcaaacaacttcaaggaagcaggtcagagggcagctgacctagcaggttaaggctgaacrtgctgcaggctcagtttatttttctttctttccctctcgtcttccctgattaatgttataaagattataaggatggtttcaagagtgttaaccttgctaacacagcctgaagcatggcagctgctaccccagttcccacactcacttcctactctgctgtcagttcctctccatcccctgagatctccctttccatttttctacatttgataaaacatttctagagcttatgcagggcaacattttcaggagcagaagtcagaacctggtctctaggttggagctagctcctgccccaccagctcttgccctacccaccctaggcacatctggctcagagtctgagggtcccaggggtcacccagggccggtatccacgaggcagctgggtatatgagtctgggctcagtgcacggggctggggtgtggacacagatgtgaagtctagcacatgtgctgattaccatcccttgggaatagaca

SEQ ID NO: 361338 - DNA, 581 bp, Homo sapiens
cttgtaacagggtccatgtgattctgaggcaccaagcagcaaacaacttcaaggaagcaggtcagagggcagctgacctagcaggttaaggctgaacatgctgcaggctcagtttatttttctttctttccctctcgtcttccctgattaatgttataaagattataaggatggtttcaagagtgttaaccttgctaacacagcctgmagcatggcagctgctaccccagttcccacactcacttcctactctgctgtcagttcctctccatcccctgagatctccctttccatttttctacatttgataaaacatttctagagcttatgcagggcaacattttcaggagcagaagtcagaacctggtctctaggttggagctagctcctgccccaccagctcttgccctacccaccctaggcacatctggctcagagtctgagggtcccaggggtcacccagggccggtatccacgaggcagctgggtatatgagtctgggctcagtgcacggggctggggtgtggacacagatgtgaagtctagcacatgtgctgattaccatcccttgggaatagaca

SEQ ID NO: 361339 - DNA, 592 bp, Homo sapiens
gtatgtgcaaaggctggggatgccaaagagtgtggaatgttccgggagcattgaggcattctgtgtagctggtggggcaggggcaagatgagaggaggtataaattccatggacatctaggaagagtttaagggataaataaatagagaaaagtgatcccacgggtcatagttggccacacgctgagtttggataagaaaaacggagcttctgggacaacagctaccaagaaactgaggtatctgcactcasaggggtccgccctcagccagggagcaaaccctcgctctgtgtatggcagaagaacccttcctgctcctgagaacacaggattccatgtggctcttccattcagatggatgccggagatctggacagagtcccaagcaggacttgggtgattacaggggtggaatcagctggcctcacaagagggagcaatgattttatttatcatctgaattaattactaataagtatcatagctgacatctatggaggaatttctatgtgccaggcactgttctgtatatgagcttgtttattccatatgacaagttcatgatgtaaatgtcattattatcctcatttt

SEQ ID NO: 361340 - DNA, 592 bp, Homo sapiens
gtatgtgcaaaggctggggatgccaaagagtgtggaatgttccgggagcattgaggcattctgtgtagctggtggggcaggggcaagatgagaggaggtataaattccatggacatctaggaagagtttaagggataaataaatagagaaaagtgatcccacgggtcatagttggccacacgctgagtttggataagaaaaacggagcttctgggacaacagctaccaagaaactgaggtatctgcactcagaggggtccgccctcagccagggagcaaaccctcgctctgtgtatggcagaagaacccttcctgctcctgagaacacaggattccatgtggctcttccattcagatggatgccggagatctggacagagtcccaagcaggacttgggtgattrcaggggtggaatcagctggcctcacaagagggagcaatgattttatttatcatctgaattaattactaataagtatcatagctgacatctatggaggaatttctatgtgccaggcactgttctgtatatgagcttgtttattccatatgacaagttcatgatgtaaatgtcattattatcctcatttt

SEQ ID NO: 361341 - DNA, 564 bp, Homo sapiens
gtaccattcctccagatacagtctgtcatggcttcccttggctaggaaagggaaatcccctgaccccttgtgctttgcaggtgaggcgacaccccgccctgcttcagctttccctccatgggctgtacccactgtccaaccastcccagtgagatgaaccaggtacctcagttggaaatgcagaaatcacctgtcttctgcgtcgacctcgctgggagagcgcagactggagctgttcctatttggccatcttggaagccggccttgactgttttttaacaaacacactgaatccacttcggtagcatcagtctcctccacttccaccagacagtcacgatgcatgtcttgcataaggaaagaactttgggtttttgtctttctgttccaataaacgcaggggctcctccaaagtatcaggggcattttcccctctccacttgagtattttttacctctgcactcaaatgtccaccatcacaacgtggattgagcatctgccattgttggtggtcacccagaacagaaacaccttcgcagattatggaatttcctgtcttaaga

SEQ ID NO: 361342 - DNA, 564 bp, Homo sapiens
gtaccattcctccagatacagtctgtcatggcttcccttggctaggaaagggaaatcccctgaccccttgtgctttgcaggtgaggcgacaccccgccctgcttcagctttccctccatgggctgtacccactgtccaaccactcccagtgagatgaaccaggtacctcagttggaaatgcagaaatcacctgtcttctgcgtcgacctcrctgggagagcgcagactggagctgttcctatttggccatcttggaagccggccttgactgttttttaacaaacacactgaatccacttcggtagcatcagtctcctccacttccaccagacagtcacgatgcatgtcttgcataaggaaagaactttgggtttttgtctttctgttccaataaacgcaggggctcctccaaagtatcaggggcattttcccctctccacttgagtattttttacctctgcactcaaatgtccaccatcacaacgtggattgagcatctgccattgttggtggtcacccagaacagaaacaccttcgcagattatggaatttcctgtcttaaga

SEQ ID NO: 361343 - DNA, 604 bp, Homo sapiens
ctggagctgttcctatttggccatcttggaagccggccttgactgttttttaacaaacacactgaatccacttcggtagcatcagtctcctccacttccaccagacagtcacgatgcatgtcttgcataaggaaagaactttgggtttttgtctttctgttccaataaacgcaggggctcctccaaagtatcaggggcattttcccctctccacttgagtattttttacctctgcactcaaatgtccaccatcacaacgtggattgagcatctgccattgttggtggtcacccagaacagaaacaccttcgcagattatggaatttcctgtcttaagagacagagcctgaacatgycagagatttttcttccccagtctccttagtggaataaaccaaagtagaagcatatagcaaggttcctccagtcagatgcaccccaagcccaccctttggaaagaaagtccttgacaacatttctccttaaattgattagagagagtgtgtgttttgtgaaataatcctgattcataaactacagttttgcctattcaaaaattctgcactttttagaaccaagttaaaatgctgcctcctccacgaag

SEQ ID NO: 361344 - DNA, 506 bp, Homo sapiens
tcattgggtgtctttccccaactctgtgctaggcatggagccatagctgaggacaacatagccctgacctcatataacaaacaggctcatgagagacacaattgttaaataaacactaataaatatatgattttggaatttgatgaacaaaatgaaagraaactaaagaatgtaatgaacagttagaataaggggcctcttcttgatttggagcagggagaaagagtcagggaagactgttatgaggatgtgacagagccaggcagagaaccaaagatggggccctccagatggagtaaccagtacctgtgaaggccttgggggaggcccatcaaggtgtgtttaaggaatatcgattaggccagtgtgactgcagcaggtgagttcctaaatacatgaagcaaacattgatagaatagaagagagaaatagatagcaacacaataacagtagaagatttcaatacttccactttcaataacagatagaacaaccagacagaaagc

SEQ ID NO: 361345 - DNA, 506 bp, Homo sapiens
tcattgggtgtctttccccaactctgtgctaggcatggagccatagctgaggacaacatagccctgacctcatataacaaacaggctcatgagagacacaattgttaaataaacactaataaatatatgattttggaatttgatgaacaaaatgaaagaaaactaaagaatgtaatgaacagttagaataaggggcctcttcttgatttggagcagggagaaagagtcagggaagactgtyatgaggatgtgacagagccaggcagagaaccaaagatggggccctccagatggagtaaccagtacctgtgaaggccttgggggaggcccatcaaggtgtgtttaaggaatatcgattaggccagtgtgactgcagcaggtgagttcctaaatacatgaagcaaacattgatagaatagaagagagaaatagatagcaacacaataacagtagaagatttcaatacttccactttcaataacagatagaacaaccagacagaaagc

SEQ ID NO: 361346 - DNA, 506 bp, Homo sapiens
tcattgggtgtctttccccaactctgtgctaggcatggagccatagctgaggacaacatagccctgacctcatataacaaacaggctcatgagagacacaattgttaaataaacactaataaatatatgattttggaatttgatgaacaaaatgaaagaaaactaaagaatgtaatgaacagttagaataaggggcctcttcttgatttggagcagggagaaagagtcagggaagactgttatgaggatgtgacagagccaggcagagaaccaaagatggggccctccagatggagtaaccagtacctgtgaaggccttgggggaggcccatcaaggtgtgtttaaggaatatcgattaggccagtgtgactgcagcaggtgagttcctaaatacatgaagcaaacattgayagaatagaagagagaaatagatagcaacacaataacagtagaagatttcaatacttccactttcaataacagatagaacaaccagacagaaagc

SEQ ID NO: 361347 - DNA, 618 bp, Homo sapiens
caaaacttataggaagcaacaaaaacagaactaatagagaagtttatagctgtaaatgcttacattaaaagaagaaagatctcaaatcaacaacccaactttacacctcaaggaaaaaaataagaacaaacaaaacccaaagttagggaaggaaggaaagaataaagattagagcagaaataaatgaaatagagaatagaaaaacaatagaaaaaatcaatgcaactaagagttcrttttttgaaaagataaacaaatttgcaagttcttagctggattaactaagaaaaaatataaaaaatcaaataactaacgttagaaatgagaggccattgcaactaatgcaacaggaattcaaaggattataagagaatactatgacaattatatgtcaataaattggataacctaaaagaatggataatccctagaaacatgcaacatatgaaaactaagtcatgaagaaataaaaaacctaacagacctataacctatactaaagagactgaatcagtaatcaacaacccctcaacaaagagaagtccaggaccaggaccagaccaggcttcacaggagaattctaccaaatatttaaagaagaattaacaccaaccctcc

SEQ ID NO: 361348 - DNA, 618 bp, Homo sapiens
caaaacttataggaagcaacaaaaacagaactaatagagaagtttatagctgtaaatgcttacattaaaagaagaaagatctcaaatcaacaacccaactttacacctcaaggaaaaaaataagaacaaacaaaacccaaagttagggaaggaaggaaagaataaagattagagcagaaataaatgaaatagagaatagaaaaacaatagaaaaaatcaatgcaactaagagttcattttttgaaaagataaacaaatttgcaagttcttagctggattaactaagaaaaaatataaaaaatcaaataactaacgttagaaatgagaggccattgcaactaatgcaacaggaattcaaaggattataagagaatactatgacaattatatgtcaataaattggataacctaaaagaatggataatccctagaaacatgcaacatatgaaaactaagtcatgaagaaataaaaaacctaacagacctataacctatactaaagagactgaatcagtaatcaacaacccctcaacaaaragaagtccaggaccaggaccagaccaggcttcacaggagaattctaccaaatatttaaagaagaattaacaccaaccctcc

SEQ ID NO: 361349 - DNA, 573 bp, Homo sapiens
cttcctccaggtgacctctgcacaagcctcggacactagaagcccttctttgcactcagctgctggttggatttgcagataaccctgagcattttgcagagttggacctgacaacagtgtcctaggcacatttttctctaagatccacctctgtgagagcatctacagcacccactttccctttgaacatgaatctcattcctctttgttcccccacagtgccaagcacagtgtccaaagacttcttaggaacttggaaaaatgctggttgaattgaacagaacatgaaaaagaagttaaacaggctcttaaggttgcatctgagagggaaaagaaaatgttttaaarggaaaatccttttctgttcatccctggagagcacaggacttcaaggaaggctttggcaaatcccttcgtaaagtgcagaagtgtggaattctggggtacagtcacttgcactcgtggcattgtgactttgtgtatatatgcatatatacatatattaatgttgtatacataatacaacataaatgtataaatattggatactaaatagttaagtattaaagtata

SEQ ID NO: 361350 - DNA, 601 bp, Homo sapiens
gaagaggattacgatgatggagaggatgatgatgaagaagataatgattatggggaagattatgatgatggagaggattatgatgatggggaggattatgatgatggagaggattatgatgatggagaagatgatgatgatgragaagataatgattataaagattatgatgatggagaagatgatgatggagaaaatgaagatgatggagaggatgatgacaccaagtgatggtggagcatataccttgcttggtgctgcattgggtgcctcgcctcacacacaccatctctcacagcacaataacttatgcaaaagaagttttcttggttttatcttccatatgagcaaactgaggcacagcaatatcaagtgtcctggaaggtcacaccatttcaaccacgaaggcaatagagctccagaggccgcatgcctccttcatcctgggcttggaactatcctgacgcattaagaacccccagcccctcagtcctcctcctctacttaagttgggcagaaagtgaaaagctcaccatcagttttcctgaaactcatcttttgttttgcaatttggcctgctagctgcttgaggcccattttt

SEQ ID NO: 361351 - DNA, 584 bp, Homo sapiens
ttcagtcattcaacaaacatttattgtatgcttgctatatgtgctaggtacatggtccccaccaccacagaacacggaggctaccagcactaagcaaataattgcagaaataataaacagtaaacagcatttcactcagagtttgcataaagtaccccagcctgaaattaaattgcagcctcagtgcagagagcccatgttacaaaaaagcaggtgctcccagggaaaggggactcacacctttaaacgcacagctgggatkgccctgcgtggtgggaacaccatctccaaatcatggaggagcttgcagcttgcaggcctgtgcaggtccttaagaccatgatgacacacagggcctctgtgggcaagacaaggaagagttcatgtctcccccacaggatgcatcctgatttggagccagtccagggaggaagagaggggagctgctctgagggagacgctgtgcatggagctgctgtagggggaactgcgggagctgccatggggaaaactactgttggggagctgctgtcgggggagctgctgtgggggagctgttgttggggagctgctgtgaggggagc

SEQ ID NO: 361352 - DNA, 585 bp, Homo sapiens
gcagtgactctgcttaggggccaaagatgtcccaaaggccaagtttctttgatgacttggtcaatgactacacccacatctctctctcccccatagccagcaaggccctgccaggcatgggatgccagccagcatgcactaccctccctcccaggaaagggctgccaagccatgccaactcaatgcctgctctacycacaagtcaaaatggcttcacacacttttgaaatcaccctgcctgctcagtgacccaaatttgcactggtggcaagatcagccctgttttcattgtgttcataggtgagagaggagtgtggttaatgagtgggagctttacaggcaaagacaggtggtttctaatctcaagtctgtgagttgtcagctgagaggctttgggccttcacccaaagtctcttcacctttgaggctctgtactctaaatgtaaaatggttataatgttttctttcctaggttgctaaaatgattaaacgaaaccacaaaaattggctaatgcggtaaaatataattttaaaaaggattttatatgttcaagtacatctggtactttgctattctgccacttc

SEQ ID NO: 361353 - DNA, 585 bp, Homo sapiens
gcagtgactctgcttaggggccaaagatgtcccaaaggccaagtttctttgatgacttggtcaatgactacacccacatctctctctcccccatagccagcaaggccctgccaggcatgggatgccagccagcatgcactaccctccctcccaggaaagggctgccaagccatgccaactcaatgcctgctctactcacaagtcaaaatggcttcacacacttttgaaatcaccctgcctgctcagtgacccaaatttgcactggtggcaagatcagccctgttttcattgtgttcataggtgagagaggagtgtggttaatgagtgggagctttacaggcaaagacaggtggtttctaatctcaagtctgtgagttgtcagctgagaggctttgggccttcacccaaagtctcttcaccttygaggctctgtactctaaatgtaaaatggttataatgttttctttcctaggttgctaaaatgattaaacgaaaccacaaaaattggctaatgcggtaaaatataattttaaaaaggattttatatgttcaagtacatctggtactttgctattctgccacttc

SEQ ID NO: 361354 - DNA, 585 bp, Homo sapiens
gcagtgactctgcttaggggccaaagatgtcccaaaggccaagtttctttgatgacttggtcaatgactacacccacatctctctctcccccatagccagcaaggccctgccaggcatgggatgccagccagcatgcactaccctccctcccaggaaagggctgccaagccatgccaactcaatgcctgctctactcacaagtcaaaatggcttcacacacttttgaaatcaccctgcctgctcagtgacccaaatttgcactggtggcaagatcagccctgttttcattgtgttcataggtgagagaggagtgtggttaatgagtgggagctttacaggcaaagacaggtggtttctaatctcaagtctgtgagttgtcagctgagaggctttgggccttcacccaaagtctcttcacctttgaggctctgtactctaaatgwaaaatggttataatgttttctttcctaggttgctaaaatgattaaacgaaaccacaaaaattggctaatgcggtaaaatataattttaaaaaggattttatatgttcaagtacatctggtactttgctattctgccacttc

SEQ ID NO: 361355 - DNA, 529 bp, Homo sapiens
caagtaaaggccttggtgggagccctgagggttttgctgggtggtaattgctttagccaggtgggcttcccaggtttcagctgtagggtttgccgggcagcccagaattctctgaaacaccaaaacaaaattgtgtatgtgtgtgtttttcttctcctaattatggggttgtgacctcaaatgctgctcacaatcttatctacacaaacatcaaatctaccagtcctttgacaagccttttgagtgggatttgctaagttccaggtagtgggaagcgttttcatacttatttcttttcaaaggaaagagtggtagaatttcagaaattgggcccaggcagtggagatagtaagtggaattagttaaattcaattttaggctttcaggctgtcaggcctggattcaattctggctgcactaaatattaggcgatggccttggggaagtcatgttgcctctgttagctgcaatcccaycctgtggaagagcacaataatagaatatatcttgttggaccattgtgaacatt

SEQ ID NO: 361356 - DNA, 530 bp, Homo sapiens
ctgctactctgggcacactgcctatagggtaaccctgctctgtgaggagcagtacctttgctgctgctgcaygctgctgctgcacactgctgcttcaataaaagttgctgtctaacaccactggctggcccttgaattctctccagggtgaagccaaaagccctcccaccaggccctccaacactagggattgcaattcaacatgcaacttagaggggacaacatccaagtaatatcaccctcgtaggcgttttacttcctggagcctccgttctccatctgggaaatgggcatcattgctgcacttcccagagttgctctgatcaatcacttggtgccctgtgggtacttggtaactgcctcatccttactccaaaagcaccataatgagaaggcttctcagcatgggagctgtggggtcatctatccctaaaggccatgatgatgaagttgctccctctgaggacacagccttgtgggcctcaaaggctgttcaggtttctggggcccctgagaaatacaaccatccc

SEQ ID NO: 361357 - DNA, 608 bp, Homo sapiens
ttgctcttggaagagaagttagaagtttcctcatcctagaggtaaacttgatcatagccctgtgaagctgatcctgcctttacctttgagctgatcctaatctcactcaaccaaaagctttctgggactcctgaacctaagaaatagaytttggtgttagacatatttggatttgaggaccaactttgctgccaactagtgatgtcacctccacttgctcttctttcaaatggggataatgacctacctcatagaaatgtggtacactgttgtaagatacatccaatgagatcatatacacggtgttcaggccagggcctgacacatgggaaggggtcacagcatttttttccttcttcttctttttcaatttttttaattttagacaaaaaaattatatttatggggcatgatgttatcttttgatatatgtatgcattatggaataattaaaacaagctaattaacatatccatcaccccacaaacttattttttagtggagcaaacattaaaagtctactttcttagcaattttggaatatacattacactactgttaactataggtaccacgctatgcaaaagatcttgaatctgcagaattta

SEQ ID NO: 361358 - DNA, 536 bp, Homo sapiens
tgcagtcagctggtggattggctgggggtgaacttgtccaggatgaactctgctgaggagacttgttgcaagctcttttctctgtaacctgtggtatctcatcctcccgcaagccagcttggacttttycacatggtggtggccgagatacagaagagaaaaaaagaagcacatatggttcctaatacctacacttagaatgggtccattatcacttctttcatattctataaatcaaagcaagtcataagaaataaggcttatatacactcattatattcagagatattctagtgtgaaagaaaaataaatcttggagccccacaatcactaaactaaagggaaaagtcaagtgaggaactgcttaggtgaaacctgcctcccattctattcaaagtcattcctctgttcactgaaataaatgtatatctgattgcctcctttggaaaagctaatcagaaatgagaagatcaggaattccccctggacatgtaaagttgacatgtggatatgtcaaataagcaattggatatgag

SEQ ID NO: 361359 - DNA, 536 bp, Homo sapiens
tgcagtcagctggtggattggctgggggtgaacttgtccaggatgaactctgctgaggagacttgttgcaagctcttttctctgtaacctgtggtatctcatcctcccgcaagccagcttggacttttccacatggtggtggccgagatacagaagagaaaaaaagaagcacatatggttcctaatacctacacttagaatgggtccattatcacttctttcatattctataaatcaaagcaagtcataagaaataaggcttatatacactcattatattcagagatattctagtgtgaaagaaaaataaaycttggagccccacaatcactaaactaaagggaaaagtcaagtgaggaactgcttaggtgaaacctgcctcccattctattcaaagtcattcctctgttcactgaaataaatgtatatctgattgcctcctttggaaaagctaatcagaaatgagaagatcaggaattccccctggacatgtaaagttgacatgtggatatgtcaaataagcaattggatatgag

SEQ ID NO: 361360 - DNA, 483 bp, Homo sapiens
gtaataaatccctgtctatggaatgcctttgaacattggcttcctagtattgataattacatttgaatcaataggttattaattaaagtgtgattctttacattcatgtaagtttttaattattttaacatctctgttgtagatttctaaatggcgaatttgtctttcttttaatattatttaacatagttccaagtaaggcttatcagccgcaacttcaggaaactttcacaataacattccaagaactaattttaaaaagcagtgcgtttcaggatatttcggagataaatttgtgaagaaacaagaatgctttagaatgggtaagatttcttctgtttstacaaattccagtgtattggctaatcttgttttaacagtgaccaatagtgacactttcactgcttcccccttggaaaccagcatccaaactagaagttttcataaatagacagtaagttggaaataatatgatggattcaa

SEQ ID NO: 361361 - DNA, 428 bp, Homo sapiens
ataagcccacctccaaaaaacacttcttaggaatcttaagaaaaaattagtataaggtggctttgaagtattttcattcatcttcttcacttttcccagattccaaaggtacatattattccacattagatattgccatcatctctaattgctccactccccaaatccctcactcaaacagcccaatcccaattcacatcttcctcttctacttgcttgtccaaccatgtctactatgagcatgaacgtaaattgagtcctccagctttttgatctcacaaccaaatcttccatttcttgaatcctacctcccttaccaggcttagctttctgcaatcccagccacagccatcccctaaacattttctgtgtgtattstaatacattcaatcttggcttaatatattctttcttcctaaaattacatc

SEQ ID NO: 361362 - DNA, 573 bp, Homo sapiens
gtacatactcttgtcatattgaactatgtttgattccaagtagaaggcacacattcttgagttcatgccattgaatttgcaactcctattgttcagaatatacttgagtatttctstttctagttaactttccctctctaccacctggcctggccaactcttactcaacagcacaaaacacatttcaaatctcatttcctctgggatgctcctacatgacagttattttattctttttctcttttcctctctctctttctctttctttctttcttctttctccctctgtgtcctccctccctccctccctcgctctctttctttctttctttctttctttctttttctttctttctttctttctttctttctttccttctttctttctttctttctttctctgtgcatgtgcttactccaagtgcttctacagcatttctggaaaactttccctttgttataatactttttttcttggatgtcgggagcagacagttgaagtaattatactgcacttctcagttcatgccccattaccatcattggtccaaacaaaacccttctctgatttta

SEQ ID NO: 361363 - DNA, 573 bp, Homo sapiens
gtacatactcttgtcatattgaactatgtttgattccaagtagaaggcacacattcttgagttcatgccattgaatttgcaactcctattgttcagaatatacttgagtatttctctttctagttaactttccctctctaccacctggcctggccaactcttactcaacagcacaaaacacatttcaaatctcatttcctctgggatgctcctacatgacagttattttattctttttctcttttcctctctctctttctctttctttctttcttctttctccctctgtgtcctccctccctccctccctcgctctctttctttctttctttctttctttctttttctttctttctttctttctttctttctttccttctttctttctttctttctttctctgtrcatgtgcttactccaagtgcttctacagcatttctggaaaactttccctttgttataatactttttttcttggatgtcgggagcagacagttgaagtaattatactgcacttctcagttcatgccccattaccatcattggtccaaacaaaacccttctctgatttta

SEQ ID NO: 361364 - DNA, 523 bp, Homo sapiens
attctaacattagcagtctaactaaacagttaatggtctaaatctgttttgtgtaatggttccaaaatacacatgatttttaaagttttcastgaaattatacggacctattatcattatgtatgtaaaaagtaaagcttactctttgaaaaggaagacagattctactccatgaaatccagatcgtatgtggctctcttcactttcctcattaaaacaattcccattccaacaatctcccaaacgtgttccatggattatagtgctacaggaccaggtgggcaaactcccatgcccctcacttccctgcctgtcttctttactgaaaccattacccaatctctttgaagcaaaaataccatggcataccaacaaagtatagtatcataaatttaaaacatttttttcaaatttcatctaagggaaaactcacccaaactttaacaaccatggcaccaaggcttattcactgttcaattatttggcatagcaacttaaaggtcacctttctagcaccaatatg

SEQ ID NO: 361365 - DNA, 523 bp, Homo sapiens
attctaacattagcagtctaactaaacagttaatggtctaaatctgttttgtgtaatggttccaaaatacacatgatttttaaagttttcactgaaattatacggacctattatcattatgtatgtaaaaagtaaagcttactctttgaaaaggaagacagattctactccatgaaatccagatcgtatgtggctctcttcactttcctcattaaaacaattcccattccaacaatctcccaaacgtgttccatggattatagtgctacaggaccaggtgggcaaactcccatgcccctcacttccctgcctgtcttctttactgaaaccattacccaatctctttgaagcaaaaataccatggcataccaacaaagtatagtatcataaatttaaaacatttttttcaaatttcatctaagggaaaactcacccaaactttaacaaccatggcaccaaggcttatkcactgttcaattatttggcatagcaacttaaaggtcacctttctagcaccaatatg

SEQ ID NO: 361366 - DNA, 605 bp, Homo sapiens
tcatgctgtcttacacttactaccacttctaccgtaatcactttcccaatggactgctaaatatgtacaccctaaaacacacattcagagtaaggatagggggccccagttcaatctgaggtgaagttatgttctcctcttaaggctttcctaaacaatcacaaataggttgtcatattaygcttttatggattaatacaattagttttcatttgaatattcttgtgagtatactgcatgtgtcagaacttgaagagggaatgagatgagagacatgccaaatctttaaagattttaggatatattcccaggagtagaattcctgggtcaaagagtttgcctcttttggagccacacttttgaatccgtctctgtattcccatttcttctactctattattcctccatttatttcaatttgagtttctcccttactgaaatagctctcattaagattatcaatgactttttaattgcaaatttaacagttgatattcaagtgtaaaatgagataaaatgactcactctcagtgatagaaattcaaagtttttatactactactcatgacacttcaaaattatgccccaaactattttttgcttaa

SEQ ID NO: 361367 - DNA, 566 bp, Homo sapiens
tgaacaattaattcaaatacaaattctgtgggaagtcgtccaattttcaacctaraaaatatgttggaaacaatgcattttttcagatctttctgatagatttatatttttattttgtgcttacttaaactcctacataattcctcaatgtaacaatattactaaaacaggaataatgtagtgatgtcatggtaagaactggaaaggcttttggaacagagataacaaacatgttattctatctagccatacattcacagatatagagtcaattccagggaaggaaaatcttttttatctctgtaacttcagtctgaagtgttcacagctggttcttattcattcttcagatctagccttaaaactcttctctttagataaggatttctctgaccttccaatctaaagcaggctcattatattctctcaaatctattcttttatggtacctactgcaattttttatcgcatagtaacctgtttacttatttgatggcttcctcctaattcaattatatgcctagggatgagagacctgtctgccttggtcatcactgaatatccag

SEQ ID NO: 361368 - DNA, 605 bp, Homo sapiens
tcatgctgtcttacacttactaccacttctaccgtaatcactttcccaatggactgctaaatatgtacaccctaaaacacacattcagagtaaggatagggggccccagttcaatctgaggtgaagttatgttctcctcttaaggctttcctaaacaatcacaaataggttgtcatattatgcttttatggattaatacaattagttttcatttgaatattcttgtgagtatactgcatgtgtcagaacttgaagagggaatgagatgagagacatgccaaatctttaaagattttaggatatattcccaggagtagaattcctgggtcaaagagtttgcctcttttggagccacacttttgaatccgtctctgtattcccatttcttctactctattattcctccatttatttcaatttgagtttctcccttactgaaatagctctcattaagattatcaatgactttttaattgcaaatktaacagttgatattcaagtgtaaaatgagataaaatgactcactctcagtgatagaaattcaaagtttttatactactactcatgacacttcaaaattatgccccaaactattttttgcttaa

SEQ ID NO: 361369 - DNA, 544 bp, Homo sapiens
cattttttgatgcactacccacaattaccttattaatgttatcctatgagaaacaattcaagattttttatttcctgaagctcttcacataaccagacaacaatgcaaaataaatattctttatcttgttcaaattcatactttttcaaataaaaaatgttttattccatattctagttcaagttgttcagtagtcccctcttttcataattgttctaagttattaaatttttatggaatgtaaagcacttaatagtttttgttaaataaaatgttttacttactaagctatatatctaaggtgcaaaggagayaggctttcccacattgtattaactacattatggcatcttttgttcactatcattcaaaatgatagaactttaaaataaaaaaaaaaaaacaggagacagtggagagggagtcacaaagaatgtcttgtgcaaaaagaaaaatgagttaatgagcatgttccaatacaatggactaatgtttgtgtcctctcaaaattaatatgttgatattctaacccccaatatgattg

SEQ ID NO: 361370 - DNA, 527 bp, Homo sapiens
aacagtttccttaaaactttccaatgaatctattcatgtatgatttactttcagctatgtctgccwtcatctcctaaccctctggccttggctcactcgatcctaataatgactgctggactcttcatgttctttatatgcgctgagctcattgtcgttcagggcacgtattcttctctctacctgtaccattttttttttctcagacacacatacagttcactccctcacatcatttattaaaatattgctacctttaaatacaccacctctttcttatctctataacctgctttagatttatttacagcactaatcattagatagcattatgtcacatatttatgggtgtattggcttactgtctgacctacctcactagaatatacgtttcatgaaggctgggactttttctggtttactggtatgtgcatggcccccaaatcatctctggcacattttaagtgccaaataaataattggtgaataaataaataagagaatttaaaccccttacaatcttgaca

SEQ ID NO: 361371 - DNA, 556 bp, Homo sapiens
ttaaatttaaaggattgcttaagtgttaactgctgtaagtattcaaatatttggaaataccaagctctgtagttggctcatagaatgcaaatactacactcctgtctaatcatctatagagctgttaaataaggtgaactaagtaaaatgcttagacagtatctggcacatagaaataataaaataaatgtcaaattcctcttcatttttacatgattttttttttttttgacacagtctcactccatcacccaggctggagtgcagtggtgcaatctcagctgactgcaaccttcaccccctgggttcaagtgaaactcccacctcagcctccctagyagctgggattacaagctcacgctatcacacctggacaattttcgtatttttagtagagacagggtttcaccacgttggccaggctagtccagaactcccgacctcaaatgatcctcctgctttggactaccaaagtgctggtattacaggcatgaggtaccatgtgcagcctacataatgctactttacaagatagtgctttaaaaaaaaaaaaaag

SEQ ID NO: 361372 - DNA, 575 bp, Homo sapiens
catacatttatttgtgaagaaggtgtgggagcatgtagagatcaggcagagctcagtttaggattcaaccaagagttcaactttactccattgcctcgttattaaggacttaacctctgacattgccttagtgagagagcatttatctatgatgctgccttcaaggagcgagctcttctttggtgttaattactagcatagcagcagggcctttcatagacttctaagagggacgaacactgtggtcatcaggctttaaaatattttccccatcaagacttactatgtatgatatagataacttctctgcctatgctcacaggtacttccttggagaacagaagccaaattctgtcattgtttgtctcagccctccccacagggcagtgatgagagtacaaatgtgggacctgacccaagagtgacaccctagaaccttaatgagagaagataggcaagtatgggcaaggtcccttattcgccctgcctacacctatttttaatgaaaggtgccttttargaagagttgaagaagcagttcttggtttctgttttaaaaatacatcagtctgtta

SEQ ID NO: 361373 - DNA, 595 bp, Homo sapiens
gttaagcttgaggtccaagcccactcttcatacgacacaatgcaccacaaacattttcaaaaccctaattttaatgtgcctgaaaaaggccaatgttccctgaagaaaataagtcggaatagtaacagtcaagatctttaaacctactctttttttccaaaatagccatgcatctcctttactatgggacagtatatgttttcattggtaactgacacatgtgtttcgagaacatgtattcccccaaaagaaggttccagtatcatttctcattcatgaatagaagagtgacatgaaagtttaatttctagaaccataaagctttgtttctaatcccccaaacatgctttttcaygtccatatgtttctctttaaagtaaatacattgcagagaagtaagagagaaaagtacagtaaagggagaaacatgcatttcgcctagagcaatttaattcatctaaacaaaggctgagctccaagcaaatgtagctttggagatcagaagatagcagctgctggcaaacaagcaggttttggtaattcacacttgggagggcctgctatggcggctcaagagacccccttgcttttgcca

SEQ ID NO: 361374 - DNA, 570 bp, Homo sapiens
tcctaaatgccttttcaacactcaatttaaatatctaacaagcatttcacacttaaagtaccccaaattggacttgtctcccactccacacctgtttctgaaatattccccatctcagaaaatgattctaccattcaccttgctcctggggctaaaaaccaagagtcatctttgactttccttttttttttcacatacccagtaacctgtctgccctattttcaaaataaatactgaattcaaccatttttcactccctctgataccatcatagtgcctcacctagacaacagcaatagcctcttattgtctgttgtcttattgtcttactgtctattgttccatgcttgcgtctacattctaatctcttcactgtgatgctccaaaacatcagtcaaatcatgtcactgtcacattctaaactgtctcatggcacctgcacacacttaaaataaaattcaaactctttcrtgtacatggtccaccatgacctcgccctcacctacctaccttcctgtcttcacttcccatcatgttctccatgatttcttcaagctccagcaaccatgg

SEQ ID NO: 361375 - DNA, 609 bp, Homo sapiens
gtatctcacctggctattttgtatatgctcaatgcctctaaaaagtttctgtgtaatttttcaattattaatactgtaccatcttccagtcaccacgctttgtggttattaggtcattaatccttaccaacatctttgggtagataaaagacacctcatttttctgctgagaaaacagaggctgaaataaattaaataacttacttgaagttacccaggaagttaagagattgaactatttttcaaccctacatgtgtctaattctaaagtccaacctcttaaattcaaaggtatagagttcacttcttatactacaaggtgtttctccgtgtggtgttattggtaaaagtgctaaaagctaaaagcttggatctgaagtcacaagacctggttctaagactgttctctttcacttgccatttgtggcaagtgacctaccttcctcatatattaagtggatattaataataataactttatctttcttatcagaaatcaaattcaataacatgggaaatgtttgcaaagctgcaaarcacagttaaatacttggcattatgtgactttgtaagcattcttaagtcactttttaatgcaaatagtatgtc

SEQ ID NO: 361376 - DNA, 580 bp, Homo sapiens
acaaaagctaagaagagacaagaattctctccaacaggtttcagagggagtgtggtcccgctgacatcttaattttgcacttgtgtcttcagaactgttaaattagagttctgttgttttaagccacctagtttgtggtaccttgttatgacaaacctaggtcgcactatacatatgggaataagtctcagcactgtgctaagaatgaccccaaagccctctagatccaccatgaaaagctattcatgggtgtccaaacactgcaactaaggatgaattgaagggggaagctagcatggaaaagggaaatagtagtagctaacatttattgagcttaataccatccaggcacactttacctaygctagttagtttaatcccaaacaaccctttgaggcaaatactattttaatctccaatttagaaaagaggaagctgaggctcccatagatcacataacttgcccaatattgctccaacaatgggaaactgagccagaatttgaatccacttgtactggaccctaaagcccctgctcccaatggcagcttgagagaaaagctcttggtaagtccagaga

SEQ ID NO: 361377 - DNA, 356 bp, Homo sapiens
agaaaaagaaactgatttcattaaaaatgaaaaagaatgggtgcttatgaggtacagagacacgctgctagccacagtgggaactttgaacagatcagcaaaggatactataatggaggcrgtgaaccaggggctctggtctcagcccctccacgctgactttcagtatactgacagcagtgttgtcaccacaagctgatgaatgaatactacagttttgttttcatctccagcctttccctgggtctgtgtgtctacttaagcctcatgaataatgctaccacttacagatactggacaacaatgtgacaaaaacagactgattcatggaaacatggattaaagactacttccat

SEQ ID NO: 361378 - DNA, 573 bp, Homo sapiens
ctatgttcctatgtgactacctaaactgggataaatattctaacatactattaaaaatgagcagctatcattagaacagagaatttatcacgaatcaggttcacctctgatacggttaggctttgtgtcttcacccaaatctcatcttgaatggcaatkcccataatccccaggtgttgaaggaaaaacctagtgggaggtgattggatgatgggggcgatatcccccatgctgttcttgtgatagtgagtgagttttcatgagatctgatggttgtataagtgtttgacacttttcctttgctcattcctctctctcctgctgccatgtgaagatggtgcctgctttcccttcctccatgattttaagtttcctgagacctccccagccatgagaaaccatgagtcaattaaacctctttcctttataaattacctggtcttgtgtagtatctttatagcaatgtgaaattgtacttatacagaaaattggtactgaggtagtggggcactgctataaagatacttgaaaatgtggaagcaactttggaactgggtaatgggcagatgttgc

SEQ ID NO: 361379 - DNA, 529 bp, Homo sapiens
tgtgctacagggtcacagccctcatggagaacctctgctagggcagtacagaagggaaatgtggggttggaacccccacacagagtccccactggagcactgcctaatggacctgtgagaagagggccactatcctccagacyccagaatggtagatctactgacaggttgcaccatgcacctggaaaaccacaggcactcaatgctagcctgtgaagagctgtccaaggctgtgggagcccagccattgcatcagtgtgccccagatatgagacacagactcaaaggagatcattttggagtctgaaggtttaatgactaccatgctgggttttggacttatatgaagcctatagcccctttgttttggccaatgtctccatttggaataagagcattacccagtgctggtacccccattttatcttgcaaataactagcttgcttttgattttacaggctcaaaggaagaagggacttgccttgtctcagataagactttggacttagactttggattaatgctggg

SEQ ID NO: 361380 - DNA, 529 bp, Homo sapiens
tgtgctacagggtcacagccctcatggagaacctctgctagggcagtacagaagggaaatgtggggttggaacccccacacagagtccccactggagcactgcctaatggacctgtgagaagagggccactatcctccagaccccagaatggtagatctactgacaggttgcaccatgcacctggaaaaccacaggcactcaatgctagcctgtgaagagctgtccaaggctgtgggagcccagccattgcatcagtgtgccccagatatgagacacagactcaaaggagatcattttggagtctgaaggtttaatgactaccatgctgggttttggacttatatgaagcctatagcccctttgttttggccaatgtctccatttggaataagagcattacccagtgctggtacycccattttatcttgcaaataactagcttgcttttgattttacaggctcaaaggaagaagggacttgccttgtctcagataagactttggacttagactttggattaatgctggg

SEQ ID NO: 361381 - DNA, 628 bp, Homo sapiens
ctttggggaaagggtcatagtgacattgtaagagaatcagagttaaagagactttagctaatgatttaacaagcaaagcttatgagctttaccatttttatcatagatggcattaaatggccattaccttctgtgtaagaatagtagcttttactttgtggtggcactgaaaattattactggatcaatatctgcagatttccttcttccaartttctccaaaaagaagagttgtaggttgcaatgtcataatttatgctttttttgtcacactgagttctggctaacaaaaagattctccaggtagtcagtgagtggcagagtggaaagttgactctctggcacctagtctcaaaggaacagggatacagcaaatatagggggctatttgaataagaacaactgtgatagctactttgagctatcactatgagtatggaatttcagggaaagaaaaaactatttggagtatttataggaagtttttctcatattgcacagagtaaaacccctggcttacactcttttaaactataggaaaaaaatcaacattatttttaaggcttttttgaagtaactccatgcaaggaggaagtcatgcagggtcccagtaataataagtagagtt

SEQ ID NO: 361382 - DNA, 619 bp, Homo sapiens
cagaatccagtcttttggaatgcatgtggcatacaaggtatgtttccatagtagggcttctcattaaaaccatcccacaggtggggccagaatcaggattagggaatggaggaayacattttctctttctcagcattgaaaataaagaaacaaacaaggataaaactactcccacttcttgttaagaagaggaaactgtaaatatttataatgtaatatgaagattaacctgatgtgttggatgtttttacttccatgatctcaagccaattcttctctttaaaaatgaccttcctgccatttaaagtagttttaaactgtctacatcttaacccatttaccctaattctggactatattctaaaaagtaataattaaagagaagctcaaagggttatgtttctctcagtattgtttgtaatagaaaaataaaaattagaatactctacaacaacctgaaaactatttaataaaagattactagaagtagttaatatttttgtttgctaagattttttcatgaagaaaagtgccctgagcatattttacataaatagtttataaaatggtatgtttactacatccaaatagttttaaaatatatataatgatgagaaag

SEQ ID NO: 361383 - DNA, 452 bp, Homo sapiens
acaggctttatctcaattcattacttcttsccataccttaaacccattaaacactaagtcttgtggaatatctctcaagatcatttcttattctctagctgaagtttcttatttccttacatagcaactatcgtcacagtcttataactgacttcccagtagggtgaccaactgtcctggtttccctaggattggcagtcttcccaggatgcatggcttttattactaaaaccagaaaagttttaggcaaaacaggatgggtttatcacccagcatcctggcctccaacatcaccctcttttagtaattcaaagtcagatgcatgttatggaacttccctcaaaaagtgtacaggcacgtaagttttgcatttaattccagaatttaactgatgatctgaatctataggtcaattgaccacaggtttgaaatatataaatttgaggtttcag

SEQ ID NO: 361384 - DNA, 452 bp, Homo sapiens
acaggctttatctcaattcattacttcttcccataccttaaacccattaaacactaagtcttgtggaatatctctcaagatcatttcttattctctagctgaagtttcttatttccttacatagcaactatcgtcacagtcttataactgacttcccagtagggtgaccaactgtcctggtttccctaggattggcagtcttcccaggatgcatggcttttattactaaaaccagaaaagttttaggcaaaacaggatgggtttatcacccagcatcctggcctccaacatcacccycttttagtaattcaaagtcagatgcatgttatggaacttccctcaaaaagtgtacaggcacgtaagttttgcatttaattccagaatttaactgatgatctgaatctataggtcaattgaccacaggtttgaaatatataaatttgaggtttcag

SEQ ID NO: 361385 - DNA, 577 bp, Homo sapiens
cttggaaggaataactcatgcatggttggctatgttttcacctctaagtcaagctaagaaatctaaggggtaaaggaaaataaacaaatgcttgattcaatcaaatcgtaccaaaagtcaaaatagttcaatagttcaacacacacacaaacttctctttacagaataagttgttaaggattcattattccmgagattaggcccatcattctgggtatttgagaaaagaagtgaactcacagaaaattagtcattacttatattttatgaatgataatgaaaaatgtttaaattatctgattcttagtatgttaaatataaccagaatttctatccttattagaaaatctttgcttaaaaatttcatttttattctttaaaaatattgatcataaacatccaaaatatttctctgaacaacatctaggcatttcataatttaatctgtcatattgtcttggttcctaaataatttagaaatttgtaaaggattttggaaatttggatggcatgtcttatattagtgcattttttaaaagaatgtggatgttggcagtgggcggtggctcatgcctgt

SEQ ID NO: 361386 - DNA, 594 bp, Homo sapiens
tctaatatttacctgtggaaacaatagctaatatttgctgaacattaccaaaagctgtgttaaaagtgcattatttaatttcatttttaaacatgtattattttatactttctgtacagatgatggaatggaagaaagagaactaaaggagagccatcaaatcagacaaaagctatctgtctctttggagagacaacctctggsctcatccactgcattacattcttagagcttgtagaagagcggttattaaatattttcaaggctacagactccttcaagaattgataaaagctatagaacttctttccacaaaaatgcatgtattgcacactgaatgtctgcatgcagtccttgaggggaggacctctgaggcctatctctgagtctgcagtgtccatgagcccatgtcaggaattcctgcaacacacattatgtgattttaaaatacttaaatgaaagttttttccagtgtcctccagaagcaaattccattaaacaagccaatgtgtataatattaccctagaaattcgagagttggtgtaatgcaaatgggagatatgagcatgtgtgtgcatgtgtgtgtgcttgtg

SEQ ID NO: 361387 - DNA, 623 bp, Homo sapiens
tctacattttcaacatgctcttgggcaatgcttctggtcctctgaccctactctgagatctgagcataaagagcaataactttrgggtagccacctggagttttatgtggaaaagaatattctgaagctaaattctcgctttttgggaaagaatgatgtcatctatgagtgaactttgccttggtgatggtggcagtagcaataatgtcagggtttttttttttaccactcctagacagtcatgacagaatctcatcaccatgatttaggagatagagagtcctggagtttatgttattctcttatttccagaagaacttagaattcctgcatactgatgagattattatctggtataattatgatggtacaattatgaagaatcttttgcagatcaagtttcaacaaaaaggttaagtacagtaggtaaggtcacatagaaaatcaagaatacattttagttttcctgtcttctaaaatatttccatgattaaattagcctgcaactcattttttggtatcaaattgatgtgaaatacgagcagaaaatagatatgaattgacttattcttaaaaacccagtgcttgaaaattcattgtttttttgtttcaaaggatagatt

SEQ ID NO: 361388 - DNA, 623 bp, Homo sapiens
tctacattttcaacatgctcttgggcaatgcttctggtcctctgaccctactctgagatctgagcataaagagcaataactttagggtagccacctggagttttatgtggaaaagaatattctgaagctaaattctcgctttttgggaaagaatgatgtcatctatgagtgaactttgccttggtgatggtggcagtagcaataatgtcagggtttttttttttaccactcctagacagtcatgacagaatctcatcaccatgmtttaggagatagagagtcctggagtttatgttattctcttatttccagaagaacttagaattcctgcatactgatgagattattatctggtataattatgatggtacaattatgaagaatcttttgcagatcaagtttcaacaaaaaggttaagtacagtaggtaaggtcacatagaaaatcaagaatacattttagttttcctgtcttctaaaatatttccatgattaaattagcctgcaactcattttttggtatcaaattgatgtgaaatacgagcagaaaatagatatgaattgacttattcttaaaaacccagtgcttgaaaattcattgtttttttgtttcaaaggatagatt

SEQ ID NO: 361389 - DNA, 533 bp, Homo sapiens
aaacaaataccagaatgaattccatagctagctgtagaataatgatgacaagactatttccatattatggctgaggaattttaagtattatgaaagtcartgggttgcccattctttctttcaataaatattcattaagctcctcctatatacccagaactggataccaaggcaaacaaagcaggcataaagcttattggctactgagcgaacagtcataaaataaaaaataagcacagaaatatatctaaaatcacaaattatgatttgtgatgagagaaaaagtatacgatagtgtaaagaaacataacagaagggatggcataacctacatggtgggtccgatccgtcctttctgaaggagtgatccttatgctgtgagccagaaaaaaaaagcgagaggcaagcaggcatcaagaccagcctgaaggccccaagactggaaagtgggtggccagtatagaagaggaaggacaaaagagggggtcaaggggaaaggcaagggcagactatgtgaccttctaagccatggc

SEQ ID NO: 361390 - DNA, 601 bp, Homo sapiens
cccttcttactttttaaccaataggatctcatgttagccatcaaagcaacagactttcagtcagttgacctttcatgatagagggttttgtggggagaagagagagaaaggagagaaaaaaaattgaggtttttgcatcatttgtcattctaatagttgaagactgaatcagtcttatgttgcagacacattaatttgattaagatacaatccatgggtcattcaggcatgtaaagtactcttgcttaattgcaaaattaacaatagaataggwtaaatcattaccaaactggaggttgttctgggactcatggactttttccctcactcaattcattttctccatctaaagttctttttgacactttgttaaaggaaaaatcggggctaaggcaacagtaagtggcaaaccaacattcaattctcaaggcattagttgagggacctcatgctctctcagaacaggaaatgccggtagacccatcttacaaaaaggatcgaagagtcccttcagctccaaagagttcataaccatctcatgattcacagaactgtaggaagttatccaatgcctcaagacatccactctgaaacctgaagc

SEQ ID NO: 361391 - DNA, 600 bp, Homo sapiens
aatggagaggaccagtggactactcagtgccaagcttaagaggtcatctcattaatcaattgaatggaagtttaatttattcattcaacacacacttactaataacttgagcccytgtagtacttgagatctgctaacatatacatgttataagtatgttatccatgctttctaattagattgtgaggcccttcaaaagaatctgatctcaatttgccaccacctgtcttataacatcgggcaactcacttcacttctctgggcctcagtttccttattgtggggggtggctaaaaggagcgccctaaatccacagagtcaccttcttcccactcaattcagcaattatgggttatgcacagaacatgagagctgctgaggaagctcaaagaaggaaagaacaagtgctgttcaagaagaatcagaattgttgaagctgggcgagggtacatggaagttcatcagataattctgtctatttatgtgtatatttgaaaatcccctacaaaaaaaaaaagcaagaaaggaagaaaggaaaaaatacaaggaaatctagcaggcttcacatagcgagaagcaatttagcagagttgaagcatg

SEQ ID NO: 361392 - DNA, 587 bp, Homo sapiens
cttttgaacccctagttagcctgccttctcttttctacctatcagaatattcttacatttgttttgtgtagaacagccaaggattttagttgcactcagcaggaggaagagagaaaagtgtgtctactcaatctttccagaagtgaaagtctccactgaacttttgaaatggtgttaaaactggatttcttaccccagtgtctcatccttgcagataaagtgtcataccctctttaaaatactgagagaccatgccattttcctttttgcaraactgtcatgaatcttcattattgcctctggaataatatgtaacatatctgactgctgtttaaagtcttcgttatgtaacttttacctacctctttaatctcttgctcttcccttccacaggacctagaatctcagtgaattggacttctgtcgggattccctgaaaactcttcatggtttcttgctgcctcaacttgctagttattctgtatacttaggacaccccccaaaagtgcaaattttttctttcccatttaagggtcatttagaaactacaacctatcttttctatttcccttagaattatgacctac

SEQ ID NO: 361393 - DNA, 587 bp, Homo sapiens
cttttgaacccctagttagcctgccttctcttttctacctatcagaatattcttacatttgttttgtgtagaacagccaaggattttagttgcactcagcaggaggaagagagaaaagtgtgtctactcaatctttccagaagtgaaagtctccactgaacttttgaaatggtgttaaaactggatttcttaccccagtgtctcatccttgcagataaagtgtcataccctctttaaaatactgagagaccatgccattttcctttttgcaaaactstcatgaatcttcattattgcctctggaataatatgtaacatatctgactgctgtttaaagtcttcgttatgtaacttttacctacctctttaatctcttgctcttcccttccacaggacctagaatctcagtgaattggacttctgtcgggattccctgaaaactcttcatggtttcttgctgcctcaacttgctagttattctgtatacttaggacaccccccaaaagtgcaaattttttctttcccatttaagggtcatttagaaactacaacctatcttttctatttcccttagaattatgacctac

SEQ ID NO: 361394 - DNA, 346 bp, Homo sapiens
ccctctgtcactttcacacactcgccttctcagttctaccctctagagctcgggaataacaagaaactagtccatacttctcccaaacttctttcccctaggctgatgttttaatcaatggagatttctttccagaagccttgttaatcaagctatcactaatcagtcaaatcccaatagaatgcaggccaaaacattgtcccaattattttgttgtgttaggattttataatataaaaaatatatattttaaagaaatggaattccacctggggcctaacattmtttctgttttagaaagagttgcatcatagtaatatttgttttattttgctttattgggatt

SEQ ID NO: 361395 - DNA, 577 bp, Homo sapiens
ataaagtggcacttgcctagcttagaactagcgtgcaagaaaatttaattgttgactgtttgttgtgacaatgggctccttcagaaactgggattgctgagtcttatgggcccatgcackggtggctaggagaaaggttaactggggccagctgtggctgcagaatgcatgcgttcactttagaaggcaaacggctcagagagaacgctcttggcttcaagttgttctagaaagaaaaacttatactctaagagattggatgatgtaagaaccaagaaagaatcagaattagcactcggtaaatcagcattattaattgttatggtactttgacattataatatctgaaacacaacaactgaaatccctgaaagccaaatttggttttatcatcatttaagaattatagaaggctagatttggaaagggccttagagagctcttaatctaaactcatttttttctaatattacagcaaacagttcctctggatctgaggaggcaagctgcccaatgtaggatagtaagttggtttaaatagagatacaacatgttcttttggtattttatgttttta

SEQ ID NO: 361396 - DNA, 577 bp, Homo sapiens
ataaagtggcacttgcctagcttagaactagcgtgcaagaaaatttaattgttgactgtttgttgtgacaatgggctccttcagaaactgggattgctgagtcttatgggcccatgcactggtggctaggagaaaggttaactggggccagctgtggctgcagaatgcatgcgttcactttagaaggcaaacggctcagagagaacgctyttggcttcaagttgttctagaaagaaaaacttatactctaagagattggatgatgtaagaaccaagaaagaatcagaattagcactcggtaaatcagcattattaattgttatggtactttgacattataatatctgaaacacaacaactgaaatccctgaaagccaaatttggttttatcatcatttaagaattatagaaggctagatttggaaagggccttagagagctcttaatctaaactcatttttttctaatattacagcaaacagttcctctggatctgaggaggcaagctgcccaatgtaggatagtaagttggtttaaatagagatacaacatgttcttttggtattttatgttttta

SEQ ID NO: 361397 - DNA, 577 bp, Homo sapiens
ataaagtggcacttgcctagcttagaactagcgtgcaagaaaatttaattgttgactgtttgttgtgacaatgggctccttcagaaactgggattgctgagtcttatgggcccatgcactggtggctaggagaaaggttaactggggccagctgtggctgcagaatgcatgcgttcactttagaaggcaaacggctcagagagaacgctcttggcttcaagttgttctagaaagaaaaacttatactctaagagattggatgatgtaagaaccaagaaagaatcagaattagcactcggtaaatcagcattattaattgttatggtactttgacattataatatctgaaacacaacaactgaaatccctgaaagccaaatttggttttatcatcatttaagaattatagaaggctagatttggaaagggccttagagagctcttaatctaaactcatttttttctaatattacagcaaacagttcctctggatctgaggaggcaagytgcccaatgtaggatagtaagttggtttaaatagagatacaacatgttcttttggtattttatgttttta

SEQ ID NO: 361398 - DNA, 576 bp, Homo sapiens
tgttgatgttgcgagttgtctccactgctttacgacccgtgttgaactcaaataagaatatcacttgaatttgctttttgtctaacattatctccatagactaaaataaacagcaataagtcattagcaaaaaaaacaaagtgagaaatgtgcattaaaataatgtataacataatgacatttaagaatgtattgcaatatcaaatggcaaatttcaacaatgcaaaaaccgcaattacatttgcaccaacctaatccatactacttctttataggaaaggagacagtgaagtgtatagaaggggtcaaagttgttctattaaaaattgagagatatrtgaggacatgggagctgagtccccattaacaacatatacactatcaacctgacctagtcctccagaatcctggcaaagaatctgggggaatatgaggcgtcccaaccccttgaatggtgttcaagtcaatttcatttagatctcagagggaaggatcccctacttgatatctgccattacatttgtaaggtaatgtttcctttttaaggaattctttaacaccagttagtttttgcca

SEQ ID NO: 361399 - DNA, 614 bp, Homo sapiens
aaaaattccatttgcagtaaactctgtgggctggattggagtaagagatgttagtataaactcatgttaattttaatatggctacatacagaagtataaatagaaaaataattctgggtatgtatgtatgtaagggtatatatctatctgtatatctatagatagatatactgtattggtccattttcacactgctataaagatactcctgggatgggcaacttttaaacaaatgaagtttaattgcctcagttacacatggctggggaggcctcaggaaaccttatggcaggaggcaaagaggaagcaacgcacgtcttcacaaggcagcagaagagaaagagaacgaaagaggaactcctgaacccttttaaaaccatcagctctggtgagaactcactcgctatcatgagtacagtgtgggggaaactgtccccatgatccagtcacctcccaccaggtcctccctttacacatggggattacaacttgaggtgagatttgggtgctgacacagagccaaacagtatcatatacttttacaaatatgttgtacatgtattttatrtgtttatatatttcacatatgtgtattttatatatttagtataagt

SEQ ID NO: 361400 - DNA, 582 bp, Homo sapiens
gaggttgcagtgagccaagatcatgccactgcactccagcctgggtgacagagcgatactctgtctcaaaaaaaaaaaaaaaaaaaaaaagattaaagagcagagttgatatcagcataatgtcagtatggagggagatgatagaaggaaaattaaaaatcaataaaacttacattggttgaggagctagtatgtgctaagttgcagtccacattatctaatttttataaatgtctgatattggtggaatagatccaatttagagatgagaaaatttagattaaggaatgttttataattttccaagttaattttgctaattgtctggaatagccagaattcagagcaaggacagcgtaggcaggctgtagtcacacagcygtttctaagcttaggtcacaaaattaaatgcaacttgtcacattagaggacagatatcagtaggcacagaaagtacagattatagaaaattggtagaaatgtaaaaatcagtaggaaaaaagaaaaagaatgtcttgggagttttaaaagtactaaatttctaaattcttttagaattaaaacatttgcaaatttcaaaac

SEQ ID NO: 361401 - DNA, 551 bp, Homo sapiens
agtctctataaaataaaaatattcttaattctaacatttactatctatttggttgccaatatttagaaatgatatcatactttaaactttgcatccatttatacatattgaaatttgagagaaatataaagtgtttaatattgaaaaatatacttcagttgctatgtgcaactgctttgaataacactcacatttgtgagaacctgtagagccatgatttagaatatgaagagaagcaagaaaatggatactcagcaccactgagaaaaatatatttaaaatagaaaaaaaaamctatttcatgtatgctgttgagacaccagatttgacaggtcaactgatttatattcattcttaaatgactttgttttcaccgttcaaatactctgatctgcaaagcagtgtccttctcgcagctggcattggcacaatctgaaactatttatgggattcagacacagtcaacttttgctttaaggacgtatgtcaagagatgtgggtattgccatgggactcagagggtctattttgcctggaatgagggcagtact

SEQ ID NO: 361402 - DNA, 599 bp, Homo sapiens
agctcactctgaacacaaggacataatataaaatagacatagaaaataatactttttgtcataaatgcagccaaaytggtatatttttcataattccttaagtcatcaaggctatagagtgttagtaaaatatttcatattctggtccatataaaaggagtctatcatacaaaaattgatattagtatacaaaatgatttgtctttttaataatttgattttagacagcttataaagatggatagtggataaaatgactttccataaggaagatacagaatcttgttcctcattacagcaaagtagcttattattataacataataacctctgaataaagtatttttaaaagcatatatttgcaggctcagaaaagcaaacaaaacagatagaaattggagaaaatccatgttttgaaacaggaagcacattggtaaaattcatgtttttataggctttcttttgagggcacgccactgtccgacgtttcacaaggaatagaactcaagctaaaaacaaaggtctccctgggatgatgattcagaagtcagaattagagactgtgtgtctgagaaattgagtgaagaagttcaggagcc

SEQ ID NO: 361403 - DNA, 524 bp, Homo sapiens
aagatggatagtggataaaatgactttccataaggaagatacagaatcttgttcctcattacagcaaagtagcttattattataacataataacctctgaataaagtatttttaaaagcatatatttgcaggctcagaaaagcaaacaaaacagatagaaattggagaaaatccatgttttgaaacaggaagcacattggtaaaattcatgtttttataggctttcttttgagggcacgccactgtccgacgtttcacaaggaatagaactcaagctaaaaacaaaggtctccctgggatgatgattcagaagtcagaattagagactgtgtgtctgagaaattgagtgaagaagttcaggagccccaaatttgcataaaattcccctcctatcactggttgacacttaactgtgcatgtatatgacaagaacctaagtggccgatgtgaatcatgaagaagtttgaaaggaawgaagagagattccgaaagtttcccattttaggggaaataaccttgaaagc

SEQ ID NO: 361404 - DNA, 568 bp, Homo sapiens
atagttgatatagtttggataattttctcttcaatctcatgttgaaacatgatctccagtgttggaggtggggcctagtgggaggtgattgaaacatggggaaggaattctcatgagttggttctgtcttcgtgacagtgagtgtgttctcatgagatctaggtgtttaaaagttggtgatgccttttctccctctctcattcccactttcactttcgcttctgtttttcctttcatcatgaataaaagctccctggatccttcccagaaaccaagcaaatgctggcaccatgcttcttgtaaaacctgcagaacggygagccaattaaacctcttttctttgtagattatccagcctcaggtatttctttacagtaatgcaaaaaatgacctaatatttcattgtacagtaggcccccaaatgtcattttggtcaacagctttttcttataacattgatgaggaaaaaataaaataaaacattcctggtgaggccactgtctgtgtgttagcaaattctttccgtatctgcctgggttttctctggacactccagtttcccaaagct

SEQ ID NO: 361405 - DNA, 543 bp, Homo sapiens
atagaaggatggttaccagaggataggaagggtagtgggtggattgagggcaggtgaggatggttaatgtgcacatacacacaaaatagaataagacatagtattattcataacacaacagggggacctatagtcattaataatttaattgcacatttaaaaataactaaaagtataattggattgtttgtaacaccaaggataaaygcttgaggggatggatacccaatttttcatgatgtgattatctcacattgtatgcctgtatcaaaatatcatgtgtgtctcataaatatatacacctactatgtaccaaaaatttaaaaatagaaaaattaaaaaattaaaaataaaagtgacttttatgaaatattcttaatttcagtgtaaggcatttgctcaatattttcctttattcttagtttttctaatctgctaaataattattttactccatagatctgttctgttattttctagacactcaagcttttgaatctgccatatttgggtataaaattcatcaggaattcagttttgttt

SEQ ID NO: 361406 - DNA, 580 bp, Homo sapiens
cccttctcttcttttgcactctgaaccagtcctgaaagtagatattcatgtaagagaaatggagatctattatcaactttattatgagtacaggtagactagggaatgaatgttggaattagcatcaccattgacttctaaaatttctctgaattaagcttaccaccccaaaatactctgggtctaagctatggtctcagaaagaaattagrgtcatgtaagtaagtttaaataaaggagctatttagaaatgtatagacaaggcataggaatgccaaagacccatggactggttacaggagagctatttcaatccctgaggcacaaagcagttataaaacacagaaggagaaagtcatgcagggagggccatgttgagacgaggtgggcatccctgcagggaggcaaaccagagcaatacacaacctgaactcaatattctgcttctattggatcttctgccaggactccctattggtcatgtacacccagaagccagagggggaaaaaaaaagtcacttatatttcaaccaagtcagcattctgggatggatgccaggctaaaagaaagtagacagtg

SEQ ID NO: 361407 - DNA, 580 bp, Homo sapiens
cccttctcttcttttgcactctgaaccagtcctgaaagtagatattcatgtaagagaaatggagatctattatcaactttattatgagtacaggtagactagggaatgaatgttggaattagcatcaccattgacttctaaaatttctctgaattaagcttaccaccccaaaatactctgggtctaagctatggtctcagaaagaaattagagtcatgtaagtaagtttaaataaaggagctatttagaaatgtatrgacaaggcataggaatgccaaagacccatggactggttacaggagagctatttcaatccctgaggcacaaagcagttataaaacacagaaggagaaagtcatgcagggagggccatgttgagacgaggtgggcatccctgcagggaggcaaaccagagcaatacacaacctgaactcaatattctgcttctattggatcttctgccaggactccctattggtcatgtacacccagaagccagagggggaaaaaaaaagtcacttatatttcaaccaagtcagcattctgggatggatgccaggctaaaagaaagtagacagtg

SEQ ID NO: 361408 - DNA, 580 bp, Homo sapiens
cccttctcttcttttgcactctgaaccagtcctgaaagtagatattcatgtaagagaaatggagatctattatcaactttattatgagtacaggtagactagggaatgaatgttggaattagcatcaccattgacttctaaaatttctctgaattaagcttaccaccccaaaatactctgggtctaagctatggtctcagaaagaaattagagtcatgtaagtaagtttaaataaaggagctatttagaaatgtatagacaaggcataggaatgccaaagacccatggactggttacaggagagctatttcaatccctgaggcacaaagcagttataaaacacagaaggagaaagtcatgcagggagggccatgttgagacgaggtgggcatccctgcagggaggcaaaccagagcaatacacaacctgaactcaatattctgcttctattsgatcttctgccaggactccctattggtcatgtacacccagaagccagagggggaaaaaaaaagtcacttatatttcaaccaagtcagcattctgggatggatgccaggctaaaagaaagtagacagtg

SEQ ID NO: 361409 - DNA, 547 bp, Homo sapiens
ccatacaatttcaaaatccagcagagcagtcattaaatctttaakctccaacatctcatttaattccatgtctcacatccagggcatgctgatgcaaagggtgggttcccacagccttaggcagctccacccctgtggctctgcagggtacagcccctgtggctgctttcatgggctggcattgagtgcctgtgatttttccagatggatgctggtgctagctgttggtggatttaccattctggggtcttgaggagagtgacccatttctcacagcttgactaggcagtatcctcgtgggaagtcagtgtgggggcttcaaccccacatttcctttccacactgccttggcccaagttctccatgagggctccatctgtgctacaaacttctgcctggacatccatgcatttccatacatcctctgaaatctgggcagaagctcccaaagctcagttgttgtcttctgcacatctgcaggcccaggaccacatggaagccaccaaggcttggggcttataccctctgaagcgatgagccaagctgt

SEQ ID NO: 361410 - DNA, 428 bp, Homo sapiens
tagggttttgtgaaaactgtgggctggtaacttaagcttaggatttggagagagtcaagacaaggtttacatgacaagaagaaaaattattgcattagcttatgtgtaaaactcaaggcttagtagaatttttgctcaatttggtttctaaaagcatttccaagattttattttcaaactaaatatttatgttaatatgttatgttaatgtgggcttaacagccttgttctggaaataaacttgtcttttttatgatatttctatggtgattctcccaaatataagttgatgatcaaatacagttctgagtatctaaatgacttttaaattayttgcctctttatatgaagccagggactttataccaagaagaaatcatacctagctacttttgtttcaggaaagaaagggattttgtgatgagata

SEQ ID NO: 361411 - DNA, 571 bp, Homo sapiens
tacttcatttgtataatcaatttcatcatcattttagagtctggagtgttaccatccctctctctagattcattatctcatttttctaataattgtggattaggtttcaacttacaagtttgaggggacacaaacatttggaccatagcatgtctttttgttttagtcttttttaaaagaatactttggaataattgataaataatgataaaataaattctgaaatagcaaaatgtttcaagacataggaaagaaaaaattacgaagattccatcatgtgttttagatttataaaagagtccagtggattcctgtgctaattcaagttaagtgagttttattctattaagaagtagtacactttgtatttttgtggaaggcttctaagaaagaataaaaatgatgtcaatcatcacaaacagaactgttcaaaatcaaagaaaaaaatgaaaattggatccaatggaccttgattgcatattgacggttaacccactcttatcaagcattctgcctcaccttgaacccagtgaaataatcctttaaggtcaytgaaacttaagtgttgata

SEQ ID NO: 361412 - DNA, 577 bp, Homo sapiens
catccgttctaacactgctaataagacatacctgagactgggtaatttataaagaaaaaaggtttaattgacttacggttccacatggctggagaagcctcaggaaacttacaatcatggcaaaaggggaagcaatcacgtctttcttcacaaggcgacagcagagaggagaaaaaccccttacaaaactatcacatctcatgaggactcattatgatgagaacagcgtgagggtaaycacccccatgattcaattacctcccaatgggtccctcccatgacatgtggggattatgagaactacagtttaaaatgagatttgggtggggacacagccaaaccatgtaatttattatgtgtaatcaaagtttgaaattttgttttggccatgacatacactaagaaatgtattttactttatggtccaaatcatacatacatacaaacatatataagtgtatgaagttgaaaaaaaattcacacagctatacttactctttcaacatgtaatgttctctgacattttctatgtgattctattttatttccattaaaaattgaattatggttacactaa

SEQ ID NO: 361413 - DNA, 605 bp, Homo sapiens
cccttacaaaactatcacatctcatgaggactcattatgatgagaacagcgtgagggtaaccacccccatgattcaattacctcccaatgggtccctcccatgacatgtggggattatgagaactacagtttaaaatgagatttgggtggggacacagccaaaccatgtaatttattatgtgtaatcaaagtttgaaattttgttttgrccatgacatacactaagaaatgtattttactttatggtccaaatcatacatacatacaaacatatataagtgtatgaagttgaaaaaaaattcacacagctatacttactctttcaacatgtaatgttctctgacattttctatgtgattctattttatttccattaaaaattgaattatggttacactaaattgatttcataacccaccaatgagtcacagtctaagtttaaaaacacgaacactgttgtgtccacaagataccatgacaacaacaaagaaaaaaacgtctaaatcagatgggagggtcaaaaggggtttatcagaacacttcctaacttctgggaaatagaagatgtccacaatgttgaaaatcaaatttggtgtattttctcc

SEQ ID NO: 361414 - DNA, 605 bp, Homo sapiens
cccttacaaaactatcacatctcatgaggactcattatgatgagaacagcgtgagggtaaccacccccatgattcaattacctcccaatgggtccctcccatgacatgtggggattatgagaactacagtttaaaatgagatttgggtggggacacagccaaaccatgtaatttattatgtgtaatcaaagtttgaaattttgttttggccatgacatacactaagaaatgtattttactttatggtccaaatcatacatacatacaaacatatataagtgtatgaagttgaaaaaaaattcacacagctatacttactctttcaacatgtaatgttctctgacattttctatgtgattctattttatttccattaaaaattgaattatggttacactaaattgatttcataacccaccaatgagtcacagtctaagtttaaaaacacgaacactgttgtgtccacaagataccatgacaacaacaaagaaaaaaacgtctaaatcagatgggagggtcaaaaggggtttatcagaacacttcctaacttctgggaaatagaagatgyccacaatgttgaaaatcaaatttggtgtattttctcc

SEQ ID NO: 361415 - DNA, 523 bp, Homo sapiens
gtatataagcaatagaataaatgaaagaataggggagttcaggaaatagctctaaaatacacatgccacacttaatttctattaattcacaatttgtgacaaagtcaaatttcaattttctgtcccagaaagcatatgcyaagtctttaaacatttgtttaccatatatttatgtagtgcctctaaaattcctagaactatattactatttacttgcaggagtaattataatacttaatatttatatattactgttctataaccttgaatattgagtactactgaagtattaaatctgggatataaaggctaatcacaataatgatgataatgatagtaatagctagtatttatcgagtgctttctaccctcaacatccaatttagaatgatctctagtgagcttgagttactattgactgtggaatataactttatgtgattagttgttccacctacatgttggaatttcttgcatttaataagttttctctaaatgatgcttgaaataatctagtgggaaa

SEQ ID NO: 361416 - DNA, 512 bp, Homo sapiens
ggagagtggattgattttcaataattgctatagccctccttcacattcaagttactccccacctctttttttaaggtcactctttttttttttgtaaagcttctctttagggaacacagattgaaagcaatgttatggagtcagttttgttttcttgmccactggaatgagttctttgttggagagctgcttctaggtatgaagaaacctcagcaaaaattcttggaggcagaggctgagtcttcagggctgagaaccacccatactcacgtctcccatgtggagggatgccattttgcatgaatgatggcaaacaacaacaagaagaaacaaacaaaaacaggctttcagtgaggaaagcctagaggaagccaggtggagcagatgagaccaggctcagaaggggaaagaggggagaggaggacttgtggaccctcggttgagaaggggaattggagaaatacctaaggggatcttaggttcttttctgtgaatattctctcaggatacca

SEQ ID NO: 361417 - DNA, 512 bp, Homo sapiens
ggagagtggattgattttcaataattgctatagccctccttcacattcaagttactccccacctctttttttaaggtcactctttttttttttgtaaagcttctctttagggaacacagattgaaagcaatgttatggagtcagttttgttttcttgaccactggaatgagttctttgttggagagctgcttctaggtatgaagaarcctcagcaaaaattcttggaggcagaggctgagtcttcagggctgagaaccacccatactcacgtctcccatgtggagggatgccattttgcatgaatgatggcaaacaacaacaagaagaaacaaacaaaaacaggctttcagtgaggaaagcctagaggaagccaggtggagcagatgagaccaggctcagaaggggaaagaggggagaggaggacttgtggaccctcggttgagaaggggaattggagaaatacctaaggggatcttaggttcttttctgtgaatattctctcaggatacca

SEQ ID NO: 361418 - DNA, 498 bp, Homo sapiens
tacatacatacatatatatgaaatacacacacacacacacacacacacaaacacacaccccacatgttctttattcattcatctatcagtaggcatttaggttgcttccatcccttggctattgtgaataaagctgcaataaacataggtgtggaaatctcttcacgatcctgttttgaattcttttgaatgtatacccagaagtgaaattactggatcagatcatatgggaattctatttttaattttttgargaagctccatgctttattttctatgatggctgcatcattttaaattcccaccagcagtgcacagaagttctaatttcttcacatcctcaccaacactagttattttctgttatttatttttttgttagtgatattttaatggtgtgaggtgctttctcatgtggttttgatttgcatttccgcagtgattagtgacgttgagcatctttttacatgcttgttggccatttgtatatcttctttg

SEQ ID NO: 361419 - DNA, 556 bp, Homo sapiens
  misc_feature (1)...(556): n = A,T,C or G
atctcattgtggttttgacttgcatttctctgatggccagtgatgataatcattttttcantgtgtctattgactccttgtgcagaaatgtttaagtttgatgtagtcctatttgcctatttctgtttttgttacctgtgcttttggtattatatccaagatatcattgctataagctttttccctatgttttctkctaagagttttgtaattctaggttttccattgtgagttaagtttcatatgtggtataaggtgaaggttaaactgtatttttttgcatgtagatatacaatatacccaggaccatttgttaaagggaatgacttgctgttgtcattttgttaattgttttctgtcttgaagttgttttctttctttttttctgaattgccgcctttctttttatttcattgatattttgtagtagcatgctttaattcttttaaagttttcttttgtgcataatatataggtattttatttgtggttaccatggggattatataaaacatcttatagatataaccatctattttaaactgtagcaacttaa

SEQ ID NO: 361420 - DNA, 556 bp, Homo sapiens
  misc_feature (1)...(556): n = A,T,C or G
atctcattgtggttttgacttgcatttctctgatggccagtgatgataatcattttttcantgtgtctattgactccttgtgcagaaatgtttaagtttgatgtagtcctatttgcctatttctgtttttgttacctgtgcttttggtattatatccaagatatcattgctataagctttttccctatgttttcttctaagagttttgtaattctaggttttccattgtgagttaagtttcatatgtggtataaggtgaaggttaaactgtatttttttgcatgtagatatacaatatacccaggaccatttgttaaagggaatgacttgctgttgtcattttgttaattgttttctgtcttgaagttgttttctttcttttkttctgaattgccgcctttctttttatttcattgatattttgtagtagcatgctttaattcttttaaagttttcttttgtgcataatatataggtattttatttgtggttaccatggggattatataaaacatcttatagatataaccatctattttaaactgtagcaacttaa

SEQ ID NO: 361421 - DNA, 558 bp, Homo sapiens
gccaatctcagtgaagaatggagaagagaagcattccaggcaaaggcaacagcatgtgcaaatgctctgacctggaacttgatatggatccatataatgcaaaaaactttcatggtagaaggatgaatgctgttctaaatgcaatagaaaccattggagagtttgtaacagtgatccagtttgaatgtagtcttaatcacatttctaactattgacagcaaagtattaaaagaagaaagaaaactatgttaattatacatattactccgaaaatgtctttcatttagataaacactatttggaacttagagttttgttatctgtttggatttttgattggttcatccaagagaataattattaagttaaaacaaagtaaataaaacattttattaattttatgcattttggggcagctagacccttaggatagagataaagttttccaataatgttttttgtctttatctgactrttgagattaaactttcttcagtctggaacatgtgtccttaactagattatcaaatgaattttcccctcagtattaatttccac

SEQ ID NO: 361422 - DNA, 582 bp, Homo sapiens
aagggcaaattagcagtaacttaaaacccaggactgaaaatgtggtctctttggcctcttgattttatttctatttattgacacaaaaatccacaaattgtacaaagataggtataagaaggaacagtacatatgttcaacacagtgaatcattggaggcacttgaaatatccattaattggggagcaaattgatatgttattattcaaccattctgtgaaattctatgcaattattaagaaaaataagctcaggtgcctgacattgaaaaatctatgagatttaagaaaagcaaaattatgtggtaaaatatgtatattaatacagttgtgtaaaataaatatgatattgtttatgtattcatgtgcaagtttaaatgcacagaaaagatgtcaggaagggtgtacacaacagttcatagtggtagaggttaccccagggaagtaagcaggaacgyatgtgcatctacgcatgtgtatgagaattctttattctatattttcccatattgtttttttttgatttaatagaaatgcattcctttcattttatgtaattgaaaataaaatgttacatgtttca

SEQ ID NO: 361423 - DNA, 582 bp, Homo sapiens
aagggcaaattagcagtaacttaaaacccaggactgaaaatgtggtctctttggcctcttgattttatttctatttattgacacaaaaatccacaaattgtacaaagataggtataagaaggaacagtacatatgttcaacacagtgaatcattggaggcacttgaaatatccattaattggggagcaaattgatatgttattattcaaccattctgtgaaattctatgcaattattaagaaaaataagctcaggtgcctgacattgaaaaatctatgagatttaagaaaagcaaaattatgtggtaaaatatgtatattaatacagttgtgtaaaataaatatgatattgtttatgtattcatgtgcaagtttaaatgcacagaaaagatgtcaggaagggtgtacacaacagttcatagtggtagaggttaccccagggaagtaagcaggaacgcatgtgcatctacgcatgtgtatgagaattctttattctatattttcccatattgtttttttttkatttaatagaaatgcattcctttcattttatgtaattgaaaataaaatgttacatgtttca

SEQ ID NO: 361424 - DNA, 582 bp, Homo sapiens
accaagacttgctttaaggaaagcataggtggccgggcgcagtggctcatgcgtgtaatcgcaacactttgggagaccgaggtcggcagatcacttgaggtcaggagttcgagaccagcccggccaacatggcgaaatcctgtctctactaaaaatacaaaaattagctgggcatggtggcactcacctgtagtcccacctactcgggaggctgagacaggagaatcacttgaacccgggaggcggaggttgcagtgagccaaggtcatgccactgcactccagcctggacaamagggcgagactccatctcaaaataataataataaaacataggtaattgtcgtgtgacttaacaaacaagagataaattgaatatatataaagttaggttcatggaaaaacataaaatctcagaaggaattcaaaatgtaagagcaggtatgagacaccaatagaaattgtgaagaccactgtgaaatttcgtccaggagataaatgatctcagcagacacatagttatagaagagaacggagcattaattaaacttttacctttaaaatgatctcactccaattcacc

SEQ ID NO: 361425 - DNA, 573 bp, Homo sapiens
tatataatcccatagcactagtatatagggtctaatgtatatatggactaatatatagccccatagcactaaagttcctgtgtagtaattctgacacgtgggtcatttgagtctgattctgtttattgcattgtctctttacaatgggttgcttttccctatttttttacatgtctcataatgttttgtcaattgccagacataaagtatagaataaaagagactaaagtatatcatatctatgcctggaaatgtctctttttctgtcttgtcagagtgaaaggttgagtcagtcctgtcaaagattgagttatgtttgggttttgttgttgccttcaatgaaccatgagcttcctatcaagcctagtaaaggaaggtataccaaaaacacaagtccaaattaaagcatgagcaytttgataattagcatttgataataatgaaaaatgagactcaagagagatacagggaccataccccgagtacactgtcagccacgctgaaatgtggactttattttgcaagcaaaaattaagagatttggattttagaacatcattctggcctatggtc

SEQ ID NO: 361426 - DNA, 471 bp, Homo sapiens
ctgcatctcaatccatgttgatagtttgataaactgacaatacggtgccttttaatttatgagacagtgagagcaattcattaaacaaaattctactggccagatgcagtggctcacacctgtaatctcagcacttcggaaggccgaggtgggcagatcacctaakgtcaagagtttgagaccatcctggccaacaaggcgaaaccccgtctctactaaaaatacaaaaattagctgggcgtggtggcaggcacctgtaatcccagcttctcaggaggctgaggcaggagaatcgcttgaacccaggagatggaggttgcagtgagctgagattgccccactgcactccagcctgggcgacaagaacaaaactttgcctcaaaaatgaaaaaattctaccactttaggtcattttcctcttaggaagcactctgtatatgaggaactggggtaggggacaaggcatagaat

SEQ ID NO: 361427 - DNA, 471 bp, Homo sapiens
ctgcatctcaatccatgttgatagtttgataaactgacaatacggtgccttttaatttatgagacagtgagagcaattcattaaacaaaattctactggccagatgcagtggctcacacctgtaatctcagcacttcggaaggccgaggtgggcagatcacctaatgtcaagagtttgagaccatcctggccaacaaggcgaaaccccgtctctactaaaaatacaaaaattagctgggcgtggtggcaggcacctgtaatcccagcttctcaggaggctgaggcaggagaatcgcttgaacccaggagatggaggttgcagtgagctgagattgccccactgcactccagcctgggcgacaagaacaaaactttgcctcaaaaatgaaaaaattctaccactttaggtcattttcctcttaggaagcactctgtatatgrggaactggggtaggggacaaggcatagaat

SEQ ID NO: 361428 - DNA, 528 bp, Homo sapiens
ttggtgacaggtgaacaccttagttataggaacatcttagtttaaacayagtttctgagtttgcaagttatatactaaatagcaccaccatatggagcagatgtaggcaaagccacaaacactaagaaaatgaggtcacaattgtggaaatgagacatttccccctttttccatgcccttggttgtatgcagattgctccaacctaaagggatacatattgaactcattttctgtaatttaactgaattacaatgttcatttttatatatagctagaaagaactcagacataagaaagggtatctattagctctttctttttttttgagatgtagccttgctctgtcacccaggctggagtgaaatggcacaatcttggctcactgcaacctctgcctcccaggttcaagcgattctcctgcctcagcctcccaagtagctggcactacaggtgcccgccatcacacccagctaatttttgtatttttagtagagacggtgtttcaccatgttggccaggcttgtctc

SEQ ID NO: 361429 - DNA, 557 bp, Homo sapiens
agtaggagctaaccattgggtaaacatggacataaagatgggaacaacagacagtgggtaatacaagaggagggacagagagagggaggcagggctaaaaaactacctattgggtactatgctcacttcctgggtaatgggttcgatggtactcgaaaccccagtataacacggtatacctttgtaacaaacatacacatgcactcctggaatctaaaataaaagttgaaaarggaaaaaaaatgttactttcactgtctctcttacttggctatcatctttcaaatgaagcaacaaacttttaatgatttcaaaagacacttatgaattcagtgatgaataggggatgacccatttcttcatgttcaaggggtatgcaactcaacaaaattacaaatcactgcttgccatggtcttgtggctcccacataagtagtggttatcatgggtattgaattcgtaaatttcacagcattattgtttgccctttacctaattgtgactctacagccggtgagtccagagaaagccttggaacttgaagtacttcttttatg

SEQ ID NO: 361430 - DNA, 419 bp, Homo sapiens
ataaacaaaaaaagaaaatttaacaataacaataaggcttaagccctagtatagttttatatgcactgaaaaatatgctgttgtggcttatgrgctgttaaaagtaattttattcttgcttattcttaccatgtcaacaattgtgctaactgcaccttgtgtatacatctgataagaggtagaaatattaatttatgaattatcacaatgaaactgatgggttttttagtaatagaattattcttaaagtcatataagacaaaacaaaatttatttttgttgcccttttaaataatttattattcagataaaggtttatggtattggttttggagaagtcaacagtttgaatcacccctccaccctcgccaaggtttgccaactcctccctgggggttgaccagtctttagagctggaa

SEQ ID NO: 361431 - DNA, 419 bp, Homo sapiens
ataaacaaaaaaagaaaatttaacaataacaataaggcttaagccctagtatagttttatatgcactgaaaaatatgctgttgtggcttatgggctgttaaaagtaattttattcttgcttattcttaccatgtcaacaattgtgctaactgcaccttgtgtatacrtctgataagaggtagaaatattaatttatgaattatcacaatgaaactgatgggttttttagtaatagaattattcttaaagtcatataagacaaaacaaaatttatttttgttgcccttttaaataatttattattcagataaaggtttatggtattggttttggagaagtcaacagtttgaatcacccctccaccctcgccaaggtttgccaactcctccctgggggttgaccagtctttagagctggaa

SEQ ID NO: 361432 - DNA, 554 bp, Homo sapiens
agtttttcactgcagaagtaaagcaatcatctgtctgagacactgcctgtttctttaacacatttctatccataggttgtagcatttatttctgaatgtcataaggaaataggttacagcatttatgtcaagaatttcaytttaagtaaattattttaattgataaaattagacacagcatttttcttgctttgcctcataatctgtggagcaactgagagtattcattttactgtaaacagaagacatttctaccacttaattaaatataatatgttatataggagtattaatttcactgataagtttttgcaaaattcaaggtatcacattaacttttcacaggaattcaaatgaacaaaacaatatgagaaaataatattggaagagtataggaattaattttgaaggaaaggtaaaatggaaaattatttttaaacttggaaaatatttctcctgtcaacgtatatttaccattttaaaaactttttcaaatttgccatgaataagcagagtatgaaaaaaagttgaaagaaagaagtacttttattact

SEQ ID NO: 361433 - DNA, 623 bp, Homo sapiens
cacagcatttttcttgctttgcctcataatctgtggagcaactgagagtattcattttactgtaaacagaagacatttctaccacttaattaaatataatatgttatataggagtattaatttcactgataagtttttgcaaaattcaaggtatcacattaacttttcacaggaattcaaatgaacaaaacaatatgagaaaataatattggaagagtataggaattaattttgaaggaaaggtawaatggaaaattatttttaaacttggaaaatatttctcctgtcaacgtatatttaccattttaaaaactttttcaaatttgccatgaataagcagagtatgaaaaaaagttgaaagaaagaagtacttttattactgtactttatgtcccttacttactatgcaactaatattgaattagcaaatcaagtaaaaaggaagaaaaataattatacagctaatacagaagtgctcaaaattaactatactcttgggaagataattttacttcctatatgcaataaattatctaacaggttctccatttaaagtctttcatatctgtttcttcctttgcattgttaatatcttattcagattttgataacttcacatttag

SEQ ID NO: 361434 - DNA, 574 bp, Homo sapiens
cctttttgcccaacaccctactcattttctccacaaaatctcactcatttgacttatctctgttaagatatcctcttacctgaattcctaaacccatctatattgtataatttcaaactgaactcttgttgcttcatgtaccatattatttctstataattataaacactcagtaatacatatataacaaagtaataatctttttgttaaaatatactagcatgcagtttaagatgtgaaaggaaaataaatcttgggtccccataatcactaagctaaagataacagtcaagctgggaattgcttggggcaaaccggctttccatgctattcaaaggcatccctctgctcactgagataaatgcatatctgattgattgcctcctttggaaaggttaattagaaattcaaaaaaatgcaaccatttgttgttgcaacctataacctggaagccctctctccacttcaagttgtcctgcctttgcttcaagttgtccttcctttctggctcaaaacaatgttcatcttacatatattgattgatgtctcctgtttccctaacatgtataaaacc

SEQ ID NO: 361435 - DNA, 452 bp, Homo sapiens
gattttgcttcttaattttttttgttttatgtacaattttgtgaaactgatagtaatttccatacctgcccactacttcacctttctccaaataaaatgtacataagtacacaacatatttttatgccatttgttctggcttgtattagaaatagatttcctttttatgaaatataaagtgaattaaaaatctattgtcatagtctgaggagtttgaaatgaaattagttgctttctttagaaaaaaaaaaaaacaaaacaaaacttaaaggcaaaatgggcaggtatatcccaaaaagtaaagttgattmtgtttaaaagcatatttaaatgaataaattgctggtattttacttgaataagaagttagtattttggatttgattttgacatggcaaagctcatgtgatctttaatatccaatttagcttaacttttttatatgtaaataa

SEQ ID NO: 361436 - DNA, 636 bp, Homo sapiens
catagtctgaggagtttgaaatgaaattagttgctttctttagaaaaaaaaaaaaacaaaacaaaacttaaaggcaaaatgggcaggtatatcccaaaaagtaaagttgattctgtttaaaagcatatttaaatgaataaattgctggtattttayttgaataagaagttagtattttggatttgattttgacatggcaaagctcatgtgatctttaatatccaatttagcttaacttttttatatgtaaataaactttggtaactttattcacaggttcatagaagcacaccaaatcagagttctgatagcttatgttgccaaccaagtgttggcttatgccaaggaattcctgatttttccaaggctctttgagtcagatttatgttcaattatttcctatttttttcccaaatgaatgaggttagttttgtaatgtggcattagtcatgctcactatttcagcaacataatatttaaatctgtattttaattttaaaatgttatggtaatttaattttcagggtcctctaatgttttctggtatttgcagatttctgctcattgaggcaaggtttggtgatttatgatttcagagaagaggaactcttcttccagttttagaaagtccagata

SEQ ID NO: 361437 - DNA, 559 bp, Homo sapiens
aaatgggcaggtatatcccaaaaagtaaagttgattctgtttaaaagcatatttaaatgaataaattgctggtattttacttgaataagaagttagtattttggatttgattttgacatggcaaagctcatgtgatctttaatatccaatttagcttaacttttttatwtgtaaataaactttggtaactttattcacaggttcatagaagcacaccaaatcagagttctgatagcttatgttgccaaccaagtgttggcttatgccaaggaattcctgatttttccaaggctctttgagtcagatttatgttcaattatttcctatttttttcccaaatgaatgaggttagttttgtaatgtggcattagtcatgctcactatttcagcaacataatatttaaatctgtattttaattttaaaatgttatggtaatttaattttcagggtcctctaatgttttctggtatttgcagatttctgctcattgaggcaaggtttggtgatttatgatttcagagaagaggaactcttcttccagttttagaaagtccagat

SEQ ID NO: 361438 - DNA, 515 bp, Homo sapiens
atagaccaatcttagcttaatattttggaagttttttaattattataaagtcagggaagytcatgagagtcaccaaatatttttagacaagacttttatacatcacagaaactcttcctcttttttccgaaacctctctccaatttcagcgccctctccccgcccctcccaccatcctagtctatcaacatatattaaatgaagagggaggaccatgtagcatagttatttttgtttgtttgtttccttttttggaatgaaaatatagtacacagaattgagataatcattctcatcctatatttgacttgggtaatgatcatccacttttcttgtattaaataatacttcttttttttatttccttccaagttcccactcccacaaaagcataactttagtatatgtaatataggactttcccactatcttctaagtgtttggatacagttatatatataaaacgatattgcattgtttcttgtgggtgtttaatccatttaaatcattttgtg

SEQ ID NO: 361439 - DNA, 515 bp, Homo sapiens
atagaccaatcttagcttaatattttggaagttttttaattattataaagtcagggaagttcatgagagtcaccaaatatttttagacaagacttttatacatcacagaaactcttcctcttttttccgaaacctctctccaatttcagcgccctctccccgcccctcccaccatcctagtctatcaacatatattaaatgaagagggaggaccatgtagcatagttatttttgtttgtttgtttccttttttggaatgaaaatatagtacacagaattgagataatcattctcatcctatatttgacttgggtaatgatcatccacttttcttgtattaaataatacttcttttttttatttccttccaagttcccactcccacaaaagcataactttagtatatgtaatataggactttcccactrtcttctaagtgtttggatacagttatatatataaaacgatattgcattgtttcttgtgggtgtttaatccatttaaatcattttgtg

SEQ ID NO: 361440 - DNA, 515 bp, Homo sapiens
atagaccaatcttagcttaatattttggaagttttttaattattataaagtcagggaagttcatgagagtcaccaaatatttttagacaagacttttatacatcacagaaactcttcctcttttttccgaaacctctctccaatttcagcgccctctccccgcccctcccaccatcctagtctatcaacatatattaaatgaagagggaggaccatgtagcatagttatttttgtttgtttgtttccttttttggaatgaaaatatagtacacagaattgagataatcattctcatcctatatttgacttgggtaatgatcatccacttttcttgtattaaataatacttcttttttttatttccttccaagttcccactcccacaaaagcataactttagtatatgtaatataggactttcccactatcttctaagtgtttggatacagttatatatataaaaygatattgcattgtttcttgtgggtgtttaatccatttaaatcattttgtg

SEQ ID NO: 361441 - DNA, 620 bp, Homo sapiens
gtaattcttatttatcaacttgaaggaaaatgaacagcaatctaaataagtaagtaaattactgtctcatgacattatcaacagaaaaagaagtggacggctataagcatgtttgatgcagagtgacagggcttatcacaggacaacaaacaaagaagaaattttacttgactttaaaattcctgtatttgaaacaggaagttccagatcacttccttaaattttaataaatctctttttgtgtagttgctgcttttggtttttacctattaaaactatgatgaatatcaacctagacataatcatgaaggagatgtttcatttagtgtcctgaccaataaaaaagaacttggatctttaatttaaaaagttaaaaaaattattttgggagaaaagagcttcgaaatayattagaaacttctttgtcttaaagcacacgccaagtgagtcctttcgtttagggtgctttaggatgagccccacgtattatatttggcgggcacacgatgtcatttgaagaggtcactgaaggatgccttcgccaacagtaaatgattgcacactgctgctttctgaattaattcacaggatagttacaatttttctgcctctatccccac

SEQ ID NO: 361442 - DNA, 546 bp, Homo sapiens
aagcgacaaaacagttcccatacctagacctcataattgcatagctccacttatagataaggggaatgggaaactactaagtggtatgatattagggctcagaaataaatagagatatccctctatttaccatggggttatattcagatraatccatcataagttcagtacaccccttgatttatgatggtggtgtcactgcattgttaagtcaaaaattataagtcaagccaccataagtggggagtcatctgtacaacagtgattgagtttctcctagttaagagtcatgtggacatttgttcattcattcatataacactggttgagatttactagctgaagttctctttttagacacttagaatactatgacgggcaaaacttgcacaccccgtaccccagattcctggctttcccaaggcccttaatagcaactctctctagaagaagttatggtttaagtcatagccaagtattaatgaaaggaatcgtttccaaattgtatttaaaaaataataacaacacaaaaacttttggagtaag

SEQ ID NO: 361443 - DNA, 562 bp, Homo sapiens
tatattctttatgttaaatagaaactttaaatatagtatactctacttattctcagaagtgtttggatctctaaggcaggccttaaacatgagtgaaatatcgtaaatatgaggcataatatgagcagcactccctgaagaggtcctgtacaaaatcttctcctctgttggctggtaccagctctgaaaatcccttcaagctatcagtacctttgggattggtggtggtagagtgaggagacccctgagaggaaatctgtgttctacaaaaaaaaaaaagcgaagtctaatggaaataggaaaaagagaaatacttggaaagggtgctagagaaggggaataaaaataaaagtgcccttgtaatgatgaggtctgaacatttcagaggggaaagatagcacaagtatttaactcactcaaggagcacaacaaccatctatagttacttctgccactaaggaagagggttaatttcctccakgatggatgaccttatatccagcagaacaggttactttaaatgagaaattacagggtttcagctggagatgtgaaaatttct

SEQ ID NO: 361444 - DNA, 662 bp, Homo sapiens
atgtttctgaaataattaaaactttaacactgagaccacagaccatatgaggatcataaataagcaaagtagctatacaatctttgtgttcaggaagagaactaaacccaacaaagggtcttattaatttggtatttccttttaaacaaaagagcgacgctcagttttatcaatactcaatatccagtcctttaacagtgttataagaacacattttatggagaatgtctcttttgattttaaggttggaaggctgatattttaagattcacaaatcttacatcatattctcaaataaaaatggtattagttcttaggaaagatctccctttgatctgcttagggggtcacttaaktgaaccctttagtttatacatataggtaagaaataacactttcaaatttctttcattgttcttgaaaagaaaaattgaaatagaaggacttggtcttggtctattaacttaagcagatatcctcagcagaacactacctgtaaatatttcaagaaatgtttttgttgttgtttttttaacttttattttaggttcaggggtatatgtgcaggtttgttatatatgtaaattgtgtgtcacgatggtttggtgtacagattattttgtcacccaggtaataagcatagcacccaataggtagttttt

SEQ ID NO: 361445 - DNA, 540 bp, Homo sapiens
tgattaaggggaggaaagtagtggatagataacctaggaggaggagttggcaagagctggaggtcaggtaccagcaaaatggatcagaatcagttctgtatcagcagcaggtttggaaaattgagttggaaatctagttatatgtactgacaagttaarggtattcatattgatcttgtaggttacaaattgttgctagtggagtgtagctcatgatctcccagttttatccctgacatgtctgatatctgggagactgacatctggaccccaccaacttgtgggtagatgatgataaacatttttcctgatttggatcagctttggtgaattccctcagtaattctatttatgggaggctgagtaatgtatacattcttaactttctgaggtttaagttagccacctgaatgtaagagagatcagattaaacaatgaagaaatcagtggctattaaaataacagttatcctttgctgcttgcatgtggcaaagatttgggagacagagttgcctttaacatgaagaaaggaaagaaaat

SEQ ID NO: 361446 - DNA, 540 bp, Homo sapiens
tgattaaggggaggaaagtagtggatagataacctaggaggaggagttggcaagagctggaggtcaggtaccagcaaaatggatcagaatcagttctgtatcagcagcaggtttggaaaattgagttggaaatctagttatatgtactgacaagttaaaggtattcatattgatcttgtaggtwacaaattgttgctagtggagtgtagctcatgatctcccagttttatccctgacatgtctgatatctgggagactgacatctggaccccaccaacttgtgggtagatgatgataaacatttttcctgatttggatcagctttggtgaattccctcagtaattctatttatgggaggctgagtaatgtatacattcttaactttctgaggtttaagttagccacctgaatgtaagagagatcagattaaacaatgaagaaatcagtggctattaaaataacagttatcctttgctgcttgcatgtggcaaagatttgggagacagagttgcctttaacatgaagaaaggaaagaaaat

SEQ ID NO: 361447 - DNA, 580 bp, Homo sapiens
agctggtagagggtcttgcctcaatgtctgtggctgctgactgattggcgtggtggttgctgatggttagaatggaggtggcaatttcttaaaataagatgacattgaagtttgtgttatcaactgactcctcctttcctgaaagaattatctgtagcatgtgatgctatttgatagcatgttacccacagtagaacttctttcaaaattggagtcagtcatctgtaaccctgctgctgctttatcaactaagtttatgcaatattctaaatcttttcttgtcatcttatgaacgtttatagcatcttcaccaggagtaagattctatctccagaaaccaccgtctttgctcattaagaagctactccttatccattgaagttttgccatgagaatgcaacaattcagtcacattttcaggccccacttctaattccawtttcttataatctctaccacatctacagttactttctccgctgaagtctcggacccctcaaaatcactcaggagggttggaatcaatttcttccaaactcctgttaatgtggatattttgacttcctcccctgaatcacac

SEQ ID NO: 361448 - DNA, 612 bp, Homo sapiens
gaccaatgtctctcataaacatagatgcaaaagtcctcaacaaaatattggcaaataaaattaaacaatacataaaaagaattataaactaagacaatgaaatttattctggatatgcaagattggttcaatattcaaaattcagttaatgcatgacatcattagcaacagactaaagaagaaaaatcacatgaacatattaatagatgtagtaaaacatttgacaaaatccaacaccaattcatgataaagcaagctaagaataaaagggaacttcttcaacttaacgaaaattacctataaaaagcctttagctaacattatacgtactggtaagaaataactttcccgctaagactgagaacaaaacaaaaatgtccccttttacctactcattttcaacaccatagctaatgcaatgagataaaaaatgggaataaaaagtatatatattgggaaggaagaaataaattgtctttgcttgcatatggcattatyttctatgttgaaaattggggaaaatgacaaaaaaaagaaattactatagaactaatgaactattatagcaaggttgcatgatataagcttaatttacaaaagtcaattgctttc

SEQ ID NO: 361449 - DNA, 565 bp, Homo sapiens
ttataaaagtatctgcttgattcaaacaatagagcaagaaataatacattttaaatctcattttccattaaaatacccattaacatataattaggaaaagaactctagaattcttgttagactctaggaatttcagtgtaaagaattgcaataataaagcaacgtagaagaattgctataataattatagcatagattggacaaaattaaaaaataagatgatgcacatctaaccttttaaatcaaaatgaggcatgcaggaggaaatgtattaggacgytgccagcaggatcaaactgactcaggttgcacctcacagaaagaaaatggcatcatccttgtcccaaagaaaaagtctttcactacaattcttaaaaagaaaaagaaagaaaaattctatctatagcagtagaaatcttcttttggacctccattcttcttcaacactttgtagttttagaattcagaatattgatgttattcgtacacacacacacacacacacgcacaagtgcgcgtgtaaaggaattgaatcaacttgcagaatgaatgcagttaaaaataa

SEQ ID NO: 361450 - DNA, 438 bp, Homo sapiens
gatattactgactatattgtccttttatakaggttatgatcctatcaggtcttaatatcaagaaaagttgtgtaattagagattaaatatattttaaaagtttttctaattcagtgaacaaaaatctgatacacttccttttactgtaacaattaatcagagtcattttgagctgcttctgtagcaattatacaaatatggtttgcattaaccgggttttattactttttatctctattttgcttttacctaaaattttattctgttctttattacatacagtttgcaagaaattgtaaacacttggtgaaataagaaaataagaaaagggatgtaaacctataaataagtctaataattatttattgtgtttcagatcacagagaaatgctttacaaaaatctttactctggatatctttttagatggacattccag

SEQ ID NO: 361451 - DNA, 438 bp, Homo sapiens
gatattactgactatattgtccttttatagaggttatgatcctatcaggtcttaatatcaagaaaagttgtgtaattagagattaaatatattttaaaagtttttctaattcagtgaacaaaaatctgatacacttccttttactgtaacaattaatcagagtcattttgagctgcttctgtagcaattatacaaatatggtttgcattaaccrggttttattactttttatctctattttgcttttacctaaaattttattctgttctttattacatacagtttgcaagaaattgtaaacacttggtgaaataagaaaataagaaaagggatgtaaacctataaataagtctaataattatttattgtgtttcagatcacagagaaatgctttacaaaaatctttactctggatatctttttagatggacattccag

SEQ ID NO: 361452 - DNA, 438 bp, Homo sapiens
gatattactgactatattgtccttttatagaggttatgatcctatcaggtcttaatatcaagaaaagttgtgtaattagagattaaatatattttaaaagtttttctaattcagtgaacaaaaatctgatacacttccttttactgtaacaattaatcagagtcattttgagctgcttctgtagcaattatacaaatatggtttgcattaaccgggttttattactttttatctctattttgcttttacctaawattttattctgttctttattacatacagtttgcaagaaattgtaaacacttggtgaaataagaaaataagaaaagggatgtaaacctataaataagtctaataattatttattgtgtttcagatcacagagaaatgctttacaaaaatctttactctggatatctttttagatggacattccag

SEQ ID NO: 361453 - DNA, 638 bp, Homo sapiens
ccatttcctctgatctggtcttatatcttctaattgtgtcactgaccaatggcttcaactgctgctgattctgtgagtaagcttttgtgtgagcaaagctaaaccattggtagttattctgatatgctgcctttgacaatacatgacctacratctgcattatcctcacctgttccatccaatttgatatatgagatagccttctgggttattcaactccttcaatcctgtctctttacctcagacattgcctgatctcaaggaagagaatttcattccctttcttttaaactacagcacagatgtgactaggataagaatttcaacaagactactgaagctgcagtactggacaatgcacagagtaacttgaaatttgtcctagacataattactcataataacccacctgttcaaatctgttgtcaggatctctgctcagctcttacaatgtttccttgtgctagtgggaacaagctcaacccccacaatgggaatctcctgagactcacacatctcagttcttgtatatgcttgttttctgtgtttctgagaaacacagaagttctttcctcctctagtctaagttccatttcctctccagtcacaggaaactgacatattctcttggagaaatt

SEQ ID NO: 361454 - DNA, 599 bp, Homo sapiens
tacttctattcacctttattataggtaggatgcaaggattcatgggattgtatgtctgttcttgttttgtttaaccatatggaaagattttcttccttgtaaccctattattattattttttaagttgaayaggtaactattgttctgacagctaatttcccatctgtttctgcctcctagattcagagaatgagatgtgcacttaatttactataatgggttgagttgcgtcccctaaaaagatacattcaagtcataactcctggtatttgcggatgtgtgtttatttggaaatgggttatttacagatgtaatcaaattaaaatgaggttataatggattagggtgggctctaaatccaatgattagtgtccttctaaggatagggagacttggaaatacacagaggtagaaatgccatgccaggttggaggcagagcctggggtgatgtaacagtaagccaagggatgctgaagattactggcagctaccaggtgctggggaaaggcattggaggggtctatcctaaagactccagaggaagtaaggccttactgacatcttgatttcagacatctagccccagaattgtgacag

SEQ ID NO: 361455 - DNA, 599 bp, Homo sapiens
tacttctattcacctttattataggtaggatgcaaggattcatgggattgtatgtctgttcttgttttgtttaaccatatggaaagattttcttccttgtaaccctattattattattttttaagttgaataggtaactattgttctgacagctaatttcccatctgtttctgcctcctagattcagagaatgagatgtgcacttaatttactataatgggttgagttgcgtcccctaaaaagatacattcaagtcataactcctggtatttgcggatgtgygtttatttggaaatgggttatttacagatgtaatcaaattaaaatgaggttataatggattagggtgggctctaaatccaatgattagtgtccttctaaggatagggagacttggaaatacacagaggtagaaatgccatgccaggttggaggcagagcctggggtgatgtaacagtaagccaagggatgctgaagattactggcagctaccaggtgctggggaaaggcattggaggggtctatcctaaagactccagaggaagtaaggccttactgacatcttgatttcagacatctagccccagaattgtgacag

SEQ ID NO: 361456 - DNA, 599 bp, Homo sapiens
tacttctattcacctttattataggtaggatgcaaggattcatgggattgtatgtctgttcttgttttgtttaaccatatggaaagattttcttccttgtaaccctattattattattttttaagttgaataggtaactattgttctgacagctaatttcccatctgtttctgcctcctagattcagagaatgagatgtgcacttaatttactataatgggttgagttgcgtcccctaaaaagatacattcaagtcataactcctggtatttgcggatgtgtgtttatttggaaatgggttatttacagatgtaatcaaattaaaatgaggttataatggattagggtgggctctaaatccaatgattagtgtccttctaaggatagggagacttggaaatacacagaggtagaaatgccatgccaggttggaggcagagcctggggtgatgtaacagtaagccaagggatgctgaagattactggcagctaccaggtgctggggaaaggcattggaggggtctatcctaaagactscagaggaagtaaggccttactgacatcttgatttcagacatctagccccagaattgtgacag

SEQ ID NO: 361457 - DNA, 638 bp, Homo sapiens
ccatttcctctgatctggtcttatatcttctaattgtgtcactgaccaatggcttcaactgctgctgattctgtgagtaagcttttgtgtgagcaaagctaaaccattggtagttattctgatatgctgcctttgacaatacatgacctacgatctgcattatcctcacctgttccatccaatttgatatatgagatagccttctgggttattcaactccttcaatcctgtctctttacctcagacattgcctgatctcaaggaagagaatttcattccctttcttttaaactacagcacagatgtgactaggataagaatttcaacaagactactgaagctgcagtactggacaatgcacagagtaacttgaaatttgtcctagacataattactcataataacccacctgttcaaatctgttgtcaggatctctgctcagctcttacaatgtttccttgtgctagtgggaacaagctcaaccccyacaatgggaatctcctgagactcacacatctcagttcttgtatatgcttgttttctgtgtttctgagaaacacagaagttctttcctcctctagtctaagttccatttcctctccagtcacaggaaactgacatattctcttggagaaatt

SEQ ID NO: 361458 - DNA, 461 bp, Homo sapiens
gggtacatctttatcagcagcacgaaaatggactaatacacttgccttttctctcttcagcgttttcaagatctattgttgataatatataatatcttacaagttatttaattctctaatgtatgggaagcagcgtagcatcgtccttgctgttgctatggtatttattgctgttgagccttcaggaaacctctctgcatctcggtttcctcatctataaaatggagatgataactgtacttacatcatggagctgctatgaggatcaaagaagttatcaacacttcagaatayggccagcacataggaacaatatatctatttgctaaatcgaaggtaacaactgttgactattttgtttttaattttttactattactaacaattttttcaaaaatgtttcatacacatagctttgttcctttgtgggagtgttgctcaatagtatattatacgtggaa

SEQ ID NO: 361459 - DNA, 609 bp, Homo sapiens
ctggagcctctgggtaaaatttcatcttcaccaccttcttatgtaactcataagattatttttaggactaaatggcattttttttatatatatatatatatatatatatatatatatawagctattaatattatacctggcacataataaatattcattaactattagctattattatttctttcctttaatactattagagctatagggttatatagttctatatatttagagagtttaattaaattaggcttcatcgtataatgatataggaagaagttattatcctaacagataatatttgggaagatatttaataagctttctctgtggtataaatgagtattctattttctggccttctacatttcaggataaaaagaaacctactttgtatggaaaaggagaaagaaaagagtaagattgaactatgctttgctgcatggtgggtttgatgaaagtggagtcacgctgattggtgctcaagataaatgtcttaggggaagactcatacccagtggaattttttttagtgaaatatcgtggctcatggactgtgagatttgtcatttgttttcaataaaatgataaaaatcataatttattttg

SEQ ID NO: 361460 - DNA, 591 bp, Homo sapiens
actcactcagtaactaatttattgccaggggaactaatccagtgtcaagacagtgagagctcactacctcaagaaaggaaccaagccattcatgagggctctgcccctaagacccaaacacctcccactaggccccacctccaataccaccacattggggatcaaattttaacacaagatttgatggagacaaccaaatcatatcaaaaccatcacagtgtgtgacaaatttaggactaagtgagcttcagtagtgcccaggattgtttacaagaaacaagcagagttttaatcacaggcaggaaatgtaagtatatcacataaatgttttattttcccttttgtgtaatgtggtcttattgatgcataatcttaatatgttattctagttttcacctgcacattaatcaacacattctacctaatayattttacatttgctacattgattaaggaacaaagaatttctgacctgtagtacagttggccttcagtatccacaggctccccatctttggattcgaccaactgaggatcaaaaatattttttaaaaacccaataaaaaataatacaaataatacaaataaaaa

SEQ ID NO: 361461 - DNA, 591 bp, Homo sapiens
actcactcagtaactaatttattgccaggggaactaatccagtgtcaagacagtgagagctcactacctcaagaaaggaaccaagccattcatgagggctctgcccctaagacccaaacacctcccactaggccccacctccaataccaccacattggggatcaaattttaacacaagatttgatggagacaaccaaatcatatcaaaaccatcacagtgtgtgacaaatttaggactaagtgagcttcagtagtgcccaggattgtttacaagaaacaagcagagttttaatcacaggcaggaaatgtaagtatatcacataaatgttttattttcccttttgtgtaatgtggtcttattgatgcataatcttaatatgttattctagttttcacctgcacattaatcaacacattctacctaatacattttacatttgctacattgattaaggaacaaagaatttctgacctgtagtacagttggccttcagtatccacaggctccccrtctttggattcgaccaactgaggatcaaaaatattttttaaaaacccaataaaaaataatacaaataatacaaataaaaa

SEQ ID NO: 361462 - DNA, 506 bp, Homo sapiens
ggagacaggtaaatactgggtagaagagagcagttccacagcaaaggccccaccctcaagcatggatacccacagccctaaatgggaacaggcattcctgttttcacacccagaaagttgctttttggcccaccacgcccacctatcctgtacccatataaaccccaaatccccagctccaggtgaatagaagagcataagagtggcagaaaaggagagaaaagtagaaatctcaggagcagttctgctggggaccattggcaaatcggccgctggatggccaaactccaggggaagakcatcttaccactccatcccctttccagctccccattcatctcactgagagctaactcaccacccaataaaacccctgcattcaccatccttcaagttcgtgtgtgacctgatttttccaggatgctggacaagagctcgggatacagacagctgtcacattggcccctgcccttgcagaaaggcagagggtccactgaggtggttaa

SEQ ID NO: 361463 - DNA, 569 bp, Homo sapiens
ggacggagcccaggggtgctcgccccagctcctgcacctgttcatcttcatgttcccccacccataaggggtttgagcagcagcagcaactgaacagatgagccacacccctgtcacatccagtgagggggataatcacattggtgattaagtttcaacatatgaatttggggagactttcagaccatagcacttgcttagaacattgctgccacataggaaggaattaataagaagtagctactattaacaaggttattcccactgaaaaaacccagagctcctgattgaactttgctcatagtacgttacaaatatttggggagaaaaacaatcaatcctttctcaggttacgcaattcacaattttaaatagatataataaagcaattgctcagaatatgaacaattgatcttggtggtcagatcagatgacaatttcttttaagtctcctgatattgtrtgaccattgtatgatgaaataaacagtattctccacaatagccaaatagtaaatataatgacaacttcaatcctcaatataggatgatggcatcataccagaaccc

SEQ ID NO: 361464 - DNA, 580 bp, Homo sapiens
tgtctataatataatctataagtctgcctttctaaatcaatatgtgggtaacatttcccttacatctatcctatagagtattttataccaccgccagtaccaataaaaaaaaaaacttggtgagaagtttcctattgataataatatatatacttctctgaatgtatgccttacagtgaagcaatacttccattcctgcccaaatcagagcactttcaaacctgacaccaatcctggtacttagaaacctataaatgattatctcagccatgggctacataaaataaattaagttttaaagatcataaaagtaaaaccatgtgtctaaacatatggcatgttcattggcagtgtgaatgctcattatatgagaaatmtcatccagtttgtcaggaaactgaatcaaatatttcctgccatgtaagccaaagggctcaaagcagtccccctaaggtttatggtgaattcacctgctgaaaatacttaatgctaaggataatacagaggtaagaagctaaaaccataaatgaggaaaagtaaaaattctaaaatcagtacttataagtccaaacctcaaatg

SEQ ID NO: 361465 - DNA, 580 bp, Homo sapiens
tgtctataatataatctataagtctgcctttctaaatcaatatgtgggtaacatttcccttacatctatcctatagagtattttataccaccgccagtaccaataaaaaaaaaaacttggtgagaagtttcctattgataataatatatatacttctctgaatgtatgccttacagtgaagcaatacttccattcctgcccaaatcagagcactttcaaacctgacaccaatcctggtacttagaaacctataaatgattatctcagccatgggctacataaaataaattaagttttaaagatcataaaagtaaaaccatgtgtctaaacatatggcatgttcattggcagtgtgaatgctcattatatgagaaatatcatccagttwgtcaggaaactgaatcaaatatttcctgccatgtaagccaaagggctcaaagcagtccccctaaggtttatggtgaattcacctgctgaaaatacttaatgctaaggataatacagaggtaagaagctaaaaccataaatgaggaaaagtaaaaattctaaaatcagtacttataagtccaaacctcaaatg

SEQ ID NO: 361466 - DNA, 609 bp, Homo sapiens
gctaacagtccagcacagtgactctcaaatggtctcwtttataattcatttaagaagatcatcttgatagccatactatgctgaaacatgtatatttgttctattttccatgatgctaccatcctcaaaaatcttcactgcagcctttaaaattctgtccttttaaaaaatatggtggaggtccataatttagtggtacttttacaaaaagggttaaagattgaacagcgaaaaacttctatagattaagataagagagggatagttccagtttgtgaatattacttgtcatttgttcttcctcgaaattgtactacttttttttattaaaagtcattataaaaagttattttctctatgttcaaactggaacaaatgggcttacattaaagcttatgggatttaagttagatacctggaaggagctgctgacaaaggagtctgttaagccctgaattgtaaacttggaaaatctttttatctgctagcctttaaaagaaatacagggtggttttctcaactaagtttgttgaaagacagagaatctaggctagctaacgtttcttggaacattttcagcactgattttctctgatttggtgattatgt

SEQ ID NO: 361467 - DNA, 586 bp, Homo sapiens
tttaatgttaatatattcatagaaaaatattggaaggaatatgtgccaaagattaccgtggctatttctggggcatgatgtatgtatttcataatgtttacatttttatgaacatggattacttttgcaaacaggaaaaatccaatgacgttgaattatttccccaagggaaggaaggaaataaaaaaggaaccggctggtaatgagatttattcactgtctttgggtgagagrcttcagtgtaattccacggtgagtgcactctgattccggcaccctgggcaagggcgatatgtagtaaaaatgaacggaagtgaccatgcccacaccaggggccgcagacaaacggcctctctccgctcccttgccctggtctcctgcttgttgctgcggctactgctgctgctcctgactcttggctgatgcctgagtgcctgctttcttcccatttccttctctcaccctgcaagccgctgtagaggacacttaaacatggtggtaaagaccttggcctttagaggtaggtagccctaggttcaaaccccgacttcaccactttcctgtgtgactttggaacatttactgc

SEQ ID NO: 361468 - DNA, 584 bp, Homo sapiens
agagcaggcgttagcctcctgatggccacctcttcattcttccatggaggttttcctttgaatagacctggaattccctgcaagaaaaggtccttccttcccattccctcacttttgattccttacattcaagtgaacaagttgtagattccaacacctacatctttctcacatcagtccccatccttagygccttagctaatataatttcatttctcccctggaatcttgccatggcttcagatctaattcccccacccccttagtccctcttctctccagtcagctcttctgcaggaaaattttctagcatggcaaacagcctccctctctgatctcatctcccaccgcataaatgtgttctatttcagtcatatctgacggcagcttccagaacatgctggctcccatatccacagagcactttcctccaacacggctccctacccttccctgtgcttcccccagtgcttccagcaagtctgtttaattcacgtgtccttcaagactcagatttgtcatctctaggagaatttctccctcctgtgcccctgatctgatccctatgctgagtgcggttagta

SEQ ID NO: 361469 - DNA, 584 bp, Homo sapiens
agagcaggcgttagcctcctgatggccacctcttcattcttccatggaggttttcctttgaatagacctggaattccctgcaagaaaaggtccttccttcccattccctcacttttgattccttacattcaagtgaacaagttgtagattccaacacctacatctttctcacatcagtccccatccttagtgccttagctaatataatttcatttctcccctggaatcttgccatggcttcagatctaattcccccacccccttagtccctcttctctccagtcagctcttctgcaggaaaattttctagcatggcaaacagcctccctctctgatctcatctcccaccgcataaatgtgttctatttcagtcatatctgacggcagcttccagaacatgctggctcccatatccacagagcactttcctccaacacggctccctacccttccctgtgcttcccccagtgcttccagcaagtctgtttaaytcacgtgtccttcaagactcagatttgtcatctctaggagaatttctccctcctgtgcccctgatctgatccctatgctgagtgcggttagta

SEQ ID NO: 361470 - DNA, 580 bp, Homo sapiens
gaagttgagctgggaattatcatggcccatgcatcctcctctagctgtgactcagtgccctggggttgctatatgaacctttccatgtataactacctgtattcrgcttggtcttttggttggttctggctggaattttaaaaaccaccttatataataagcttctagtctcaatgctgaagtgggtggggtttaccagagtggttgctccagggagaaaattaaaaggggtggaggcagggaaaggaactctgagtttgttgactaggttatgttggtttgcaagtagtcagctggtagacaaacgaagccagagtgtctggaagtattcattaatgattttactgctcccctgccactgtctgcagtggtcttttccaaggctctaagtggactaagcagtttacaggtaacagggccagatattttcaagccatcactcaaaccccagtgctaggcatgtccagagcgaaacctgttaccttgtcggcatgctcaccaaagtgcactgccaggggtgtgcactttacactcatagcacagatcacagtttgtgtctcacagtgaaaaagactgttca

SEQ ID NO: 361471 - DNA, 580 bp, Homo sapiens
gaagttgagctgggaattatcatggcccatgcatcctcctctagctgtgactcagtgccctggggttgctatatgaacctttccatgtataactacctgtattcggcttggtcttttggttggttctggctggaattttaaaaaccaccttatataataagcttctagtctcaatgctgaagtgggtggggtttaccagagtggttgctccagggagaaaattaaaaggggtggaggcagggaaaggaactctgagtttgttgactaggttatgttggtttgcaagtagtcagctggtagacaaacgaagccagagtgtctggaagtattcattaatgattttactgctcccctgccactgtctgcagtggtcttttccaagrctctaagtggactaagcagtttacaggtaacagggccagatattttcaagccatcactcaaaccccagtgctaggcatgtccagagcgaaacctgttaccttgtcggcatgctcaccaaagtgcactgccaggggtgtgcactttacactcatagcacagatcacagtttgtgtctcacagtgaaaaagactgttca

SEQ ID NO: 361472 - DNA, 552 bp, Homo sapiens
  misc_feature (1)...(552): n = A,T,C or G
attgattatttccttaaataaatttttctaaacattttaacctctcttcctgcacagccttttcttcacttctaatgatgccacattgcattgtggaagtccagagtgacagaatgtatgttacctcacactgaggtgacataaagcatggaaagtgatgagcaccccttcagattctgtgggttaaatggccttatgctctggctgctctgtttattatggccaagggctrtgacaaaggtttcctagcatagtgctgagggcagaggtttgtgagccgcanagactagagctcaaattacaacctaaccagtgtgacttgggcaagttacctaatttttctgagttttaacttcataggaataattatgcctgcctcaccaggttgtgaagatatgtttggttttttgtttgttttgggttttgtttttttggagacaggttctagctcaggccagagtgcaatggtgtattttacgtttgtttttttgtttttgttttgtttttttggagacaggttctagcccatgctagagtacaatgatgtgatcc

SEQ ID NO: 361473 - DNA, 552 bp, Homo sapiens
  misc_feature (1)...(552): n = A,T,C or G
attgattatttccttaaataaatttttctaaacattttaacctctcttcctgcacagccttttcttcacttctaatgatgccacattgcattgtggaagtccagagtgacagaatgtatgttacctcacactgaggtgacataaagcatggaaagtgatgagcaccccttcagattctgtgggttaaatggccttatgctctggctgctctgtttattatggccaagggctgtgacaaaggtttcctagcatagtgcygagggcagaggtttgtgagccgcanagactagagctcaaattacaacctaaccagtgtgacttgggcaagttacctaatttttctgagttttaacttcataggaataattatgcctgcctcaccaggttgtgaagatatgtttggttttttgtttgttttgggttttgtttttttggagacaggttctagctcaggccagagtgcaatggtgtattttacgtttgtttttttgtttttgttttgtttttttggagacaggttctagcccatgctagagtacaatgatgtgatcc

SEQ ID NO: 361474 - DNA, 618 bp, Homo sapiens
catcatgaaagcttttaagatggtcatccaaaaattggctaacacaactgacaaaaatcccacaaaacagattccaaccaaagaaaaatctttaaaggcaaccaatcagcacctaaggaactcaatcatctggctttttatcttttgagatggagtcttgcactgtcacccaggctggagtgcagtggcgtgtgccaccaggccaggctaattattttttgtatttttagtwgagacggggttttgctacattggccaggctggtctcaaactcctgacctcagatgatccgcctgcctcagcctccaaagtgctgggattataggcgtgagccaccacgccaggccaatcatctggctttttgatggaaggtatttctagaattaatagggacataagatccagtaccactgccttgacggtggacagactgatttactccagtcaggtctacatgagcaaagtaaagtaaaacatggaatgccattatcttgacagtggtgctgggtggaaggaagggcaattaggcagatatagggacctgagacttaggtggttattttcttcatctcatcggtggggacctggcttctttgactgcaccttgatgtgcttgtt

SEQ ID NO: 361475 - DNA, 552 bp, Homo sapiens
  misc_feature (1)...(552): n = A,T,C or G
attgattatttccttaaataaatttttctaaacattttaacctctcttcctgcacagccttttcttcacttctaatgatgccacattgcattgtggaagtccagagtgacagaatgtatgttacctcacactgaggtgacataaagcatggaaagtgatgagcaccccttcagattctgtgggttaaatggccttatgctctggctgctctgtttattatggccaagggctgtgacaaaggtttcctagcatagtgctgagggcagaggtttgtgagccgcanagactagagctcaaattacaacctaaccagtgtgacttgggcaagttacctaatttttctgagttttaacttcataggaataattatgcctgcctcaccaggttgtgaagatatgtttggttttttgtttgttttgggttttgtttttttggagacaggttctagctcaggccagagtgcaatggtgtattttacgtttktttttttgtttttgttttgtttttttggagacaggttctagcccatgctagagtacaatgatgtgatcc

SEQ ID NO: 361476 - DNA, 573 bp, Homo sapiens
tgctgggcccccatgcctgagtttctgaggtctgaagacccaagaatttgcatttctgacaagctcccagtgatgctgacrgtactggttggggactatagtgagggctactgctgaaagagcaagtaatgtcaagccacataatccctaagatatgacacaatggactgttcagcacagggctgatgccatgtcccttagagacccgcccaggtggtgcttctttaatttataatcatctttaactactttgtgagtttggacttcacagattactccttgcttctgatggagtctgcagatttaatcattcaaaagctggtcacatgctaagctgtcatatcacaaaggcacagggtggcttccaaatgagtcacgtcactgggtagtagagaagatagggctcaaagaggaataagtttaagaaggaaaaaaatctcagccacacacatctggatagccaccaggactgtattctgggaattgggggtgaagcagccagacctccattgtctttcatgtcttaaaagataaaggtctctcagtctcccagatcactcagaattctccatc

SEQ ID NO: 361477 - DNA, 573 bp, Homo sapiens
tgctgggcccccatgcctgagtttctgaggtctgaagacccaagaatttgcatttctgacaagctcccagtgatgctgacggtactggttggggactatagtgagggctactgctgaaagagcaagtaatgtcaagccacataatccctaagatatgacacaatggactgttcagcacagggctgatgccatgtcccttagagacccgcccaggtggtgcttctttaatttataatcatctttaactactttgtgagtttggacttcacagattactccttgcttctgatggagtctgcagatttaatcattcaaaagctggtcacatgctaagctgtcatatcacaaaggcacagggtggcttccaaatgagtcacgtcactgggtagtagagaagatagggctcaaagrggaataagtttaagaaggaaaaaaatctcagccacacacatctggatagccaccaggactgtattctgggaattgggggtgaagcagccagacctccattgtctttcatgtcttaaaagataaaggtctctcagtctcccagatcactcagaattctccatc

SEQ ID NO: 361478 - DNA, 603 bp, Homo sapiens
ctccctttacaagcagctaccttctcaatgtggctaatattacttctagatctctcatgtcaatgctggggtcattcttcctgtcccacttatgtgacctttgataagaaatgtatacatcaaatatacctcactctcattgacatgaacctttcaacaaacaaaccaaaaatatttcatgattttgatgactcatttccatgagttcttcatctgagccttaaagttatcagtgccaactggaaaaattgggaatttctgataaatgattgtcacatttctgcaaatgaagattcataaaggctcatctgcatttttcagaacatatgcacatccattcctaatgagcttgccttctactaatgccttaaaatttaaataagtggatttaattcaccttaccatcaaatagaaacagtgaaatcctgaaaatattacttygctgtatatacccagcagccacttaatggaatcttcaggataaagcaagataataaaatcacaaaggggaagtaattcaatttaaaagtgcttgagatttcatgacttttccctggacatgttttatttatatggttttgaagcatatctttaattatttat

SEQ ID NO: 361479 - DNA, 555 bp, Homo sapiens
gatgatgtactcaaattccataaagaagcttctctaaatgaactaagaaaaaatcctccctaatagacctgctttcttctagggaaccacaattttttacatccatatattactttaaagagacccttacattttatagatacaacaaattcttgataagattttctaaatatgaacacatactcatttaatggaggcatccagcaaattacaaaagtatacttcatttagttttgacttattttaggcccattttgccttttccactggaattttgaatattcttaactctttagaattttattacacttcaaaaacagtagactcttgagtggaccttttctagcacacaaacataaaaactaataaatacacaattcacaggmgtattcttgtacaaatcactcctctttctagattctactatgcaatttctaggcgcagaggcccttctgcagtgtttctgttcactccaaacatacaagccccacaaaaaggttcattactcttttcacatgaaaatcctataaagttgattggtaaatctaaaagaaa

SEQ ID NO: 361480 - DNA, 596 bp, Homo sapiens
aagaaaatgaaatggcagcaacctacttacatatataaaccacttgcatacctgcctactgatgtatgaacttcagagtaagatggcctatattgatttttcaggattgctcttcatattttttttgytgttgtttttctcccttcttcctcctgttttttctttgtagaacgtaagaattcacaacctactaaaaatgacctttcctgataacgtgagacctacctgtctaggaaaaaaccatcctagccatgaggcaaatctggaacaaaaaaaacctctttttcttctaaaatgctttctccaaaagattttaaaaaggggttaaatgtcaaaggaaaataaatcttgggaccccccccacccccggcaaatcactaagccaataaaaacatcaagctggggactatgtcaggcaaatctgtctcccattttattcctaaacaagatagctacaaagattaaaaacaaaaaaaaaaagctacatatctccctcattatttgcccacaaagaaattatttgtggacaaaggacagacagacctcaaagtcatccctcttaggccaagggcatgtctgatttcttcctctaccct

SEQ ID NO: 361481 - DNA, 567 bp, Homo sapiens
atggtattagtacaaaatcagacacatagaccaatggaaggcaatagaaacctcagaaataaaaccacacactagcaaccatctgttcattgacaacctcataacaactagcagtgaggaaaaaaaattgtcagtaaatagttctgggataactggttagccacaggtgggagatagaaattgggccctactttttatcatatacaaaaaattaattcaaaatggttcaaaaatctaaatgtaagacctcaaactacaaaattgctagaaaacaacctaggaaatacccttcttaacactggctttaaaaaagcacaaagctgagggtatcacactacctgacttcaaactatactacaaggctacagtaaccaaaacagcatggtactggtactagaacagacacatagaccaatggaacgaaacagagaactcagaaataagactgcacacctacaaccatctgatcttgtacaaacctgacaaaaacaaccaatgaggaaaccattytctatttaataaattgtgcttgaagaactagtcattggcagaaaattgaaactggac

SEQ ID NO: 361482 - DNA, 595 bp, Homo sapiens
atagtttttaagtaaatgtaaattgtagaatgacaaaatatattcgattaatgaatgattttatattttgactattgtgatagtgctgggataaacatgagatggcagctatttacttgacccactgattttaattcctttcaatatatacctagtagtgggattgctggacaatatggtagttttatttttaattatttgagagatgttcatactgtatgagtcctctttgctccacattctcattagtaggtttatattgtctatttgataatgatcaytataactgggatgaggtgatatttaactgaggtttttatttgaatttctcagatgatcagtgatgttgaacatttttttgacatacctgttcttcatttgtatgtcttttattgagaaatttttattcagatttttttttcatttttacatcaggttatttacttgtttgttttttcctattgagttatttgagttccttgtatattctggatattagtatattgctggataaattgtttgcaaacattttttcttatttggtaggttgtctcttcactctcctgattggttcttttgttacagtgaagatttt

SEQ ID NO: 361483 - DNA, 583 bp, Homo sapiens
tccttttacatgatttattctctctttaacctaaaattcatttctttaatttgaaaatacatattaaatatcttcatattaaaaaaaattgaaggttgtcttctaagtaatgaaaaatatagaataaggtcagtgatagtgatgatgagagacgtattttatgccctctatattgcaaagtgattttcattaaggaactggatatctcaatttttttgacacctccgtaactaatcctatgaacacgaagaggcctcttaactgttttgagcatcgctcctttctatcacttgaggaattcagcaaaatagtttctcagtttttttatttcactggaactttttccttaccctctgtttcttgtagttgtttttgtttaataaakaaatctacacctatttattcacacatcataggacacaggtaaacagatgagtgagtgggagaattttagtaaccaagttcttaacagatgtaagcaaaatcttcaacatacgatttatatctagagaaaattctaacagttataaacagatacaccataaatacagtgaagatagagaacgtcattcttttgtttatt

SEQ ID NO: 361484 - DNA, 540 bp, Homo sapiens
tatttccctaatctaactgagggataaaatgtagcactgagtctgaatttcttaagtttgcttaagagacacttagaggaatttggaaattgccttattaacatatattctgttgttgataccttagttaagctggtcagatattcagtttatatacttatttatcataaagaaagtcatgattcacaatgcagtgttatttaaaaamctgatcctgaatgctacttccctactagtctgatttatatttttttgttaacattctaccaagcaagacatatatatgactgtttctgagtatgtctgtgttatgtctgtgtctcaactactgtactatgtgtgttaaaggcattattttttaaatgattataacatccagtctgtgtcagctatttatcatcatttatactgaagaagttaagatgcaaataagtcaatttactagcctatggtcacgtctcttgtaagtggtaaattggcctcacacacacaaaatcacactgtttaaattgtatgctttccagttgtgactagtgacag

SEQ ID NO: 361485 - DNA, 458 bp, Homo sapiens
tccctaatctaactgagggataaaatgtagcactgagtctgaatttcttaagtttgcttaagagacacttagaggaatttggaaattgccttattaacatatattctgttgttgataccttagttaagctggtcagatattcagtttatatacttatttatcataaagaaagtcatgattcacaatgcagtgttatttaaaaaactgatcctgaatgctacttccctactagtctgatttatatttttttgttaacattctaccaagcaagacatatatatgactgtttctgagtatgtctgtkttatgtctgtgtctcaactactgtactatgtgtgttaaaggcattattttttaaatgattataacatccagtctgtgtcagctatttatcatcatttatactgaagaagttaagatgcaaataagtcaatttactagcctatggtcacgtctct

SEQ ID NO: 361486 - DNA, 615 bp, Homo sapiens
agtattaagtagcacattagggtgctaaaaaaattaaaaagttaaaataaataaataaaaatagtagcctactatacactcctaggaaacttgttatctttaaacaatgtcttggagctcattccatattcataaggagctgcctagtattctattacatggacccactgtaatcctttttactagtcgtctgtaaatgttaacaggtgaacttttatggtaccataacatttccattttacatagtgctaagtattacattaatagctacatatgtcattttccatgagtatgattaaatwttataaaaattgttcttcatgagacatgaaaagaacatgctgaccaccttttattcttgttttctactgaaattatatattttagcaatctgtagatcagattcctagaagtagaatttattagtcatcaaatataaagtttgaaattttgatagaaatagacagatttccctcaaaatgattggcctgttgtatataactataagccccgtgtaagggttcacacctctggtcacagtcttgccaaatcagatatcagacctttagattttttataatctgttgagtgagaaatggaatgccaaaattatcc

SEQ ID NO: 361487 - DNA, 558 bp, Homo sapiens
gactaaatactgagggagttcattaccacaagacctgtcttacaaaagattccaaacggagtcttttatttgaagtgaaaacatgctaaacagcaatttgaaaatatatgaaagtacagctacccctcagtatatatggaagttcagtttcaggacccctgtttataccaaaatctgcatgtaatcaagtccagcagttggtcatgtggaacccacatatatgaaagatggccctccctatatatgggtttcacatcccctgaatattttagctccacaatgggctgaaaaacgtccactaataaatagaactttatagttaaaamtctatgctgttcaagggtcaactgtattaagcttgatagtaaaggtaaatatataggcaaaaacagaatgctggaatgatgtaacagtgttgtgtaaatcactttaaattctggtatgaaggtaaaagacaaaagtataaaaataacaaatatattaattggtacacaacataaaaatgtatttgtgacatcagtaacataaagcatgttagtgtgggtgaagtaaaagtgt

SEQ ID NO: 361488 - DNA, 506 bp, Homo sapiens
agcaaggcactgggcctggcccaggaaaccatttttttcccgcctaggactctgggccttagatgggaggggatgccatgaaggtctctgacatgccctggagacattttctccattgtcttggtgaattacatttggcttcttgttacttatgcaaatttctcaagctggcttcaatttctttccataaaattagtttttcttttctatcacacgatcaggctgaaaattttccaaacttttatgctgtgcttcccttttaarcataagttccaatgccagaccttctctctcaagttcaaagttccacagatctctagtacacggacaaaatggcaccagtctctttgctgaaacatagcaagagtgaccttttctccagttcctaaaaaattcctcatgtctatctgagactgcctcagcctggacttcgttgtccacatcattatccattatcagtgtttgggtcaaaaccgttcaacaagtgtctaggaagttccaaattt

SEQ ID NO: 361489 - DNA, 618 bp, Homo sapiens
atagtaaataaaattatctccataagcgctgtagtgatgtttacatttgttcttttattccatagcacagtatatatctattttcataattgtcataattgagattcgcaaacatataaagcatatgtagatcaaaatgcatttatatatttttggaatgactcacaatcagtattgtaaagaaaacactcattttacatatctgtaatgcattgcaaaagccactttcttcaccttgtactcataaattaagctttgttaaacaacttagcatgaagggcaaagatgttaattttatttgaaaatcacaccaaatggtgtgaaagtattaaaataacaacaccttctatgtcttcaacaacttggcttctaagaagaaaagctagataaagtttcctttttttttttttgaaattcatgatttgaaaattaagaatctcttgggaaataaaaagtttaatataaatttattaaaataatttattacaaatgctggaaagaatattaaatacagttattccagtcacaaattttaataaatgagggcagtgagactgaaaaacatgasatggttcacataaattaatatagtaagtaaactatcaaaaaataaaacct

SEQ ID NO: 361490 - DNA, 442 bp, Homo sapiens
cattgagaattaatggtacagacaggaaggttcatgtaaaaatgcatgtagacawataggtgtataggtttgtggatgtgtcctagagattttgcatatgttctttgcctatcagtatcacattgcaaaatagtatcatttgtattcagagcaaatagttaaaaaaaccgtgttttgtaacacatataattttctctttccattaggttgaaaatggttgcttgtgttcaactactgtgaagagttggaatcagacaactacggctttgattttccaagtggttcagaatgtaaatatgatctgacctttccctgatggacagttaaatcatggacacgctaaacaatttactttggactgtccttcctaaagatgctctggcttctctcttgaatgctcactaagcttttgtagctgacaaggaaaggaaggaaaactgtg

SEQ ID NO: 361491 - DNA, 571 bp, Homo sapiens
ttcaagcattgttttatagcaaaaaaattgaaacaaagaaaaggagatggaattttaaaaaagtggcatgcctgtgtaatagaatgttatataatagtcttgttacagcaaagatcatatctaagagtctaattttcatgtctcaacatgcccaatatcggaaagatagtgttaactaaaaatttcaagttgcagaaagagctactttgccagatcatggtaagaggatttcttgttttctagaacataagaatctaacttttctagatgattccaagttatcatctgttctacaagttttgaacatactcataaactgtttgaatttttccctcttcttatttttgtgtatatttttattcatttaactgtattgtaatmtttaaaaaacataggctatacatttctaaaagcacaattttgctcaaaaagttgtccagttttttgcacatggcatataactaaaatgtattaaatgaattatggaatgaagaaatgaatttacttttttgtacaaaattttaaaataaaatgtttttactcatctataaaatgaagaaaataatatcta

SEQ ID NO: 361492 - DNA, 571 bp, Homo sapiens
ttcaagcattgttttatagcaaaaaaattgaaacaaagaaaaggagatggaattttaaaaaagtggcatgcctgtgtaatagaatgttatataatagtcttgttacagcaaagatcatatctaagagtctaattttcatgtctcaacatgcccaatatcggaaagatagtgttaactaaaaatttcaagttgcagaaagagctactttgccagatcatggtaagaggatttcttgttttctagaacataagaatctaacttttctagatgattccaagttatcatctgttctacaagttttgaacatactcataaactgtttgaatttttccctcttcttatttttgtgtatatttttattcatttaactgtattgtaatatttaaaaaacataggctatacatttctaaaagcacaattttgctcaaaaagttgtccagttttttgcacatggcatataactaaaatgtattaaatgaattatggaatgaagaaatgaatttacttttttgtacaaaattttaaaataaaatgtttttacycatctataaaatgaagaaaataatatcta

SEQ ID NO: 361493 - DNA, 575 bp, Homo sapiens
taatgtttcaggataatcataacacatggagatgagactccacctcatagcaagccccaacgaaagacacaaattgttccttagaaaatgtagggagggaagagggtagaaactacaaaccacatatgtccccatgtggtgacagaggtttccttgggagaaggaatgtttggctttatcatccaggaattcctggttgaaataagtttagaatataacagcaatcactagtatgctcaggtgactatgagatgcagttatttaaactcctgtcaggcacatttttctcacttttgatgtttgaaagcagaaaaatgtaatatattaaaatggaaatatatgagttttataaatattaattgatgtccttcattattttattctgtttgatccattctttccacatccacagctctctgcagaacccatttcagagaggttaagagacttcttatctaattgtaccttattaatatttggtggaactgggatgtgaaaagaagcctatcacaatctcaagttcatgttctttccactgctgtatcttscctcgtgttacataatagtgcggcaga

SEQ ID NO: 361494 - DNA, 575 bp, Homo sapiens
taatgtttcaggataatcataacacatggagatgagactccacctcatagcaagccccaacgaaagacacaaattgttccttagaaaatgtagggagggaagagggtagaaactacaaaccacatatgtccccatgtggtgacagaggtttccttgggagaaggaatgtttggctttatcatccaggaattcctggttgaaataagtttagaatataacagcaatcactagtatgctcaggtgactatgagatgcagttatttaaactcctgtcaggcacatttttctcacttttgatgtttgaaagcagaaaaatgtaatatattaaaatggaaatatatgagttttataaatattaattgatgtccttcattattttattctgtttgatccattctttccacatccacagctctctgcagaacccatttcagagaggttaagagacttcttatctaattgtaccttattaatatttggtggaactgggatgtgaaaagaagcctatcacaatctcaagttcatgttctttccactgctgtatcttgcctcrtgttacataatagtgcggcaga

SEQ ID NO: 361495 - DNA, 567 bp, Homo sapiens
aaatacataatttgcataaagaattaaacagaccgttatcaatgctttgaatctcttcctgtattcccactcttgccaattgtcctccttgcataaagaatgtatctcttaaaatctgaaatataatgttgtagtgactgcccaaaataagaaaccttttgagtaggtggaaaagaaaacgtgcatttgtcctccttagatcctaacaattatgaccataatgtttaagtttactctaattttctttattgtgtcaaatctgctgtttaatccattcactaaaattttgatccccttaatatttattattccaagatagtatttttttcaaatttctcctcattcttgatggtttcctattgtttgagcatcttgttaattgcatccattatttctctgataattttgtgtacrgtataattttctttagttttattgtacatctgcatttttgttgatcaaaatcagtggtttctcacttcgtttccccttatcataataattgccatcctcccatccagatattcctgcccatgctccaaaatttatgaactctagcttatgagt

SEQ ID NO: 361496 - DNA, 613 bp, Homo sapiens
agtgggtgagacttgacactcacttccccgaagcacagcacaygcgcaataatggcccttcctgatagttcttcctcacatgcaccagctattcaaagacaaaactgcaaagaaaacactccttgagactcaatataaagcttccagccagcctgaaacatttgtgaggcatttgtggttccctgttgggaatatgtaatactgtgtcattctgagttagaaggccacttcctaagggaagaggggctgttggcctgtgtcccacgtggtgaatcataaaatgaaaaggcctaataaatatgaaactgtgataacgtcttccctctgctcaggcagcctctatttttagttcaatatgtatctattgcacccagcactgggctgggtcctctgaaagaaatcccgtaaaacctcaaggagctcacaggctggaatattctttcacaggcaagcaaggacccagggctgtgctcaagctgggctacaagggctggaccagggtctggggttgggcataggttgggctgacttgcagttgctggccttggagaaaggagaagcaaagccactgtgattggaggaaggagattcaggaagcaaggacagctcttag

SEQ ID NO: 361497 - DNA, 568 bp, Homo sapiens
gcaaggtcaaaccaacctgatgttgcccaactgcaagacatctccacgaattgcttatgaagaaatagcaccagccttgcacctggagtttccaactttccagcagaaccatgtagggtcagctcgtgggtgacatcccrtatatacctgaatagcctgccctgctaccatgggccagcgttcatggtatctgggctcaggctgacttgctatgtttcttacaggtactcatccactaaatagactcctggctaccagattcacttcgagaaaaagttttcggttgtcttttagcgctcatttttgaaagatggtccgcctggtgcctactcctgggcgctggatgaagtcaggggatgacagcaacatgaactcgctgtggataacaagtcctctgttatgactggatgcgtttgcagtgctataaataactctatcaatattgtgataatggcactttaaagaggtctattttacaagtgctgaatgtaagagagaccacagctgcactcattaattctgaagtatgcctccctctatgtacaacttgcaggtgtaacaataggag

SEQ ID NO: 361498 - DNA, 568 bp, Homo sapiens
gcaaggtcaaaccaacctgatgttgcccaactgcaagacatctccacgaattgcttatgaagaaatagcaccagccttgcacctggagtttccaactttccagcagaaccatgtagggtcagctcgtgggtgacatcccatatatacctgaatagcctgccctgctaccatgggccagcgttcatggtatctgggctcaggctgacttgctatgtttcttacaggtactcatccactaaatagactcctggctaccagattcacttcgagaaaaagttttcggttgtcttttagcgctcatttttgaaagatggtccrcctggtgcctactcctgggcgctggatgaagtcaggggatgacagcaacatgaactcgctgtggataacaagtcctctgttatgactggatgcgtttgcagtgctataaataactctatcaatattgtgataatggcactttaaagaggtctattttacaagtgctgaatgtaagagagaccacagctgcactcattaattctgaagtatgcctccctctatgtacaacttgcaggtgtaacaataggag

SEQ ID NO: 361499 - DNA, 614 bp, Homo sapiens
aaccttcccagcataacgctgaattagaaatggcactgccgtaatttttccaagtgaggaaacggagggtaaaaatagtgtaccttttttttctttttttgacatgcattcagagttgtaaggcaagccctgcttgttgtaatttttctggtatgatcatggcatctctgtgactctcttgggttaggggtgtttaatttagattgtgactgttggctctgggctatgatagctaccaagaggggtctcctgaagagctctgccatggcttcctatctctagcctcgagttagtcacttaacctcrgcatctttctgtgtctgtgtttctgtatctgtctcattcactggggtgcaggaaacctaattaattcagacaataggcatcattgtggtaaaaaataatattatatttttacttttaaatttttatttctaacagccttattgagatatcattgacatataaaaattatgtatatttaaggtgtacaacttcacgttttgatatacatcatgaaattattaccacagtaatgttaattaacacatccattacctttacatagttaccgttttgtgttgtgtgtgtgcgtgtgtgtattgagaagattt

SEQ ID NO: 361500 - DNA, 552 bp, Homo sapiens
gtcctcccttgtctgtgaggagataacattccaagacccccccacagtggatgcccaaaatcacaaatggtaccaaagcctagcctagcctacatggcctttttggatggcaaatagcatatacagcatgtatatgctgtatccaacattcccaycagtattctgcccaaggtgggaaggacaggatgcctctcagaaaagcacacaatttaaaaattaataactctgagattgtggttaaccatggttgcagataaggggatattactatattgttatttgactatacttacttgtgaagcgatgtgtgactatctcataaacatcatcttataattcgtacatacagaagttggaaatacaaaatgctatgtctgaaatccaatcaagatgtaggtagtaattgctaaataacatgctaattttagaaataaaaattacagtgaaggcaaatatctaaaatggaccataaaaattgatcagtaactgagactgaaagcagcactgccaagtcacaataggatcctgaattatacttaatctggttctgtg

SEQ ID NO: 361501 - DNA, 552 bp, Homo sapiens
gtcctcccttgtctgtgaggagataacattccaagacccccccacagtggatgcccaaaatcacaaatggtaccaaagcctagcctagcctacatggcctttttggatggcaaatagcatatacagcatgtatatgctgtatccaacattcccatcagtattctgcccaaggtgggaaggacaggatgcctctcagaaaagcacacaatttaaaaattaataactctgagattgtggttaaccatggttgcagataaggggatattactatattgttatttgactatacttrcttgtgaagcgatgtgtgactatctcataaacatcatcttataattcgtacatacagaagttggaaatacaaaatgctatgtctgaaatccaatcaagatgtaggtagtaattgctaaataacatgctaattttagaaataaaaattacagtgaaggcaaatatctaaaatggaccataaaaattgatcagtaactgagactgaaagcagcactgccaagtcacaataggatcctgaattatacttaatctggttctgtg

SEQ ID NO: 361502 - DNA, 638 bp, Homo sapiens
taaatcctttttctgaattatttgtaataaatgctttccacatgattgttgtaaggtttttaagtattgtaatgacttttttgaagtacttaagttttgtattttcattaaggaaatgattactgttttctgacttcctctgttggttatctgttcaaaaaatcctttcctactcaaagctctaactaatattcatctcaatattttcaagttttggtttcacttaaaattttctcttttatacacttgggtttattttgatatatagtgtgggaggctatacattttttctttgtttgcaaatagccagatttttcaacagattgcatggacagtgtcttgatgttaaattggacaacattttttaaaaaggcaatgagaggatttggtgctggagaaattcattcataagcttggcgtattcagaacactgawgaattgttgggtgagtaccaggaaagttgtcaggacagacaagtattcaacagccactgggaaggttctaaactgtgccccctttccccttctccataataaaggggtctccctttaccaaaatgaactgtcctaaatttaagtagccaaaagtcagagcagtcccagaattgtttcttggtgtcaaggcctcaatcaaccaa

SEQ ID NO: 361503 - DNA, 638 bp, Homo sapiens
taaatcctttttctgaattatttgtaataaatgctttccacatgattgttgtaaggtttttaagtattgtaatgacttttttgaagtacttaagttttgtattttcattaaggaaatgattactgttttctgacttcctctgttggttatctgttcaaaaaatcctttcctactcaaagctctaactaatattcatctcaatattttcaagttttggtttcacttaaaattttctcttttatacacttgggtttattttgatatatagtgtgggaggctatacattttttctttgtttgcaaatagccagatttttcaacagattgcatggacagtgtcttgatgttaaattggacaacattttttaaaaaggcaatgagaggatttggtgctggagaaattcattcataagcttggcgtattcagaacactgaagaattgttgggtgagtaccaggaaagttgtcaggacagacaagtattcaacagccactgggaaggttctaaactgtgccccctttccccttctccataataaaggggtctccctttaccaaaatgaactgtcctaaatttaagyagccaaaagtcagagcagtcccagaattgtttcttggtgtcaaggcctcaatcaaccaa

SEQ ID NO: 361504 - DNA, 614 bp, Homo sapiens
aaataatgatttttaattttttccaattgtatgttgatagtatataaaaataaaataaaaattttctatattaactttgtatcttaaaccttgctgagtttacttattagatttagtaggattagggagtagattcccttcaagtttctacctgcaaaatcatgtcattgtagagaaagataattttacttctttctcagtctttatgacttctatcttttcatacctaatggcaagacctcaagtacaatgttgaatagcagcatgagagtggatccctaccttatttttgaccttagagagaaagtgttccatatcttatcattaaatatgatgttatgtataagcttttatagatgcattttatcaaattgaggaaattctgttctattacttgtttgtctagaggttttatcayggaatagtgttgaaattttcaaaatcttttcctggatctactgagatgtttgtatttttcttttttatactgttaatgggatgaattacactgactgcttttctcatattttaattgatcttgcattttttgtgataaaacccacttagctgtgatgtgttatattttttaatatatagatggatctaatttgcta

SEQ ID NO: 361505 - DNA, 600 bp, Homo sapiens
ttccactcttgtctttatttccttccttctattttggacttactatactgttctttttctagcttcttttttttgagacggagtctcattctgtcacccaggctggagtgcagtggtgtgatctcggctcactgcaacctccacctcccaggttcaagctattctcctgcttcagcctcccgagtagctgggatgacaggcatgcaccaccatgcctggctaattttgtatttttagtagagacggggtttctccatgttggtcaggctggtcttgaactcctgacctcagagctcaggtgatccgcccaccttggcctcccaaagtgctgggatcataggcatgagccaccgcgcccagcctttttctagcttcttaatgtggaagcttagctcattgatttcagcactttcttattttctaatacaagcacttaaactctaaattgtattcttagcgtcacataagctgcatctcacaaattttgatatgctatacttaccattcagtaaaagatatctaattytcctagagtttttctttagaagtatattgcttaatttccaaatgtttaaatatttgctgggtatctttttgtta

SEQ ID NO: 361506 - DNA, 526 bp, Homo sapiens
tcagtgaattgtcacagacctgccatgtttctttctgcgagacttgctagactggttttccaggtattgtgtggatgaagtgcatttggattgcagcatgcatttgacagataaagtctctatctttgaaaatgggatacacccatggacaagggctgatggcaaccaagtcaggtagatgagtaactgattggactcagagtactaatgaatgagttgatgtggatctasagaaaggatcttgcacaccacagttttctggcttctgtcttgccttgttaggcatttttattaatgtcttggatgaagacattgacggcccagtgataaaatttgtgggtgacacaaagctggaagggatagctaatacattggacagtagaattgcaatgcaaaaaagatttgacaggctgaaacaatggaccagatctaacaagattatgtttaatggggataaatgtaaagtcttaacatttggttaaaataaacaggcaaataagatggaataagcagcagatgggaaaga

SEQ ID NO: 361507 - DNA, 570 bp, Homo sapiens
aggcattcaagactagcctgggcaacataatgagacctcatctgtacaaaatatttttaaaaattagctggcacggtggcatgcacctgtaatcccagctacttgggaggctgaggtgggaggatctctagagccagggaggtcaacattgcagtgagccctgaccacaccactgcactccagcctgagccacaaagcaaaaataataaataataatgaacaaaataataaaataataaacaaaataatgaaataataaacaaaaaaaatccatagcaatgtgaaccaaatagattataaaggaggatgatatccattaaktcttcttcattctcatggctcttgtccctgtgtttatttgccttaagaatgtagccaaatcttatctccgtctagtgaaaatcacttgatagaaagttacattaatgcacaaattcacaaagagaatttgcatgattttcagaaccaaattaatccctaattactggcatacagctatttgagccaaaagatcatattgcattttaaacaatataaactcatcctttatcagtcttcatttgcataaga

SEQ ID NO: 361508 - DNA, 593 bp, Homo sapiens
atctgcgtttttacagatgaggaaactgaagctcagagagatcaatctatttgtaagtggcacaggcaaggtttgaacactagaggtttgtctctagagcccagaggcttaagctttgcaccacagtttcttcattgctaacctatattctgtgcaatgctgagcaaggaaaaacaatagcaaataggaggagataaaaacagaggagcccaggagacccttctctgcaggttggtggaaggagctttgaaaagccaaatggcctgagatgaaactattctcagagcctccatcaactcttcagctgctataggggattattatcatygggtcacaaaggaagagaggccctccctttctttgctttggtgtgaagtagattcatgtggatgaggggtgttagtcttttagctaacctatagcaaaaatgactgccccctctggcttttcccactcaaaccatctgcctggcattttggaggtaagatccaggtatgtgtttagaacaccttagacttaagtgggggaggttgttgaatcaggaaaaaaaaacacattttttataaggaagtacactgatgttttcatttcat

SEQ ID NO: 361509 - DNA, 536 bp, Homo sapiens
gtgcaaggcaggtccagcttaggtaacgccaagccacactttaaaggtaacctcagggtttgtgccactgaccttactgtacattaaaaagctatcaatgtctttatggtcctttggctagacaaaatcctgcggatagattccaaaatagatgcctttgatatcaacttcaacttcagttggctgagcagtattatggagactttggaagggcacaatctattgctttaatttctgacaacataagtaaawgaaaataatgatctagtacactggaaatatcccaggcctttgcagttgggtagcacggggtcatttgctattgtaccctgtgtgactgatctacataccgacttccttatctgtaaaacgtagataacacaatgagaattaaatccatattaaattactttttgtatacctagctcatagtaagtcctcaataaatggtatttgtgaacagctatgcctctttcccagaatatttttcaggacttgtgtggcctgaatttcactgacaggaagccgttaaaata

SEQ ID NO: 361510 - DNA, 567 bp, Homo sapiens
tccttgcttagcttgcttaccttaaaaaacaaatatttacttagttattaaaatgaggcaagtactatacaaggcatcaaagttaatgaaaataagatgtaattcttgcctttaaggaacttagtcttatgagagagacattgacataaagtgaatatttaaaatgtcatgcactaagtaccaacatagagtttacacaacacattataggagatcagaggagggataagtaatccagttctgggggaaagggaggtgggatgaagagaaattgtgcaatagagataatttcttagagaaaggtacaagaaagctgagtcttcagggttgagtaagagttatttaggtaatgagggaataagagagctacttgaagcagaagaaaaataaatgctactagattaagaagtattaataaaaggcaggtagtagagaaaaattrgtctagagagttaagcagggacctgtgcattgaagtatcttttaacaacatgttaaaacaactgtagtgatttagctgagagatgatagtgacttgagttagggtagagaagaggggacagatac

SEQ ID NO: 361511 - DNA, 666 bp, Homo sapiens
atctggtaacctggaatttggatgtcctgttatagaatcttaaatggagtattcaaactccaagtgctcaaataggagaaagagaggacagttgatgtacatgaaccttctccaaggagtattcggttatctccttctcagacaagctaggagcctagagttcagagctctaggaatgaagataggtcatttgcagcatcaagtccaagggtgcaggaagacagcaaaagatagcaggccagagggttatcaagaggaacaggagcatcatggtcatgactataggctctgaagccaaactctctaggtttgaatcctagctctactacattttagatttttcatctaatctctttatgcctcggtttgtttttttgtttgtttgtttgttttgttttttgtttttttgagacagggtctcactctgtcactcaggctgaagtgcagtggcacaatcatggctcactgcagcctcagcctcccgggcccaagctatcctcccacctcaagctcctgaatagctgggaccataggcatgcaccattatgccaagctaatttttaattttttgtacagatgaggyctcactgtgttgcccaggctggtctcaaactcctaagctcaaattatcctcccaccttggcctcccaatgtgctgaagttata

SEQ ID NO: 361512 - DNA, 589 bp, Homo sapiens
tgaaatagctccaatggtgtaacagaagtacacatgagataaaagagtagactcctgtggatcaacagcaaatctacaagatccatggcatgagcacgacacatggctgcagtccatttttccattggcctgtggctactgtgagctgagttacyggactgcttcaggcctacaaggttctttctattgactgtgaattaatcattcagaagccaacagacaccgtttgttcacatttagcaaacattgctaatggtgacaatgtataatggtgactgactaataacatgttccccgttctcatggagctttcaaaccagtgcagaggtggggagaggactaatattaaacaaacacataaataagcctataattaaaatcaagatgtgtgctttgaagggaggggatgtaccagagattcaggggaggctttctggaattaatattggagctgatacctagagaataactaggcatcgatcaaatcaagtttgcggaaaggaggagagtattttcaggcaaaaagaaatatgggggtaaagaaaggatctggagcgagagggtgtataatgaatacaaaattttttaa

SEQ ID NO: 361513 - DNA, 611 bp, Homo sapiens
atatggatgccttataatacatataatgtatcagtatattagtacttatgtgtaaattataaataaataagcgtatgctgagggagtgtgttcaatttttaactgattgtggtatgtgaccaagatgtctgaaaaacacctaaagattatgttttgcaaatgaccttttcaccattaatacctggctagcagacttttaaaaattatttcatttcctgattttcagagtaataggtttgtgttctatctacctctaaaggtgacttttattatatatatataatgagattttatttgctttctccctctttctatgtgcrtgtatccatacaaacatacacatgtatacacatatgcatataatcttttttaaccattgagaatgagtagcagattgttttcctttattcctaaatatttccgtgtatatttcctaagaacaaggacatagccatagtacagttatcaaatcggagaagttaatgttgattttgacagcagaatttaaagatcttgacttaatctgatcagataataaacttaaaactgaagaaaaaactaagaataagtccaatgtatttacctgaattgtctcatctgtgatatagaaa

SEQ ID NO: 361514 - DNA, 595 bp, Homo sapiens
gcacttacacaaacctagatctataacctcccatacacctaggctatatggcatagctattcctcctaggctacaaatctgtaaggcatgttactatactgaatattgttggtaactacaacacaatggtgagtatctgtatttctaaacatacctaacatagaaaatatacaataaaagattttttaaatggtacacctgtaaaggacacttaccatgaacggagcctgcgggactggaagttgccctgcgtgagtcactgaatgaggagtgaatggatgtgaaggcctargacactacagtagactttgtaaacaatgtacagttaggctaaatttatttttttaattatttctccaataataattaaacttactgtagcttttctactttttaaacttaaaatgttttaactctttgactcttttgtagtaacagagctaaaaacacaaacacattatatagctgtacaaaaatattttctttctttatatccttattctataagcttttttctatttttaaaaattttttgaacttatttgttaaaacctaagacacacacacattagcctagacctacacagagtcagga

SEQ ID NO: 361515 - DNA, 459 bp, Homo sapiens
tttacttgtgaaaaatgggatctttcatcaaccctatagtcatgcagcgagattccttgatgttgattgtccttggaaactgggagacagttcaggttttataaaacctggcctgggttcttggccacagatgcaaacttatctataattaagcagcygataacttcgcagggaagaaaggtgatttgtgagctcaatgtgattcgtgagcccaagacagatttaggatggtatatgcctgtttctctgctaaaatatcagacatggcctcttgtaggtctgaaccaaatggtgggagtcattactgaggtaagaagatcataaatcatggaaacagattgaggcactcctcagggttcttgtcacaagtcattcttctttttctgggacctactgttcttgggacaactctggagagttcgtgtcctaatacttgccaagactgaggttgtgagcaag

SEQ ID NO: 361516 - DNA, 617 bp, Homo sapiens
acatataaaattgctgtttagaattttagtattatttatttgttttcatacaaatatattgtggagacaggacatggaaaagagttgcattttctgagtgagatctttggactctttcyttttcaaggggagatactctgattctctctatcccctatgtcttgctttaggccttcattacttctgcatggattatggactattgcaataacctcttaactagtcttcctgtttccaatcttgcctccttcaagtctatacttcatatttgctgtcaaaatacatctttataaagtgcatttgaaatccttcaatggctccctattaaactcaaaaatctcaactcctttgtatggcctgcaaggcccattttcacttggcttctgcatgcttgggtagccttatttctctatcatcttatttgcacccagtgatccaatcatatttacctatttggaacattgtgttcctggtccccacatctctatgcctctgcacatgtgggtcctcttttcttggtacacatccactatccatcttgtttaatctatgcactcgtctgtcaatttatgtgcaatgaatgaagtgaagaagaaatgaactccttttaaatatct

SEQ ID NO: 361517 - DNA, 617 bp, Homo sapiens
acatataaaattgctgtttagaattttagtattatttatttgttttcatacaaatatattgtggagacaggacatggaaaagagttgcattttctgagtgagatctttggactctttctttttcaaggggagatactctgattctctctatcccctatgtcttgctttaggccttcattacttctgcatggattatggactattgcaataacctcttaactagtcttcctgtttccaatcttgcctccttcaagtctatacttcatatttgctgtcaaaatacatctttataaagtgcatttgaaatccttcaatggctccctattaaactcaaaaatctcaactcctttgtatggcctgcaaggcccattttcacttggcttctgcatgcttgggtagccttatttctctatcatcttatttgcacccagtgatccaatcatatttacctatttggaacattgtgttcctggtccccacatctctatgcctctgcacatgtgggtcctcttttcttggtacacatccactatccatcttgtttaatctaygcactcgtctgtcaatttatgtgcaatgaatgaagtgaagaagaaatgaactccttttaaatatct

SEQ ID NO: 361518 - DNA, 576 bp, Homo sapiens
agctctgtagtgggtttaaaatttggaaatgagacttccaactttgtctttctttttcaagttatttttggctgttcagagcccctcaagtttccatgtgaatttaaaaacctaatccttatacaaaaaaatggtgagctaatttcaaagttttatttaactctttaatgatgaactctttaatgatgaaaccagtaggatggccaagtaggttccaaaaagagtttgagaaactgagatttttataatgagggggaaaaaaggaattctgcaataaatttgctagttacawattgtcgtataggaaaattatacccacccaccccccctttttcttaaccaatgtaaagaaccttttctaccaatataaagaagatgatccatgggtcttctttacactggtagaaacaaaaatcaccttataaattttacagacttgtaaaatgtttgagtcatgatcagttgtgtaaataaagtaggctcattagaaaatgttgttagcatgacataaaaagtcatataatcatcttttatctacaagttttaggtaattttcctttaacttattttatttta

SEQ ID NO: 361519 - DNA, 576 bp, Homo sapiens
agctctgtagtgggtttaaaatttggaaatgagacttccaactttgtctttctttttcaagttatttttggctgttcagagcccctcaagtttccatgtgaatttaaaaacctaatccttatacaaaaaaatggtgagctaatttcaaagttttatttaactctttaatgatgaactctttaatgatgaaaccagtaggatggccaagtaggttccaaaaagagtttgagaaactgagatttttataatgagggggaaaaaaggaattctgcaataaatttgctagttacatattgtcgtataggaaaattatacccacccaccccccctttttcttaaccaatgtaaagaaccttttctaccaatataaagaagatgatccatgggtcttctttacactggtagmaacaaaaatcaccttataaattttacagacttgtaaaatgtttgagtcatgatcagttgtgtaaataaagtaggctcattagaaaatgttgttagcatgacataaaaagtcatataatcatcttttatctacaagttttaggtaattttcctttaacttattttatttta

SEQ ID NO: 361520 - DNA, 589 bp, Homo sapiens
tgatcctttggaagagaagaggcgttccagtttttggaattttcaacctttttgtgctgtttttttttttttttctcatctttgtggatttatctacctttggtttttgatgttggtgacctttggatgagggttctgtgtggatgtactttttgttgatgcttttccttcctcttygttagttttccttctaacaggcccttctgccacaggtctgctggagttcactggtggtccactttttgttgattttgatgctattcctttgttagttttccttctaacaggcccctttgctgcaggtctgctggagtttgctggtggtctacttcataccctgttgccagggtatcaccagtggaggctgcagaacagcaaagattgctgccacttccttcctctggaagctttgtcccagagggcacccgccagatgccagctggacttctcctgtatgaggtgtctgttgaccattgctgaggaggtgtgtcccagtcaggaggcatgggggtcagggacccacttgaggagacagtctgtcccttagcagagcttgagcgctgtgctgggagatccactgctctcttca

SEQ ID NO: 361521 - DNA, 610 bp, Homo sapiens
ctgggtaacttataaatgaaagagatttagttgattcaccattccacatggctagggaggcctcaggaaacttacaattgtgacagaaggggaagcaaacacatccttctttacatggcggcaggagagaaaagtgcagagcgaaagggagaaaaaccccttataaaatcatcagatctcatgagaactcactcattaccaggagaacagcatggagaaaccacctccatgatcaaattacctcccacaagcccctccctcaacacatggggattacaacttggattacaaatcattatgagatttgggtggggacacaragccaggccatatcacttactctgatagctcacacgagagctcacatgagagagcctggcaactcccattcttgctctcttgcacccaccctctcttgcctgctctcttgccatgtgacacacctgctccccttttgccttctaccatgatgtaagcttcctgaggccctcaccagaagccgagcagatgttggtactgtgcttatacagcctgcagaactgtgagccaaaataaacctctttataaattacccagcctcaggtatttctttatagcaacacaaaaacaa

SEQ ID NO: 361522 - DNA, 610 bp, Homo sapiens
ctgggtaacttataaatgaaagagatttagttgattcaccattccacatggctagggaggcctcaggaaacttacaattgtgacagaaggggaagcaaacacatccttctttacatggcggcaggagagaaaagtgcagagcgaaagggagaaaaaccccttataaaatcatcagatctcatgagaactcactcattaccaggagaacagcatggagaaaccacctccatgatcaaattacctcccacaagcccctccctcaacacatggggattacaacttggattacaaatcattatgagatttgggtggggacacaaagccaggccatatcacttactctgrtagctcacacgagagctcacatgagagagcctggcaactcccattcttgctctcttgcacccaccctctcttgcctgctctcttgccatgtgacacacctgctccccttttgccttctaccatgatgtaagcttcctgaggccctcaccagaagccgagcagatgttggtactgtgcttatacagcctgcagaactgtgagccaaaataaacctctttataaattacccagcctcaggtatttctttatagcaacacaaaaacaa

SEQ ID NO: 361523 - DNA, 565 bp, Homo sapiens
ggtgttctggtcctgttgttaggtcctctgatggtccacatgtgagccagaagccacaggcagggcatgtcaactcctrggcccttgggacagtgttcttggatgccggtggcaggcaggctgggacttttgtccaatctgcatgttcatcagtgtttatcaatatctcctactaaacctaaatggtttcatcagcacatgcccattatggctgcatgacccaattccacatgctgctgcttccaattcttgtacccgtcatcatattttttatttagtctgccttacagctcaaattcttgagggagaatctggctcactgtgctcagtttacatcttcatttccttttataaagttgccactgttggtcaactcagtcgtgactacagaggaggagttataatcaaccctttgctggttttaagcccttttctccaagggaatatggtttgctgtttctaaggaaactccatgtgattggatctgtgatctaagttatctttttcaagcttgtagttttggataaaaaaactcatgatgctttctaattcattaagcatttct

SEQ ID NO: 361524 - DNA, 569 bp, Homo sapiens
ctaactttttagtatttagtgtttttgatcaatggagacaatgtgatctaatgtgatctaaaataaaattagaagatattcttgagagaaatgtgatcacaatggactgactttagaaataacttcaacatgagatggtattaatgagcctgtcactttctgcacagaagtcttcaaattcatgtctctgagcaccttgttacttttcccatacatatttaaccctattcagttcttatctagtgctcctttccattttacttcacagaacccatgctctatcagaggcaaattcttcttgattctaaacatccttctcatcatcttactctctgtcrccttcctggaatgaaacatggttatattaggatgcactatagccccagttatcatttactacttctgcttttcagaaactagcatagcctcctaataatgagcaggtgctgagtacatgattagtgatgattttagatgttggggtggttggtaggccttgtgtttgttcttctggatcagaagttaggaaaccagaacctacggctaatgtgcctcacagcttgtgtttg

SEQ ID NO: 361525 - DNA, 569 bp, Homo sapiens
ctaactttttagtatttagtgtttttgatcaatggagacaatgtgatctaatgtgatctaaaataaaattagaagatattcttgagagaaatgtgatcacaatggactgactttagaaataacttcaacatgagatggtattaatgagcctgtcactttctgcacagaagtcttcaaattcatgtctctgagcaccttgttacttttcccatacatatttaaccctattcagttcttatctagtgctcctttccattttacttcacagaacccatgctctatcagaggcaaattcttcttgattctaaacatccttctcatcatcttactctctgtcaccttcctggaatgaaacatggttatattaggatgcactatagccccagttatcatttactacttctgcttttcagaaactagcatagcctcctaataatgagcagktgctgagtacatgattagtgatgattttagatgttggggtggttggtaggccttgtgtttgttcttctggatcagaagttaggaaaccagaacctacggctaatgtgcctcacagcttgtgtttg

SEQ ID NO: 361526 - DNA, 554 bp, Homo sapiens
ccttggaacgtagaaaattgcccaatragataaaatatgagttttgggaaccatttgaaattggcatgaagtctttattcacctaaacctctgaaaagcactgctctaggagcagagaaaaagggggattgagacatcaaacaattacacaaaatgactgggaaatgcctgcaatatggtcactgcaaaggctgaatattaaattgtctatttgctgtgattatataaaaagtataggatctggaaataaaacctggaagtgaaatattgaccaaaagaattctaatgagggtttctttttcaagatttaaaagctaagcatcaatctaacttagctgttatttactaatttaaatccctactttactccataagaatctaaggaggcttagaagctggtttgtgcatcagctgaggccaatctgagaggctacgggcctttgttcttccatcgcctcaagggccagacctggaaaaagagagcagggtttctccagtgctggcctgcctcggaactacctgggtgcttaggaacaagagtggtgactgggccc

SEQ ID NO: 361527 - DNA, 460 bp, Homo sapiens
ccaactttggctaccgttagactcttacgggtacaggcattctaaagccaagtctacactggccactaaggaaagctggtctaggaaaggcagggaagtaataaaaggagtccacaggaggtatgtctgggctaattcttagccacccagaatattcaggcaagactttgtttcatgaaagtagctctttcgagggagagggatagctaattttcatacttgaatctttcaacacttctgtgaacctatggaaaacaaaaataattgcgggggatgtgctaactggagtaggaagtgataagatggcagtcccaagcttgggcatgctaaaagagacaggtgacagggctagggacaggggacctgrtagaacactgtatacaaagtccttctgtctgaaagcccatgccccagttcttggccagtctgccccataaggggcagtgagacttgagtacag

SEQ ID NO: 361528 - DNA, 620 bp, Homo sapiens
tcttaacattttgctatattcacttcagacascagaatctatcccctctcagaatctatcctcactcagataaaatacaatggcatgaatcacacttttctgttcaatgcctcattctgtgcggtaatgactaatggctaaattacaccctttaagagaacttaagatcaaacctttagccagcacctcccttaacgcttcttcccatcacatgttagaagaatgagtgttgtggggatgtggacaggaagaccactcacatgagcagtcactgggccagcaggagagggtggaggatgatggggtgggggtggctagggcaaggtgagggaacgtgtccaaaaaataaaacttaattaacgctaatagtgagacatgattattggccaacaataaaacttatttttacattgttatttcctctatggttatcttacagagaggtttcaaacctggtgaatagggctgttcccggcccttagggagcctttgaatgaattttaaaggggtcctttgggcagacatgagcgacgccagggcagagcatgggctgaattttcgtccctacttcccacttcagccaaatgcctttgtggagggcacagcctatacaaccacag

SEQ ID NO: 361529 - DNA, 620 bp, Homo sapiens
tcttaacattttgctatattcacttcagacaccagaatctatcccctctcagaatctatcctcactcagataaaatacaatggcatgaatcacacttttctgttcaatgcctcattctgtgcggtaatgactaatggctaaattacaccctttaagagaacttaagatcaaacctttagccagcacctcccttaacgcttcttcccatcacatgttagaagaatgagtgttgtggggatgtggacaggaagaccactcacatgagcagtcactgggccagcaggagagggtggaggatgatggggtgggggtggctagggcaaggtgagggaacgtgtccaaaaaataaaacttaattaacgctaatagtgagacatgattattggccaacaataaaacttatttttacattgttatttcctctatggttatcttacagagaggtttcaaacctggtgaatagggctgttcccggcccttagggagcctttgratgaattttaaaggggtcctttgggcagacatgagcgacgccagggcagagcatgggctgaattttcgtccctacttcccacttcagccaaatgcctttgtggagggcacagcctatacaaccacag

SEQ ID NO: 361530 - DNA, 620 bp, Homo sapiens
tcttaacattttgctatattcacttcagacaccagaatctatcccctctcagaatctatcctcactcagataaaatacaatggcatgaatcacacttttctgttcaatgcctcattctgtgcggtaatgactaatggctaaattacaccctttaagagaacttaagatcaaacctttagccagcacctcccttaacgcttcttcccatcacatgttagaagaatgagtgttgtggggatgtggacaggaagaccactcacatgagcagtcactgggccagcaggagagggtggaggatgatggggtgggggtggctagggcaaggtgagggaacgtgtccaaaaaataaaacttaattaacgctaatagtgagacatgattattggccaacaataaaacttatttttacattgttatttcctctatggttatcttacagagaggtttcaaacctggtgaatagggctgttcccggcccttagggagcctttgartgaattttaaaggggtcctttgggcagacatgagcgacgccagggcagagcatgggctgaattttcgtccctacttcccacttcagccaaatgcctttgtggagggcacagcctatacaaccacag

SEQ ID NO: 361531 - DNA, 632 bp, Homo sapiens
acttctgacagcttcccatatttataagttacttataagtgctgcacgtattagaatttttttttttcagaccagtaaagttagagaaaagacgctgtaaaggaaaagcaagtgagagtatgtgtaggacactgacagtgtgtgggcaccagttctgaagaggaggggagctgctggagccctagcctgttggggaaaagctggcacactcttggctcgccctctttgagtggagctgatccaacacctcatgcctgccttggccggacactgagaggaggggcacacgtgcttccagagacactcaggagtcagaccccaatgctcagagtcacaatgtgttcatggcctcctgtaacaggactctggggatcccctctgtggcccagcccaccccaccctctgctcttctatgctgtgcccagggcagctgccctcttctgcctgtgccccatcccatcctgaaaacccaggaccaaggcaggggcaggcagccagttcttccaccttgcctcagagtcatttaaaacctttactgcatttgataccagaaaarcctccagagacaaaccaaatgcaaaggcctttcctttataactctaaagaacaggcatcgaaagtttatttttgta

SEQ ID NO: 361532 - DNA, 459 bp, Homo sapiens
ccaaatgactgtgtttgcttcctttcatattttgaccccgtgctttttggctaaagtataaaagaagagaaatctgaaatgtgttctcaaacgttcaaagctccaattgctgcagaagagaatttaaaacaaaccccccttggactctcggcaggagtggacagcagtatctctgcttagaagtctgcaggtgaaggacaggctgagccagaggaaatctgtttctcattagaattcttggcggagcattttcaggctcatctggaaaagagatgaggagaagggctgccagtgaggtttgtttaataagctcytttctcccctcacacgtctgctggctttcccgtccacaggccacctgggaccaggttttccagtccctctgcagccccctgcatgtgtctgtatataatctgggtatatggcttataaagtggagaatccatataaggaaaaccc

SEQ ID NO: 361533 - DNA, 606 bp, Homo sapiens
tctgttaaaagaaagaagtaactaaggccatgatagtgagatattctataaatatttatttatatttggaacaaaaaatgctgctctaaacatcagaaaaaccacatttcgaaagcaaataaaacagactgcattgtgtaaaaccttcacatttataaaagtaagcacattgagyagggactctgccatactaacacaaataaacataattcacctttcaaacaaatcagattttcaaattagatcacaattgaaaaccaactctatgctgtatccaagaggcatacccagaacaaagtaattctgaaatgggaaaaaaaatgatgcttgaagaaaatctaaaacaaaaagaatcagcagttatatgaatttcagacacgatgagattcaggtgaaaagcacaaaaatgggcattatgtaagaataatggatatagctcataatgaaatttacagttatggatacaaatacaccaaataatgtaatcagcaacttcctacagcagacatcacagaagctacaataagaaataacaacttgtcactgggaattttaattcaccacccccaatctataaaaaatcaaaatgtccacgtctcataagct

SEQ ID NO: 361534 - DNA, 617 bp, Homo sapiens
acttaactgctagatggccacttcaataacctgacctatttccaggcttagatatcaggagaagaaatatatatggtacaattacatttttatctatttttgctttcttatattttgaatttttcctacctttgcacaatcacccactgatatggtttggctctgtgtccccacccaaatctcatctcgaattgtaataatccccacgtgttggaggaggggcatggtgggagatgactgaatcatgggggtggattcctcctttgctgttcttgtgatagtgagtgagtgctcatgagagctgatggtttcaaagtgtggcacttcccccttcaatctctctttcctgctgccttgtgaagaaaatgcctgcttcccttttgcctcccatcatgactaagtttcctgaggccttcccagccatggggaactatgaatcaattaaacctttttcctccataaattaccctgtctcargtagttctttatagcagtgtgaaaacagactaatacacccatgatatcactaattactatttaaaaagaaagtacagatatgtgtgtatatatttttaatcataaaaattctataaaagttctatatttttatacctata

SEQ ID NO: 361535 - DNA, 508 bp, Homo sapiens
atgttttcatcctagtgaagttaaattttttcaaaatgtttattggccacttgcttttcttggaaaaaaaattgctgttcatgccttttgcccattttaaaattaaaatattattcacataaagaaacattttatttattagctgtatgtcataggggtcatgtagttgttgagaacagaaacctctttaatctatttcaggaatcagggaatttatcgctaggaaaaggggaacccaatggaacccaaaactagaaggtggaacatgtcctcccaagacctaraaagttggcaagcaggtatttctgctcactctgaggccattggcctcttctgtttctcctttcatatctgttcctttcttctttccatagactagttcgcttgataagactgtttgtatattcatgagattttatgtccacaaggcttggggtttctatgaagccaactctgagcctcattctaaaaggaattgaagtgtgaatgttcttggaggtgctatagc

SEQ ID NO: 361536 - DNA, 603 bp, Homo sapiens
taggggtcatgtagttgttgagaacagaaacctctttaatctatttcaggaatcagggaatttatcgctaggaaaaggggaacccaatggaacccaaaactagaaggtggaacatgtcctcccaagacctagaaagttggcaagcaggtatttctgctcactctgaggccattggcctcttctgtttctcctttcatatctgttcctttcttctttccatagactagttcgcttgataagactgtttgtatattcatgagattttatrtccacaaggcttggggtttctatgaagccaactctgagcctcattctaaaaggaattgaagtgtgaatgttcttggaggtgctatagccagctacatatctatgtttccatgttccaatgtgtgaggttgagagcttgactcctggatcgtcctgcttggaactacgttcacatcccttgtccaatcagacataactatagagttctgaagtggggtgccaagagtaggggtatggtagaagttcagatgccccctgcctatttaattcattttcaaagaaggaaatgtggacagccacacaaatcaactaataaatatcctacacacccctatg

SEQ ID NO: 361537 - DNA, 603 bp, Homo sapiens
taggggtcatgtagttgttgagaacagaaacctctttaatctatttcaggaatcagggaatttatcgctaggaaaaggggaacccaatggaacccaaaactagaaggtggaacatgtcctcccaagacctagaaagttggcaagcaggtatttctgctcactctgaggccattggcctcttctgtttctcctttcatatctgttcctttcttctttccatagactagttcgcttgataagactgtttgtatattcatgagattttatgtccacaaggcttggggttkctatgaagccaactctgagcctcattctaaaaggaattgaagtgtgaatgttcttggaggtgctatagccagctacatatctatgtttccatgttccaatgtgtgaggttgagagcttgactcctggatcgtcctgcttggaactacgttcacatcccttgtccaatcagacataactatagagttctgaagtggggtgccaagagtaggggtatggtagaagttcagatgccccctgcctatttaattcattttcaaagaaggaaatgtggacagccacacaaatcaactaataaatatcctacacacccctatg

SEQ ID NO: 361538 - DNA, 603 bp, Homo sapiens
taggggtcatgtagttgttgagaacagaaacctctttaatctatttcaggaatcagggaatttatcgctaggaaaaggggaacccaatggaacccaaaactagaaggtggaacatgtcctcccaagacctagaaagttggcaagcaggtatttctgctcactctgaggccattggcctcttctgtttctcctttcatatctgttcctttcttctttccatagactagttcgcttgataagactgtttgtatattcatgagattttatgtccacaaggcttggggtttctatgaagccaactctgagcctcattctaaaaggaattgaagtgtgaatgttcttggaggtgctatagccagctacatatctrtgtttccatgttccaatgtgtgaggttgagagcttgactcctggatcgtcctgcttggaactacgttcacatcccttgtccaatcagacataactatagagttctgaagtggggtgccaagagtaggggtatggtagaagttcagatgccccctgcctatttaattcattttcaaagaaggaaatgtggacagccacacaaatcaactaataaatatcctacacacccctatg

SEQ ID NO: 361539 - DNA, 603 bp, Homo sapiens
taggggtcatgtagttgttgagaacagaaacctctttaatctatttcaggaatcagggaatttatcgctaggaaaaggggaacccaatggaacccaaaactagaaggtggaacatgtcctcccaagacctagaaagttggcaagcaggtatttctgctcactctgaggccattggcctcttctgtttctcctttcatatctgttcctttcttctttccatagactagttcgcttgataagactgtttgtatattcatgagattttatgtccacaaggcttggggtttctatgaagccaactctgagcctcattctaaaaggaattgaagtgtgaatgttcttggaggtgctatagccagctacatatctatgtttccatgttccaatgtgtgaggttgasagcttgactcctggatcgtcctgcttggaactacgttcacatcccttgtccaatcagacataactatagagttctgaagtggggtgccaagagtaggggtatggtagaagttcagatgccccctgcctatttaattcattttcaaagaaggaaatgtggacagccacacaaatcaactaataaatatcctacacacccctatg

SEQ ID NO: 361540 - DNA, 600 bp, Homo sapiens
atcaatacaactgacttctgttttgtctttccttaaaacaatgaaggattgttagaattaacatagatcatatgcaaacatgaggatttaggtggattgtgaaaatctgtgatggagtcttttgacctctctgattgtcttgtgggaatagacaatcttattctgaagcgatttaataaacatggcatgtgaattgttcaatttcatgtccttggatatcctctgtcaaagatattgcaaaagcattagaggtgattagacttggctcttaattaaaagactttttgactttccatatatattaatggaaatgaactaaaaatcctctagactacatttaaataactagataaagaggctctgagattttaatttgctctgatgctttttggccaaaggtgaattytatgcaagagtattgatcatatattattttattgttcagtatgtttgctatgtactattttggctccacaaagggccagtgagttggaagtcatgtaatgttctgtaacaacattagctacctagaagtgatttttattaacatttatggtttagatttagcttcatgaaatattttataactaattttctctt

SEQ ID NO: 361541 - DNA, 579 bp, Homo sapiens
atgttagggaagtcaaaataagcacctaccttttacttataaaactggaatccaaagtgaactaagatgtattctttgcatcatgacctcaaagattgtattcattaaggggacattttgaatgattaagcaattatatcccttaaaacttgacaaggaaaattattttttgtgcttatgggatttgggatccctgataaaatattatcaccgacactatcctttggcaaaattgtggagcagggacagttttagggccatcattttccatttcctccatygctatgataattattctcaggaaacgatttcataaaacctaatttatactaggcagtcatttatataaatgactgttaaagcctaatgagtacctctccgtcttttatctctgattctgtccttaaaggaccacctgatgttatgaggacccattcttggatcttgccagttacggctgtgggaagtagattgtgttgagtaggaaaggagaggtaacatatgtagatgcttaaggaagtgagctcagtatgtcagtcagaaaacacctgtgatttaaaaaaaatccttatttcaact

SEQ ID NO: 361542 - DNA, 451 bp, Homo sapiens
ccctggctccagcatggtaaaagcacagtctggagctatagagatggctgccacccttgcmccactttgggagcttggtgtgttcagcagatatcagtcccagtgctggctgctgcccctccccacaaggacctcaaatggctgagagagcagacagctacagctgtggtgctcgttgccccttcccccaggaactcagcaggcttaagctttagttgaatggctgttgagaatatgcttggctcctaggctccagtggtgtgggttcacgagtgggatcttccaatccatgggtggcacagttccgtggcaaaagcacggtttcccaggctgggtaacacactcactcaccgtctcccttggctggggggtgagggctcccctgcctcatgtggctctcaggtgggctgcccaccacactgctctttcttcctctacatgggtcacacca

SEQ ID NO: 361543 - DNA, 597 bp, Homo sapiens
agggtaaaactggctgctagtgctacttttagtgtgatccacaggatgacatgagcctacagactgccactggtcccttaaaagcaactcaattgaaggtacatcttcagaaacttttataaaatttgacagtaattctacatctgttgcatctaatatctttttttaaggtgggtttgtattttgcatatycttgtgtccttttccttcatttctattaatttacttttatattttataaaattatcagtttgcaatattggaaataagatctttaccacagactgaaaagcattgggatatacaattttggtgacgcaaacgtttagttttgatattcatgggaacagatttgtgaatttcaaatatacttagtgaaagccagtatttaatggagaaaaaaatgtattcaaatttcatacacctacctcaagggttgatctatctaaatatctttaaatgcatagacatgttaattataaaggaaactaacctcttatctctatagaaatgtttcattttctgcaaaatatagaaattagaaaaatgtatatctggccagcttgaaaattacataatttggaaaaattcaagttt

SEQ ID NO: 361544 - DNA, 623 bp, Homo sapiens
taataatcagaagaaaagacatggaagttaagtgcaacccagtctggcagttcattagcaaataactgccactatgccaaagtacgaaaacaaaacaaaattaatcctgcttagaagagctgaagatttctttgctttcctccaaaacaaggaactcaaaacatgtcaacagtaatccctgtctaaatgcatcagaaagccaggcaattcccactgtacccactccgacaccagggcattcagaaatacttcccaactatcacaggagctcttcaatctttgattttgtaagatgttcccacatataagagaccaagaaaaagacacatccacaacaaaacaactgggacatttttaacagaaaggtatgtttgtctcatatctaacactctgatttagcaattcacgtagcttcctttctccaagttccacaaaagaggccacaaatggccccttgataaagtctcctttctcagatgttttaaaggcactttatgctggatatcataacagwtaatctgactttcctccattccattgacttatttaatttgctcagagatgtaagacaattcagggacttgagagagctggggaaaatgggggagagtgttaaaacgaaa

SEQ ID NO: 361545 - DNA, 571 bp, Homo sapiens
tattggggctctctagcattccattcatttctttacacccgaaatctgcagagagacatcctttatccttgccctgtgctctgaacccaaaccaaattattctgatcaccaagaaaattagctttaacctatctaaagttttttccagacagcaatgttggtgggcatacaacaatatgactgaagacttacaatgcacgtgattaaaccagtgagaggaaccaggtctgcagcaactcaaagatgatctcatgaagcaggcttaatgtcaccattttgtaccaatataaattatttagctcatgaactgctgtcaacccctccctaaatcatttccaaatatggagctaattagacmacatgttgctctgaatctgattacaatatatttgattagcacgtagagttttatcccagtaaattgtcatcatcataaggttggaaaccctattgccagggcatcctggaggggaatatacacaattcagcctttattaaaattctaacttagtcaaacttaatggtgttcttggttctcatcactaagtcaaaagaatgccgatttctctct

SEQ ID NO: 361546 - DNA, 571 bp, Homo sapiens
tattggggctctctagcattccattcatttctttacacccgaaatctgcagagagacatcctttatccttgccctgtgctctgaacccaaaccaaattattctgatcaccaagaaaattagctttaacctatctaaagttttttccagacagcaatgttggtgggcatacaacaatatgactgaagacttacaatgcacgtgattaaaccagtgagaggaaccaggtctgcagcaactcaaagatgatctcatgaagcaggcttaatgtcaccattttgtaccaatataaattatttagctcatgaactgctgtcaacccctccctaaatcatttccaaatatggagctaattagaccacatgttgctctgaatctgattacaatatatttgattagcaygtagagttttatcccagtaaattgtcatcatcataaggttggaaaccctattgccagggcatcctggaggggaatatacacaattcagcctttattaaaattctaacttagtcaaacttaatggtgttcttggttctcatcactaagtcaaaagaatgccgatttctctct

SEQ ID NO: 361547 - DNA, 603 bp, Homo sapiens
atgttcttttcctgctcttgtctgtgggtagggagtaaactgctccctgtaaatctattcacactctttcacacattcctcgaatatgtatggctgtcctggaaagccattccctgaaagggttaagatgcctcctttmaacagtcatagagcagcagatggcacatttgctaaccaaaatgatgttgctctcacttgggtctaaatttcctccctccacctggcatcccagacagctgtgtgagctccatctgcccaccttgaattcatcaggtgaatgctccatttccttaattgaggttaagctaacccaagtaatcaaagacaagtatggaatgttccctgtcatcaccatgccactgatatatataacacccattcctgcagtagtaagccccactttaatacacagaaagcatagcacagtgaatgaaaagacagatcatgatagcagacaggacacttttcaagggttcatggctgaccgcagtgtcattcttcctccttaaagtaagtgccttaggaaagcttccattcacccacaagaacactgacaggtaacagatacctcccaaatccatgccaccaccacctatgcatatt

SEQ ID NO: 361548 - DNA, 603 bp, Homo sapiens
atgttcttttcctgctcttgtctgtgggtagggagtaaactgctccctgtaaatctattcacactctttcacacattcctcgaatatgtatggctgtcctggaaagccattccctgaaagggttaagatgcctcctttaaacagtcatagagcagcagatggcacatttgctaaccaaaatgatgttgctctcacttgggtctaaatttcctccctccacctggcatcccagacagctgtgtgagctccatctgcccaccttgaattcatcaggtgaatgctccatttccttaattgaggttaagctaacccaagtaatcaaagacaagtatggaatgttccctgtcatcaccatgccactgatatatataacacccattcctgcagtagtaagccccactttaatacacagaaagcatagcacagtgaatgaaaaracagatcatgatagcagacaggacacttttcaagggttcatggctgaccgcagtgtcattcttcctccttaaagtaagtgccttaggaaagcttccattcacccacaagaacactgacaggtaacagatacctcccaaatccatgccaccaccacctatgcatatt

SEQ ID NO: 361549 - DNA, 584 bp, Homo sapiens
gatgggatcagttccttgggagctgctaatgcctggactgagaatatgatcagagcagtgtgatgaaaaaagtatttaggaagatgactcaggcaccagtggccraacagcccaaaagtttttaatgagagggaagttgaatggcccaaaccactgctccatctagcaaatatttatcaagcaactactatatacaatgtaaataaggcattatttttaatgtctagaatatattccttaactttctggttctgatatttctaataaatgtgaatgtttacacgtacaaataattactcagatgccctgtgaatgtcagactaaaactgtaaattgggatcagattgacttatatcaaaaccactggacaatttaatttctacagtccctttacctggagagatgcttacttagaattcctgttttgaattaagaaggacacacagtttagttgcctctagggatttgggccttttagaggttatttttagaaagatttgttttgggagaggtcagttggtctacagttccagctgaaaagttttatggctagagctaattagtttccttagtattatttttgg

SEQ ID NO: 361550 - DNA, 585 bp, Homo sapiens
ctctcaaaattgtgtgagcctcaagccccacggaagctgaaatagcttctgttcaacagaataaaatcagaatttcccataccaatgcctgtggttccagctgggatgaaggggaaagaattccagctgccagttctcaatagtttttgtattctggattagtttgcaagatgaaaaacaatcttcaatttacttggggaatagtggaggaaaaggaaaaggggtgccctgctctttgtgacattcctgttttcctttcatagactacactgaataagaatggtttgagacttgatcaaattcagcatgacttaatgcttaccttgaattatatgaagtgctgtggaggttaattttgcccttagatttgagctagtgaggtctctgcctcagaccacagggttcaatgggtcccttgtattggagagcctccttaagatgtcctgcatttcttgagatgggctgcagccagagctsgcattcagacaggggctttaagcatagaccatagaccttggcatgcgtggcatgggtcttgatcatgaaaagcacctatctccctttttttttttttttttttttttt

SEQ ID NO: 361551 - DNA, 585 bp, Homo sapiens
ctctcaaaattgtgtgagcctcaagccccacggaagctgaaatagcttctgttcaacagaataaaatcagaatttcccataccaatgcctgtggttccagctgggatgaaggggaaagaattccagctgccagttctcaatagtttttgtattctggattagtttgcaagatgaaaaacaatcttcaatttacttggggaatagtggaggaaaaggaaaaggggtgccctgctctttgtgacattcctgttttcctttcatagactacactgaataagaatggtttgagacttgatcaaattcagcatgacttaatgcttaccttgaattatatgaagtgctgtggaggttaattttgcccttagatttgagctagtgaggtctctgcctcagaccacagggttcaatgggtcccttgtattggagagcctccttaagatgtcctgcatttcttgagatgggctgcagccagagctcscattcagacaggggctttaagcatagaccatagaccttggcatgcgtggcatgggtcttgatcatgaaaagcacctatctccctttttttttttttttttttttttt

SEQ ID NO: 361552 - DNA, 585 bp, Homo sapiens
ctctcaaaattgtgtgagcctcaagccccacggaagctgaaatagcttctgttcaacagaataaaatcagaatttcccataccaatgcctgtggttccagctgggatgaaggggaaagaattccagctgccagttctcaatagtttttgtattctggattagtttgcaagatgaaaaacaatcttcaatttacttggggaatagtggaggaaaaggaaaaggggtgccctgctctttgtgacattcctgttttcctttcatagactacactgaataagaatggtttgagacttgatcaaattcagcatgacttaatgcttaccttgaattatatgaagtgctgtggaggttaattttgcccttagatttgagctagtgaggtctctgcctcagaccacagggttcaatgggtcccttgtattggagagcctccttaagatgtcctgcatttcttgagatgggctgcagccagagctcgcattcagacaggggctttaagcatagaccatagaccttggcatgcgtggcrtgggtcttgatcatgaaaagcacctatctccctttttttttttttttttttttttt

SEQ ID NO: 361553 - DNA, 559 bp, Homo sapiens
gttgagattaggtgcagtcctagatgattgtcttctgtttccatatggttggatctagtttttctgaacactttatgatgttgtcaaaaagatttccttgtttgcctaacaagtgacatgtaactaaaactgccacatggaaggacttacattggcagttacatactttattctcttaagaaaatattaaaaataagcaacttcttcttcccaaaggactttccacttcaactttgggtgagataggtttcctaggaaacagatctcatggataattctagagtttagtcactatgtcctgaaaatcaatcaatggagcttttcataatatcaactcttccatccatttcaagcatttgaaagaaacacttactacttgactgcaacttagaaagtctttgatttttagggatctagtcataattgtgagggaaggataactatttttcaagcttctttttttaattttttaaattttttwaatttttatttttttttgaccaagtttccctctgctgcccaagctggagtgcagtggtgcaatctcggctcactgcaa

SEQ ID NO: 361554 - DNA, 593 bp, Homo sapiens
tagcagtcagtttaatttctaycactttgcctgcaaaagttgtgccaattaaagatgtctggagctctccaagctcagagtgattccactagtactttttcttcaattattcggaagcactaaatgtgaaaacaaatgtcttagattaccccagggctggaaaaattagcgctggtagaaagagcagcaacaaaccatgatagacaaagcataggacggtcacctttgtgggatagacataaggcttgtgtttctgcaggaaaggttttacagatggaaagtgaatgggaggcatcactgtcttgtatctcctgtcacccagaggtttcatcctgcaacacatacaagagaaactcatgcttgcacaactggagacatatacaagatggtttataacagttctgatcagtacaactctagaaacaatgcaaatgcccattcagagactggatgaataagtggaaaaaaatcatacaatgacatattcagtaggcagaacaaatgaactacacggtgacccaaaaatatggatgaatcttggtgatgtgctgctatgtgaaaaaaataaggcccaacatattatggcatatctt

SEQ ID NO: 361555 - DNA, 593 bp, Homo sapiens
tagcagtcagtttaatttctatcactttgcctgcaaaagttgtgccaattaaagatgtctggagctctccaagctcagagtgattccactagtactttttcttcaattattcggaagcactaaatgtgaaaacaaatgtcttagattaccccagggctggaaaaattagcgctggtagaaagagcagcaacaaaccatgatagacaaagcataggacggtcacctttgtgggatagacataaggcttgtgtttctgcaggaaaggttttwcagatggaaagtgaatgggaggcatcactgtcttgtatctcctgtcacccagaggtttcatcctgcaacacatacaagagaaactcatgcttgcacaactggagacatatacaagatggtttataacagttctgatcagtacaactctagaaacaatgcaaatgcccattcagagactggatgaataagtggaaaaaaatcatacaatgacatattcagtaggcagaacaaatgaactacacggtgacccaaaaatatggatgaatcttggtgatgtgctgctatgtgaaaaaaataaggcccaacatattatggcatatctt

SEQ ID NO: 361556 - DNA, 593 bp, Homo sapiens
tagcagtcagtttaatttctatcactttgcctgcaaaagttgtgccaattaaagatgtctggagctctccaagctcagagtgattccactagtactttttcttcaattattcggaagcactaaatgtgaaaacaaatgtcttagattaccccagggctggaaaaattagcgctggtagaaagagcagcaacaaaccatgatagacaaagcataggacggtcacctttgtgggatagacataaggcttgtgtttctgcaggaaaggttttacagatggaaagtgaatgggaggcatcactgtcttgtatctcctgtcacccagmggtttcatcctgcaacacatacaagagaaactcatgcttgcacaactggagacatatacaagatggtttataacagttctgatcagtacaactctagaaacaatgcaaatgcccattcagagactggatgaataagtggaaaaaaatcatacaatgacatattcagtaggcagaacaaatgaactacacggtgacccaaaaatatggatgaatcttggtgatgtgctgctatgtgaaaaaaataaggcccaacatattatggcatatctt

SEQ ID NO: 361557 - DNA, 608 bp, Homo sapiens
ttatttttacatgcaaatattttaggatgtatctctaaaagataaggactcttcttaaatgtaaccacaatgtcagcattacacaattccaaaaaaccccacaatttcttaatagcawtgaataactagtcaatacttactctttgaggtttttttgaatcaggatccaaataaggtcttttaagtcttttttaaaaatctgtttttttttctcttttttctttttattgatattttgttgaagaagctaagtcctttgttttgtagagttttccaacaacgtgtctattgtgtctatgttgtgtagtgtaacaggttcctttgtcctctgtacttcctgtaaattggtagttcaacctagtgggctaatcagattcaagtttgatttcttttggcaagactgcttcataaatggtaccttctatcaggaggaacataatgtttagttttatctccttttgtaatattagcaaccattgatgatcactagtttattaagtaatgtaaaatctaatttggtcatcttttgctttttaattagaatgattctataatgagaaaattttcctcatcaattatggttaccttgaggtacattttgtataaca

SEQ ID NO: 361558 - DNA, 608 bp, Homo sapiens
ttatttttacatgcaaatattttaggatgtatctctaaaagataaggactcttcttaaatgtaaccacaatgtcagcattacacaattccaaaaaaccccacaatttcttaatagcattgaataactagtcaatacttactctttgaggtttttttgaatcaggatccaaataaggtcttttaagtcttttttaaaaatctgtttttttttctcttttttctttttattgatattttgttgaagaagctaagtcctttgttttgtagagttttccaacaacgtgtctattgtgtctatgttgtgtagtgtaacaggttcctttgtcctctgtacttcctgwaaattggtagttcaacctagtgggctaatcagattcaagtttgatttcttttggcaagactgcttcataaatggtaccttctatcaggaggaacataatgtttagttttatctccttttgtaatattagcaaccattgatgatcactagtttattaagtaatgtaaaatctaatttggtcatcttttgctttttaattagaatgattctataatgagaaaattttcctcatcaattatggttaccttgaggtacattttgtataaca

SEQ ID NO: 361559 - DNA, 608 bp, Homo sapiens
ttatttttacatgcaaatattttaggatgtatctctaaaagataaggactcttcttaaatgtaaccacaatgtcagcattacacaattccaaaaaaccccacaatttcttaatagcattgaataactagtcaatacttactctttgaggtttttttgaatcaggatccaaataaggtcttttaagtcttttttaaaaatctgtttttttttctcttttttctttttattgatattttgttgaagaagctaagtcctttgttttgtagagttttccaacaacgtgtctattgtgtctatgttgtgtagtgtaacaggttcctttgtcctctgtacttcctgtaaattggtagttcaacctagtgggctaatcagattcaagtttgatttcttttggcaagactgcttcataaatggtaccttctatcagraggaacataatgtttagttttatctccttttgtaatattagcaaccattgatgatcactagtttattaagtaatgtaaaatctaatttggtcatcttttgctttttaattagaatgattctataatgagaaaattttcctcatcaattatggttaccttgaggtacattttgtataaca

SEQ ID NO: 361560 - DNA, 523 bp, Homo sapiens
gcagctgtaacctttgtttctctgattatagattagcctcttccttacctatactgttttgtraaatgttgtaaaagactaaaaggcaccagagaagaacccctcccttcttcactgttgatctccattatagatgacatttcctcttcttttacacaaagacctcatgactatcacattatctgggatggaaactgatgattcctaaagattagccataattaaacattctactttaaatttttaaattttttgctaatataaacaatgctgccatgtgcatatttgtacatatataattgcacaggtgtcaagtatttctgtcagattcctaatagaattgttgtcagaaatatgcacttttaacattttgataaacattaaaattttttctagcgtatgaatttaagtctataaatttacctttgagtattgtattggccacatcccattggttgtgaaaagcagtgattttactgttcattttaagcaaagtgaaacttcattaaaattaagtcccatg

SEQ ID NO: 361561 - DNA, 523 bp, Homo sapiens
gcagctgtaacctttgtttctctgattatagattagcctcttccttacctatactgttttgtgaaatgttgtaaaagactaaaaggcaccagagaagaacccctcccttcttcactgttgatctccattatagatgacatttcctcttcttttacacaaagacctcatgactatcacattatctgggatggaaactgatgattcctaaagattagccataattaaacattctactttaaatttttaaattttttgctaatataaacaatgctgccatgtgmatatttgtacatatataattgcacaggtgtcaagtatttctgtcagattcctaatagaattgttgtcagaaatatgcacttttaacattttgataaacattaaaattttttctagcgtatgaatttaagtctataaatttacctttgagtattgtattggccacatcccattggttgtgaaaagcagtgattttactgttcattttaagcaaagtgaaacttcattaaaattaagtcccatg

SEQ ID NO: 361562 - DNA, 555 bp, Homo sapiens
caaaatacttgtatcattttattaacactgccttcttgtaccacaatttttttaaaaaaccacttcagttatgattgacaaaaagctgtacatgtttaatgtatacaacattagtttgcaaatgcaatcataaaatcatcaccataatcaatgccataaacatatacatcaactccaaaagtttcatcttaccctcctgactttgtgataagagcatttaacataaaaatttgctaagagggtagatactaagtgtacaagtattgtcaactatagtyactatgcagtatagaaatttctttttggttttcttttttcattttacaatggatttaattatttctaatcaaataatggatttgattatgtgcaatggatgtgattttttatattttattatactttaagttctagggtacatgtgcacaacatgcaggtttgttacataggtatacatgtgccatgttggtgtgctgcacccagcaactcgtcatttacattaagtatatctcctaatgctatccctcccccctccccccaccgcacaacaggccc

SEQ ID NO: 361563 - DNA, 576 bp, Homo sapiens
gagtatatataacaggatgccrtttatgtaaaactctgaaaatgcaaattaatctaaagtgatagaaagtagattggttggttggggaggaaggagtgttaagaggaggattcttttggaggtgatggatacattcattatcttcattgtagtgattatttcaggagtgtagacagacctatgttaaaagttgccaagttgtatactttaaacatacattgcaggttgtatgccaattctttaattaaacctattgaaataatattgtgaccaaaatatgtctgtggtttgctctaaaatatttcttgatgtagagagcaaataggtggcactaaaccagaaactggccattagttgataatagctgagaggtaaatacatgagtgttcgttaccctattctatccatttttatatttgaaaaatttcaaaggaaaatactataattactgatttatatatatctttgtgcctctttgcatatcttttatatagaatagggcactaaaaatggaatattagatgcaagcacttacatactttttattttggtggatattaagctgtggttttaagt

SEQ ID NO: 361564 - DNA, 466 bp, Homo sapiens
gcttaggaaaatctttagagtcccaaatatatatcaaatatatcttacagccttcctaaaacctatatattttataaataaagtgaaatgtattttaacattacatcttaggcaacaacataactttgcattactaagagcgataaaactctagctctgctaraacactgactgcttggggagagcaaatcaaatctgacaaaattttgattgcaatacaaatacacaacatttgttgagaacctgttatgatttcatcacggttctgggcctcttaggtgcccagacactgtaagtcaaccctgaaccatcattttagcctctttctgctttgccaactgttacccttccaattattttttaaaatgtctcttagactatatctttgcctgcatcaagtttggctgctccatgtagtcaaacgatttttgtgtttcagatcaacttgagtgagttgaacaataac

SEQ ID NO: 361565 - DNA, 466 bp, Homo sapiens
gcttaggaaaatctttagagtcccaaatatatatcaaatatatcttacagccttcctaaaacctatatattttataaataaagtgaaatgtattttaacattacatcttaggcaacaacataactttgcattactaagagcgataaaactctagctctgctagaacactgactgcttggggagagcaaatcaaatctgacaaaattttgattgcaatacaaatacacaacatttgttgagaacctgttatgatttcatcacggttctgggcctcttargtgcccagacactgtaagtcaaccctgaaccatcattttagcctctttctgctttgccaactgttacccttccaattattttttaaaatgtctcttagactatatctttgcctgcatcaagtttggctgctccatgtagtcaaacgatttttgtgtttcagatcaacttgagtgagttgaacaataac

SEQ ID NO: 361566 - DNA, 429 bp, Homo sapiens
caatagtgctttccatccaaagctgccattaataggattatcagtttaaagacaggctcatcaataaggctaagggtactcaaaagtctctgaatttttcagaagtgaaaacaaaaatagtggaatcaaggamacagcattcaatgaatcttttaacttgttgcaggaagtcagggaccccggagagccggctgaagccatggcagaaaaacataaattgtgaagatttcatggacatttattagttccccaaattaatacttttataatttcttacacctgtctttaccgcaatctctgaacataaattgtgaagatttcatggacacgtatcacttccccaatcaatacccttgtgatttcctatgcctgtctttactttaatctcttaatcccatcatcttcgtaaactgaggaggatgtatgtca

SEQ ID NO: 361567 - DNA, 571 bp, Homo sapiens
atgaccacacttgctgtatattttgaaaccatatttttaagaaagtgtatgcattacatggaggcttcattctcccaatagtgctttccatccaaagctgccattaataggattatcagtttaaagacaggctcatcaataaggctaagggtactcaaaagtctctgaatttttcagaagtgaaaacaaaaatagtggaatcaaggacacagcattcaatgaaycttttaacttgttgcaggaagtcagggaccccggagagccggctgaagccatggcagaaaaacataaattgtgaagatttcatggacatttattagttccccaaattaatacttttataatttcttacacctgtctttaccgcaatctctgaacataaattgtgaagatttcatggacacgtatcacttccccaatcaatacccttgtgatttcctatgcctgtctttactttaatctcttaatcccatcatcttcgtaaactgaggaggatgtatgtcacctcaggaccctgtgatgattgtgttaactgctcaaattatttgtagagcatgtgtgtttgacaata

SEQ ID NO: 361568 - DNA, 571 bp, Homo sapiens
atgaccacacttgctgtatattttgaaaccatatttttaagaaagtgtatgcattacatggaggcttcattctcccaatagtgctttccatccaaagctgccattaataggattatcagtttaaagacaggctcatcaataaggctaagggtactcaaaagtctctgaatttttcagaagtgaaaacaaaaatagtggaatcaaggacacagcattcaatgaatcttttaacttgttgcaggaagtcagggaccccggagagccggctgaagccatggcagaaaaacataaattgtgaagatttcatggacatttattagttccccaaattaatacttttataatttcttacacctgtctttaccgcaatctctgaacataaattgtgaagatttcatggacacktatcacttccccaatcaatacccttgtgatttcctatgcctgtctttactttaatctcttaatcccatcatcttcgtaaactgaggaggatgtatgtcacctcaggaccctgtgatgattgtgttaactgctcaaattatttgtagagcatgtgtgtttgacaata

SEQ ID NO: 361569 - DNA, 429 bp, Homo sapiens
caatagtgctttccatccaaagctgccattaataggattatcagtttaaagacaggctcatcaataaggctaagggtactcaaaagtctctgaatttttcagaagtgaaaacaaaaatagtggaatcaaggacacagcattcaatgaatcttttaacttgttgcaggaagtcagggaccccggagagccggctgaagccatggcagaaaaacataaattgtgaagatttcatggacatttattagttccccaaattaatacttttataatttcttacacctgtctttaccgcaatctctgaacataaattgtgaagatttcatggacacgtatcacttccccaatcaatacccttgtgatttcctatgcctgtctttactttaatctcttaatcccatcatcttcrtaaactgaggaggatgtatgtca

SEQ ID NO: 361570 - DNA, 608 bp, Homo sapiens
ccctgccttcatttaccttgtgatatcttattaccttgtgaaacatgtcatccctgtgacccacatcctatttgtacactccctccccttttgaaaatcactaataaaamcttgctggttttgcagcttagggggcatcacggaacctgccaacatgtgatgtctcccctggacacctagctttaaaatttctccttttgtactctgtccctttatttctcagaccggccaatacttagggaaaatagaaaagaacctacatgaaatatcgggggtgaatttcgcccaatatcaactgagaggtgatctctcttatagtagcatttcccccatcatcatctaggctggagttccctaacatttatgttaataggagctatttttaattttccctatggtcttaagatttgaaaggtagaggacttcttgatttatgtctggagaaaaaaacacagaaaatgaaatctgagtaaagataaatttaaggctttagtatttgaacacatcagggcaaggaaagataccatcaatttttctgtcatcctctctggtcactgatggattgactagtgcaattggcttgaaattatgccaaataaaattttaat

SEQ ID NO: 361571 - DNA, 608 bp, Homo sapiens
ccctgccttcatttaccttgtgatatcttattaccttgtgaaacatgtcatccctgtgacccacatcctatttgtacactccctccccttttgaaaatcactaataaaaacttgctggttttgcagcttagggggcatcacggaacctgccaacatgtgatgtctcccctggacacctagctttaaaatttctccttttgtactctgtccctttatttctcagaccggccaatacttagggaaaatagaaaagaacctacatgaaatatcgggggtgaatttygcccaatatcaactgagaggtgatctctcttatagtagcatttcccccatcatcatctaggctggagttccctaacatttatgttaataggagctatttttaattttccctatggtcttaagatttgaaaggtagaggacttcttgatttatgtctggagaaaaaaacacagaaaatgaaatctgagtaaagataaatttaaggctttagtatttgaacacatcagggcaaggaaagataccatcaatttttctgtcatcctctctggtcactgatggattgactagtgcaattggcttgaaattatgccaaataaaattttaat

SEQ ID NO: 361572 - DNA, 608 bp, Homo sapiens
ccctgccttcatttaccttgtgatatcttattaccttgtgaaacatgtcatccctgtgacccacatcctatttgtacactccctccccttttgaaaatcactaataaaaacttgctggttttgcagcttagggggcatcacggaacctgccaacatgtgatgtctcccctggacacctagctttaaaatttctccttttgtactctgtccctttatttctcagaccggccaatacttagggaaaatagaaaagaacctacatgaaatatcgggggtgaatttcgcccaatatcaactgagaggtgatctctcttatagtagcatttcccccatcatcatctaggctggagttccctaacatttatgttaataggagctatttttaattttccctatggtcttaagatttgaaaggtagaggacttcttgatttatgtctggagaaaaaaacacagaaaatgaaatctgagtaaagataaatktaaggctttagtatttgaacacatcagggcaaggaaagataccatcaatttttctgtcatcctctctggtcactgatggattgactagtgcaattggcttgaaattatgccaaataaaattttaat

SEQ ID NO: 361573 - DNA, 523 bp, Homo sapiens
ctttttcaagtaagtacaccagatctttctcaaccactgaagaaggtctgtcaagtcaatgcagtggcttctcctgtcacttttgggatttggagcagtatcctttcaggtgttaaaaagaacagtgggatttcaatcaaaatactcatctcacatcttaacagcctccccttacacatggctcagagctgggaagcctgcagcagtacagggrctggttcctttctctccctgttcagtctcactctctgctgcttctggcttcctactctggggattgctatgtaacaaatcactccaaatttaaatgtttatcataacagtcacttattttgcttattaatttcttctatgtggaaccattcagggcaaccccaaatgggatgattctaaagattgggggctgggatcaactagaggcttctctctcagatgtctggcccatgcttccacgttcctctagagttgggaaagaaggagacaagaactatcttgactataatcttgtcttgatgacctcatt

SEQ ID NO: 361574 - DNA, 630 bp, Homo sapiens
tttgggatttggagcagtatcctttcaggtgttaaaaagaacagtgggatttcaatcaaaatactcatctcacatcttaacagcctccccttacacatggctcagagctgggaagcctgcagcagtacagggactggttcctttctctccctgttcagtctcactctctgctgcttctggcttcctactctggggattgctatgtaacaaatcactccaaatttaaakgtttatcataacagtcacttattttgcttattaatttcttctatgtggaaccattcagggcaaccccaaatgggatgattctaaagattgggggctgggatcaactagaggcttctctctcagatgtctggcccatgcttccacgttcctctagagttgggaaagaaggagacaagaactatcttgactataatcttgtcttgatgacctcattgtgactggtgcctagatgtaaattctttggcttatgggctctcagagtccctttccattagggacccctgtggtccctcttcctgagccaaatgatgtcctcttaagctgcttccccgtggcgtcccctcagccctcgtgtccaatggtacagcactcacagccttttctgctggggttaccagtccc

SEQ ID NO: 361575 - DNA, 630 bp, Homo sapiens
tttgggatttggagcagtatcctttcaggtgttaaaaagaacagtgggatttcaatcaaaatactcatctcacatcttaacagcctccccttacacatggctcagagctgggaagcctgcagcagtacagggactggttcctttctctccctgttcagtctcactctctgctgcttctggcttcctactctggggattgctatgtaacaaatcactccaaatttaaatgtttatcataacagtcacttattttgcttattaatttcttctatgtggaaccatycagggcaaccccaaatgggatgattctaaagattgggggctgggatcaactagaggcttctctctcagatgtctggcccatgcttccacgttcctctagagttgggaaagaaggagacaagaactatcttgactataatcttgtcttgatgacctcattgtgactggtgcctagatgtaaattctttggcttatgggctctcagagtccctttccattagggacccctgtggtccctcttcctgagccaaatgatgtcctcttaagctgcttccccgtggcgtcccctcagccctcgtgtccaatggtacagcactcacagccttttctgctggggttaccagtccc

SEQ ID NO: 361576 - DNA, 447 bp, Homo sapiens
gccacctcccatatgctgcccctcttttyagaacgtggtaaagcttgttactatcattcttacttttggggctccagtgctcagaagccctgcaactgtaaaaatggtacatttaacatccattccatgggcatcaaaaattacaattatgatgcaaccactgtgatcagcatgaaggactcatgagataataatcacgaaccttttttttctcctgtggtcccattaaaagtgtcctatggggtcccagtctcaccctggccctgtggtaaaaattcaagcagtctcatgacatttctgtttttcgtcagaaatggaagatcctcaagtctgtaatcaatcaacctatcacagggaagcagtcactactactcagaattgcccccctctcccagctcaaatgtgctgctttaggatgggttggagggggaggggattggggattgg

SEQ ID NO: 361577 - DNA, 447 bp, Homo sapiens
gccacctcccatatgctgcccctcttttcagaacgtggtaaagcttgttactatcattcttacttttggggctccagtgctcagaagccctgcaactgtaaaaatggtacatttaacatccrttccatgggcatcaaaaattacaattatgatgcaaccactgtgatcagcatgaaggactcatgagataataatcacgaaccttttttttctcctgtggtcccattaaaagtgtcctatggggtcccagtctcaccctggccctgtggtaaaaattcaagcagtctcatgacatttctgtttttcgtcagaaatggaagatcctcaagtctgtaatcaatcaacctatcacagggaagcagtcactactactcagaattgcccccctctcccagctcaaatgtgctgctttaggatgggttggagggggaggggattggggattgg

SEQ ID NO: 361578 - DNA, 528 bp, Homo sapiens
cctggccctgtggtaaaaattcaagcagtctcatgacatttctgtttttcgtcagaaatggaagatcctcaagtctgtaatyaatcaacctatcacagggaagcagtcactactactcagaattgcccccctctcccagctcaaatgtgctgctttaggatgggttggagggggaggggattggggattggctgcttccatttttctttgtacttctgcctcacttttctttctaattcagtttctgacccctccagatcgaaagggcaggaacatggcagtaaatttcttcctcgaaaaaaacaccatctagagctagcattgtgatccactggcctggccaatgttgaaatccgaccttctctgattggtagagttgccagataaaatgcaaaacaaccagttaaatttgaacttcagaaaaacaacaaataacattttcatataactaagaagtatttgttattaatctgaaactcaaattttactgagtatccttgatttttatttgctaaacttgttgaccct

SEQ ID NO: 361579 - DNA, 528 bp, Homo sapiens
cctggccctgtggtaaaaattcaagcagtctcatgacatttctgtttttcgtcagaaatggaagatcctcaagtctgtaatcaatcaacctatcacagggaagcagtcactactactcagaattgcccccctctcccagctcaaatgtgctgctttaggatgggttggagggggaggggattggggattggctgcttccatttttctttgtacttctgcctcacttttctttctaattcagtttctgacccctccagatcgaaagggcaggaacatggcagtaaatttcttcctcgaaaaaaacaccatctwgagctagcattgtgatccactggcctggccaatgttgaaatccgaccttctctgattggtagagttgccagataaaatgcaaaacaaccagttaaatttgaacttcagaaaaacaacaaataacattttcatataactaagaagtatttgttattaatctgaaactcaaattttactgagtatccttgatttttatttgctaaacttgttgaccct

SEQ ID NO: 361580 - DNA, 528 bp, Homo sapiens
cctggccctgtggtaaaaattcaagcagtctcatgacatttctgtttttcgtcagaaatggaagatcctcaagtctgtaatcaatcaacctatcacagggaagcagtcactactactcagaattgcccccctctcccagctcaaatgtgctgctttaggatgggttggagggggaggggattggggattggctgcttccatttttctttgtacttctgcctcacttttctttctaattcagtttctgacccctccagatcgaaagggcaggaacatggcagtaaatttcttcctcgaaaaaaacaccatctagagctagcattgtgatccactggcctggccaatgttgaaatccgaccttctctgattggtagagttgccagataaaatgcaaaacaaccagttaaatttgaacttcagaaaaacaacaaataacattttcatataactaaraagtatttgttattaatctgaaactcaaattttactgagtatccttgatttttatttgctaaacttgttgaccct

SEQ ID NO: 361581 - DNA, 543 bp, Homo sapiens
aggcaatgaaaacttctctctgaagaaagtcaacactctaggtattaagtttacattaataatttctcaaatatatgtcaaggaaacaatcataggattcctctcctctggacaaaaccagataaaccagcatcaacagaaacaagagacaaaataaatctgctgaaaatctaaagattggaatcatctgattcaaactataaacactgctgtgcttgctagrctcagggatataaaagtacaaacctaaaaatgtcaaaaactgggaagctatataagtaacatcgcagaggtgcaaaagaatctgtttgaattttcagaatggaaagggtcaacagccaaaataaacaacacactagatgggattaacatcagatcagacacacaaaaaagaatactagtgaactttaagataggtcaaaggaaactatccatgataaaagccataaagactaaaaaaaaaaagtaaaattctaagagatggtgaagatataggggatgtaatgaaaagatatacccatagtttaattgaggttgcagaat

SEQ ID NO: 361582 - DNA, 545 bp, Homo sapiens
gtaatgctccattgatttgttttcaaagccaagttgatgctgtttttgtcttcaccattattttttacttgataaaatgttttggtcctttccgtctgtagagaattcttcagccaataccctatcttctctgttaagagagaaccagcagctacagtcaaagttcacttcgtgttttatgtgtttctttttttatgtgagagacttaaaatgccagccctcaaagactgctggggcctcacagctgacctgaaccttgtacatgtctgccacatccaggatgcaatctacaatagaggcagggagaaagtggatgtattaactgggctatatattatatgtttatataatagatatattaatagattctaagctattaatgatactaacagctataattttggtcaccatactatgtaacagtcactattgcaagtagtcctcattcaatcctcacaatagccttgcaaactaggtactattaagaccatctcacgaayaaacaaattggggctcagttatatgtaggggaattaatatttata

SEQ ID NO: 361583 - DNA, 580 bp, Homo sapiens
gcaggtttgttacatatgtgtacatgtgccatgtttgtgtgttgcacccattaactcgtcatttacattaggtatatttcctaatgctatccctactccctccccccactgaccttctgtatttctagtracatttctattcttaaagtcactgttatctaatgttaatatacagatgcagatttcttatgctttgtgttttcttggtatctcatttttccatcctttccttttttagctgtctgtatctttatacagtacagtttttatatatagcatattgttagatgttactttttaaatccagtctgataatctctgccatttaaataaaaagttggatccatttacttttataaaaaattgagttgaaattcacatagcatacaattaaccgttttgaaacgtaccattcagtggcagttagtacatttagtggttcatgttatgcagccactaccctgtctagttccaaaacattttcatcatgccaaaagaaaaactctgtacacattcagcaattactctccattctcccctccctttcagagctggcaaccagtaatctgttttctgcctc

SEQ ID NO: 361584 - DNA, 340 bp, Homo sapiens
attttgccaagatgtatcaagatttacttcaaaatccaggagaaatatgactgctatgttagaaaaagttaaagatccatatcaggggaccttggctttaaccttaatcacgcaactccttcaaaaacatatcaggactttgttttccartagaaatcattcactgttgaaaatatagacttcgtaatgaaatataagccatattgttcattcatttaaatagcaactaattggattacaaactgttattgttaaattaaaaaaatacacacacaagcatcaaagtattaataagaacattttcccagttactggggctcagatacttataaggagactg

SEQ ID NO: 361585 - DNA, 340 bp, Homo sapiens
attttgccaagatgtatcaagatttacttcaaaatccaggagaaatatgactgctatgttagaaaaagttaaagatccatatcaggggaccttggctttaaccttaatcacgcaactccttcaaaaacatatcaggactttgttttccaatagaaatcattcactgttgaaaatatagacttcgtaatgaaatataagccatattgttcattcatttaaatagcaactaattggattacaaactgttattgttaaattwaaaaaatacacacacaagcatcaaagtattaataagaacattttcccagttactggggctcagatacttataaggagactg

SEQ ID NO: 361586 - DNA, 340 bp, Homo sapiens
attttgccaagatgtatcaagatttacttcaaaatccaggagaaatatgactgctatgttagaaaaagttaaagatccatatcaggggaccttggctttaaccttaatcacgcaactccttcaaaaacatatcaggactttgttttccaatagaaatcattcactgttgaaaatatagacttcgtaatgaaatataagccatattgttcattcatttaaatagcaactaattggattacaaactgttattgttaaattaaaaaaatacacacacaagcatcaaagtrttaataagaacattttcccagttactggggctcagatacttataaggagactg

SEQ ID NO: 361587 - DNA, 551 bp, Homo sapiens
ggggggtgcaaaggaatacaatcatgttaccaacacttctgtagaatcacagcgtgaaccctagtttaaatctaggtgtacatatggtctcttcctcaggatctcactgtaatgggaaaattcaatcttaataacaccrgagcataggattgtcttattcttcaggtctacccactgaatgaatagtgtgtgataataattacaataaaatatgcatattgcaagatagtaatggtgagttgctaaaagaaaggatgtaatgaaaactagctggatttaatttattggtttttccatggtcaatggatacatgcttcaccatatagaacagcatttcatggtgttagaagtaactggttctaagggaaattagtaaggagtatttatgataaaaaagtaagtagtgagttcaaaatggaatatgaatttggaaattggagatgtagggagttttagttcccttttatcctttgtgttgcagattaatctcaaagatattggtgaaatctataaaatacgtattggacatgacaacactggaaagaatccca

SEQ ID NO: 361588 - DNA, 551 bp, Homo sapiens
ggggggtgcaaaggaatacaatcatgttaccaacacttctgtagaatcacagcgtgaaccctagtttaaatctaggtgtacatatggtctcttcctcaggatctcactgtaatgggaaaattcaatcttaataacaccagagcataggattgtcttattcttcaggtctacccactgaatgaatagtgtgtgataataattacaataaaatatgcatattgcaagatagtaatggtgagttgctaaaagaaaggatgtaatgaaaactagctggatttaatttattggtttttccatggtcartggatacatgcttcaccatatagaacagcatttcatggtgttagaagtaactggttctaagggaaattagtaaggagtatttatgataaaaaagtaagtagtgagttcaaaatggaatatgaatttggaaattggagatgtagggagttttagttcccttttatcctttgtgttgcagattaatctcaaagatattggtgaaatctataaaatacgtattggacatgacaacactggaaagaatccca

SEQ ID NO: 361589 - DNA, 551 bp, Homo sapiens
ggggggtgcaaaggaatacaatcatgttaccaacacttctgtagaatcacagcgtgaaccctagtttaaatctaggtgtacatatggtctcttcctcaggatctcactgtaatgggaaaattcaatcttaataacaccagagcataggattgtcttattcttcaggtctacccactgaatgaatagtgtgtgataataattacaataaaatatgcatattgcaagatagtaatggtgagttgctaaaagaaaggatgtaatgaaaactagctggatttaatttattggtttttccatggtcaatggatacatgcttcaccatatagaacagcatttcatggtgttagaagtaactggttctaagggaaattagtaaggagtatttatgataaaaaagtaagwagtgagttcaaaatggaatatgaatttggaaattggagatgtagggagttttagttcccttttatcctttgtgttgcagattaatctcaaagatattggtgaaatctataaaatacgtattggacatgacaacactggaaagaatccca

SEQ ID NO: 361590 - DNA, 613 bp, Homo sapiens
ggtgttggttgggagcagcccggaggagatgccgattgcccttggcttgttgtcctgaagagtctttagttaacggcctggcagtgatgcttagggctgataagaatgctgactcagctcgaggcggccttgccacatattctggctccaggctctctccaggagagatggatgataaaagaaggtgaggttcgaggccacatctatgggtgaagaaatgtttgatgccagactttggcaagtggtcagaagggctttacttcaaatcaagaaataaccatctgagaatgtattaaagtaccatcatatttgaaatatgcctacttcaaaatatttgcatttatgaaacttgaagtcatgagaaaataagccgaaatgcctgctgacaacctatagcaagttttagataacaactgagctaaattaaaaaaaggacaagctttctttaatgctttagcctttatcacartactcgtcaatatgtgaggggaaaacatgggcttcagaatgattcagaccttttcatccacgagagaactatagctcagatacacagcatctggcggcaaatctaggtctccatcactggctatgtgaatcggggcaagtggcc

SEQ ID NO: 361591 - DNA, 543 bp, Homo sapiens
taaattatatttcaacatacttgacttaacaaataacccacacccttgttgctactgatggtggaaatcttaatcattttgactccaaataaactcagacacttccagtatagagttgaatttagtctcttttggtctaaaactgaccaattcaatatactttcttctcatttctgcccctcttaatactccatacggataccttagttcctggatatcatcctcatgtctgaaggtgcgagggccaccttcagttctctttggccttccctgaggtgtctcattctgtttgtctttgggagtcacctcctccctcattggtaatgtctgctgaaggaagcacacatcacaccacagctctggtttctgtgccaccctagctagaaaaatgtgtccctttgggactgtcacactgatctcagccattccatgcttctcttarcagcagggatgagagctgatgagggcactctgttgcctttcctctcctcctggctgcttggtcaacaggatgcttcctcagggctgcccccaagatccaac

SEQ ID NO: 361592 - DNA, 552 bp, Homo sapiens
tataaatatatagtaagtagaacgccataaaaagttgaaagtaaaacaaatgttaacagtttgctgaactgtctcccctaaaggatggattcagtggtattaaactatagctgatatttctgatcagagagttatgagactggggaaatataattatgttttctgttcgatctgttcattaaattctcaggctacatagtttttatatgacaaccagaccatgaaataacttgcagtcatttatgagagttttggcaccccgggaagtaggaggaacccatcctactcccaatgactctggcgggtataaatgggcatgggagagggatgtgactggagaaagtgtattttgcagtaacatctgaaaggggaagctcttatatgatacatcagactggsctaaggccagctttcagaggggcccttccttgtcaccaggagaggagagcctttcctagccacaacagaagagaccaatttctgcaggcagagaaggttctgccctttaggcatggctttggtatttcaacaaagaccagtagtcagcagggt

SEQ ID NO: 361593 - DNA, 573 bp, Homo sapiens
gatgttaggttccacagagaacatggcagggtcatgggataagtgaccatgggcaggagaaataggaagggggcgactgaagtggccagcaaagccttctgtgtaggcgactctagggctgacatccgggtaagacagaaccacaggaaacccacgggaacaggtccaagtggatgatgcaaagtccctgagacagggccggataagtgttacagcgctgaccacctgctctacaaaacagtccactgaatgtgctacgaagttaaaacacacacmcaatcaatcctggaaatttttcatttcaaaggccacaggagacgcacaaagtatccaaatcaaatgagcaccaagttccttcctgtaaatggtctcgttctttctgtcgattttctacaatataatatacaaagaacctctctaaatggcttacagggaattcactggtagctccaggcagaacatcttgtcctcagttaacaaatgaggattatgatggttccctttggactgtaaataacctgtttatatcagatattttagttttggcagagtcttcaggtgtctacacttgca

SEQ ID NO: 361594 - DNA, 595 bp, Homo sapiens
atccttattatttcttgtctctttgattactcattctatcatgtgaggtgatatctcctggtggttttgacctgcatttctctgataattagtgacactgaacaccttttcatatacttgctggcatgtatgccttctttaaagaaatatctattcaggttctttgccacctttttaatcaggttatttgggttttattgttgttgcttgttttgttttgcttttggattatatgagtttcttatatatttttgatattaactccttatcagatatatggtttgcatatattttctcccgtatttcataagctgccttttcattttgttgactgtttgctgtgcagatttttagttatatgtaatctcactcactttcrcttttgttgcctatttttgtggtgtcatatccaaaatcattgttaaaatgtccatagtatcaaaaggaatctacatatccaattcagtccctatcaaacttccaataacatttttcacagaaatagaaaaaagcaattctaaaattcatatggaaccacaaaaatctctgaatagccaaagcaaacttgagaaagaagaataaaggtggagacatc

SEQ ID NO: 361595 - DNA, 511 bp, Homo sapiens
gtttggttgtttttcttttcaatatgctagattaatttcatagttttttacagcagaagatattttttaacctgttgaagtagtgctacagatgtttttatcatctatattgacatttccaatatccaaaggctgtgtcagatatgtgttatttctgcagatacttattactgtttttttgtttttatttaaggcttagctttgtttttactgtgtactgttccttttccttggcaaattatttgtgggaactctttaacgattaacgacctcaaagacacattccctactccaccttcctctacacagtttcygcctaatctcaaccctcctctccatcaggctccaggcacacatcttttccagctgttatcaattaaaatatagcttttgtacctcccgataggccgcactaccttgggaagtggacttctgctggcactttctgagatttgccactgcttggccctttagcttttgtctgtgtcagtggcttttgcaggccacacac

SEQ ID NO: 361596 - DNA, 578 bp, Homo sapiens
agaggagggaggggaagagtggggaggaagggaaagaaaaggtgaaggaagaggagggggaggaggtgagcagcagcagtatgggtaccccagataccaggggctgatcttggtcagctgttggcggaggctgtcagtgcatcctcccaattttggaagttctcagaaacaatgagtgggtccaacacaaactgaccctccccaggtgtttgctccagcccaagcaaaagacaaatgcactatcacaatcagatcaatagccttttgaagcatattggagcgacaggcccaartgggccctttcaggagatggtagacccagtctctcctactgcactgggactactttctgcgagcaattcccgctgggtcttgccatcatcttggtactcatctagccatctgccatgcaaaaaaaagaagataattaatatgagagagcattgaaaggaggctcattagttagaaaggaaaaaaaaacatatggaaagaatttaaagaggcctttagagagatcagaattttaaaaaaggatttaagattttaagccacaccagattatttagcagtccagcttc

SEQ ID NO: 361597 - DNA, 576 bp, Homo sapiens
accttattaaagatcctgtacatatgataagttgtttatcttctgctgctttcaagattctctgcttgtttttggctttcaaaaattttactgtgttgtgtttaggtgtagatcaccttactgttggttttaatagttactgtggttgcaaggttgccagttttcaagactattgtggagttggggagggtggtagagagyagatcaaagtacttataaggtacccttatgtttctaccaatgttcgtcgttttcattgaatacatgctcctcaatttgttataatcctttgattaattttcagagttctagataattccatttcaataatttttttattgcttttgtggagcactggatttatggagagtctccgtctgccatttcagaagtcctgctctgctcttattatcttgatcatattttgttatttttaattcaagtttctatttctccatgaaatcttccatgatttctataacttgctgaagataaataagaactggcccaatataaatttggatttgaggctatgtcatgtgaccaaatccttggaatagaagagccaccatccaa

SEQ ID NO: 361598 - DNA, 589 bp, Homo sapiens
acaaaaaggtgctcaacataactaatcatcarggaaatgcaaattgaaactgcaatgagataccacatctaacctgttagtatggctatcatcaaaaaaacaagagatagtaagttttggtgagaatgtggagaaaagggaacccttgtatattgcttgtgggaatgtatcggtacagacattatggaaaacagtaaggagaggcctataaaattaaaaatagagctaccatatgatctgcttctgtgtatatatctgaaggaaacaaaatcagtatcttgaagagatatctgcacccatgtggtcattgcagtgtcattcataatagccaagacataggaacaccttatctctccatcaatgaatgaatagataaacataaataaagccaaaaaagacctaaaaaccctaatacaggtgcagaatatactatggaaaacatatcgttgattttcagaagggttaaatttcctcagatgggctaaattttagaacaaaaatattattggcttcagatatcaatcattttttatttattggaggacaactgaaagaatatggcatggcctactccttaagaagccaaaaa

SEQ ID NO: 361599 - DNA, 612 bp, Homo sapiens
aacaatgggccgggcacaatggctcatgcctataatcccagcactttgggaggctgaggtgggtggatcatgaggtcaggagtttaagactagcctgaccaacatggtgaaaccccgtctctactaaaaatacaaaaattagctgggcctggtggcacacacctgtaatcccagctactcaggaggctgaggcaggaggatcgcttgaacccaggaggcggaggttacagtgagctgagatcaccccactgcactccagcctgggcaacagagtgagactctatctcaaaaaaaataaaagaattaaaaaataataataaacaatggaaggtaaactataagataataaatgattacatatgtgggggggggctaggttagaggggttagtaggaaaaactaagcttctttgaataaactttgttttgcaactccgatttaaaacatataaacattttatataattaaaaaaattaatttaaaaaaggcaacttctaaaagtaaaaggaaaatgaaacaaatgaacctgtatagtcagatgatgtaagcacacacagccagacaytattccaaatgacgttaaggcccaccattaaggtttgactgcataac

SEQ ID NO: 361600 - DNA, 592 bp, Homo sapiens
aatgaaaataaattcatgattatttcatacaatgaaaatgaaaaacaaatttctatgttgatttgaaagtgtgtgagagaatcctttttcagaattgttttagggaaatggagcaaaagagtgaaagcagctgaactggatgatgccagaaaagctactcattctctctgcctcggtttccttatctgtcatgctttgctcatggagtggagtgagaagaaactgaactctagggtgcctggcagagagactggcactggaaagtacctggcggccattagcgtcttcatttgtctgagcctgcccttcccagcgctccataaattgccctgtgttcttgracccactcacactttcttccctacactaatctctactccaaccccgaccagcttccagatgctttgctgatgtgctgtgttcactgttaacgcgactccccatcttgtcaacccccattcctctcccctctgtttatccagaatgcattcttctctcagggcacctgcaagacccgctcctgcccaagagttcctcccatgatctcgtgcacaggcccattttaccctttgctgaactctcataacacaac

SEQ ID NO: 361601 - DNA, 569 bp, Homo sapiens
tgtaacactgcctcaatagattagactgcttaacctttcaaggttctttccacaccataaattagctcattcacataactatgagatcactaatgtatttccagaatcatatcccaagaaatattaaaggttgcattatttagaatttaaaaatgaaataagacagaaccattcacaatgacattgtatcatgaactaaccaaactcattagtctttgactaatctacttttgaactataaaaaatatacattttaatgaggccataaaataagacaacagaaataattaattasaaggaagcattttaaaatagcttaatttaatcaaatttgatgaagtatatctaacaaagtcctaggtcaacaccttccctgtacattgcaacttcatgtttgacatcactgatgttgattacatgtcttacattattgacaaaggacttctgatactttcagccttaattataaccttcattttaaaactattagcctttattacccacatatgccccaccaagttctggtattaatggataatttttctacttagaatgtcatttcaagcctt

SEQ ID NO: 361602 - DNA, 569 bp, Homo sapiens
tgtaacactgcctcaatagattagactgcttaacctttcaaggttctttccacaccataaattagctcattcacataactatgagatcactaatgtatttccagaatcatatcccaagaaatattaaaggttgcattatttagaatttaaaaatgaaataagacagaaccattcacaatgacattgtatcatgaactaaccaaactcattagtctttgactaatctacttttgaactataaaaaatatacattttaatgaggccataaaataagacaacagaaataattaattagaagsaagcattttaaaatagcttaatttaatcaaatttgatgaagtatatctaacaaagtcctaggtcaacaccttccctgtacattgcaacttcatgtttgacatcactgatgttgattacatgtcttacattattgacaaaggacttctgatactttcagccttaattataaccttcattttaaaactattagcctttattacccacatatgccccaccaagttctggtattaatggataatttttctacttagaatgtcatttcaagcctt

SEQ ID NO: 361603 - DNA, 565 bp, Homo sapiens
attgtggtcttaatttgcatttctctaatgcaaaacatcttttcatatgcttatttgccatccatacatcctctttggtaaaatatctctatatcwtttgcccattttctaattggattgtttgtgtgttttttttttaatattgagcttttagctgctagtaaacctaacaaattaaaaaagagaagataaattactaatattagaaatgaaacagaggttatcactatagatattgcagacgttgaaaagaaaataagggaacaccacaaacaattctacccatagtttgccagcttagataaaatggatcacttcctcaaaaaaacaaacgagtacaactcacccaatatgaaatagattgaagtagataatttgaataaccctataatcagcaaggaaattgaatttttaatttagaaactcccagagaagaatctgtcggcccatagatggtttcattagagaatcctaccaaatatttagagaattattagtttttgcacagtccttactggaaatcagaagtgggaatactgtctaactcattctatgaagccattat

SEQ ID NO: 361604 - DNA, 512 bp, Homo sapiens
atgtgcgtaggttgcagtctagaaccttgactctcctttctccctccctcccttttccccacagctctcccaggcttgacagctcttttaggaatgcaagctcaaaggccaccaccccctttggaatagccactggctattcttggaaaggcagaggactctagcatctttagcagacctctaaccaaccagcaacagccatgtctctattcaaaacccaaaagagctgattatctttcaatcttcccattataaagttactcacccttctccctcttaaagaaaagtaactgagtgtcttctggaaaggacttattctctgtcccttccttcatcatcatggggcagcatgtaggaaactagaacaatacggtcactggtttagagctgaattccctttgggagtcaagccctctttcaacagagtgggaaagacatgtaaatttaatgtctaggagaaaccctctgtgtgtcttcgtctygctctccatatgcatacatatccacacata

SEQ ID NO: 361605 - DNA, 578 bp, Homo sapiens
tgtaatttgaactcacacttaactttacccatttcacagatatttgaagtcctatgtctgtccggtgccatgtactgacgaagaagcatacatatgacacgacttcttccctcccagagcatacagctcagaaatggttgcagatcttaaaatgttaattactaatgtgattagtactgcaagagggggctgtgcaggtatagaaaatgttgacttaaaatagtttaggttggagactgatttgagcaataataaaatagtctaggatggcagaaaatgttacattttgttattaaaattacaaatagtgttgataatttgytaaaggtgggtttggggataatcattacaggaagcagcctggcaggagggccctataataaggatgctggtgaagtgcagacatgggaagacaggcctggcttgagttggcagcagtaacaattctaaggaaagctgcaaagcacaccacagcaaaacaaaatggatagaacctcatactatgtgcttgttcaagatcaggggcttctcccttctctaaactggctttattttggttgttttaaaataagcaaaga

SEQ ID NO: 361606 - DNA, 452 bp, Homo sapiens
tacataactcccacagataccaacccaagttttgcatcacagaatgaagaaagagaatgtatgagtaagaatatgagttgtttatttatgatggcataccatgttagcaggctatatgtacaactaaactttagaaagagctccaagttaayaaaaacaaattcaatcttgtatagagccacatttctttctaggtaaaggcagtgaaggaagcaaaagttattgcccagagtatataaagacaggaaaaaatagctaaattgttaaggaacataggttgaagtgccaagtgaaattatttgcataaatactacaactattcaaatacttggtagaactagagcttttagcttcattggtagcttatcttcttcattagcattataaaattatatgtactaattgtttatgctataggacagataatgttgttaaacataaggaacttaaca

SEQ ID NO: 361607 - DNA, 452 bp, Homo sapiens
tacataactcccacagataccaacccaagttttgcatcacagaatgaagaaagagaatgtatgagtaagaatatgagttgtttatttatgatggcataccatgttagcaggctatatgtacaactaaactttagaaagagctccaagttaacaaaaacaaattcaatcttgtatagagccacatttctttctaggtaaaggcagtgaaggaagcaaaagttattgcccagagtatataaagacaggaaaaaatagctaaattgttaaggaacataggttgaagtgccaagtgaaattatttgcrtaaatactacaactattcaaatacttggtagaactagagcttttagcttcattggtagcttatcttcttcattagcattataaaattatatgtactaattgtttatgctataggacagataatgttgttaaacataaggaacttaaca

SEQ ID NO: 361608 - DNA, 609 bp, Homo sapiens
tctcccctcctggcccttgcccccgctaatataaatcccatgaggacaaggactatgtcatcgtttttcatactgccaagacattatgcctgatcatgtagacattcagttgtgcatgaattaattaattaattaatgagtttaaartctaattattaacgcttatgctctttcctctacaccattatgcctaagttcaccctggtgagaagctgataggaattctaaggttagagagagttttgcagtcaagcaggcttataaatcttggtttgaaggagactgaaattgcatttgccatggtacttcaagagtctttagtgcacaggagcattgtaaattgtcaagaggagacagcgtgtcaggcagctcatccttgggacaggccctcatggcagagcaggttactgaacagtcagcctgacttagcatgaaagtaatttcatttgttcattatctaaatcatcaaatcttattgagcttttcattatcacatagaatttttcgaaataagtttttctactagctggggaaaagtgatggtagccacatttttcagctttctgtaagagtctttggggatatccagaccttagtcttactcttagt

SEQ ID NO: 361609 - DNA, 569 bp, Homo sapiens
tgagtccacattaaaagtagaattaaaatcttcttcagtacttagcttggtgttcaaaaatccctttttattatgaaagaaattatcttttttgtttttactactcatgattataagaaaaataatcctttgatttattgaataaaaagttgtactcagtgttgaaacattactaatcatttaaaggcttttttgacacattatcacagtyatatttatttacatatttagcattttcatacgctcttcatttctctgcatttatctatatttccaaatgatataattttccttctgtgtggagaattttatttaatattgcttgtactgaaggtctgctagtagggaattctttcagcttttatatatttgaaaaagtgtttcatttctattttaaaaggtatttttactgagtatagaattatatgttgacaacctctttttttcttccttccttctttccttccttcctactttccttcattccttctatcttttttctttcttttcttcctgttgctccactgtctttttgcttgcattgtctcaagcaagaagtctgctgtttt

SEQ ID NO: 361610 - DNA, 569 bp, Homo sapiens
tgagtccacattaaaagtagaattaaaatcttcttcagtacttagcttggtgttcaaaaatccctttttattatgaaagaaattatcttttttgtttttactactcatgattataagaaaaataatcctttgatttattgaataaaaagttgtactcagtgttgaaacattactaatcatttaaaggcttttttgacacattatcacagttatatttatttacatatttagcattttcatacgctcttcatttctctgcatttatctatatttccaaatgatataattttccttctgtgtggagaattttatttaatattgcttgtactgaaggtctgctagtagggaattmtttcagcttttatatatttgaaaaagtgtttcatttctattttaaaaggtatttttactgagtatagaattatatgttgacaacctctttttttcttccttccttctttccttccttcctactttccttcattccttctatcttttttctttcttttcttcctgttgctccactgtctttttgcttgcattgtctcaagcaagaagtctgctgtttt

SEQ ID NO: 361611 - DNA, 653 bp, Homo sapiens
ggacataattttcagaacgtttcacccaacaactgatttttttcatcagcacatggaacattctccaaaactgacaacatattaggacacaaaacaagtctcaaatttttaaaaaaattgaaatatcaagtaacttattttaccacaatggataaaacttcaaatcaataagagaaacattcaaaactatacaaatacatggaaattaaacaccaccctgctgaacgaccartggattaaaaaagaaaataaggaaatcagaaagtcccatgagacaaatgtaaatagaaacacaacatactaaaacctatgggacacagcaaaagcagtattaaggggcaagtttatagtaataaatgtctacacaaaaaactagaaagatttcaaataaacaatttaatgatgcatctcaaggaactaaaaaaataagaaaaaaatcaaactcaaaattagtagaagaaataaagatcagagcagaaataaataaaattgagagaaaaaatacaaaagaccaatgaaatgaaaattggttatttgaaaagataaacaaaattgacaaatcagtagctaaactaagaaaaaagaaaacccaaattaaaaaaaatcagaaatgaaaaatgagacatcaaaacagataccacagaaatacaaag

SEQ ID NO: 361612 - DNA, 579 bp, Homo sapiens
aatgctagataatttttaaaattaatatactaattttaatgtcaaattggagtcccagtgggagagtaatgccattttcttattctgattagatgattctgggtcatttcctagacagaaacaattaggaactaacaatgtacaagtttaaagcaatgtaatttcccctttaagsctggaagataagatattcaccaattttctcttcataaattactagtataatgactcaatgaatccttctgttattctaattttttctatacaatggctttggtggacagggattttttataaaaggtcttgggggtgaggctagaaggaaggagaggtaccaagggagaaagggaaggcagagagagaaagatagataaaggaaaggtcataaagaaggaagatgaggctgaggaaagaggaaagagagaaaagaagtcagagagaagtagaggtttattttcttaatattctgaaagatttggctgtatatcaagctatgacttagctttttaatttttctttgcaactttagatatgccttatggttagtaactgttacctaaaacactttgcaaatcaaca

SEQ ID NO: 361613 - DNA, 609 bp, Homo sapiens
gtgtggggtgtgtccactgacagatgaatggataaacaaagtgtggtatagtcacacagtcggatgattattcagttttaaaaaggaaagaaattctgacacatgctacaacatggatgaaccttgtggacattatgctaagcaaaataagccagttataargggacaaatactgcatgatttcacttacaggaggcacttagagtagtcgaattcagggggacagaaagtcgaatagtggtttccagtggctggaggagtgggggaacaggaagctactgtttactgggtatagagtttctagtttgcaagaagaagagttctggagatgcatgctggttatagttacccaacaatgtgtatgtccttaatgccactgaagcctacgcttaggaatggttaagatggtacattttgttacatgtattttaccacatttttaaaaaatgcttttttaaaaaagtacactgaggctaggcactgtggctcacgcctgtaatcccaacactttaggatgcagaggcaggcagatcacttgaggtcaggagtttgagaccagcccgggcaatatggtgaaaccccatctctattaaaaagaaaaaaaaaatt

SEQ ID NO: 361614 - DNA, 609 bp, Homo sapiens
gtgtggggtgtgtccactgacagatgaatggataaacaaagtgtggtatagtcacacagtcggatgattattcagttttaaaaaggaaagaaattctgacacatgctacaacatggatgaaccttgtggacattatgctaagcaaaataagccagttataaggggacaaatactgcatgatttcacttayaggaggcacttagagtagtcgaattcagggggacagaaagtcgaatagtggtttccagtggctggaggagtgggggaacaggaagctactgtttactgggtatagagtttctagtttgcaagaagaagagttctggagatgcatgctggttatagttacccaacaatgtgtatgtccttaatgccactgaagcctacgcttaggaatggttaagatggtacattttgttacatgtattttaccacatttttaaaaaatgcttttttaaaaaagtacactgaggctaggcactgtggctcacgcctgtaatcccaacactttaggatgcagaggcaggcagatcacttgaggtcaggagtttgagaccagcccgggcaatatggtgaaaccccatctctattaaaaagaaaaaaaaaatt

SEQ ID NO: 361615 - DNA, 525 bp, Homo sapiens
cttccatttaattctcacacacaaggagttgagtttaaaaagttgtttccctccagatttaaacccataaaacgtatatgcattaagtagaatgaatcactcccattttccattatcgcatcccaccctaccctccttgctgccctkcacactatcttctggtctcactgccagtcatcagagcaacattgtctatcacacttgcctgtgagtgccttaatgggaggaaggaatccatccgtaccagccgtggctcgtaatccagtctctctatgattgtagcaattatgcattcaaagttcttggaatctctgcattcagctatggatgtgtatttaatcattttttaaagtgcattattataatgcaggtattggattttgttaaacattcctagcagttctcatggacttagaaattgctgtagttgcatcagtgaaaattcacccagtggggctaatagcttttctactcaggtcacatagttgagatagtggtgagaaaggtataggtgaatagaaggaa

SEQ ID NO: 361616 - DNA, 670 bp, Homo sapiens
agaatggcttttggctctgcagataggtttgatttctgattcttgtacctcttctaaagtgtttttatttgattaggtccagytggcctcccaggaatgtcctttgtcttttcttcctgccgtagcttttttagtatggataaaatgaaaatggtagagttgaaggacttcaaaaccacctcttggaattgccccacggtcttggactaccttccctggattatacgggaatatctatctatacagggagtatctacttttggcacactgagaaaaaaatgtaaaatttcttcagatcctccttcgcctttcagcatttcctactcatctctaatctctaatggtggaatttcagaggaagaaacacttggagatgatacttgtggaagctacctgggttgccaaaggatttttctacatttctagacggaagaaatgtggactagaatagagaaagtggagatgggttaagaaaaattaatggaggatgcacgggaggggagctatagttttctgacagtcggtgacagcattttaactaggtacactttctttagaaaaagctttggcatagcttgcccagattgttatgcactccattttccaccttagtagaactctacttaagatttgattgaaactattgagaagcatccagttataacgctaa

SEQ ID NO: 361617 - DNA, 670 bp, Homo sapiens
agaatggcttttggctctgcagataggtttgatttctgattcttgtacctcttctaaagtgtttttatttgattaggtccagctggcctcccaggaatgtcctttgtcttttcttcctgccgtagcttttttagtatggataaaatgaaaatggtagagttgaaggacttcaaaaccacctcttggaattgccccacggtcttggactaccttccctggattatacgggaatatctatctatacagggagtatctacttttggcamactgagaaaaaaatgtaaaatttcttcagatcctccttcgcctttcagcatttcctactcatctctaatctctaatggtggaatttcagaggaagaaacacttggagatgatacttgtggaagctacctgggttgccaaaggatttttctacatttctagacggaagaaatgtggactagaatagagaaagtggagatgggttaagaaaaattaatggaggatgcacgggaggggagctatagttttctgacagtcggtgacagcattttaactaggtacactttctttagaaaaagctttggcatagcttgcccagattgttatgcactccattttccaccttagtagaactctacttaagatttgattgaaactattgagaagcatccagttataacgctaa

SEQ ID NO: 361618 - DNA, 670 bp, Homo sapiens
agaatggcttttggctctgcagataggtttgatttctgattcttgtacctcttctaaagtgtttttatttgattaggtccagctggcctcccaggaatgtcctttgtcttttcttcctgccgtagcttttttagtatggataaaatgaaaatggtagagttgaaggacttcaaaaccacctcttggaattgccccacggtcttggactaccttccctggattatacgggaatatctatctatacagggagtatctacttttggcacactgagaaaaaaatgtaaaatttcttcagatcctccttcgcctttcagcatttcctactcatctctaatctctaatggtggaatttcagaggaagaaacacttggagatgatacttgtggaagctacctgggttgccaaaggatttttctacatttctagacggaagaaatgtggactagaatagagaaagtggagatgggttaagaaaaattaatggaggatgcacgggaggggagctatagttttctgacagtcrgtgacagcattttaactaggtacactttctttagaaaaagctttggcatagcttgcccagattgttatgcactccattttccaccttagtagaactctacttaagatttgattgaaactattgagaagcatccagttataacgctaa

SEQ ID NO: 361619 - DNA, 583 bp, Homo sapiens
atacaagagacatagctccagctagactggtatagaaaaagagagagagagagaaacagagaaggcttgaataaacactaaataygaaaatgagacataaccagagatgtatgaaagactaaaaaataagaaataaattcaattgacaaatttataccaataaacttgaagcctttgataaaatgagtgaattcttatgtcaacctaaaaggaagagactgaggaaaatatagtttaaagagttcttataagcctactgaggaaaatatagtttaaagagttcttataagcctaagtgaggacagctgcccaagacacttccaagttgcctcagggaatgctctgtcagcctttgttacaagcaggtttttaaaggcaaaagggagcaaggagtgggctgatataaattgtcttcaggaattctcatggtttaccgaggtaacgttgattagtgattgttgaacttcagggtatgagttatggtgttcagcacatggcttcttggtgttagtgaatctagagtccacctagccagttgcttcaagagctaattatttaactcaagggggagtgacaggactgc

SEQ ID NO: 361620 - DNA, 562 bp, Homo sapiens
gattcacaagaaagaaatacaggaatgtgtttgcaaacaaaacaagaatcaatgggaattcattgcaattaggttctgtaaagtgtccagcattgtgcttgccattttgaagatttgtactgtcctgtatttttctttttttctctcttttttttttttttttttgagatggaatctcactctgtcacccaggctggagtgcagtggtgcaatctcagctcactgcaaccaccacctcccaggttcaagcaattctcctacctcagcctcccgagtasctgggattacaggcgcacaccaccatgcccagctaatttttttgtatttttagtagaggtagggttttgccatgttggccaggctggtctcagactcccgacctcaggagatctacccaccttggcctcccaaaatgctgggattataggcgtgagccactgcacctgcccctattttttttagtttacttgctctctcatatttaaacctagtgcgtggatgggactaacttgtcgttctgaaatgaaacacctgagagagagagagtctgccttccttgcag

SEQ ID NO: 361621 - DNA, 571 bp, Homo sapiens
tgtgtgcttattctcattcctttttctttacatgtaaatttagaatctgcttatatttgcaaaaaatcctcttgggattttgattctgataataatcaatagaaaaaattggagagaattgacatcttaaatctgatctttcaatttgctgatttatttaggttgttgatttttcatcagctttgcataatttttgctttacagatcctgaacatgttttgttagataaatattcaaatatttttgagaactattgtatayggtattatttttcaaatattggtttctaattgttcttaattattatataaaaatacaattgatttctgagagatggtcttgtatcccgtggccttgttaaacttatttattagttccagaagatattttttgtagattcttcggtattttccggtagaaaatatgtattctctgaataccaaaagttttttgtttttcctttacaatattgctttttcttgccttattgcactaagattttaaatataatgtttataggagtggtgagattaaacataccggccttcttagtcctgggctgggtggtggg

SEQ ID NO: 361622 - DNA, 571 bp, Homo sapiens
tgtgtgcttattctcattcctttttctttacatgtaaatttagaatctgcttatatttgcaaaaaatcctcttgggattttgattctgataataatcaatagaaaaaattggagagaattgacatcttaaatctgatctttcaatttgctgatttatttaggttgttgatttttcatcagctttgcataatttttgctttacagatcctgaacatgttttgttagataaatattcaaatatttttgagaactattgtatacggtattatttttcaaatattggtttctaattgttcttaattattatataaaaatacaattgatttctgagagatggtcttgtatcccgtggccttgttaaacttatttattagttccagaagatattttttgtagattcttyggtattttccggtagaaaatatgtattctctgaataccaaaagttttttgtttttcctttacaatattgctttttcttgccttattgcactaagattttaaatataatgtttataggagtggtgagattaaacataccggccttcttagtcctgggctgggtggtggg

SEQ ID NO: 361623 - DNA, 583 bp, Homo sapiens
gtgtgcttattctcattcctttttctttacatgtaaatttagaatctgcttatatttgcaaaaaatcctcttgggattttgattctgataataatcaatagaaaaaattggagagaattgacatcttaaatctgatctttcaatttgctgatttatttaggttgttgatttttcatcagctttgcataatttttgctttacagatcctgaacatgttttgttagataaatattcaaatatttttgagaactattgtatacggtattatttttcaaatattggtttctaattgttcttaattattatataaaaatacaattgatttctgagagatggtcttgtatcccgtggccttgttaaacttatttattagttccagaagatattttttgtagattcttcggtattttccrgtagaaaatatgtattctctgaataccaaaagttttttgtttttcctttacaatattgctttttcttgccttattgcactaagattttaaatataatgtttataggagtggtgagattaaacataccggccttcttagtcctgggctgggtggtggggaagaaatagtca

SEQ ID NO: 361624 - DNA, 594 bp, Homo sapiens
tactgctttatactctgcagaactcttattgtaatcctgaagaaattgactccaggagggatgggaatggtgatttccttctaatattgaagtatggagatggtaaagtatctaacactgtttaaaatgccttcaatggctcctttctatccatctgttctgccgtcttgctttttcctacctctgtgcctccacttttccaaattgtattccctgggcatgctttctcctctttgaagagtgtttaaattctggtgtgtatgaggcatcaattcatattttattttttcccataaattgttccttgacagtacacaagatgtcctcagtaacacttaatagtgtgctgaatcaaattgtttctttatttatgctgagaccaatgtttttgttttagagagtcatttatggaatataattgtagctcatattatgctrtaatacacacatattacataaatataattctgataaaatagttcatgtgttaaatagtgaatacacaaagatttgaaatttaccatcactgatgtgctttagaattcacaagaatattttattattattttttctattgtaagatgtagggccggg

SEQ ID NO: 361625 - DNA, 594 bp, Homo sapiens
tactgctttatactctgcagaactcttattgtaatcctgaagaaattgactccaggagggatgggaatggtgatttccttctaatattgaagtatggagatggtaaagtatctaacactgtttaaaatgccttcaatggctcctttctatccatctgttctgccgtcttgctttttcctacctctgtgcctccacttttccaaattgtattccctgggcatgctttctcctctttgaagagtgtttaaattctggtgtgtatgaggcatcaattcatattttattttttcccataaattgttccttgacagtacacaagatgtcctcagtaacacttaatagtgtgctgaatcaaattgtttctttatttatgctgagaccaatgtttttgttttagagagtcatttatggaatataattgtagctcatattatgctgtaatacacacatattacataaatataattctgataaaatarttcatgtgttaaatagtgaatacacaaagatttgaaatttaccatcactgatgtgctttagaattcacaagaatattttattattattttttctattgtaagatgtagggccggg

SEQ ID NO: 361626 - DNA, 618 bp, Homo sapiens
agaaaaatatgtcccaatgagtgtatcagcttcttgattttgccaagaaaccttatttctgtccaacacagagagaaaatagtgcacaaaaagagagtagtagtgagaatatgatagataatgcacaaaagatgggatcagaatacataagggaaatctacaatttaatcttaaaataaagatcaataacctggtagtaatatgggctatgtttatgaagaggaagaccacttaagaagcaatataaataatcaataaacaaaatagcatatgttgaactcaccagtcaayaaaaaaatgtccactaaactaagaaggttctatttttttttcacctatcagattgaaaaacttaaaactttgatactttgatacaagtaaggatgtggagacacttgtagcattgatatattgttcgtgggagtgtaattgggcacagacctccagggagtttgcagtctctgtttacattaaaacagccacaccctccaatccagaaatttctcttgccagtatctatttcataggaatgctcacacatgcacaaaacatacatgtaaagggtatgtcacaacattgctcataagagtgagaaattgaaaacaaaatagcaaaata

SEQ ID NO: 361627 - DNA, 618 bp, Homo sapiens
agaaaaatatgtcccaatgagtgtatcagcttcttgattttgccaagaaaccttatttctgtccaacacagagagaaaatagtgcacaaaaagagagtagtagtgagaatatgatagataatgcacaaaagatgggatcagaatacataagggaaatctacaatttaatcttaaaataaagatcaataacctggtagtaatatgggctatgtttatgaagaggaagaccacttaagaagcaatataaataatcaataaacaaaatagcatatgttgaactcaccagtcaataaaaaaatgtccactaaactaagaaggttctatttttttttcacctatcagattgaaaaacttaaaactttgwtactttgatacaagtaaggatgtggagacacttgtagcattgatatattgttcgtgggagtgtaattgggcacagacctccagggagtttgcagtctctgtttacattaaaacagccacaccctccaatccagaaatttctcttgccagtatctatttcataggaatgctcacacatgcacaaaacatacatgtaaagggtatgtcacaacattgctcataagagtgagaaattgaaaacaaaatagcaaaata

SEQ ID NO: 361628 - DNA, 562 bp, Homo sapiens
ttatatgaaaatgtaaaagaaaaagaatagccaacaggacaccgaaaaagaataaactcagtgcactaacactacttgacatcaaggcttatgaaatgatggtaatcaagacaacaccrtggtacttgcaaaagaatgcctacatgtaccagtggaatggaacacagagtcaagaaataggcccacagaaatgtagttactaaccattgacaagggagcagtgtcaatacagcagcgccatcactgcttataaaagtgaagactccatacaaggtagaaatctacaaaaatgagttgattgttttaagtgctgtgtatttatacaatggagtgatgtggatctctatataaaaatgtctaggctatattgtaaaggaaaagatggttcacaaaaatgttatgcatagaatcacgccatttctgtaaacatataacgtgtaaattcatagaaaaaacttgaatcaacatatatcaaactatgcagcagtaatcatctgtgaatgtggaattataattgatttttactttattctttatgtatttctaatattttttgaaaatg

SEQ ID NO: 361629 - DNA, 513 bp, Homo sapiens
tgatataattggtccaacattgcccatgcagaacgtgagaactgggaagtcatggatttacacaggcaaatcttgagaatttctccataaaattccaagacatctaggtgaaaacaattacttatttatttatttattagagacagagtttcgctcttgttgcccaggctggagtgcgatggcgcgatctcagctcattgcaacccccaccttccggattcaagcaattctcctacctcagcctcccgagtagctgggattacaggcagctgccaccatgcctggctaatttttgtatttttagtagagacagggtttcaccatgttgggcaggctggtctcaaactcctgacctcaggtgatctgcctgcctyggcctcccaaagtgctgggattactggtgtgagccactgcgcccggtgaaaacaatttttaatacctagacatttctttattaaccccaatttatctaagttacattctaaaatttactcagttttattattcaactaa

SEQ ID NO: 361630 - DNA, 513 bp, Homo sapiens
tgatataattggtccaacattgcccatgcagaacgtgagaactgggaagtcatggatttacacaggcaaatcttgagaatttctccataaaattccaagacatctaggtgaaaacaattacttatttatttatttattagagacagagtttcgctcttgttgcccaggctggagtgcgatggcgcgatctcagctcattgcaacccccaccttccggattcaagcaattctcctacctcagcctcccgagtagctgggattacaggcagctgccaccatgcctggctaatttttgtatttttagtagagacagggtttcaccatgttgggcaggctggtctcaaactcctgacctcaggtgatctgcctgccttggcctcccaaagtgctgggattactggtgtgagccacygcgcccggtgaaaacaatttttaatacctagacatttctttattaaccccaatttatctaagttacattctaaaatttactcagttttattattcaactaa

SEQ ID NO: 361631 - DNA, 640 bp, Homo sapiens
ttttgttttcagaaggaatatttctctctctctctgcatgtgtgcatgtatgtcagtttttaatttataaaactctgcctttttttctttatttcatagcaggctattctttcacatgttaaattttctgagtcttggcatgtctgtaaatattagttaactgttaatacataagtgatcattttgccttagatctagaaacccgtgaagtagataaaagtctgataccagtttttctttcattgtgggarttttaagcattttatcttgttaaaattcaaaaattttgtatccttctcttttcaaattttcctttttgacattcaaaggaccttataaaattggagattaaaatcttcatcgcaggaaattatctttcttcttttcttaaaaatcatttcatctcttcattgttcaattctttctaaaatttctattagatgaacattagactttctgtaatgatcctctttgctttcaaatttttctttcactgaatctattgtttttttttcctttatggtatgttatgggagatttctccaagtttatttcccaacaaatagttagaactttagccatataatacggaattattcagtttttatattgacctatctccttccatttctctctctcc

SEQ ID NO: 361632 - DNA, 623 bp, Homo sapiens
gaccacacgttcggtcacaaaacaagacttaaaacattaaaaaaattaaaataatatcaagcatcttctccaaccacaatggaatgaaactagaaatcaataagaaattttggaacctatacaaacacatgaaaattaaacaacatgcttctgaatgaccattgtatcaatgaagatattaagaaggaaactgacaattttcttgaaacaaatgatgatgaaaacacaacataccaaaacttatgggatacagtgaaagctgtactaaaagggaaatttatagcattaagtrcctacatcgaaaaaaaagaaaaattcaaataaataacctaatgatgcatcttaaagaactggagaagtcattctgggaggctaaggcaggtagattgcttgagtcgaagagtttgagaccagcctgggcaacatggcgaaaccccatctctacaaaaaatgccctagcttggacccagggtgcgtgtctcccccacagggggcaccccaaagcggcaagaagtccccaggggcacagagacaggaggccaggcttgcaaggggacattgaggcagccggggaaaaaaagcggtgaggccgaggaggaggctggggtcgtcccgtggaggtc

SEQ ID NO: 361633 - DNA, 623 bp, Homo sapiens
gaccacacgttcggtcacaaaacaagacttaaaacattaaaaaaattaaaataatatcaagcatcttctccaaccacaatggaatgaaactagaaatcaataagaaattttggaacctatacaaacacatgaaaattaaacaacatgcttctgaatgaccattgtatcaatgaagatattaagaaggaaactgacaattttcttgaaacaaatgatgatgaaaacacaacataccaaaacttatgggatacagtgaaagctgtactaaaagggaaatttatagcattaagtgcctacatcgaaaaaaaagaaaaattcaaataaataacctaatgatgcatcttaaagaactggagaagtcaytctgggaggctaaggcaggtagattgcttgagtcgaagagtttgagaccagcctgggcaacatggcgaaaccccatctctacaaaaaatgccctagcttggacccagggtgcgtgtctcccccacagggggcaccccaaagcggcaagaagtccccaggggcacagagacaggaggccaggcttgcaaggggacattgaggcagccggggaaaaaaagcggtgaggccgaggaggaggctggggtcgtcccgtggaggtc

SEQ ID NO: 361634 - DNA, 511 bp, Homo sapiens
ctttactatcatactttagactactctgattaaagattttgagagtgatgacattgaattcaacatttaaaatcaagtgtgttatgtctaatttgtatattttgccttcaaaagatgcaaattccttcttttggcatcatgtgaagagttaagaatgcaasgaaagaactgaaacaaaaacttattccataaatcaacactccagaaaagagacatttttcctgttgtgattgttattatcattccagcccctagcgtactaagagattaggaaagtttatgatatgaatgaatgcataactgaatgaatgtctctatgtttgcaagaaaaatattctattatttttgtatttaattattaatatttgccacagagtcagtcttaccacaaatttttctctgtctccaagccattgcttttcccagaatttctaaattgtgagttgttgctgttttatcaaatatagaatagtcatcacttaaattgttgggcaagttcagtactaacact

SEQ ID NO: 361635 - DNA, 589 bp, Homo sapiens
tgcttttgaattgaccatgtccacacaaactaatcaatcaacagataattgagcaccaawtctatgaaatatgcagagaaagtgtagacaggctcccagctggttttgctattctacattctctcttctttagcatacttttcatgagcttgacacagtaatctccctaaagtgcagttttcatcatgctgtaactgctagaggacatagagtggtttttgaatgcctgctgtattaagcccaaacgactctatctagcttcaaggatcctcaacagtcttgcaattcacagtatggcatcagcaccaacatcaccagggaagttgttagaaataaataatctcacacctcaatccgcacctattaaattaggttcctcattttaacaaggtccccaggtatgcacattcgagtttaagaaacatttctttaaaatatcctttaatctaaaccaaacaaaatcactaatccatatacaacccagtcttatcaagaagaattaaatcttttcattaatttctctgcatccaaagcaatccctttgctcatgctcttaactccactggaaatttcttatttccttcacatc

SEQ ID NO: 361636 - DNA, 589 bp, Homo sapiens
tgcttttgaattgaccatgtccacacaaactaatcaatcaacagataattgagcaccaaatctatgaaatatgcagagaaagtgtagacaggctcccagctggttttsctattctacattctctcttctttagcatacttttcatgagcttgacacagtaatctccctaaagtgcagttttcatcatgctgtaactgctagaggacatagagtggtttttgaatgcctgctgtattaagcccaaacgactctatctagcttcaaggatcctcaacagtcttgcaattcacagtatggcatcagcaccaacatcaccagggaagttgttagaaataaataatctcacacctcaatccgcacctattaaattaggttcctcattttaacaaggtccccaggtatgcacattcgagtttaagaaacatttctttaaaatatcctttaatctaaaccaaacaaaatcactaatccatatacaacccagtcttatcaagaagaattaaatcttttcattaatttctctgcatccaaagcaatccctttgctcatgctcttaactccactggaaatttcttatttccttcacatc

SEQ ID NO: 361637 - DNA, 589 bp, Homo sapiens
tgcttttgaattgaccatgtccacacaaactaatcaatcaacagataattgagcaccaaatctatgaaatatgcagagaaagtgtagacaggctcccagctggttttgctrttctacattctctcttctttagcatacttttcatgagcttgacacagtaatctccctaaagtgcagttttcatcatgctgtaactgctagaggacatagagtggtttttgaatgcctgctgtattaagcccaaacgactctatctagcttcaaggatcctcaacagtcttgcaattcacagtatggcatcagcaccaacatcaccagggaagttgttagaaataaataatctcacacctcaatccgcacctattaaattaggttcctcattttaacaaggtccccaggtatgcacattcgagtttaagaaacatttctttaaaatatcctttaatctaaaccaaacaaaatcactaatccatatacaacccagtcttatcaagaagaattaaatcttttcattaatttctctgcatccaaagcaatccctttgctcatgctcttaactccactggaaatttcttatttccttcacatc

SEQ ID NO: 361638 - DNA, 589 bp, Homo sapiens
tgcttttgaattgaccatgtccacacaaactaatcaatcaacagataattgagcaccaaatctatgaaatatgcagagaaagtgtagacaggctcccagctggttttgctattctacattctctcttctttagcatacttttcatgagcttgacacagtaatctccctaaagtgcagttttcatcatgctgtaactgctagaggacatagagtggtttttgaatgcctgctgtattaagcycaaacgactctatctagcttcaaggatcctcaacagtcttgcaattcacagtatggcatcagcaccaacatcaccagggaagttgttagaaataaataatctcacacctcaatccgcacctattaaattaggttcctcattttaacaaggtccccaggtatgcacattcgagtttaagaaacatttctttaaaatatcctttaatctaaaccaaacaaaatcactaatccatatacaacccagtcttatcaagaagaattaaatcttttcattaatttctctgcatccaaagcaatccctttgctcatgctcttaactccactggaaatttcttatttccttcacatc

SEQ ID NO: 361639 - DNA, 545 bp, Homo sapiens
tttccctactctgtcaattcccaatgagggatatcatggttcagtagagatgtcttaagtttcatagacaagaggtataagtgggtagatgtgagggtgcaggaccatattgcataaagccacataatttgtgcttttttgttaaaactacttaatggaaaaatrctgttaaaatatattaaaaccttttgtagtttgaaacagatgaatattttaactgttacggacatgacaaagagatgttgtattttgtttcatgttaattttccctcctataggtaattgtgatttttttataggccagcaatatgtctttctccattcattcaacaaataacagaattttaaaatagctcctatttgtccttttctgacttcttaaattttagacatgataggcactaaataaatacttgttgattgaagacactctttgatctaaagttggggactaggtttacacacgtggaacaaccatttcagaaatgcagccaccctttcctcctactgttattcatgacataaggaaacgttcatgaagtcat

SEQ ID NO: 361640 - DNA, 495 bp, Homo sapiens
gactctgtgcagacaatccccagtaccagcgtggagctgggtagacttgctgggtggctagacccagaagagagacaacagtcactgcagtttggctcacagcaagccacatccataggaaaagagggagagtactacatcragggaacaccccatgggaaaaagaatctgaacaacagccttcagccttagaccttccctctgatagagccgccccaaataagaaggaaccagaatactaatcctggtaatatgacaaaacaaggccttcaacaccccccaaaaatcaaactagttcaccagcaatggatccaaaccaagaagaaatccctgatttacttgaaaaagaattcaggaggttagtaattaagctaatcagggagggaccagagaaaggcaaagcccaatgcaaggaaatccaaacaatgacacaataagtgaagagaggaatattcaaggaaataaatagcttaaagaaaaaacaataaaatattc

SEQ ID NO: 361641 - DNA, 362 bp, Homo sapiens
gaccctctactcatctactgatgagcaaattgtggcctaaaaggttaaatgacttgcttaaagtgtcacagctagttggcaatagtatcatgactgcaagatagggttcttttccttaggtcagtaagtttcatcccaatatgttatcttccrttaatagcgcaaagatttacttctatgaaatggaataataatatctgccctttctaccttatagggttgttgtgagataatacgtatataataataatggttatgtaaggtggtattgtaatgattttaatgatttaatctgtaggtttcctggactttttccttctcatttaagtgatatgcatttgaaatattaatctgtgttgaaa

SEQ ID NO: 361642 - DNA, 362 bp, Homo sapiens
gaccctctactcatctactgatgagcaaattgtggcctaaaaggttaaatgacttgcttaaagtgtcacagctagttggcaatagtatcatgactgcaagatagggttcttttccttaggtcagtaagtttcatcccaatatgttatcttccgttaatagcgcaaagatttacttctatgaaatggaataataatatctgccctttctaccttatagggttgttgtgagataakacgtatataataataatggttatgtaaggtggtattgtaatgattttaatgatttaatctgtaggtttcctggactttttccttctcatttaagtgatatgcatttgaaatattaatctgtgttgaaa

SEQ ID NO: 361643 - DNA, 362 bp, Homo sapiens
gaccctctactcatctactgatgagcaaattgtggcctaaaaggttaaatgacttgcttaaagtgtcacagctagttggcaatagtatcatgactgcaagatagggttcttttccttaggtcagtaagtttcatcccaatatgttatcttccgttaatagcgcaaagatttacttctatgaaatggaataataatatctgccctttctaccttatagggttgttgtgagataatacgtatataataataatggttrtgtaaggtggtattgtaatgattttaatgatttaatctgtaggtttcctggactttttccttctcatttaagtgatatgcatttgaaatattaatctgtgttgaaa

SEQ ID NO: 361644 - DNA, 515 bp, Homo sapiens
tcctacaattcatgcttaggaattaaaggaattttcccctaagaatgtcatctccactccacccactgttcatggcctattttatctytttgaatacagtctatcctcataggagaatgtgaaaatttcttgttttgtgtggcctgcccataggaaaaggccttgatgataatcctttcacgtaaaagtgtgttccttggcttctggtgacttttaaaagctatagaattctcacaaaagctttgctatccatgtagcaaattcagtggtcagtctccctaccttattaggcttagtttaaaagccatgataatctggacaatcctaaatgaaggtatatctttcctcggcttttgcttgaatgtatgttattgttgttgttgttgttgttgttgcatccacatgttggatgctcagtgctcggttctacccaaaccaatctgataacaaataccaccatattacctgtgagtagaatattatttttgccctattcgaatacttttttattagcc

SEQ ID NO: 361645 - DNA, 515 bp, Homo sapiens
tcctacaattcatgcttaggaattaaaggaattttcccctaagaatgtcatctccactccacccactgttcatggcctattttatctctttgaatacagtctatcctcataggagaatgtgaaaatttcttgttttgtrtggcctgcccataggaaaaggccttgatgataatcctttcacgtaaaagtgtgttccttggcttctggtgacttttaaaagctatagaattctcacaaaagctttgctatccatgtagcaaattcagtggtcagtctccctaccttattaggcttagtttaaaagccatgataatctggacaatcctaaatgaaggtatatctttcctcggcttttgcttgaatgtatgttattgttgttgttgttgttgttgttgcatccacatgttggatgctcagtgctcggttctacccaaaccaatctgataacaaataccaccatattacctgtgagtagaatattatttttgccctattcgaatacttttttattagcc

SEQ ID NO: 361646 - DNA, 515 bp, Homo sapiens
tcctacaattcatgcttaggaattaaaggaattttcccctaagaatgtcatctccactccacccactgttcatggcctattttatctctttgaatacagtctatcctcataggagaatgtgaaaatttcttgttttgtgtggcctgcccataggaaaaggccttgatgataatcctttcacgtaaaagtgtgttccttggcttctggtgacttttaaaagctatagaattctcacaaaagctttgctatccatgtagcaaattcagtggtcagtctccctaccttattaggcttagtttaaaagccatgataatctggacaatcctaaatgaaggtatatctttcctyggcttttgcttgaatgtatgttattgttgttgttgttgttgttgttgcatccacatgttggatgctcagtgctcggttctacccaaaccaatctgataacaaataccaccatattacctgtgagtagaatattatttttgccctattcgaatacttttttattagcc

SEQ ID NO: 361647 - DNA, 515 bp, Homo sapiens
tcctacaattcatgcttaggaattaaaggaattttcccctaagaatgtcatctccactccacccactgttcatggcctattttatctctttgaatacagtctatcctcataggagaatgtgaaaatttcttgttttgtgtggcctgcccataggaaaaggccttgatgataatcctttcacgtaaaagtgtgttccttggcttctggtgacttttaaaagctatagaattctcacaaaagctttgctatccatgtagcaaattcagtggtcagtctccctaccttattaggcttagtttaaaagccatgataatctggacaatcctaaatgaaggtatatctttcctcggcttttgcttgaatgtatrttattgttgttgttgttgttgttgttgcatccacatgttggatgctcagtgctcggttctacccaaaccaatctgataacaaataccaccatattacctgtgagtagaatattatttttgccctattcgaatacttttttattagcc

SEQ ID NO: 361648 - DNA, 570 bp, Homo sapiens
ccctgcaatccaatcaatttaattactcaatctatattgttatttaagtaatggcaaaatcattgacttattcataatagttgctaattgttttttaaaataaattctacaaaggacaaaggaaacacccatttccatttgttttatgttaaatcaacatataaccactcatggtgatttcattcaaagaaaacagaaggaactcattagcttatgtggttagagagattgatgggcttcaaacattttaaccatacatgttttttccaactgtagaaactcatgtttttaattttagtaamcttaagaaactgaagattattttattcagtgggttcatatatttctggtacagacgttatgctaatttttaaactgagatttatcatctaagtatctttgtttatagggaagtgatcaggcacttgttaaaatatacataagaataacagcagtttgagtaacaaagaatctgaaatagtatgaaaatggacataggtgcagaatattgtgattagtgtaagccaatagaacacagtatcactttcactgccctactctggccaatgg

SEQ ID NO: 361649 - DNA, 570 bp, Homo sapiens
ccctgcaatccaatcaatttaattactcaatctatattgttatttaagtaatggcaaaatcattgacttattcataatagttgctaattgttttttaaaataaattctacaaaggacaaaggaaacacccatttccatttgttttatgttaaatcaacatataaccactcatggtgatttcattcaaagaaaacagaaggaactcattagcttatgtggttagagagattgatgggcttcaaacattttaaccatacatgttttttccaactgtagaaactcatgtttttaattttagtaaccttaagaaactgaagattattttattcartgggttcatatatttctggtacagacgttatgctaatttttaaactgagatttatcatctaagtatctttgtttatagggaagtgatcaggcacttgttaaaatatacataagaataacagcagtttgagtaacaaagaatctgaaatagtatgaaaatggacataggtgcagaatattgtgattagtgtaagccaatagaacacagtatcactttcactgccctactctggccaatgg

SEQ ID NO: 361650 - DNA, 579 bp, Homo sapiens
ttcagtttttaaccttgattttcccttagatccagatctctatgccttataaccaaaatatgattcctggcttgcttctttaatgtttttgactctgaaaatcctgagcagagcctaagtgttcactgtggataagtagatgaggaatgaggacagagatgccacctggaattttacatgagtattcttatcccatctatttataaggtttgccttttctccttttatagccctacagagactccctcactcttttttttgagactgagtctcactctgttgtccaggctggagtgcagtgccacagtctcagctcactgcaacctctgtctcccgggttcacgccattctcctgccwcagcctctggagtagctgggactacgggtgctcgccaccatgcccggctaattttttgtatttttagtagaggtggggtttcaccatgttagccagcatggtctcgatctcctgacctcatgatccacctgcctcggcctcccaaagtgcagggattagcaggcatgagccaccatgcccggccaactccctcaatcttaacctcttaccaggctccaact

SEQ ID NO: 361651 - DNA, 576 bp, Homo sapiens
atcactgagatttgtagggtgctgagcagaatgtaagcactctgacataaggtctcaggcacaagtacacatctcttcagtagaagtgtgaaagcagacaaggactatatgtaaacaaacatggccatgttccaataaaatcatagacactgaaaaaaaaaaaggcagtgtgctagtctgttctcacactgttgtgaagaaatacccaagactgagtaatttataaaggaaagaggtttaattgactcacrgttccacattgctggggagacctcaggaaactcacaatcatggtagaaggcaaataagaagcaacaccatcttcacagggtggcaggggaaatgccagatgcttataaaaccattagatctcatgagactcactcaccatcacaagagcagcatgggggaaccaccccatgatccaattacctccatctggtcccgcccttgacacgtggggattatggagattgagattcaagatgagatttgggtgaggtcacagccaaaccatatcaggcagtgttatagtagaaagaatttgggcttttgtgtcagataagcctgggtttt

SEQ ID NO: 361652 - DNA, 519 bp, Homo sapiens
cctacacacaatgacctcgggccattgctcacactccacagaggtggtattaaatctggcagcttccactccaggttgctctgggccacaactaaggccggctctgtgaccttggacaaggtgtgtcccctctctgagatgttttgtagaacagaaatagtaagagtggctatctcacagaggtggagtagcasagacagtatgaaacattaagctgcagccgccctccacgagacccctgaactgagcaggggctagggcaggagtgagagctcagccccggcactctggcctctggacagcagctcgggttcagatttcttaaggaaaatgatttacacctaaacccattccaaaagtgtctctggataaattggctcttggtcaaattataaaaaagaaaaataataactaatttttgagcactttatcccttgctaagcatgtcacatggagtgacttatttattcatcatcataaccctagcctacccctattaataatatgcacataacacca

SEQ ID NO: 361653 - DNA, 528 bp, Homo sapiens
gcacaggaagggggctgggagcatttgtaagtgcatcatttctgcaccccaccgcaaaacatagctatccttccataccaaggggccacttatttagccagtttcctcatcctaaaacagtaactagcattgatgagtacttattctgagccagggactgtgataaatgctagacatattttaactcatttaaatttcctaacaaccttacaagktaaacattattataatcactgtttttacaggtgaaaaacaaaactgagggttaagagagtttaaagtaacttgcccaaggtcacccagcaggtaaggaaggttatatacaatctgtgtgaccccccaagcctgccagtgttagaaacaccagcctccagcacctccctatcctcacttctaaactcagacagaaccaaattcaaatcctggccccaccattgactgactgtgactccaggtaagctactcaatctcgttagcctccatttccacacttgtgaaatgagaataaaaggacctgtttggcagagt

SEQ ID NO: 361654 - DNA, 452 bp, Homo sapiens
tgtgatgtcatcctgcccctaccttgaggaagaacaaccacagtttattgtattttctctctccactatgtccatgcaacaggaaggttcacaacgttggcaagcattggaatcaccaggggcttgtgagcatgcagattcacagctctgctcctgaaggccaagattctttaaatctacaatagaccttggattagctagacttttacagtctcctcaaggggttctgggacagatcaccttcccaaataccttgaactttgcgagacccactttgggaagtcctgtgtgtgatgctggaacatcacagtgtcctctgtaagagcaaaggccatgccatgctcatctctgggttctactgmacaacactgtgcctggtggcagcgggtgctgagaaaaggttgaattgaattgagctgaactaaatggatgagaagttcttctctcctcct

SEQ ID NO: 361655 - DNA, 527 bp, Homo sapiens
tgtggggcctgactcttctgttrggctgaccactcaccaggcacctggcatagagcaggagctccctgcacacctgccagacaggtgaatgccagagccctggctccaggcaaggtgctggctgtgctctctcttcctctcttgggtccaactccaggagtgagaagatggctgttctctggagaatgtactgcattttgctgcctccaccatatagagtgaggaccaaactctagagggacagaagagacccttcccctctaacccgccaacctccaccagatcactccaaaagaaacatttttgcccatcagagaagcagacagagggtagcaataggcatgctagccctgggcctaccagcaaactgacctccaaaccaggcaggctaggcagttgatcttacagccctctctgctgatctttgaaaataagacagaagggaaaacatttacctccccaaagcaaacatctgctttgcaatttctgaggatgggcccacagagagagctctccccctgtaaggg

SEQ ID NO: 361656 - DNA, 527 bp, Homo sapiens
tgtggggcctgactcttctgttaggctgaccactcaccaggcacctggcatagagcaggagctccctgcacacctgccagacaggtgaatgccagagccctggctccaggcaaggtgctggctgtgctctctcttcctctcttgggtccaactccaggagtgagaagatggctgttctctggagaatgtactgcattttgctgcctccaccatatagagtgaggaccaaactctagagggacagaagagacccttcccctctaacccgccaacctccaccagatcactccaaaagaaacatttttgcccatcagagaagcagacagagggtagcaatrggcatgctagccctgggcctaccagcaaactgacctccaaaccaggcaggctaggcagttgatcttacagccctctctgctgatctttgaaaataagacagaagggaaaacatttacctccccaaagcaaacatctgctttgcaatttctgaggatgggcccacagagagagctctccccctgtaaggg

SEQ ID NO: 361657 - DNA, 566 bp, Homo sapiens
ggattataggcacgtgccaccccaaccacctaatttttgtatttttagtagagatgaggttttaccatgtttgccaggatggtctcgatctcctggcctcatgatctgcccaccttggcctcccaaagtgctgggattacgggcatgagccaccgcacccaacctattttttttttttttttttgagatggagtctcattcactgtcgcccaggctggaatgcagtgttgtgatctcggctcactgcaacctccacctcctgggttcaagtgattcccctgcctcagcctcccaagcagctgggattacaggtgcatgccaccatgcctggctaatttttgtattttttgtagagacagggtttctccatgttggccaggctggtctcgaacttctgacctcaagtgatctgtcccygctccttggcctcccaaggtgctgggattacaggtgtgagccaccgtgtctggccaagagcaattacttttataggaatctaggttctgagtctgtgctgggaaaaaaaaaaaagtcagtatggtcaatggagaaagcttgaagaaaaa

SEQ ID NO: 361658 - DNA, 566 bp, Homo sapiens
ggattataggcacgtgccaccccaaccacctaatttttgtatttttagtagagatgaggttttaccatgtttgccaggatggtctcgatctcctggcctcatgatctgcccaccttggcctcccaaagtgctgggattacgggcatgagccaccgcacccaacctattttttttttttttttttgagatggagtctcattcactgtcgcccaggctggaatgcagtgttgtgatctcggctcactgcaacctccacctcctgggttcaagtgattcccctgcctcagcctcccaagcagctgggattacaggtgcatgccaccatgcctggctaatttttgtattttttgtagagacagggtttctccatgttggccaggctggtctcgaacttctgacctcaagtgatctgtccccgctccttggcctcccaaggtgctgggattacaggtgtgagccacygtgtctggccaagagcaattacttttataggaatctaggttctgagtctgtgctgggaaaaaaaaaaaagtcagtatggtcaatggagaaagcttgaagaaaaa

SEQ ID NO: 361659 - DNA, 552 bp, Homo sapiens
cagccccacttaaccagatcctggagagggactctggccagcaaggccagcccctctgctgtctgtctctrtggaggaaaatgggtaccattgttaaccgaaaggggtcctgatccagactccaagagagggtttgagaacgaattcagggtgagtccatagagtaaagtgaaagcaagtttattagggaaataaagaaacaaaagaatggctattccataggcagagcatccctgagggctgctggttggctatttttactgttatttcttgattatatgctaaacaaggggtggattattcatgagtttcctggaaaagggaagaaccccagaactgagggttctactccctttcagaccatatagggtaacttccagatgttgccatggcatttgtaaactgtcatgatgctggcgtgtgtcttttagcatgctaatgcattataattagcatataatgagcaatgaggaattttgtcaccactttggttttggtggggtttagctgtcttcccctgccccccacccccccaatccagttttatccgca

SEQ ID NO: 361660 - DNA, 424 bp, Homo sapiens
gaacaaacccagtggagcttctgggttagggtcaccagggttatattcaactgaactgtggtattacctggactcgaaggagctagatgcaatttgagaagcaaatgcagatcaaggcccrgaaaggaactcaaggttgagtgaaaagaacgatatccattcagagatctaaaggacaattttgaggtcgcacctaagagactagggaagcaaaaaaatgcaggatggcaagcaaggctggaagaggcagagttttatttagcctgtgctcttcttcttcttttttgccaagtaagtttggtttattagaacataacacactttaagcttgttagaaacttacttacacataaaataaacagagcttagaatgttttcgttttattattattttaaattagagacgggatcttgctatgcttcc

SEQ ID NO: 361661 - DNA, 560 bp, Homo sapiens
atataaggaatataaaatgcaaatggtccacaaaataatactgcaatttaccaaagatgcaggatgtcatgaagtcaaggaaagtaacagggaagaactgcataaatcacaagcaaaatcaccaataagtgataatctggcagagttagacacatttggcagatcacagatggcagaattagacacattagccattgaagaaaatcaaaaaggataatggcatgataggtgcttcaaaggaaaatatttctgatataaacaaagctaaaggaaaaattaataagacttttattatatttacaaaattactctgttgttgaccacgctgcaaaggtcaaaggtaaagaatgcatttttgctagcatacaatgttatcaggataactacactgaagaaacaaacaattgattcattcttggttcatcataagcattcacatataattgcaacgcaactcaattktattaaataaacatgacaattttttgttccattttctaaataatttcccaccaaatcttggcctttttatgattctctatgaaaccattgtcctcatt

SEQ ID NO: 361662 - DNA, 521 bp, Homo sapiens
aaagctgctggggcatcagatgcgcacccagcaaggtgcaggctctgtggctagccagggacagcttgctcagtgagttcacattcccagcagggtataatgagggggtatgaggagggcagggatagccagcttaacttgagcaagacccctcctcacacaggctagctgtgtgacccaacagaggaggaggggggtttctcccacttcaatccatttggcctatattttttagagagtttgatttgcacaatgcaaagttagaggcattagaagacaccataacgggaatcctgaaaaaataaaatgacaattagtaagccctcatttccatgttttcccacgaagttgtaagcacagccctatggggggagtggattaccatccccatggtcacagataaggaagaggaattggcatctatggagcaccagtcagtgctatgctaagaagtttgtagttatcattttattttacatttactcttyagcccaaactgccaagtggagattattaacccc

SEQ ID NO: 361663 - DNA, 298 bp, Homo sapiens
atggggggagtggattaccatccccatggtcacagataaggaagaggaattggcatctatggagcaccagtcagtgctatgctaagaagtttgtagttatcattttattttacatttactctttagcccaaactgccaagtrgagattattaaccccacattagagataaagaaattgaggctgagagaaggcaaataacttgcccaagatcctgagaaataactaatcctaatccccaaactgggattaattccaaagtcccatgcccttcatccactcatttgtttaaaatatagt

SEQ ID NO: 361664 - DNA, 516 bp, Homo sapiens
gactcaaagctccataaatattttaattaaataagcacataattaacttcacaaatttttacggcacacctacaatgtgctaggcattctagcccctattgataaagaagtccttgctctaatgggacttgtattaattttctaactaatgaaatggggttaaaactccaactctagtccttagtagctgtgtgaccttaggaacatgatttaacttcaccactgtctagttttcccacttataaaataataacaacaataacaagagcagctaacctttattgagcacttattgtcagacactattctaaatgcatgcaaaaattccctaggaggcaatataacctgagttccaatcctgatacscgcctccccacttaaagctgcaggactttagggcagttacttggcctgtctatgcctgggttcctgtgttggctgctgtgatgtgtcatggggtaccccttccagaatgaagaacttattgccctcagtggctggaagtgctgtggcaag

SEQ ID NO: 361665 - DNA, 516 bp, Homo sapiens
gactcaaagctccataaatattttaattaaataagcacataattaacttcacaaatttttacggcacacctacaatgtgctaggcattctagcccctattgataaagaagtccttgctctaatgggacttgtattaattttctaactaatgaaatggggttaaaactccaactctagtccttagtagctgtgtgaccttaggaacatgatttaacttcaccactgtctagttttcccacttataaaataataacaacaataacaagagcagctaacctttattgagcacttattgtcagacactattctaaatgcatgcaaaaattccctaggaggcaatataacctgagttccaatcctgatacccgcctccccacttaaagctgcaggactttagggcmgttacttggcctgtctatgcctgggttcctgtgttggctgctgtgatgtgtcatggggtaccccttccagaatgaagaacttattgccctcagtggctggaagtgctgtggcaag

SEQ ID NO: 361666 - DNA, 609 bp, Homo sapiens
ttaaacatttcattgttttgagtggttataaatgatattttatttttaatttgttagtttgtacaaatacaatgatcattgtatgtttatcttatataaactttctgtgttcacttattagttccaagagtttttaattttttgggttttttttttgtagattccttgggatttcctatgtggacaatatgtcatctgaaaatagataaaattttacttcttctttttctmtctgaatgcctattaattatttttcttgccttactgcatttgctgaaatttctagcattatgttgaagaaaggcagtaagagtagtatccttgtcttgattctgatcttagtgagaaggcattcaatctttcagcattaagcataatgtcagctataggcttttgtagactttccttatcgagttgataagtttctctctatttctatttttctgagagtgtttagaaatcatgaatgcatatagaattttgtcaaatgattttttcatagattgatataatcatgtgatttttcttctttagcctgttaatgcggtgaattgttgaatatcaaaccagtcttgtatccctggaataaatgagttggtcattttatat

SEQ ID NO: 361667 - DNA, 609 bp, Homo sapiens
ttaaacatttcattgttttgagtggttataaatgatattttatttttaatttgttagtttgtacaaatacaatgatcattgtatgtttatcttatataaactttctgtgttcacttattagttccaagagtttttaattttttgggttttttttttgtagattccttgggatttcctatgtggacaatatgtcatctgaaaatagataaaattttacttcttctttttctctctgaatgcctattaattatttttcttgccttactgcatttgctgaaatttctagcattatgttgaagaaaggcagtaagagtagtatccttgtcttgattctgatcttagtgagaaggcattcaatctttcagcattaagcataatgtcagctataggcttttgtagactttccttatcgagttgataagtttctctctatttctatttttctgagagtgtttagaaatcatraatgcatatagaattttgtcaaatgattttttcatagattgatataatcatgtgatttttcttctttagcctgttaatgcggtgaattgttgaatatcaaaccagtcttgtatccctggaataaatgagttggtcattttatat

SEQ ID NO: 361668 - DNA, 570 bp, Homo sapiens
gcctgggctttggagtgtaagccaaggcttacattcttcatttgtggctttttgtctagtccaataaagaaggcttcaataaatgtcagctgtcattcttggtattttactattaccaaattcttatatatgaagtggcttacatacattatttcatttaattcccatgatagcccttggggcaactattattattacagttttgcaaatgaggagtctgaggctcagagaggctcaaaaattgcccaaatcatccaaacggcaacaatggtaggggcagcctacagacccrccatgcagctttgagtggccttcaggccttctttccagctctttttgtttgtttgtttttttgagatgggggtcttgctccgttcctcagccaggagtgcagtggcacgatattgactcactgcaacctctaccttctgggttcaagtgatttttgtgcctcagcttcctgagtagctaggattacaggcacgcgccaccacacccagctaatttttttgtatttttagtagagatggggttttgccatgttggccaggctggtctcaaacttctggc

SEQ ID NO: 361669 - DNA, 610 bp, Homo sapiens
gcattccacttctctgcctctcttcacatgaagcagtaggctgtgttcgtaagatgatggaaattgttttgtagtgaaggggggaaagactaatgatgcagggaggcgagagaatgaaaaagaagactccaaatggttcatgcctgtgggtttcagcttgtgatcccttcctgaccaccagcctatggactttcgacttgctcaaacagcctccacaattgcataagccaatgccttgtrataaatctcttaaaatccctggtttggcttctccaattgatccctaactgataacagaatttggtccctgaaaagtccttgaaaaggcaataaagttatgtactgttttctatgaaagcagagaagagggacacttgcctatagaggtgaatgaaggcttctgaaatgtagttttatttaaactaagtcttaaagaattattaaaaatgagtaagacaaggaaggaagagaagcagtggtgtgctggcaaaacagctcactggaaaaaatcaaactttatctgtagcatttgataatttcctagtatatatactcccaccatgcccaatttcaagctaccagtgtaatgtcacagaatatagagttggaa

SEQ ID NO: 361670 - DNA, 582 bp, Homo sapiens
tgtatctggaaaattcttacataccctattaatctgaagtcaaatttttgagcatctctgtagtaagattaaaatgtccacttggtgtsagggcacattgaatgccctggattacagtggatctgtaatcccaggactttgggaggtcaagatgggaggatctcttgaggccaggaggcccagagcagcctgggcaacatagcaagacccttctctaaaaacaaaacaaaacaaaacaaaaaaagtcaacttagttttgcaataattttaaagtcagattctaactcatacatctatggctaattgattttaggcaagggtaccaagaccattcaatcaggaaagaatagtctcaacaaatggtgctaggacaaatagatctctacatgcaaaagaatgaagttggacccctacctcacaccatatgaaaaaagtaaactcaaaatgtgtcaatgagaactaaaatcataaaactcttagaagaaaacataggggtaaatcttcacgagtttggatatgggaatggtttctcagatatgatattaaaagagcacaagtaatacaaaaatagataaattagac

SEQ ID NO: 361671 - DNA, 620 bp, Homo sapiens
caaatttttgagcatctctgtagtaagattaaaatgtccacttggtgtgagggcacattgaatgccctggattacagtggatctgtaatcccaggactttgggaggtcaagatgggaggatctcttgaggccaggaggcccagagcagcctgggcaacatagcaagacccttctctaaaaacaaaacaaaacaaaacaaaaaaagtcaacttagttttgcaataattttaaagtcagattctaactcatacatctatggctaattgattttaggcaagggtaccaagaccattcaatcaggaaagaatagtctcaacaaatggtgctaggacaaatagatctctacatgcaaaagaatgaagttggacccctacctcacaccatatgaaaaaagtaaactcaaaatgtgtcaatgagaactaaaatcataaaactcttagaagaaaacataggggtaaatcttcacgagtttggatatgggaatggtttctcagatatgatattaaaagagcacaagtaatacaaaaatagataaattagacttcatcaatattaaaaacttytgtgcatcaaagaacattaccaagaaagtagaaagataatctacaatctacaatcta

SEQ ID NO: 361672 - DNA, 483 bp, Homo sapiens
ttggggtgatgaaaggtttaggactacatggagatggtaattgcatggtatggtgaatgtactaaacgctactgaattgttcactttgaaatggttaaatctgtgtcatatgactctcacccgattttttttaagccaggccctacagatggaactcatattatgcaaccagacataatgtctcctaaagtactgattttcactttatgtttagatcaagtgaattctatttcatattttggagttatttcactgaatttaaaaacttaactagatagagctttcaatcccccaaaatagcagtataaattatagttacaagatagatggttgagtggtttttttctcaatggtttaaaacatatttaaggttcgtaacaggaaaggtaaatcatatttaatacagctgaattatttcwacataattggcttttcatctgtgttctggtttgggactgtttattccagtttagtaattaacca

SEQ ID NO: 361673 - DNA, 541 bp, Homo sapiens
cattttgtagaagaaaaactgagcactagtagttgacaatttgtttatgcatctattagtactttatcttgctgggctgtaattgctttcattcatatgtatctaaccaattgattgtgtatagcttacaagcagtggtcatttttacttttgtttctctggtacttaatatggtgacttgcatgtaagagacacttaatagatgtttattgagtccaaggttgatactttttctaaaatattctcttcattttatgttgtttctagtactctagtgtagtacagacttcagaattcagaaatctatagaaaatgacagaggcatttctacccaggtataactttaatatattttctaaatcttattgattagcactacattttaaaaatcatattaataaaatcrccaatgaataaataaaatctcatgacaatctcgatttcaagggcaggaaaattttctaaagtgttctagttacagttttcctatctagataatttagaaaacaatactgcccaatatatttccataataccagtc

SEQ ID NO: 361674 - DNA, 583 bp, Homo sapiens
ttttcctatctagataatttagaaaacaatactgcccaatatatttccataataccagtcaaaatcttctggggaaatagtactttttctccaaagtgtcaaggtatatgagcacctgttaaggatcttattctgggaaatggggagtagggagaaggaacacctggtcaaacggccaggtgaatcacccttgtatgaattaaagaactgaacaatataaaggagaacttgtggtttcaccgtttatgaccctgacaacctttacctggaaatttcaccattgattttggactgtcagatattttgtataaatgcactttaaaatgtagaattaaaaactctaagactttttttcattatatccccctttctccaaacaatcatatgtttgatataatattatagaaatacacatcatatgtggagactgtttcattgtcgttgccagtctgttttgtgtaatggggcactgacagaacagctcgggctctaattgyaagggtaaaaagttattcacatttttaatgcagtgtttatgactatttggcactcctctttatattagttctagaattagaatggg

SEQ ID NO: 361675 - DNA, 432 bp, Homo sapiens
ccccaaacctcttgccacatgactayaccccaggcacttcactggccactaaaggaacacagagatgaatgcaacataagtcctttccatgtgggaagacatgtatacaaggaatactacacaggatagaacacgataatatgcgtgagccaccacactggcctgcaacatgattttgaatgttgctcctggttgcacaagtgtaacctgattctccagtcttcctaataattctgtaggaaacccaatatccttaaaataaataatccttcactcaaatccaccagaatttatttctacagctagcaacaaaacaatgttggaagatgcagcaactaataactaataagtacttggcttttcttctgtcatatttccacatgttgcccagcccagagtattaagcaggaccctctatcacatatcacagca

SEQ ID NO: 361676 - DNA, 614 bp, Homo sapiens
aatgtttgtttgaaaaatacaacagagaaaattgtgaattttctggaaagggatagttcagtattgtcacatgagaattttctttaggctaccagcgaaatgtcaaattccagatatggccacaaggtggtgcagtgaccttaaattgtcattctcctacctgtagggaggaacaatttgtccattaaagcagttacattttggcggttccaaagtttacccctgatgaatccagagagcagtaaaaaaattgctctcatcaaaattttgtcatcaactatgatgtataaatatgtagggaaaaggatacagaaatgcaattctgaaaaaattcatacttgctagaaaaaggattatgaaatgacagatcactagaattacrcaggaaagatataagccatctcatttagcctcttgatttatagatgaataaatttaagcttggagatacttgaagatttacttaaataatccggaaagataggaaagatctaggagaaaagaccatatgatgtacctggctcctagttcaatgatttttttatagtacatgtagttgcctctttatcctatactctaatttaaacgcactgaaagttcagccaccatgcttt

SEQ ID NO: 361677 - DNA, 376 bp, Homo sapiens
gtgaagtaaaagacaggctatgtgaaaatacacagtcaaaggagagtgaagcactcctacaagatctaaaattagcctcagtaaggcaaatataagagttattggccttaaagaagatgcagagagagagattggagtagaaagtttattcaaagaaataataacagrgagtttttcaaacctagagaaagatatgaatattcaggtacaagaaggtcaaagaacaccaagaaaattcaacccaagtagggctactcttgaaggtcaaggataaatacagcattctaaaagcagcaagagaaaagaaggataacacacaaaggatctctgatatgtgtggcagtggacctcccggtggaaatcttacaggccagga

SEQ ID NO: 361678 - DNA, 519 bp, Homo sapiens
aagaaatgctaatgaaagatcttcagtctgaaagaaaaatatgttaacaagcaacaagaaatcatctgaaggtacaaaactcactgggaaaagtgagtacatagacaaatacagactaatccaacactgtgattatgatgtataaatcattcatatctttagtaggaaatctatagacaaacctatcaaaaataattacaatactttttaaagaartaggcaatataaaaagttataaagagaaaaaacataatgtccaaatgttgaggggataaagttaaaatatagattatgtcatttttttagttttacctttactagtttgagattttttccttctttttttgatgacagtagagttgtcatcagtttaaattcatttactataagatattatttgtaaatctcatgataatcacaaaatagaaggctgtaatagatacacatagactgaaaaacaagaaattaaacatactaccaaatacaatcactttaacacaaaggaagacaagaaggaaa

SEQ ID NO: 361679 - DNA, 519 bp, Homo sapiens
aagaaatgctaatgaaagatcttcagtctgaaagaaaaatatgttaacaagcaacaagaaatcatctgaaggtacaaaactcactgggaaaagtgagtacatagacaaatacagactaatccaacactgtgattatgatgtataaatcattcatatctttagtaggaaatctatagacaaacctatcaaaaataattacaatactttttaaagaagtaggcaatataaaaagttataaagagaaaaaacataatgtccaaatgttgaggggataaagttaaaatatagattatgtcrtttttttagttttacctttactagtttgagattttttccttctttttttgatgacagtagagttgtcatcagtttaaattcatttactataagatattatttgtaaatctcatgataatcacaaaatagaaggctgtaatagatacacatagactgaaaaacaagaaattaaacatactaccaaatacaatcactttaacacaaaggaagacaagaaggaaa

SEQ ID NO: 361680 - DNA, 636 bp, Homo sapiens
cacctggcaaggctgtgcatgctcctttcattgcagatcatttgctcacaagataagagcttgtgtctgtttttccacagtttcagctctttctctacaggagataagactctcacccagggcaatcttagcaggtttgagcctcaatatctgcttctgaagctaggagatagaatccctgagttcatcatgttccttcatcactttgtccactgaacttaggaatacccaaccagcttcattatgttccttgrttctccacatatggtcaaaggtataatgtctagagtcactaaactccttgcctctcacaaacgatgaatcaggagtgtcaaatgcatttgttttgcataactctctaaacagttcatgccaaggactatcagtgttctccatacttttagtagagtccttagcattttggggtctaatcatattaagcagccaactccagaaaccccaaaaccaattaaagaactccatccttaatattctgttcctctagaactccactcctggtaccaaaatctgtattagtcagggttctctagagggacagaactaatggaatagatgagatagagatagagatagagatagagatagagatagatagagatagagatagatagatgg

SEQ ID NO: 361681 - DNA, 636 bp, Homo sapiens
cacctggcaaggctgtgcatgctcctttcattgcagatcatttgctcacaagataagagcttgtgtctgtttttccacagtttcagctctttctctacaggagataagactctcacccagggcaatcttagcaggtttgagcctcaatatctgcttctgaagctaggagatagaatccctgagttcatcatgttccttcatcactttgtccactgaacttaggaatacccaaccagcttcattatgttccttgattctccamatatggtcaaaggtataatgtctagagtcactaaactccttgcctctcacaaacgatgaatcaggagtgtcaaatgcatttgttttgcataactctctaaacagttcatgccaaggactatcagtgttctccatacttttagtagagtccttagcattttggggtctaatcatattaagcagccaactccagaaaccccaaaaccaattaaagaactccatccttaatattctgttcctctagaactccactcctggtaccaaaatctgtattagtcagggttctctagagggacagaactaatggaatagatgagatagagatagagatagagatagagatagagatagatagagatagagatagatagatgg

SEQ ID NO: 361682 - DNA, 636 bp, Homo sapiens
cacctggcaaggctgtgcatgctcctttcattgcagatcatttgctcacaagataagagcttgtgtctgtttttccacagtttcagctctttctctacaggagataagactctcacccagggcaatcttagcaggtttgagcctcaatatctgcttctgaagctaggagatagaatccctgagttcatcatgttccttcatcactttgtccactgaacttaggaatacccaaccagcttcattatgttccttgattctccacatatggtcaaaggtataatgtctagagtcactaaactccttgcctctcacaaacgatgaatcaggagtgtcaaatgcatttrttttgcataactctctaaacagttcatgccaaggactatcagtgttctccatacttttagtagagtccttagcattttggggtctaatcatattaagcagccaactccagaaaccccaaaaccaattaaagaactccatccttaatattctgttcctctagaactccactcctggtaccaaaatctgtattagtcagggttctctagagggacagaactaatggaatagatgagatagagatagagatagagatagagatagagatagatagagatagagatagatagatgg

SEQ ID NO: 361683 - DNA, 539 bp, Homo sapiens
tagcttgttttaagaagaacaaaactacgttgaagatgaacctaaggtggcagaccatccatgtacctttgcaaggaaataaataatcttcttcatgccctaattgaataggactgattattaataacgacagccaacattatagacatctcaattgtgttcgatgtacataactctgactgaaaaattaaagttgagcacactttccactcaatggatgccaaaactgttacagccagatcagctgcagacaacagcagtgttttcaatgcatattttaaataagtgggatcaagattctgaatcatttcctcaaaaaattataacaagtgataaaacatgtcttcaccagtatgatcctaaaaacaagggcaaaatcaaggcaatggctaccaaggggtgkaggtggtatcgtcaaagcaaaagtggactggttaagagaaggtcagcatttgaccgggagggaatactcaggcattttgcttgttaactttctggagggccaaagaacgataacatctgcttattatgagagcgtt

SEQ ID NO: 361684 - DNA, 239 bp, Homo sapiens
aactggctctgggaccattggatatccatattccaacaaacaaagatggactttgttccacactaaatgtaaaacctaaaaccataaagcatctgaggaaagcacagtagaaaaacttttatgagattggtttaagcaaaratttcttagatataacatcaaaaacacaattcataaaggaacaaactgataaaacagatcatcaaaataaaaatgtctgctctttgaaagatactttt

SEQ ID NO: 361685 - DNA, 615 bp, Homo sapiens
atattaaaactgcagtgagctgctaaaattcacctattttaatggttaaaatttaaaagactgatcacactaagtgttggtgagaatatggaaaaattagaattcttctacacttctggtgggaatataaggtgatacagctcttttgtggttaaacatacacgtactatgtgatccagctatttcactcctacgtatttactygagggaaattaaagcatatgttcacacgaacactcacacacaaatgttcatagcagcttcatttacaataataaaaacgacaaacaaaaaaacttggaaaaccacaaacatccatcaactccacaggtaaatgggcaaacaaattgtgatatattcatacaatgaattactattcagcaataaaaaataatcaaggattgatatgttcaacaatatggatacatttcaaaagtattatgctgaatgaatgaagccagataaagaatgccatactatatgattccaattctagaaaatgcaaactaatctcttgtgacagaaagtagatcagtggttgacttgggatgatagtgagggagaggggagtagttgagagggggtgattaaaaagggatacatctataattgttg

SEQ ID NO: 361686 - DNA, 559 bp, Homo sapiens
tgtacatggtgagccatgataatactgttccagggtttatttcacacatctctgccaaggagcttctggacctcatatgatcttcacagcatttggggaagttgaatattatgctcacctgaaagacgggaaactgaggcccagagtaactttttttttttttgcaggtagaagaaaccttagagattacgaaccttcttcytgtacagatgaggaaggagaccaagagaagggaagcaacttggcaaggtggccagtgttagatctcaggtctctgcatttctagttccccatggggaacattgcctgtgaataggtccgaggttttgtttgtttgtctttgcagcatgattcccaccctgcttgttctttagagaagccatgggtggaacagaagctgtctggattcaggcttagagtcccaggactgccactgactcagtgtatgtagcctcagttttctcatttgatgaatgatttttgctggaccaggtattgaattagagttcccagcgtatgccacatgtgcttagagtatctcatctccccaaggagatcc

SEQ ID NO: 361687 - DNA, 559 bp, Homo sapiens
tgtacatggtgagccatgataatactgttccagggtttatttcacacatctctgccaaggagcttctggacctcatatgatcttcacagcatttggggaagttgaatattatgctcacctgaaagacgggaaactgaggcccagagtaactttttttttttttgcaggtagaagaaaccttagagattacgaaccttcttcttgtacagatgaggaaggagaccaagagaagggaagcaacttggcaaggtggccagtgttagatctcaggtctctgcatttctagttccccatrgggaacattgcctgtgaataggtccgaggttttgtttgtttgtctttgcagcatgattcccaccctgcttgttctttagagaagccatgggtggaacagaagctgtctggattcaggcttagagtcccaggactgccactgactcagtgtatgtagcctcagttttctcatttgatgaatgatttttgctggaccaggtattgaattagagttcccagcgtatgccacatgtgcttagagtatctcatctccccaaggagatcc

SEQ ID NO: 361688 - DNA, 586 bp, Homo sapiens
ggattcaggcttagagtcccaggactgccactgactcagtgtatgtagcctcagttttctcatttgatgaatgatttttgctggaccaggtattgaattagagttcccagcgtatgccacatgtgcttagagtatctcatctccccaaggagatccaagccctctatggtctgcgcaactcaggtgatgtcagccaggcagcagccactttaattcctctacgatgatttgattccttttgctggaaacccyagtgcacatatatgggctcaataaattcatgtgtctcaatgactatttccacaggctgctctcatcagctctgaacaggcagttgtctgagcacttctgaataagccctggagtccagctaggaaaaatctctctctctggagtggcattctctgggaggccacgttgacttatgtcatattatcatagaaattccctctgttctttaacctttatttaactagagtcaggacctcctgctgagcctgaaaagtttttctaacaggaggctgtcctggcagtatgcagatgattgcattatggatagtagaatgggaaggcaaagagaagggcc

SEQ ID NO: 361689 - DNA, 633 bp, Homo sapiens
atagacattggaacccttaactcccttgggcaggggtagatgagaaagacatctatcttagagtgagtgccccaaaacagacctgacacaaggacttgggtttgcaggtttggggagggattttgtgactccaggaagcacaagtaaaggagtgcagggaaaggagaaaagccaacagagggtgtcttcataattggctagctgtgtggacagctgggctcctccctcccayggggggcccctgaggaaccccctggagcacacctcaggactgtcctcctggaggctggggaggctggggcctttgtccactgaatctcatcccccacatttcaggagttgtccccgggatgcatttagtgccctgcacttggatgttgtggtgccagagcaagcccaaaggcaaaggagaagagagaagggagcgtttgaagaaaatggccgtcagtgtacaagaaacatcccactgctgcaggacaactgaggatggtcaaagggacatggtggggtagcaccggcatctgctgcagtgtttcctccaacaggtgacttttcagtggacctaaggataagtaagagttttcagctgaagcaggcgtgggagtgtcatatccaggcagctggagtcacctg

SEQ ID NO: 361690 - DNA, 633 bp, Homo sapiens
atagacattggaacccttaactcccttgggcaggggtagatgagaaagacatctatcttagagtgagtgccccaaaacagacctgacacaaggacttgggtttgcaggtttggggagggattttgtgactccaggaagcacaagtaaaggagtgcagggaaaggagaaaagccaacagagggtgtcttcataattggctagctgtgtggacagctgggctcctccctcccatggggggcccctgaggaaccccctggagcacacctcaggactgtcctcctggaggctggggaggctggggcctttgtccactgaatctcatcccccacatttcaggagttgtccccgggatgcatttagtgccctgcacttggatgttgtggtgccagagcaagcccaaaggcaaaggagaagagagaagggagcgtttgaagaaaatggccgtcagtgtacaagaaacatcccactgctgcaggacaactgaggatggtcaaagggacayggtggggtagcaccggcatctgctgcagtgtttcctccaacaggtgacttttcagtggacctaaggataagtaagagttttcagctgaagcaggcgtgggagtgtcatatccaggcagctggagtcacctg

SEQ ID NO: 361691 - DNA, 560 bp, Homo sapiens
cctgggatgggggaagaagcacaagaggggaaaaggagtgtattcctcatggcctcgttgccccaatatcagaggaggcagatgactggcagcaaaggagagcccaggaagttggggtgaggcttgagaagggtagcggccgggaatcatccttgagggtgagggagaccataggaaagacacgggagggatgggtgatacggtactagctgaggctgttcagtttacagaagagcagaaaatgacatttctgggaaggttcctcttcccactccagagagagggcgaggtgggaggagagtttcartgcattttatttttcatgacaaagctttctgagctcctgagcttctgctagcccaggccacccctaccatttgtagattcgtcaggcactgattcatttagtagtgttttctgcagccctactgtgtgctgaaaactgctcaacacacagggaccagtcctcaacacatatggttatccctatagctgcttcaagctcaggggttgcacgaggagaatgtcggctaatgggacaggaccccgctagcttccca

SEQ ID NO: 361692 - DNA, 600 bp, Homo sapiens
ggtgagccagggagcagccatgcctctgatgctgggactccctcccacccagaagtgctcccttttcaggccctggccccccagcagcctttagagcccaccgactccagtgcacaggcctcacctggcactgtcctgagccctgttctgacatcttggaggagggcagtgcgttcggctccacaggctgagaaaatgcacccacatctccctgtgctaacgcctccctgattttcgttaaaaacaagcaggggagaggagggacgcttggatttgtaatgagccccaacacatcacctggttacagatctcacagcctatctgatctgctcaggcctggctgtaatgacctggtcccccccccacctatcatggcctatgacaaggtacgtgccttgggcaggaaagccagccctcgggctgtcccttttcagtggcggggccagggtgggcgtggggctcagccacagccagagggctctggttgccrtggaaacgggtggctggggaaggctggccctaagcagaggcccctcagccaggctccagtgtccggagcctggttgatctgagcctgggtagagcattggcccctgggtt

SEQ ID NO: 361693 - DNA, 627 bp, Homo sapiens
tcaatcttagctgtcgcttatgtgcctgctgggagatctagttcaggaaaaactgtgccaggggaggaaasagcttcttgctgagcccagggattgctcaaggacaggaggagatcctcatgttgacagtgatgcccacgggctcacaataatctctctcagttttgtaaaatgcattcttatctacttgaacatctcatggcactgggtgggaagcaggacccaggaggacagggcagcccagagaggttaagtggctcgcctgaggtcacacagccattacagggctaagccagggcttgaacacatctccacatgctcaatctccaatctccccagacagccctgtgcccctgactcaagtgtggccaggtgtggtggctgagctgatgttggacacttctggatgaccatacatggctacctgggtggaatcttcctttatatgacctcccaggaggggaggggaggggaagggcaggggagtggccattgcacgcagccgcaaggtagcattgtggccacacagactctggcttcacaactcagggccgtgggacctgggacctggggccagtgacctcacctgtaagtcagacattaacaagagtccctatctcacagcct

SEQ ID NO: 361694 - DNA, 595 bp, Homo sapiens
ttcaacattgaactagaagttctagccaagacaattaggcaagaaaaagaaataaaagaaatccagattggaaaaaaaaaagttaagttatctttagttagagctgacattatcttgtaaatagaaagtcctaagaaatccactaaatatttgctagaactaataaatgagttcagcaagattacaggatasaagattcatatataaaaatcaattatatttctacacacttgcaatgaacaatctaaaaataaaatttcaaaaacaattatgtttacaacagcatcaaaaattgtttacaacagtatcaaaaagagtaaaacatttaggaatacatttaacaaaagtgtaaaacccatactctgaaaattacaaaacatttttgaaggaaattaaaggagatataaattaatgaaaaaacattccatatatgtgtattagaaaactcaatattgttaagatggcgatactttcaaattgatctgttgattaactacaatctctgttagcatctcagctgacttctttgtaacaattaacaagctgatcctagaatacatgtggaattgcaagtggcccagagtagccaaaacaa

SEQ ID NO: 361695 - DNA, 595 bp, Homo sapiens
ttcaacattgaactagaagttctagccaagacaattaggcaagaaaaagaaataaaagaaatccagattggaaaaaaaaaagttaagttatctttagttagagctgacattatcttgtaaatagaaagtcctaagaaatccactaaatatttgctagaactaataaatgagttcagcaagattacaggatagaagattcatatataaaaatcaattatatttctacacacttgcaatgaacaatctaaaaataaaatttcaaaaacaattatgtttacaacagcatcaaaaattgtttacaacagtatcaaaaagagtaaaacatttaggaatacatttaacaaaagtgtaaaacccatactctgaaaattacaaaacatttttgaaggaaattaaaggagatataaattaatgaaaaaacattccatatatgtgtattagaaaactcaatattgttaagatggygatactttcaaattgatctgttgattaactacaatctctgttagcatctcagctgacttctttgtaacaattaacaagctgatcctagaatacatgtggaattgcaagtggcccagagtagccaaaacaa

SEQ ID NO: 361696 - DNA, 592 bp, Homo sapiens
aatggggaaaagaactgttttccaacaaatggtactatgacaactggatagccatctgcaaaggaatgaagttgaacttgtaccctaggctatatatgaaaaataattcaaaatggctcacgcataattaagagctaaacctatacaactcttagaagaatacatacaggtaaatccacatgacctcagatttggcaatgaattcttagatatgacacctaaagcatgagttattaaagcaaaataggtaaacaactyaataaaaattaaaaacatttgtacatcaagggatactgccaagaaacttaaaagacaagccaaagactggggcaatgtgtttgctaaatgtatatcttatgtgtttgctaaacatatatctatgacagatatatatatatattatatatatatatgacagatttgctaaacatatgtctaggacagattatataaaaactcttataactcaacaataaaaatacaaataattcaattaaaatgggcaaaggatttgaatatatatttatccaaagaagatatacaggccaggcacggtggctcacgcctgtaatcccagcactttgggaggccg

SEQ ID NO: 361697 - DNA, 592 bp, Homo sapiens
aatggggaaaagaactgttttccaacaaatggtactatgacaactggatagccatctgcaaaggaatgaagttgaacttgtaccctaggctatatatgaaaaataattcaaaatggctcacgcataattaagagctaaacctatacaactcttagaagaatacatacaggtaaatccacatgacctcagatttggcaatgaattcttagatatgacacctaaagcatgagttattaaagcaaaataggtaaacaactcaataaaaattaaaaacatttgtacatcaagggatactgccaagaaacttaaaagacaagccaaagactggggcaatgtgtttgctaaaygtatatcttatgtgtttgctaaacatatatctatgacagatatatatatatattatatatatatatgacagatttgctaaacatatgtctaggacagattatataaaaactcttataactcaacaataaaaatacaaataattcaattaaaatgggcaaaggatttgaatatatatttatccaaagaagatatacaggccaggcacggtggctcacgcctgtaatcccagcactttgggaggccg

SEQ ID NO: 361698 - DNA, 563 bp, Homo sapiens
cttcacactcatgtgtgtcccatgagctgggtggtgtggggagcagaatccgtgttatatgtgcagaaaaactgagacaagggaatgtggatgscctcattggtgctgtggcttgtttgtggcagggcttgctctagaaccgagggctctggctgtttggccttgaaatttgtgacataaactcataaccactttcattgcacactcagtccctgagtccaaatcttcaggaggcttaagaatcacctggccaagagtcgatatgtctattcaacatgctgatccctaggtcccagtgattctgattctgtatcagacagggccaaggaatctgtaattcaggtagacacctcccaccttaccactgcccttctcttcccaggtgactctgatgaaaggttgtgtgcagaccaaacatggagaaatgctgattttaggatattcctggcctgctctaagtactgtcccctcattttggcacaattttgcagaggatagaccatggcttcagcctgcctctattgccatccatatctcagcatctactaattcagtttaaagca

SEQ ID NO: 361699 - DNA, 563 bp, Homo sapiens
cttcacactcatgtgtgtcccatgagctgggtggtgtggggagcagaatccgtgttatatgtgcagaaaaactgagacaagggaatgtggatgccytcattggtgctgtggcttgtttgtggcagggcttgctctagaaccgagggctctggctgtttggccttgaaatttgtgacataaactcataaccactttcattgcacactcagtccctgagtccaaatcttcaggaggcttaagaatcacctggccaagagtcgatatgtctattcaacatgctgatccctaggtcccagtgattctgattctgtatcagacagggccaaggaatctgtaattcaggtagacacctcccaccttaccactgcccttctcttcccaggtgactctgatgaaaggttgtgtgcagaccaaacatggagaaatgctgattttaggatattcctggcctgctctaagtactgtcccctcattttggcacaattttgcagaggatagaccatggcttcagcctgcctctattgccatccatatctcagcatctactaattcagtttaaagca

SEQ ID NO: 361700 - DNA, 563 bp, Homo sapiens
cttcacactcatgtgtgtcccatgagctgggtggtgtggggagcagaatccgtgttatatgtgcagaaaaactgagacaagggaatgtggatgccctcattggtgctgtggcttgtttgtggcagggcttgctctagaaccgagggctctggctgtttggccttgaaatttgtgacataaactcataaccactttcattgcacactcagtccctgagtccaaatcttcaggaggcttaagaatcacctggccaagagtcgayatgtctattcaacatgctgatccctaggtcccagtgattctgattctgtatcagacagggccaaggaatctgtaattcaggtagacacctcccaccttaccactgcccttctcttcccaggtgactctgatgaaaggttgtgtgcagaccaaacatggagaaatgctgattttaggatattcctggcctgctctaagtactgtcccctcattttggcacaattttgcagaggatagaccatggcttcagcctgcctctattgccatccatatctcagcatctactaattcagtttaaagca

SEQ ID NO: 361701 - DNA, 632 bp, Homo sapiens
gaggcttaagaatcacctggccaagagtcgatatgtctattcaacatgctgatccctaggtcccagtgattctgattctgtatcagacagggccaaggaatctgtaattcaggtagacacctcccaccttaccactgcccttctcttcccaggtgactctgatgaaaggttgtgtgcagaccaaacatggagaaatgctgattttaggatattcctggcctgctctaagtactgtcccctcattttggcacarttttgcagaggatagaccatggcttcagcctgcctctattgccatccatatctcagcatctactaattcagtttaaagcattcagaatagtgcctggcacaaagtacacattttataatattagctctatttgtttttatttccttatttaatattagctctacttgtttaatttccttatttgtaattccttacagatatcctcaatgccatttcacaggtgaggaaatgtgggcacagagaggtaaggtaagttgtttaacgatgcacagcttgtcaatcacagagctggagctcaaactcttccatgagactccaatgccagtgttcctaactgctaggctgccctgtccccaaggcacacactctagatcctttc

SEQ ID NO: 361702 - DNA, 632 bp, Homo sapiens
gaggcttaagaatcacctggccaagagtcgatatgtctattcaacatgctgatccctaggtcccagtgattctgattctgtatcagacagggccaaggaatctgtaattcaggtagacacctcccaccttaccactgcccttctcttcccaggtgactctgatgaaaggttgtgtgcagaccaaacatggagaaatgctgattttaggatattcctggcctgctctaagtactgtcccctcattttggcacaattttgcagaggatagaccayggcttcagcctgcctctattgccatccatatctcagcatctactaattcagtttaaagcattcagaatagtgcctggcacaaagtacacattttataatattagctctatttgtttttatttccttatttaatattagctctacttgtttaatttccttatttgtaattccttacagatatcctcaatgccatttcacaggtgaggaaatgtgggcacagagaggtaaggtaagttgtttaacgatgcacagcttgtcaatcacagagctggagctcaaactcttccatgagactccaatgccagtgttcctaactgctaggctgccctgtccccaaggcacacactctagatcctttc

SEQ ID NO: 361703 - DNA, 553 bp, Homo sapiens
cttctaaccaacctgtgagtcacccactttctgatgccagggctctgacacctcaccaggcaataatgtttacaggtatctaagcactttcctgggcagaattaccagattctcaaagggatagggatctaatgatcctaggctaggctcatgctgcrgtaacaaacaaccttggaatctcagtaatttaacacctgcagtttactttcttctgtgataaactctactgtatgtcaggtgacactcagaggctgctgtcctgggtgacccagggatccaggctgctgtaatgttgtgtcttgcccaccttaatacaaagcctccatacttttccacaacagggaagagagagccaggaggcctgcagggacctttcccttccttggcccagaagtaatacatgtctctttctgacgggctggaagtggttcgtggcctgcctacctgcagggaaaactgggaagtgtagttttcatgcactcagaaaggagaggagaggagaccctgataggggagagcatgggtcttgtctgccacaagacttggatggccc

SEQ ID NO: 361704 - DNA, 553 bp, Homo sapiens
cttctaaccaacctgtgagtcacccactttctgatgccagggctctgacacctcaccaggcaataatgtttacaggtatctaagcactttcctgggcagaattaccagattctcaaagggatagggatctaatgatcctaggctaggctcatgctgcggtaacaaacaaccttggaatctcagtaatttaacacctgcagtttactttcttctgtgataaactctactgtatgtcaggtgacactcagaggctgctgtcctgggtgacccagggatccaggctgctgtaatgttgtgtcttgcccaccttaatacaaagcctccatacttttccacaacagggaagagagagccaggaggcctgcagggacctttcccttccttggcccagaagtaatacatgtctctttcygacgggctggaagtggttcgtggcctgcctacctgcagggaaaactgggaagtgtagttttcatgcactcagaaaggagaggagaggagaccctgataggggagagcatgggtcttgtctgccacaagacttggatggccc

SEQ ID NO: 361705 - DNA, 575 bp, Homo sapiens
ctgggtgtgcccttggatcagcaagtaatcaaatgccatgctaaggggatcggactccatctaaatgccagggggccctttagaagtcttgaagcagtgaaggagccatttagtctttgaaggaggtagggtcctaaaacatccaagatcttttccggcttgaaaatgctgtgagccagcaaagccagcaacaactaatgactttcactgggtgaaagttaatagacttgtttgaattgaggttgcacaaatagatttgaggtttcatgaaatcctgggaggaagctgggggcagatcacagagaccagagctggtgggggagatcagggccatagtaacctaggcttccttgtgtggtgtcacatagaaacacacagccaagcaccgggattagtcttcctaggaacagcctccccatccagctttcgtcacccascagatgtggctgcagagcccagacctcccactgcttctgctgggaatttacatacagacttcaggagcagcccccaagaccagtccctccaagaccagccccagtgaaatcaaaccttttccccttttattttagagc

SEQ ID NO: 361706 - DNA, 560 bp, Homo sapiens
gagggctatgtaaggtaatgccgtgaaatggcttggtgcttggcacatggaggccttctgtgagcggattagctggtgctgtggtgcagctataggaagcaactcaaactggcttaagcagaacacaagggacatctcctggaaccccaggatgacaaggcagccagcctcagaaggagacaggcccaggacacagcagacccggcttctcctttctccatctgcaggacagaagatagtggccttcaggtcctgagcatgaatgtctcctccatctgacagaacagcccagatagaaccagattctctcagtcccagatttctggcaaagggactccacttggtctgacttggatctsttttctgattgtctactctggctcacttgctcttctctagaagcacattaaaaaggcacaagcctggcctctgggaggcaccccagaaggtgctgaggactgtgaaggggtcaacatgagctggacagagcccctccaaagttccaggccctgtgccagctctgggccaccaagggaaacctggcctgcgccctgtccttg

SEQ ID NO: 361707 - DNA, 600 bp, Homo sapiens
atgaacccacactgcagttctaaaaggcaggtgctgtcatactctttatgttgtacatgagggaaatgaagcacagagaggctgagtcactgatctgagatcaccttatgagtgaggagcagaaatggagcttgaaccaagatgtgtttgactcaagcccatgcttgtgactccccacatcaccaggaggagggagcatgagggtaccaatgtgggacgggggtgaggcaggcacaggcagccccgtctctagggtccagccttttgcacttttgcacctctcttctcaatcctgcctggttcttctgtctgactctctcttccaggccaggccacatcctctcttggtctctggtctctgaaagtgaaagacagagacccccagtgatgatggcgctatcattatccccacccacgaatgaggaaactgaggcacagagagattaagtaacttgtccaacatcaggcaattgaytccaaaaatctgtaaacaagttcacagtttttctaaaacccctcctatctgggttcctaagaattggccacttttcagctccactgccctagaatccggctctcgatcttctgctgtgactgaag

SEQ ID NO: 361708 - DNA, 561 bp, Homo sapiens
cctctccctctccctggaacacccttctccctgcctgtccatcactcttacttatactgggtctattcaagacccagaccagacatcatgttctgcggactgccgccaccccacctccatgcatccctgcacccagcacatccttcatcacagcacttagtgggtggggcagaggggacacgattctgtcctcaagacctgcctgtccactgggttcactcgtcccttccttccaacaagattcataaaatgttacttctgtcctaagacctgcatttctagaaggatgaccaaccccatggtgatggtatcattacttccattttagaaaatcccccactcaggttttgtaattcctgagaccagaggccccactagaagggagtagtctgagaactctgaccctgctccaggctgccaaggtcaccttggagttaatgaaggagsatggaggacataagagcccccactttcttcatccatgtcaactccttcttcctgcagctttgagcgcaggaactgttcctcctttgtgtcaccgggctgggtgaggactgaacc

SEQ ID NO: 361709 - DNA, 561 bp, Homo sapiens
cctctccctctccctggaacacccttctccctgcctgtccatcactcttacttatactgggtctattcaagacccagaccagacatcatgttctgcggactgccgccaccccacctccatgcatccctgcacccagcacatccttcatcacagcacttagtgggtggggcagaggggacacgattctgtcctcaagacctgcctgtccactgggttcactcgtcccttccttccaacaagattcataaaatgttacttctgtcctaagacctgcatttctagaaggatgaccaaccccatggtgatggtatcattacttccattttagaaaatcccccactcaggttttgtaattcctgagaccagaggccccactagaagggagtagtctgagaactctgaccctgctccaggctgccaaggtcaccttggagttaatgaaggagcatggaggacataagagcscccactttcttcatccatgtcaactccttcttcctgcagctttgagcgcaggaactgttcctcctttgtgtcaccgggctgggtgaggactgaacc

SEQ ID NO: 361710 - DNA, 485 bp, Homo sapiens
cttaaaaactgtaaaacattgggtcacaatcttagaacccgaggacatggcaattctcagaatttccagatctttaactatcagcttgccagttgctcaacccacagccaagttccttccacactgtaccaacaagtagcctcctggcctcagagtttcctccggtgccccctccttcaggaagccttccctgatctctaactagatcarattccccattacaggtcccatggcttcatctgcattgccttgttagatcccctacaggttccaggttacatttattttcacgattgtgtcattgattttgtctcttcccatctcctggactgggagccccttgggcttgggtttggtttcctttgctcgtgctgcatccctagcacaggaactggcacgtagcaggtgctcaatcagtatttgtcaaatgagtagccaaagtaatgaatgatttcaatgaatgagtggatgactggctaccaaag

SEQ ID NO: 361711 - DNA, 636 bp, Homo sapiens
gtgctcaatcagtatttgtcaaatgagtagccaaagtaatgaatgatttcaatgaatsagtggatgactggctaccaaagcctatactcttcctacaaggctatagggaaacctccaattgccacatatctgccccaaaaggctgggttagtgtcagcagcaaccttgggtaactgggaccctactgagctcacatgggtgagggtgtgaggtcagtgattaaccctcccccaggcctatgctcatccacagagaaacttctggtatccggtgttgagagtggccgcgtggtcactgtggctaagagcgtaggccatggtgtgagaagcttgcattcaaacccagctcctccatctaacagtgaagtagcctcagacaagttacttgaccacccgtgcctcagtttccccagctataaaactgggattgtgcaagttcctatctctttttaaatgaactcattaagctcctggcacagcactgagtgcacagttgacactcggtgtgactctgcacatgcagccatgtgggaacacccagcagatttggaggtagaagctgcttcacacggggcccacatggcaggaccccagggagagagaagccatcctcagggagtcaaagagacagactcag

SEQ ID NO: 361712 - DNA, 636 bp, Homo sapiens
gtgctcaatcagtatttgtcaaatgagtagccaaagtaatgaatgatttcaatgaatgagtggatgactggctaccaaagcctatactcttcctacaaggctatagggaaacctccaattgccacatatctgccccaaaaggctgggttagtgtcagcagcaaccttgggtaactgggaccctactgagctcacatgggtgagggtgtgaggtcagtgattaaccctcccccaggcctatgctcatccacaragaaacttctggtatccggtgttgagagtggccgcgtggtcactgtggctaagagcgtaggccatggtgtgagaagcttgcattcaaacccagctcctccatctaacagtgaagtagcctcagacaagttacttgaccacccgtgcctcagtttccccagctataaaactgggattgtgcaagttcctatctctttttaaatgaactcattaagctcctggcacagcactgagtgcacagttgacactcggtgtgactctgcacatgcagccatgtgggaacacccagcagatttggaggtagaagctgcttcacacggggcccacatggcaggaccccagggagagagaagccatcctcagggagtcaaagagacagactcag

SEQ ID NO: 361713 - DNA, 608 bp, Homo sapiens
ttaaaatttagatctcgttgtttttctatttgtcctagctgttatttgtatacctttctcccttttcctgccttcttttggattgaatattayttatgattccatattgtcttctgtgttggcttgttaactataactctatgttttgcattttagtattggcttgagggtttatagtggacatcgttagcacagtctgcccgagatgttacactatttctcacagactttaagaaccttatagcagtggacttccacttctcccctcccaccttcctactattgttgtatgttttacttctacatgatttgtaaatattacactacatcattaattttgttcaacaggtcaatattctcatgtgtgtgcatgtgtatgaataaataacttgttcctctgtatagctgagcagtattctcttacatggatatatcaccatttgcattcaccttttgaaagacatcttggtagtttccagtttgtggaaattatgcatatagctgctataaatattcatgtacatattattgtgtgaacagaagtattcaatttacttaggtaaatatctataaggaggatttctggattacatgggaaatgtatgttt

SEQ ID NO: 361714 - DNA, 608 bp, Homo sapiens
ttaaaatttagatctcgttgtttttctatttgtcctagctgttatttgtatacctttctcccttttcctgccttcttttggattgaatattacttatgattccatattgtcttctgtgttggcttgttaactataactctatgttttgcattttagtattggcttgagggtttatagtggacatcgttagcacagtctgccygagatgttacactatttctcacagactttaagaaccttatagcagtggacttccacttctcccctcccaccttcctactattgttgtatgttttacttctacatgatttgtaaatattacactacatcattaattttgttcaacaggtcaatattctcatgtgtgtgcatgtgtatgaataaataacttgttcctctgtatagctgagcagtattctcttacatggatatatcaccatttgcattcaccttttgaaagacatcttggtagtttccagtttgtggaaattatgcatatagctgctataaatattcatgtacatattattgtgtgaacagaagtattcaatttacttaggtaaatatctataaggaggatttctggattacatgggaaatgtatgttt

SEQ ID NO: 361715 - DNA, 608 bp, Homo sapiens
ttaaaatttagatctcgttgtttttctatttgtcctagctgttatttgtatacctttctcccttttcctgccttcttttggattgaatattacttatgattccatattgtcttctgtgttggcttgttaactataactctatgttttgcattttagtattggcttgagggtttatagtggacatcgttagcacagtctgcccgagatgttacactatttctcacagactttaagaaccttatagcagtggacttccacttctcmcctcccaccttcctactattgttgtatgttttacttctacatgatttgtaaatattacactacatcattaattttgttcaacaggtcaatattctcatgtgtgtgcatgtgtatgaataaataacttgttcctctgtatagctgagcagtattctcttacatggatatatcaccatttgcattcaccttttgaaagacatcttggtagtttccagtttgtggaaattatgcatatagctgctataaatattcatgtacatattattgtgtgaacagaagtattcaatttacttaggtaaatatctataaggaggatttctggattacatgggaaatgtatgttt

SEQ ID NO: 361716 - DNA, 572 bp, Homo sapiens
ttggcttgttaactataactctatgttttgcattttagtattggcttgagggtttatagtggacatcgttagcacagtctgcccgagatgttacactatttctcacagactttaagaaccttatagcagtggacttccacttctcccctcccaccttcctactattgttgtatgttttacttctacatgatttgtaaatattacactacatcattaattttgttcaacaggtcaatattctcatgtgtgtgcatgtgtatgaataaataayttgttcctctgtatagctgagcagtattctcttacatggatatatcaccatttgcattcaccttttgaaagacatcttggtagtttccagtttgtggaaattatgcatatagctgctataaatattcatgtacatattattgtgtgaacagaagtattcaatttacttaggtaaatatctataaggaggatttctggattacatgggaaatgtatgtttaattttataagcaacttgaagaccctcttttgtatatagcctttacaggatttcaaatttatgtatatgctatgataacttt

SEQ ID NO: 361717 - DNA, 640 bp, Homo sapiens
tttagggtcactttatttcagtttaaaggaatccctttttacagtagatctgctgggaatagtgtctctcgattcttgtttatctgggaatgtcttaggttcctcttcatttttgaaggttagttttcctggacatagaattcttgattaaccttccttttcttctgttctttgtatatgtcatcccacgtcttctggcatccatmgttttttatgagaagttagctactgatcttattgaggatacctgtggcatgatgaatcatttttctcttgttttgaagtttctctctttgtctttcaacagtttgactatgctgtgtctgtgtgtgcagctctttgagtttatcctactttgaatttgttgggctttattggatgtgtaggttaatattttaaaatcagatttgagaagttttggccattatttatatagatatagatataagagaatacagctcagctatatagaggaacaagttatttactcacatacatgcacacacacaagaatactgacctgttgaacaaaattaatgatgtagtgtaatatttacaaatcatgtagaagtaaaacatacaacaatagtacaaaggtgggagaggagaggtggaagtccacttatctttcttttctctt

SEQ ID NO: 361718 - DNA, 299 bp, Homo sapiens
aagagacttgctttgtttcagatgagactatggacttgacttttgcgataatgatggaatgagttaaggctttgggggactgttagaaaggcatgattgtgttttgaaatgtgagaagaacatgagatttgggagaggccaggtccagaatgacatggtttggctctacgtttccacccaaatcttatgttgaattgtaattccaaatrttgagggaagaacctagtaggaggtgattgaataatgggggcagatttctcttatgctattcttgtgatagtgagtgagttctcacgaga

SEQ ID NO: 361719 - DNA, 586 bp, Homo sapiens
ttatataaagacaagatgaacacaaaaaaagtcacattagcagtttaaatgatcaagttaaataagatacaatttaggtgaaaagataattgtgttgaaaatacaatgatccatttgacagtggaagaataaaagacacagagaatttcaaatacaacctccctatctagaagtctcatttagtatttcttacaagagaacatatgtatttggtagtactgttagtttatgactcatcctattatttaattaaggagcattaatattatctatatatgaaatcagagataaggatcttttataaaaattatgcattatagaaacatcagtgaaaataaaaataagagtgtcttgtctctgctttgattttgtgcaagaatttattggtattaacacaatctgagaccatcctgataatcccttctacaaaagcattaaaatttttactccatcttgacaggaaagtaacaaaaaatgaaataatgcaataaataactcaaaaataaggtwaataacacatctttaataaaaaggcaatcaaataaaaatatcataacctgtatgatatccaaatcagaagatctgg

SEQ ID NO: 361720 - DNA, 493 bp, Homo sapiens
tcattttgtgtgtgtgtgtgagacagggtcttgctctgtcacccagtttggagtgcagtggcatgatctcaacttgctgccgcytccaactcctgggctcaagccgtcctccccccttagcctctgaagtagctggcaccacaagctcaagccaccactcctagttaatttttgtattttttgtgaagatgcagttttgctatgttgcccaggctggtatcaaactcctggcctcaagcaatccacccaccttggcctcccagggtgctgggattactggcgtgaaccactgtgcccagccatcactgcctcgtttttaaaacaaaagcaacactgcacaactgtcgagttgatgtgatgattaactaacagggcatccttgtaaggtaggtattactattattcctggtccacacatgaggagattgaggttcaatgctattttctggctgtcagtgttcatacaagaagggaagaacaaaactaggacttg
